United States Patent Application Publication US 2011/0245090 A1 - sequence listing, part 2

SEQ ID NO: 1744 - protein, 824 aa, Homo sapien
MSLLGDPLQALPPSAAPTGPLLAPPAGATLNRLREPLLRRLSELLDQAPEGRGWRRLAELAGSRGRLRLSCLDLEQCSLKVLEPEGSPSLCLLKLMGEKGCTVTELSDFLQAMEHTEVLQLLSPPGIKITVNPESKAVLAGQFVKLCCRATGHPFVQYQWFKMNKEIPNGNTSELIFNAVHVKDAGFYVCRVNNNFTFEFSQWSQLDVCDIPESFQRSVDGVSESKLQICVEPTSQKLMPGSTLVLQCVAVGSPIPHYQWFKNELPLTHETKKLYMVPYVDLEHQGTYWCHVYNDRDSQDSKKVEIIIGRTDEAVECTEDELNNLGHPDNKEQTTDQPLAKDKVALLIGNMNYREHPKLKAPLVDVYELTNLLRQLDFKVVSLLDLTEYEMRNAVDEFLLLLDKGVYGLLYYAGHGYENFGNSFMVPVDAPNPYRSENCLCVQNILKLMQEKETGLNVFLLDMCRKRNDYDDTIPILDALKVTANIVFGYATCQGAEAFEIQHSGLANGIFMKFLKDRLLEDKKITVLLDEVAEDMGKCHLTKGKQALEIRSSLSEKRALTDPIQGTEYSAESLVRNLQWAKAHELPESMCLKFDCGVQIQLGFAAEFSNVMIIYTSIVYKPPEIIMCDAYVTDFPLDLDIDPKDANKGTPEETGSYLVSKDLPKHCLYTRLSSLQKLKEHLVFTVCLSYQYSGLEDTVEDKQEVNVGKPLIAKLDMHRGLGRKTCFQTCLMSNGPYQSSAATSGGAGHYHSLQDPFHGVYHSHPGNPSNVTPADSCHCSRTPDAFISSFAHHASCHFSRSNVPVETTDEIPFSFSDRLRISEK

SEQ ID NO: 1745 - DNA, 9618 bp, Homo sapien
gcggccgctcccccggagcggctaaagcggcggcgaccgaggcgagcaatgggcacggcagtctcggcagagcacaggcgcttcaccgcggctgctcgggctccgcgctgacctgcccgggcggccgcctattgtctttctccgcggcgaaggtgaagagttgtcccagctcggcccgcgggggagccccgggagccgcacgtgtcctgggtcatgaaacttaatccacagcaagctcccttatatggtgattgtgttgttacagtgctgcttgctgaagaggacaaagctgaagatgatgtagtgttttacttggtatttttgggttccaccctccgtcactgtacaagtactcggaaggtcagttctgatacattggagaccattgctcctggtcatgattgttgtgaaacagtgaaggtgcagctctgtgcttccaaagagggccttcccgtgtttgtggtggctgaagaagactttcatttcgtccaggatgaagcgtatgatgcagctcaattcctagcaaccagtgctggaaatcagcaggctttgaactttacccgttttcttgaccagtcaggacccccatctggggatgtgaattcccttgataagaagttggtgctggcattcaggcacctgaagctgcccacggagtggaatgtattggggacagatcagagtttgcatgatgctggcccgcgagagacattgatgcattttgctgtgcggctgggactgctgaggttgacgtggttcctgttgcagaagccaggtggccgcggagctctcagtatccacaaccaggaaggggcgacgcctgtgagcttggccttggagcgaggctatcacaagctgcaccagcttctaaccgaggagaatgctggagaaccagactcctggagcagtttatcctatgaaataccgtatggagactgttctgtgaggcatcatcgagagttggacatctatacattaacctctgagtctgattcacatcatgaacacccatttcctggagacggttgcactggaccaatttttaaacttatgaacatccaacagcaactaatgaaaacaaacctcaagcagatggacagtcttatgcccttaatgatgacagcacaggatccttccagtgccccagagacagatggccagtttcttccctgtgcaccggagcccacggaccctcagcgactttcttcttctgaagagactgagagcactcagtgctgcccagggagccctgttgcacagactgaaagtccctgtgatttgtcaagcatagttgaggaggagaatacagaccgttcctgtaggaagaaaaataaaggcgtggaaagaaaaggggaagaggtggagccagcacctattgtggactctggaactgtatctgatcaagacagctgccttcagagcttgcctgattgtggagtaaagggcacggaaggcctttcgtcctgtggaaacagaaatgaagaaactggaacaaaatcttctggaatgcccacagaccaggagtccctgagcagtggagatgctgtgcttcagagagacttggtcatggagccaggcacagcccagtattcctctggaggtgaactgggaggcatttcaacaacaaatgtcagtaccccagacactgcaggggaaatggaacatgggctcatgaacccagatgccactgtttggaagaatgtgcttcagggaggggaaagtacaaaggaaagatttgagaactctaatattggcacagctggagcctctgacgtgcacgtcacaagtaagcctgtggataaaatcagtgttccaaactgtgcccctgctgccagttccctggatggtaacaaacctgctgagtcttcacttgcatttagtaatgaagaaacctccactgaaaaaacagcagaaacggaaacttcacgaagtcgtgaggagagtgctgatgctccagtagatcagaattctgtggtgattccagctgctgcaaaagacaagatttcagatggattagaaccttatactctcttagcagcaggcataggtgaggcaatgtcaccctcagatttagcccttcttgggctggaagaagatgtaatgccacaccagaactcagaaacaaattcatctcatgctcaaagccaaaagggcaaatcctcacccatttgttctacaactggagacgataaactttgtgcagactctgcatgtcaacagaacacagtgacttctagtggcgatttggttgcaaaactgtgtgataacatagttagcgagtccgaaagcaccacagcaaggcaacccagctcacaagatccacccgatgcctcccactgtgaagacccacaggctcatacagtcacctctgaccctgtaagggatacccaggaacgtgcggatttttgtcctttcaaagtggtggataacaaaggccaacgaaaagatgtgaaactagataaacctttaacaaatatgcttgaggtggtttcacatccacatccagttgtccctaaaatggagaaagaactggtgccagaccaggcagtaatatcagacagtactttctctctggcaaacagtccaggcagtgaatcagtaaccaaggatgacgcactttcttttgtcccctcccagaaagaaaagggaacagcaactcctgaactacatacagctacagattatagagatggcccagatggaaattcgaatgagcctgatacgcggccactagaagacagggcagtaggcctgtccacatcctccactgctgcagagcttcagcacgggatggggaataccagtctcacaggacttggtggagagcatgaaggtcccgcccctccagcaatcccagaagctctgaatatcaaggggaacactgactcttccctgcaaagtgtgggtaaggccactttggctttagattcagttttgactgaagaaggaaaacttctggtggtttcagaaagctctgcagctcaggaacaagataaggataaagcggtgacctgttcctctattaaggaaaatgctctctcttcaggaactttgcaggaagagcagagaacaccacctcctggacaagatactcaacaatttcatgaaaaatcaatctcagctgactgtgccaaggacaaagcacttcagctaagtaattcaccgggtgcatcctctgcctttcttaaggcagaaactgaacataacaaggaagtggccccacaagtctcactgctgactcaaggtggggctgcccagagcctggtgccaccaggagcaagtctggccacagagtcaaggcaggaagccttgggggcagagcacaacagctctgctctgttgccatgtctgttgccagatgggtctgatgggtccgatgctcttaactgcagtcagccttctcctctggatgttggagtgaagaacactcaatcccagggaaaaactagtgcctgtgaggtgagtggagatgtgacggtggatgttacaggggttaatgctctacaaggtatggctgagcccagaagagagaatatatcacacaacacccaagacatcctgattccaaacgtcttgttgagccaagagaagaatgccgttctaggtttgccagtggctctacaggacaaagctgtgactgacccacagggagttggaaccccagagatgatacctcttgattgggagaaagggaagctggagggagcagaccacagctgtaccatgggtgacgctgaggaagcccaaatagacgatgaagcacatcctgtcctactgcagcctgttgccaaggagctccccacagacatggagctctcagcccatgatgatggggccccagctggtgtgagggaagtcatgcgagccccgccttcaggcagggaaaggagcactccctctctaccttgcatggtctctgcccaggacgcacctctgcctaagggggcagacttgatagaggaggctgccagccgtatagtggatgctgtcatcgaacaagtcaaggccgctggagcactgcttactgagggggaggcctgtcacatgtcactgtccagccctgagttgggtcctctcactaaaggactagagagtgcttttacagaaaaagtgagtactttcccacctggggagagcctaccaatgggcagtactcctgaggaagccacggggagccttgcaggatgttttgctggaagggaggagccagagaagatcattttacctgtccaggggcctgagccagcagcagaaatgccagacgtgaaagctgaagatgaagtggattttagagcaagttcaatttctgaagaagtggctgtagggagcatagctgctacactgaagatgaagcaaggcccaatgacccaggcgataaaccgagaaaactggtgtacaatagagccatgccctgatgcagcatctcttctggcttccaagcagagcccagaatgtgagaacttcctggatgttggactgggcagagagtgtacctcaaaacaaggtgtacttaaaagagaatctgggagtgattctgacctctttcactcacccagtgatgacatggacagcatcatcttcccaaagccagaggaagagcatttggcctgtgatatcaccggatccagttcatccaccgatgacacggcttcactggaccgacattcttctcatggcagtgatgtgtctctctcccagattttaaagccaaacaggtcaagagatcggcaaagccttgatggattctacagccatgggatgggagctgagggtcgagaaagtgagagtgagcctgctgacccaggcgacgtggaggaggaggagatggacagtatcactgaagtgcctgcaaactgctctgtcctaaggagctccatgcgctctctttctcccttccggaggcacagctgggggcctgggaaaaatgcagccagcgatgcagaaatgaaccaccggagtatgagctggtgcccctctggtgtgcagtactctgctggcctgagtgctgactttaattacagaagtttcagtctagaaggcttgacaggaggagctggtgtcggaaacaagccatcctcatctctagaagtaagctctgcaaatgccgaagagctcagacacccattcagtggtgaggaacgggttgactctttggtgtcactttcagaagaggatctggagtcagaccagagagaacataggatgtttgatcagcagatatgtcacagatctaagcagcagggatttaattactgtacatcagccatttcctctccattgacaaaatccatctcattaatgacaatcagccatcctggattggacaattcacggcccttccacagtaccttccacaataccagtgctaatctgactgagagtataacagaagagaactataatttcctgccacatagcccctccaagaaagattctgaatggaagagtggaacaaaagtcagtcgtacattcagctacatcaagaataaaatgtctagcagcaagaagagcaaagaaaaggaaaaagaaaaagataagattaaggagaaggagaaagattctaaagacaaggagaaagataagaagactgtcaacgggcacactttcagttccattcctgttgtgggtcccatcagctgtagccagtgtatgaagcccttcaccaacaaagatgcctatacttgtgcaaattgcagtgcttttgtccacaaaggctgccgagaaagtctagcctcctgtgcaaaggtcaaaatgaagcagcccaaagggagccttcaggcacatgacacatcatcactgcccacggtcattatgagaaacaagccctcacagcccaaggagcgtcctcggtccgcagtcctcctggtggatgaaaccgctaccaccccaatatttgccaatagacgatcccagcagagtgtctcgctctccaaaagtgtctccatacagaacattactggagttggcaatgatgagaacatgtcaaacacctggaaattcctgtctcattcaacagactcactaaataaaatcagcaaggtcaatgagtcaacagaatcacttactgatgagggagtaggtacagacatgaatgaaggacaactactgggagactttgagattgagtccaaacagctggaagcagagtcttggagtcggataatagacagcaagtttctaaaacagcaaaagaaagatgtggtcaaacggcaagaagtaatatatgagttgatgcagacagagtttcatcatgtccgcactctcaagatcatgagtggtgtgtacagccaggggatgatggcggatctgctttttgagcagcagatggtagaaaagctgttcccctgtttggatgagctgatcagtatccatagccaattcttccagaggattctggagcggaagaaggagtctctggtggataaaagtgaaaagaactttctcatcaagaggataggggatgtgcttgtaaatcagttttcaggtgagaatgcagaacgtttaaagaagacatatggcaagttttgtgggcaacataaccagtctgtaaactacttcaaagacctttatgccaaggataagcgttttcaagcctttgtaaagaagaagatgagcagttcagttgttagaaggcttggaattccagagtgcatattgcttgtaactcagcggattaccaagtacccagttttattccaaagaatattgcagtgtaccaaagacaatgaagtggagcaggaagatctagcacagtccttgagcctggtgaaggatgtgattggagctgtagacagcaaagtggcaagttatgaaaagaaagtgcgtctcaatgagatttatacaaagacagatagcaagtcaatcatgaggatgaagagtggtcagatgtttgccaaggaagatttgaaacggaagaagcttgtacgtgatgggagtgtgtttctgaagaatgcagcaggaaggttgaaagaggttcaagcagttcttctcactgacattttagttttccttcaagaaaaagaccagaagtacatctttgcatcattggaccagaagtcaacagtgatctctttaaagaagctgattgtgagagaagtggcacatgaggagaaaggtttattcctgatcagcatggggatgacagatccagagatggtagaagtccatgccagctccaaagaggaacgaaacagctggattcagatcattcaggacacaatcaacaccctgaacagagatgaagatgaaggaattcctagtgagaatgaggaagaaaagaaaatgttggacaccagagcccgagaattaaaagaacaacttcaccagaaggaccaaaaaatcctactcttgttggaagagaaggagatgattttccgggacatggctgagtgcagcacccctctcccagaggattgctccccaacacatagccctagagttctcttccgctccaacacagaagaggctctcaaaggaggacctttaatgaaaagtgcaataaatgaggtggagatccttcagggtttggtgagtggaaatctgggaggcacacttgggccgactgtcagcagccccattgagcaagatgtggtcagtcccgtttccctgccccggagagcagagacctttggaggatttgacagccatcagatgaatgcttcaaaaggaggcgagaaggaagagggagatgatggccaagatcttaggagaacggaatcagatagtggcctaaaaaagggtggaaatgctaacctggtatttatgcttaaaagaaacagtgagcaggttgtccagagcgttgttcatctctacgagctcctcagcgctctgcagggtgtggtgctgcagcaggacagctacattgaggaccagaaactggtgctgagcgagagggcgctcactcgcagcttgtcccgcccgagctccctcattgagcaggagaagcagcgcagcctggagaagcagcgccaggacctggccaacctgcagaagcagcaggcccagtacctcgaggagaagcgcaggcgcgagcgtgagtgggaagctcgtgagagggagctgcgggagcgggaggccctcctggcccagcgcgaggaggaggtgcagcaggggcagcaggacctggaaaaggagcgggaggagctccagcagaagaagggcacataccagtatgacctggagcgactgcgtgctgcccagaaacagcttgagagggaacaggagcagctgcgccgggaggcagagcggctcagccagcggcagacagaacgggacctgtgtcaggtttcccatccacataccaagctgatgaggatcccatcgttcttccccagtcctgaggagcccccctcgccatctgcaccttccatagccaaatcagggtcattggactcagaactttcagtgtccccaaaaaggaacagcatctctcggacacacaaagataaggggccttttcacatactgagttcaaccagccagacaaacaaaggaccagaagggcagagccaggcccctgcgtccacctctgcctctacccgcctgtttgggttaacaaagccaaaggaaaagaaggagaaaaaaaagaagaacaaaaccagccgctctcagcccggtgatggtcccgcgtcagaagtatcagcagagggtgaagagatcttctgctgaccctcttcctctctgctgaggcagctgcctcctgatcctggccagcccacctctcctgctgtccccgcgtgcacaagtctcttacactggacgcccactgctcctcagcgtccagtcctcctgggcggccccaggtcctggacaataagcaacagatgatattgagtgtcgggtggggaaggaggcccagactctgcttcggccatgatttgtgactgcccaggactctcaggttgggctggccctactcaggattacactgaaagtaatggcctcgtaagtacaggtgatggttttggacacgtcaggaattcctaaaggctgaaagagtgtatccaagtaaggtctgaacctccgactgccttttatttgggggaacacaaaaccaaacagcagatgttttggacttgatctgtgtacgtacatggggacctgtctgcatatacacacggggaatgccagaagaaggcccagtctgcaccaggcgtctggtcaacttagcacaagggcagtgcctggacggacccggagcccccgcatatcagcagttcacccagtactcctcagagactggtttccctctaaacccatcccgggcacataccacccctgttttgcatgtatttctcatttcattttagggatgacaaacatttgtgaaaccagtgagagaaggcttgatgtgtataaaagacgtgatgtgcaccacctcgatctcggtgtttcaggcactaaagcaacaaaacaacccatagtatctcattttgtcatcagatccagaagaaatatcctggttttccagcatgtttacccacatgttttgggcatggataaagtgaagaggcctactcaccattatccctgcagcgtgacaccttttgattgtcactgaccactcagaaggggccacggcctcctggctgtgttcctgagaaaaaaaaaaaaaaaaaa

SEQ ID NO: 1746 - protein, 2000 aa, Homo sapien
MKLNPQQAPLYGDCVVTVLLAEEDKAEDDVVFYLVFLGSTLRHCTSTRKVSSDTLETIAPGHDCCETVKVQLCASKEGLPVFVVAEEDFHFVQDEAYDAAQFLATSAGNQQALNFTRFLDQSGPPSGDVNSLDKKLVLAFRHLKLPTEWNVLGTDQSLHDAGPRETLMHFAVRLGLLRLTWFLLQKPGGRGALSIHNQEGATPVSLALERGYHKLHQLLTEENAGEPDSWSSLSYEIPYGDCSVRHHRELDIYTLTSESDSHHEHPFPGDGCTGPIFKLMNIQQQLMKTNLKQMDSLMPLMMTAQDPSSAPETDGQFLPCAPEPTDPQRLSSSEETESTQCCPGSPVAQTESPCDLSSIVEEENTDRSCRKKNKGVERKGEEVEPAPIVDSGTVSDQDSCLQSLPDCGVKGTEGLSSCGNRNEETGTKSSGMPTDQESLSSGDAVLQRDLVMEPGTAQYSSGGELGGISTTNVSTPDTAGEMEHGLMNPDATVWKNVLQGGESTKERFENSNIGTAGASDVHVTSKPVDKISVPNCAPAASSLDGNKPAESSLAFSNEETSTEKTAETETSRSREESADAPVDQNSVVIPAAAKDKISDGLEPYTLLAAGIGEAMSPSDLALLGLEEDVMPHQNSETNSSHAQSQKGKSSPICSTTGDDKLCADSACQQNTVTSSGDLVAKLCDNIVSESESTTARQPSSQDPPDASHCEDPQAHTVTSDPVRDTQERADFCPFKVVDNKGQRKDVKLDKPLTNMLEVVSHPHPVVPKMEKELVPDQAVISDSTFSLANSPGSESVTKDDALSFVPSQKEKGTATPELHTATDYRDGPDGNSNEPDTRPLEDRAVGLSTSSTAAELQHGMGNTSLTGLGGEHEGPAPPAIPEALNIKGNTDSSLQSVGKATLALDSVLTEEGKLLVVSESSAAQEQDKDKAVTCSSIKENALSSGTLQEEQRTPPPGQDTQQFHEKSISADCAKDKALQLSNSPGASSAFLKAETEHNKEVAPQVSLLTQGGAAQSLVPPGASLATESRQEALGAEHNSSALLPCLLPDGSDGSDALNCSQPSPLDVGVKNTQSQGKTSACEVSGDVTVDVTGVNALQGMAEPRRENISHNTQDILIPNVLLSQEKNAVLGLPVALQDKAVTDPQGVGTPEMIPLDWEKGKLEGADHSCTMGDAEEAQIDDEAHPVLLQPVAKELPTDMELSAHDDGAPAGVREVMRAPPSGRERSTPSLPCMVSAQDAPLPKGADLIEEAASRIVDAVIEQVKAAGALLTEGEACHMSLSSPELGPLTKGLESAFTEKVSTFPPGESLPMGSTPEEATGSLAGCFAGREEPEKIILPVQGPEPAAEMPDVKAEDEVDFRASSISEEVAVGSIAATLKMKQGPMTQAINRENWCTIEPCPDAASLLASKQSPECENFLDVGLGRECTSKQGVLKRESGSDSDLFHSPSDDMDSIIFPKPEEEHLACDITGSSSSTDDTASLDRHSSHGSDVSLSQILKPNRSRDRQSLDGFYSHGMGAEGRESESEPADPGDVEEEEMDSITEVPANCSVLRSSMRSLSPFRRHSWGPGKNAASDAEMNHRSMSWCPSGVQYSAGLSADFNYRSFSLEGLTGGAGVGNKPSSSLEVSSANAEELRHPFSGEERVDSLVSLSEEDLESDQREHRMFDQQICHRSKQQGFNYCTSAISSPLTKSISLMTISHPGLDNSRPFHSTFHNTSANLTESITEENYNFLPHSPSKKDSEWKSGTKVSRTFSYIKNKMSSSKKSKEKEKEKDKIKEKEKDSKDKEKDKKTVNGHTFSSIPVVGPISCSQCMKPFTNKDAYTCANCSAFVHKGCRESLASCAKVKMKQPKGSLQAHDTSSLPTVIMRNKPSQPKERPRSAVLLVDETATTPIFANRRSQQSVSLSKSVSIQNITGVGNDENMSNTWKFLSHSTDSLNKISKVNESTESLTDEGVGTDMNEGQLLGDFEIESKQLEAESWSRIIDSKFLKQQKKDVVKRQ

SEQ ID NO: 1747 - DNA, 3113 bp, Homo sapien
aaaaagtacagagtccagggaaaagacttgcttgtaactttatgaattctggatttttttttttcctttgctttttcttaactttcactaagggttactgtagtctgatgtgtccttcccaaggccacgaaatttgacaagctgcacttttcttttgctcaatgatttctgctttaagccaaagaactgcctataatttcactaagaatgtcttctaattcagatactggggatttacaagagtctttaaagcacggacttacacctattgtgtctcaatttaaaatggtgaattactcctatgatgaagatctggaagagctttgtcccgtgtgtggagataaagtgtctgggtaccattatgggctcctcacctgtgaaagctgcaagggattttttaagcgaacagtccaaaataataaaaggtacacatgtatagaaaaccagaactgccaaattgacaaaacacagagaaagcgttgtccttactgtcgttttcaaaaatgtctaagtgttggaatgaagctagaagctgtaagggccgaccgaatgcgtggaggaaggaataagtttgggccaatgtacaagagagacagggccctgaagcaacagaaaaaagccctcatccgagccaatggacttaagctagaagccatgtctcaggtgatccaagctatgccctctgacctgaccatttcctctgcaattcaaaacatccactctgcctccaaaggcctacctctgaaccatgctgccttgcctcctacagactatgacagaagtccctttgtaacatcccccattagcatgacaatgccccctcacggcagcctgcaaggttaccaaacatatggccactttcctagccgggccatcaagtctgagtacccagacccctataccagctcacccgagtccataatgggctattcatatatggatagttaccagacgagctctccagcaagcatcccacatctgatactggaacttttgaagtgtgagccagatgagcctcaagtccaggctaaaatcatggcctatttgcagcaagagcaggctaaccgaagcaagcacgaaaagctgagcacctttgggcttatgtgcaaaatggcagatcaaactctcttctccattgtcgagtgggccaggagtagtatcttcttcagagaacttaaggttgatgaccaaatgaagctgcttcagaactgctggagtgagctcttaatcctcgaccacatttaccgacaagtggtacatggaaaggaaggatccatcttcctggttactgggcaacaagtggactattccataatagcatcacaagccggagccaccctcaacaacctcatgagtcatgcacaggagttagtggcaaaacttcgttctctccagtttgatcaacgagagttcgtatgtctgaaattcttggtgctctttagtttagatgtcaaaaaccttgaaaacttccagctggtagaaggtgtccaggaacaagtcaatgccgccctgctggactacacaatgtgtaactacccgcagcagacagagaaatttggacagctacttcttcgactacccgaaatccgggccatcagtatgcaggctgaagaatacctctactacaagcacctgaacggggatgtgccctataataaccttctcattgaaatgttgcatgccaaaagagcataagttacaacccctaggagctctgctttcaaaacaaaaagagattgggggagtggggagggggaagaagaacaggaagaaaaaaagtactctgaactgctccaagcaacgctaattaaaaacttgctttaaagatattgaatttaaaaaggcataataatcaaatacttaatagcaaataaatgatgtatcagggtatttgtattgcaaactgtgaatcaaaggcttcacagccccagaggattccatataaaagacattgtaatggagtggattgaactcacagatggataccaacacggtcagaagaaaaacggacagaacggttcttgtatatttaaactgatctccactatgaagaaatttaggaactaatcttattaattaggcttatacagcgggggatttgagcttacaggattcctccatggtaaagctgaactgaaacaattctcaagaatgcatcagctgtacctacaatagcccctccctcttcctttgaaggcccgagcacctctgccctgtggtcaccgaatctgtactaaggacctgtgttcagccacacccagtggtagctccaccaaatcatgaacagcctaattttgagtgtctgtgtcttagacctgcaaacagctaataggaaattctattaatatgttagcttgccattttaaatatgttctgagggttgttttgtctcgtgttcatgatgttaagaaaatgcaggcagtatccctcatcttatgtaagtgtgaattaatattaagggaaatgactacaaactttcaaagcaaatgctccatagctaaagcaacttagaccttatttctgctactgttgctgaaatgtggctttggcattgttggatttcataaaaaatttctggcaggaagtcttgttagtatacatcagtctttttcatcatccaagtttgtagttcatttaaaaatacaacattaaacacattttgctaggatgtcaaatagtcacagttctaagtagttggaaacaaaattgacgcatgttaatctatgcaaagagaaaggaaaggatgaggtgatgtattgactcaaggttcattcttgctgcaattgaacatcctcaagagttgggatggaaatggtgatttttacatgtgtcctggaaagatattaaagtaattcaaatcttccccaaaggggaaaggaagagagtgatactgacctttttaagtcatagaccaaagtctgctgtagaacaaatatgggaggacaaagaatcgcaaattcttcaaatgactattatcagtattattaacatgcgatgccacaggtatgaaagtcttgccttatttcacaattttaaaaggtagctgtgcagatgtggatcaacatttgtttaaaataaagtattaatactttaaagtcaaaaaaaaaaaaaaa

SEQ ID NO: 1748 - protein, 495 aa, Homo sapien
MSSNSDTGDLQESLKHGLTPIVSQFKMVNYSYDEDLEELCPVCGDKVSGYHYGLLTCESCKGFFKRTVQNNKRYTCIENQNCQIDKTQRKRCPYCRFQKCLSVGMKLEAVRADRMRGGRNKFGPMYKRDRALKQQKKALIRANGLKLEAMSQVIQAMPSDLTISSAIQNIHSASKGLPLNHAALPPTDYDRSPFVTSPISMTMPPHGSLQGYQTYGHFPSRAIKSEYPDPYTSSPESIMGYSYMDSYQTSSPASIPHLILELLKCEPDEPQVQAKIMAYLQQEQANRSKHEKLSTFGLMCKMADQTLFSIVEWARSSIFFRELKVDDQMKLLQNCWSELLILDHIYRQVVHGKEGSIFLVTGQQVDYSIIASQAGATLNNLMSHAQELVAKLRSLQFDQREFVCLKFLVLFSLDVKNLENFQLVEGVQEQVNAALLDYTMCNYPQQTEKFGQLLLRLPEIRAISMQAEEYLYYKHLNGDVPYNNLLIEMLHAKRA

SEQ ID NO: 1749 - DNA, 3113 bp, Homo sapien; identical to SEQ ID NO: 1747

SEQ ID NO: 1750 - protein, 495 aa, Homo sapien; identical to SEQ ID NO: 1748

SEQ ID NO: 1751 - DNA, 2934 bp, Homo sapien
gcccctccctccgcccgcccgccggcccgcccgtcagtctggcaggcaggcaggcaatcggtccgagtggctgtcggctcttcagctctcccgctcggcgtcttccttcctcctcccggtcagcgtcggcggctgcaccggcggcggcgcagtccctgcgggaggggcgacaagagctgagcggcggccgccgagcgtcgagctcagcgcggcggaggcggcggcggcccggcagccaacatggcggcggcggcggcggcgggcgcgggcccggagatggtccgcgggcaggtgttcgacgtggggccgcgctacaccaacctctcgtacatcggcgagggcgcctacggcatggtgtgctctgcttatgataatgtcaacaaagttcgagtagctatcaagaaaatcagcccctttgagcaccagacctactgccagagaaccctgagggagataaaaatcttactgcgcttcagacatgagaacatcattggaatcaatgacattattcgagcaccaaccatcgagcaaatgaaagatgtatatatagtacaggacctcatggaaacagatctttacaagctcttgaagacacaacacctcagcaatgaccatatctgctattttctctaccagatcctcagagggttaaaatatatccattcagctaacgttctgcaccgtgacctcaagccttccaacctgctgctcaacaccacctgtgatctcaagatctgtgactttggcctggcccgtgttgcagatccagaccatgatcacacagggttcctgacagaatatgtggccacacgttggtacagggctccagaaattatgttgaattccaagggctacaccaagtccattgatatttggtctgtaggctgcattctggcagaaatgctttctaacaggcccatctttccagggaagcattatcttgaccagctgaaacacattttgggtattcttggatccccatcacaagaagacctgaattgtataataaatttaaaagctaggaactatttgctttctcttccacacaaaaataaggtgccatggaacaggctgttcccaaatgctgactccaaagctctggacttattggacaaaatgttgacattcaacccacacaagaggattgaagtagaacaggctctggcccacccatatctggagcagtattacgacccgagtgacgagcccatcgccgaagcaccattcaagttcgacatggaattggatgacttgcctaaggaaaagctcaaagaactaatttttgaagagactgctagattccagccaggatacagatcttaaatttgtcaggacaagggctcagaggactggacgtgctcagacatcggtgttcttcttcccagttcttgacccctggtcctgtctccagcccgtcttggcttatccactttgactcctttgagccgtttggaggggcggtttctggtagttgtggcttttatgctttcaaagaatttcttcagtccagagaattcctcctggcagccctgtgtgtgtcacccattggtgacctgcggcagtatgtacttcagtgcaccttactgcttactgttgctttagtcactaattgctttctggtttgaaagatgcagtggttcctccctctcctgaatccttttctacatgatgccctgctgaccatgcagccgcaccagagagagattcttccccaattggctctagtcactggcatctcactttatgatagggaaggctactacctagggcactttaagtcagtgacagccccttatttgcacttcaccttttgaccataactgtttccccagagcaggagcttgtggaaataccttggctgatgttgcagcctgcagcaagtgcttccgtctccggaatccttggggagcacttgtccacgtcttttctcatatcatggtagtcactaacatatataaggtatgtgctattggcccagcttttagaaaatgcagtcatttttctaaataaaaaggaagtactgcacccagcagtgtcactctgtagttactgtggtcacttgtaccatatagaggtgtaacacttgtcaagaagcgttatgtgcagtacttaatgtttgtaagacttacaaaaaaagatttaaagtggcagcttcactcgacatttggtgagagaagtacaaaggttgcagtgctgagctgtgggcggtttctggggatgtcccagggtggaactccacatgctggtgcatatacgcccttgagctacttcaaatgtggtttatacctcgcagatacaagaatctttatgaatatacaattctttttccttctacagcttagctccgtcttttcaaccacgaacatttaaaacccgacctactagcactgttctgtcctcaagtactcaaatatttctgatactgctgagtcagactgtcagaaaaagctagcactaactcgtgtttggagctctatccatattttactgatctctttaagtatttgttcctgccactgtgtactgtggagttgactcggtgttctgtcccagtgcggtgcctcctcttgacttccccactgctctctgtggtgagaaatttgccttgttcaataattactgtaccctcgcatgactgttacagctttctgtgcagagatgactgtccaagtgccacatgcctacgattgaaatgaaaactctattgttacctctgagttgtgttccacggaaaatgctatccagcagatcatttaggaaaaataattctatttttagcttttcatttctcagctgtccttttttcttgtttgatttttgacagcaatggagaatgggttatataaagactgcctgctaatatgaacagaaatgcatttgtaattcatgaaaataaatgtacatcttctatcttcaaaaaaaaaaaaaaaaaaa

SEQ ID NO: 1752 - protein, 360 aa, Homo sapien
MAAAAAAGAGPEMVRGQVFDVGPRYTNLSYIGEGAYGMVCSAYDNVNKVRVAIKKISPFEHQTYCQRTLREIKILLRFRHENIIGINDIIRAPTIEQMKDVYIVQDLMETDLYKLLKTQHLSNDHICYFLYQILRGLKYIHSANVLHRDLKPSNLLLNTTCDLKICDFGLARVADPDHDHTGFLTEYVATRWYRAPEIMLNSKGYTKSIDIWSVGCILAEMLSNRPIFPGKHYLDQLKHILGILGSPSQEDLNCIINLKARNYLLSLPHKNKVPWNRLFPNADSKALDLLDKMLTFNPHKRIEVEQALAHPYLEQYYDPSDEPIAEAPFKFDMELDDLPKEKLKELIFEETARFQPGYRS

SEQ ID NO: 1753 - DNA, 984 bp, Homo sapien
actcagggcagagcctggctgctgggcagaagggcacttgggcgggctgcttcagagagggccattcggtgtcctggcccacagagagagtaaacagtgagagaccaagagagcaaaccagagagatagggagggggaatgcaaggggtccctgggggactcaggggtcccagtggagaatgagaggcaggccccccgtggtgggccggggacctggctgccagaggaccgggctggtgaggaggcgaggatgtggactttcgtcacccagctgttggtcacgctggtgctgctgagcttcttcctggtcagctgtcagaacgtgatgcacattgtcagggggtccctgtgctttgtgctaaagcacatccaccaggagctggacaaggagctgggggagagcgagggcctcagtgacgacgaggagaccatctcacccagggtggtccggcggcgggtcttcctgaaggggaatgagtttcagaatattccaggggagcaggtgacagaggagcaattcacggatgagcagggcaacattgtcaccaagaaggatcacacctcgacacccaacccctgaaccccacacactctctgccatgcacacaggaggagagctggacctgagggccaccgcagcggtgcacacattcctctgggctgacggcatgacctctgtaagggactcctgctagtcccctcttggcatgaatgactgactgtagacgcatgacctccaggcttcaatcctgcctcttgcaatgacagctgatctgtcggaaccaggacacaaaagcagcaagaagcggggagagagagggatagaaaacaagcgcaggagagcctgcgaacgcaaaagtgaatgagggctttttgtggctggggatgggttttggttttggggttttttttttaaattgttttgacttcgtacagggtactttttcccaacctcatctgtcagaaatccatgtgggcttcctg

SEQ ID NO: 1754 - protein, 109 aa, Homo sapien
MWTFVTQLLVTLVLLSFFLVSCQNVMHIVRGSLCFVLKHIHQELDKELGESEGLSDDEETISPRVVRRRVFLKGNEFQNIPGEQVTEEQFTDEQGNIVTKKDHTSTPNP

SEQ ID NO: 1755 - DNA, 2269 bp, Homo sapien
cgccaaaccctgtggtcaacggcgcgcgggtctccaggctccgtgttctaggcccgagttagaatcctgtcagctgaggaggtcgggcggggcagaggggcttcaccttgaaaatctcggggagactgtgggtacgagggggaagtgattatttttctgttgcccacttttcaatatgaaggaggatcaagttgtggcggaagaaccaggattccaagatgaagaggaatctttgtttcaagatattgacctgttacagaaacatggaattaacgtggctgacattaagaaactgaaatcagtaggaatctgtaccatcaaaggtatacagatgacaacaagaagagctctatgcaatgtcaaaggactctcagaagccaaagtagacaagattaaagaggcagcgaacaaactaattgaaccaggattcttgactgcatttgagtatagtgaaaagaggaaaatggttttccatatcaccaccgggagccaggaatttgataagttactaggaggtggaattgaaagtatggcaattacagaagcttttggagaatttcgtactggaaaaacccagctttctcataccctctgtgtgacagctcaacttccaggagctggtggctacccaggaggaaagattatcttcattgatacagaaaatactttccgtccagatcgccttagggacattgctgatcgctttaatgtagaccatgatgcagtactggacaacgtactttatgcacgtgcatatactagtgaacatcagatggagctacttgattatgtagcagcaaagttccatgaagaagctggcatcttcaagctattgattatcgattcaataatggcactttttcgagtggatttcagtggccgtggggagttggccgaacggcagcaaaaattggcccagatgttgtcacgactccaaaaaatctcagaagaatataacgtggctgtttttgtgaccaatcaaatgactgccgatccaggagcaactatgacctttcaggcagatcccaaaaaacccattgggggacacattctggctcatgcttcaacaacaagaataagcttgcgaaagggaagaggagagctcagaattgccaagatttatgacagtcctgagatgcctgaaaatgaagccaccttcgcaataactgctggaggaattggggatgccaaggagtaggtggtgaattgatgcaaattgcttcttagtgcttattaggagctgaagaaatggaaaagcagtctccaatttcacatcttgaaatagaggttttttcccacatgttactaaagaaaagtcagcaaagagatttaaatcttatatttatcttaaaagtccctgatttatgataactatacattgtatgtaaattcagggatatgtatatgtatgtttgtgtgtgtgtgtgtttgtgtgtgtatacctgacatatatagtagatatatatacctattgaaattctctcactctgtgtatgtatatatacctatggaaaactagttgttgggaaaggagtacgtgattccctccctttcacttttcaaagtgagccactaaacagaaagtctaagagttcagaaatgtcccattctcctaaggactttcccttcaccatttttctagggtatagtgccactgacttacatagctagatgtttttccacaagaggatttaagggaggaatgtttataggacacacacacaaaagctctttctatttataatatcaaactgcatattcacctttatagcaacagaaaacagacattaaattaagccaaattttaaatcatttgactttgacaagcagaaattacttttaaaaaatgtatttatggctgggcgtggtggctcacacctgtaatcccagcactttgggaggccgaggcaggtggatcacttgaggtcaggagttcaagaccagcctggccaacatggagaaaccccatctctactaaaaatacaaaaattagccaagtgcagtggcatgtgcttgtaatcccagctactctggaggctgaggcaggagaattgcttgaacccaggaggcagagattgcggtgagccaagatggcaccactgcactccagcctaggtgacagagtgagactccgtctcaaaaaaaaaaaaaaaacttttttaaaatgttaaaattaatttaaatgtaaaatttctgaatactaatcttagaaatgtgtaaaagatattattttgattgttaaacaaataaaatcctgttttcaaaatgc

SEQ ID NO: 1756 - protein, 340 aa, Homo sapien
MKEDQVVAEEPGFQDEEESLFQDIDLLQKHGINVADIKKLKSVGICTIKGIQMTTRRALCNVKGLSEAKVDKIKEAANKLIEPGFLTAFEYSEKRKMVFHITTGSQEFDKLLGGGIESMAITEAFGEFRTGKTQLSHTLCVTAQLPGAGGYPGGKIIFIDTENTFRPDRLRDIADRFNVDHDAVLDNVLYARAYTSEHQMELLDYVAAKFHEEAGIFKLLIIDSIMALFRVDFSGRGELAERQQKLAQMLSRLQKISEEYNVAVFVTNQMTADPGATMTFQADPKKPIGGHILAHASTTRISLRKGRGELRIAKIYDSPEMPENEATFAITAGGIGDAKE

SEQ ID NO: 1757 - DNA, 2431 bp, Homo sapien
gttttgcctgctagcatctccctgtaactctcccaatcttgaggagtgatccctgtcccagcccctggaaaggggcaggaacgacaaactcaaagtccaggatgttcaccatgacaagagccatggaagaggctctttttcagcacttcatgcaccagaagctggggatcgcctatgccatacacaagccatttcccttctttgaaggcctcctagacaactccatcatcactaagagaatgtacatggaatctctggaagcctgtagaaatttgatccctgtatccagagtggtgcacaacattctcacccaactggagaggacttttaacctgtctcttctggtgacattgttcagtcaaattaacctgcgtgaatatcccaatctggtgacgatttacagaagcttcaaacgtgttggtgcttcctatgaacggcagagcagagacacaccaatcctacttgaagccccaactggcctagcagaaggaagctccctccataccccactggcgctgcccccaccacaaccccctcaaccaagctgttcaccctgtgcgccaagagtcagtgagcctggaacatcctcccagcaaagcgatgagatcctgagtgagtcgcccagcccatctgaccctgtcctgcctctccctgcactcatccaggaaggaagaagcacttcagtgaccaatgacaagttaacatccaaaatgaatgcggaagaagactcagaagagatgcccagcctcctcactagcactgtgcaagtggccagtgacaacctgatcccccaaataagagataaagaagaccctcaagagatgccccactctcccttgggctctatgccagagataagagataattctccagaaccaaatgacccagaagagccccaggaggtgtccagcacaccttcagacaagaaaggaaagaaaagaaaaagatgtatctggtcaactccaaaaaggagacataagaaaaaaagcctcccaagagggacagcctcatctagacacggaatccaaaagaagctcaaaagggtggatcaggttcctcaaaagaaagatgactcaacttgtaactccacggtagagacaagggcccaaaaggcgagaactgaatgtgcccgaaagtcgagatcagaggagatcattgatggcacttcagaaatgaatgaaggaaagaggtcccagaagacgcctagtacaccacgaagggtcacacaaggggcagcctcacctgggcatggcatccaagagaagctccaagtggtggataaggtgactcaaaggaaagacgactcaacctggaactcagaggtcatgatgagggtccaaaaggcaagaactaaatgtgcccgaaagtccagatcgaaagaaaagaaaaaggagaaagatatctgttcaagctcaaaaaggagatttcagaaaaatattcaccgaagaggaaaacccaaaagtgacactgtggattttcactgttctaagctccccgtgacctgtggtgaggcgaaagggattttatataagaagaaaatgaaacacggatcctcagtgaagtgcattcggaatgaggatggaacttggttaacaccaaatgaatttgaagtcgaaggaaaaggaaggaacgcaaagaactggaaacggaatatacgttgtgaaggaatgaccctaggagagctgctgaagcggaaaaactcggatgaatgcgaggtgtgctgtcaagggggacaacttctctgctgcggtacttgtccacgagtcttccatgaggactgtcacatcccccctgtggaagccaagaggatgctgtggagttgcaccttctgcaggatgaagaggtcttcaggaagccaacagtgccatcatgtatctaagaccctggagaggcagatgcagcctcaggaccagctgaaatgtgagttcctcctcttgaaggcctactgtcatccacaaagctccttttttacgggcatcccatttaatattcgagattacggtgagccctttcaggaagcaatgtggttggacctggttaaggaaaggctgattacggaaatgtacacggtggcatggtttgtgcgagacatgcgcctgatgtttcgcaaccataaaacattttacaaggcttctgactttggccaggtaggacttgacttagaggcagaatttgaaaaagatctcaaagacgtgctcggttttcatgaagccaatgacggcggtttctggactcttccttgaccctgttctgtaaagactgaagcatccccacctcaggattcagctgatgggaccctggcttggactgttgattgccagtgagtctgggatgtaattggctgccctcaggacccaaacccagacacttcataggattatcacaccctccatctttattctttctttttacctttaaaagtctatatcta

SEQ ID NO: 1758 - protein, 713 aa, Homo sapien
MFTMTRAMEEALFQHFMHQKLGIAYAIHKPFPFFEGLLDNSIITKRMYMESLEACRNLIPVSRVVHNILTQLERTFNLSLLVTLFSQINLREYPNLVTIYRSFKRVGASYERQSRDTPILLEAPTGLAEGSSLHTPLALPPPQPPQPSCSPCAPRVSEPGTSSQQSDEILSESPSPSDPVLPLPALIQEGRSTSVTNDKLTSKMNAEEDSEEMPSLLTSTVQVASDNLIPQIRDKEDPQEMPHSPLGSMPEIRDNSPEPNDPEEPQEVSSTPSDKKGKKRKRCIWSTPKRRHKKKSLPRGTASSRHGIQKKLKRVDQVPQKKDDSTCNSTVETRAQKARTECARKSRSEEIIDGTSEMNEGKRSQKTPSTPRRVTQGAASPGHGIQEKLQVVDKVTQRKDDSTWNSEVMMRVQKARTKCARKSRSKEKKKEKDICSSSKRRFQKNIHRRGKPKSDTVDFHCSKLPVTCGEAKGILYKKKMKHGSSVKCIRNEDGTWLTPNEFEVEGKGRNAKNWKRNIRCEGMTLGELLKRKNSDECEVCCQGGQLLCCGTCPRVFHEDCHIPPVEAKRMLWSCTFCRMKRSSGSQQCHHVSKTLERQMQPQDQLKCEFLLLKAYCHPQSSFFTGIPFNIRDYGEPFQEAMWLDLVKERLITEMYTVAWFVRDMRLMFRNHKTFYKASDFGQVGLDLEAEFEKDLKDVLGFHEANDGGFWTLP

SEQ ID NO: 1759 - DNA, 5891 bp, Homo sapien
ccaggagagcggcgtggacgcgtgcgggcctagaggcccacgtgatccgcagggcggccgaggcaggaagctgtgagtgcgcggttgcggggtcgcattgtggctacggctttgcgtccccggcgggcagccccaggctggtccccgcctccgctctccccaccggcggggaaagcagctggtgtgggaggaaaggctccatcccccgccccctctctcccgctgttggctggcaggatcttttggcagtcctgtggcctcgctccccgcccggatcctcctgaccctgagattcgcgggtctcacgtcccgtgcacgccttgcttcggcctcagttaagcctttgtggactccaggtccctggtgagattagaaacgtttgcaaacatgtcccggatcgaaaagatgagcattctgggcgtgcggagttttggaatagaggacaaagataagcaaattatcactttcttcagcccccttacaattttggttggacccaatggggcgggaaagacgaccatcattgaatgtctaaaatatatttgtactggagatttccctcctggaaccaaaggaaatacatttgtacacgatcccaaggttgctcaagaaacagatgtgagagcccagattcgtctgcaatttcgtgatgtcaatggagaacttatagctgtgcaaagatctatggtgtgtactcagaaaagcaaaaagacagaatttaaaactctggaaggagtcattactagaacaaagcatggtgaaaaggtcagtctgagctctaagtgtgcagaaattgaccgagaaatgatcagttctcttggggtttccaaggctgtgctaaataatgtcattttctgtcatcaagaagattctaattggcctttaagtgaaggaaaggctttgaagcaaaagtttgatgagattttttcagcaacaagatacattaaagccttagaaacacttcggcaggtacgtcagacacaaggtcagaaagtaaaagaatatcaaatggaactaaaatatctgaagcaatataaggaaaaagcttgtgagattcgtgatcagattacaagtaaggaagcccagttaacatcttcaaaggaaattgtcaaatcctatgagaatgaacttgatccattgaagaatcgtctaaaagaaattgaacataatctctctaaaataatgaaacttgacaatgaaattaaagccttggatagccgaaagaagcaaatggagaaagataatagtgaactggaagagaaaatggaaaaggtttttcaagggactgatgagcaactaaatgacttatatcacaatcaccagagaacagtaagggagaaagaaaggaaattggtagactgtcatcgtgaactggaaaaactaaataaagaatctaggcttctcaatcaggaaaaatcagaactgcttgttgaacagggtcgtctacagctgcaagcagatcgccatcaagaacatatccgagctagagattcattaattcagtctttggcaacacagctagaattggatggctttgagcgtggaccattcagtgaaagacagattaaaaattttcacaaacttgtgagagagagacaagaaggggaagcaaaaactgccaaccaactgatgaatgactttgcagaaaaagagactctgaaacaaaaacagatagatgagataagagataagaaaactggactgggaagaataattgagttaaaatcagaaatcctaagtaagaagcagaatgagctgaaaaatgtgaagtatgaattacagcagttggaaggatcttcagacaggattcttgaactggaccaggagctcataaaagctgaacgtgagttaagcaaggctgagaaaaacagcaatgtagaaaccttaaaaatggaagtaataagtctccaaaatgaaaaagcagacttagacaggaccctgcgtaaacttgaccaggagatggagcagttaaaccatcatacaacaacacgtacccaaatggagatgctgaccaaagacaaagctgacaaagatgaacaaatcagaaaaataaaatctaggcacagtgatgaattaacctcactgttgggatattttcccaacaaaaaacagcttgaagactggctacatagtaaatcaaaagaaattaatcagaccagggacagacttgccaaattgaacaaggaactagcttcatctgagcagaataaaaatcatataaataatgaactaaaaagaaaggaagagcagttgtccagttacgaagacaagctgtttgatgtttgtggtagccaggattttgaaagtgatttagacaggcttaaagaggaaattgaaaaatcatcaaaacagcgagccatgctggctggagccacagcagtttactcccagttcattactcagctaacagacgaaaaccagtcatgttgccccgtttgtcagagagtttttcagacagaggctgagttacaagaagtcatcagtgatttgcagtctaaactgcgacttgctccagataaactcaagtcaacagaatcagagctaaaaaaaaaggaaaagcggcgtgatgaaatgctgggacttgtgcccatgaggcaaagcataattgatttgaaggagaaggaaataccagaattaagaaacaaactgcagaatgtcaatagagacatacagcgcctaaagaacgacatagaagaacaagaaacactcttgggtacaataatgcctgaagaagaaagtgccaaagtatgcctgacagatgttacaattatggagaggttccagatggaacttaaagatgttgaaagaaaaattgcacaacaagcagctaagctacaaggaatagacttagatcgaactgtccaacaagtcaaccaggagaaacaagagaaacagcacaagttagacacagtttctagtaagattgaattgaatcgtaagcttatacaggaccagcaggaacagattcaacatctaaaaagtacaacaaatgagctaaaatctgagaaacttcagatatccactaatttgcaacgtcgtcagcaactggaggagcagactgtggaattatccactgaagttcagtctttgtacagagagataaaggatgctaaagagcaggtaagccctttggaaacaacattggaaaagttccagcaagaaaaagaagaattaatcaacaaaaaaaatacaagcaacaaaatagcacaggataaactgaatgatattaaagagaaggttaaaaatattcatggctatatgaaagacattgagaattatattcaagatgggaaagacgactataagaagcaaaaagaaactgaacttaataaagtaatagctcaactaagtgaatgcgagaaacacaaagaaaagataaatgaagatatgagactcatgagacaagatattgatacacagaagatacaagaaaggtggctacaagataaccttactttaagaaaaagaaatgaggaactaaaagaagttgaagaagaaagaaaacaacatttgaaggaaatgggtcaaatgcaggttttgcaaatgaaaagtgaacatcagaagttggaagagaacatagacaatataaaaagaaatcataatttggcattagggcgacagaaaggttatgaagaagaaattattcattttaagaaagaacttcgagaaccacaatttcgggatgctgaggaaaagtatagagaaatgatgattgttatgaggacaacagaacttgtgaacaaggatctggatatttattataagactcttgaccaagcaataatgaaatttcacagtatgaaaatggaagaaatcaataaaattatacgtgacctgtggcgaagtacctatcgtggacaagatattgaatacatagaaatacggtctgatgccgatgaaaatgtatcagcttctgataaaaggcggaattataactaccgagtggtgatgctgaagggagacacagccttggatatgcgaggacgatgcagtgctggacaaaaggtattagcctcactcatcattcgcctggccctggctgaaacgttctgcctcaactgtggcatcattgccttggatgagccaacaacaaatcttgaccgagaaaacattgaatctcttgcacatgctctggttgagataataaaaagtcgctcacagcagcgtaacttccagcttctggtaatcactcatgatgaagattttgtggagcttttaggacgttctgaatatgtggagaaattctacaggattaaaaagaacatcgatcagtgctcagagattgtgaaatgcagtgttagctccctgggattcaatgttcattaaaaatatccaagatttaaatgccatagaaatgtaggtcctcagaaagtgtataataagaaacttatttctcatatcaacttagtcaataagaaaatatattctttcaaaggaacattgtgtctaggattttggatgttgagaggttctaaaatcatgaaacttgtttcactgaaaattggacagattgcctgtttctgatttgctgctcttcatcccattccaggcagcctctgtcaggccttcagggttcagcagtacagccgagactcgactctgtgcctccctccccagtgcaaatgcatgcttcttctcaaagcactgttgagaaggagataattactgccttgaaaatttatggttttggtatttttttaaatcatagttaaatgttacctctgaatttacttccttgcatgtggtttgaaaaactgagtattaatatctgaggatgaccagaaatggtgagatgtatgtttggctctgcttttaactttataaatccagtgacctctctctctgggacttggtttccccaactaaaatttgaagtagttgaatggggtctcaaagtttgacaggaaccttaagtaatcatctaagtcagtacccaccaccttcttctcctacatatcccttccagatggtcatccagactcagagctctctctacagagaggaaattctccactgtgcacacccacctttggaaagctctgaccacttgaggcctgatctgcccatcgtgaagaagcctgtaacactcctctgcgtctatcctgtgtagcatactggcttcaccatcaatcctgattcctctctaagtgggcattgccatgtggaaggcaagccaggctcactcacagagtcaaggcctgctccctgtagggtccaaccagacctggaagaacaggcctctccatttgctcttcagatgccacttctaagaaaagcctaatcacagtttttcctggaattgccagctgacatcttgaatccttccattccacacagaatgcaaccaagtcacacgcttttgaattatgctttgtagagttttgtcattcagagtcagccaggaccataccgggtcttgattcagtcacatggcatggttttgtgccatctgtagctataatgagcatgtttgcctagacagcttttctcaactgggtccagaagagaattaagccctaaggtcctaaggcatctatctgtgctaggttaaatggttggcccccaaagatagacaggtcctgatttctagaacccgtgactgttactttatacagcaaaggaaactttgcagatgtgattaaagctaaggaccttaagacagagtatcctgggggtggtggtggggtgggggggggtcctaaatgtaatcacgagtaagattaagagcaaatcaattctagtcatatattaaacatccacaataaccaagatatttttatcccaagaatgcaagatttcagaaaatgaaaaatctgttgataaatccatcactataataaaaccgaaggtgaaaaaaattctgaaaaaaaaaaaaaaaaaaaaaaaaaaaa

SEQ ID NO: 1760 - protein, 1312 aa, Homo sapien
MSRIEKMSILGVRSFGIEDKDKQIITFFSPLTILVGPNGAGKTTIIECLKYICTGDFPPGTKGNTFVHDPKVAQETDVRAQIRLQFRDVNGELIAVQRSMVCTQKSKKTEFKTLEGVITRTKHGEKVSLSSKCAEIDREMISSLGVSKAVLNNVIFCHQEDSNWPLSEGKALKQKFDEIFSATRYIKALETLRQVRQTQGQKVKEYQMELKYLKQYKEKACEIRDQITSKEAQLTSSKEIVKSYENELDPLKNRLKEIEHNLSKIMKLDNEIKALDSRKKQMEKDNSELEEKMEKVFQGTDEQLNDLYHNHQRTVREKERKLVDCHRELEKLNKESRLLNQEKSELLVEQGRLQLQADRHQEHIRARDSLIQSLATQLELDGFERGPFSERQIKNFHKLVRERQEGEAKTANQLMNDFAEKETLKQKQIDEIRDKKTGLGRIIELKSEILSKKQNELKNVKYELQQLEGSSDRILELDQELIKAERELSKAEKNSNVETLKMEVISLQNEKADLDRTLRKLDQEMEQLNHHTTTRTQMEMLTKDKADKDEQIRKIKSRHSDELTSLLGYFPNKKQLEDWLHSKSKEINQTRDRLAKLNKELASSEQNKNHINNELKRKEEQLSSYEDKLFDVCGSQDFESDLDRLKEEIEKSSKQRAMLAGATAVYSQFITQLTDENQSCCPVCQRVFQTEAELQEVISDLQSKLRLAPDKLKSTESELKKKEKRRDEMLGLVPMRQSIIDLKEKEIPELRNKLQNVNRDIQRLKNDIEEQETLLGTIMPEEESAKVCLTDVTIMERFQMELKDVERKIAQQAAKLQGIDLDRTVQQVNQEKQEKQHKLDTVSSKIELNRKLIQDQQEQIQHLKSTTNELKSEKLQISTNLQRRQQLEEQTVELSTEVQSLYREIKDAKEQVSPLETTLEKFQQEKEELINKKNTSNKIAQDKLNDIKEKVKNIHGYMKDIENYIQDGKDDYKKQKETELNKVIAQLSECEKHKEKINEDMRLMRQDIDTQKIQERWLQDNLTLRKRNEELKEVEEERKQHLKEMGQMQVLQMKSEHQKLEENIDNIKRNHNLALGRQKGYEEEIIHFKKELREPQFRDAEEKYREMMIVMRTTELVNKDLDIYYKTLDQAIMKFHSMKMEEINKIIRDLWRSTYRGQDIEYIEIRSDADENVSASDKRRNYNYRVVMLKGDTALDMRGRCSAGQKVLASLIIRLALAETFCLNCGIIALDEPTTNLDRENIESLAHALVEIIKSRSQQRNFQLLVITHDEDFVELLGRSEYVEKFYRIKKNIDQCSEIVKCSVSSLGFNVH

SEQ ID NO: 1761 - DNA, 1552 bp, Homo sapien
acagactgcagggctgactagggttagtttggaggagggagtaagaggtggggaggaggaggcacagttaatggatctgtaaacttgcaccctctttcagagtggtacatggaagacagcacaaagtggatccatactctgaaatgcagtaactctgatgcttgaatttgtctcccttcttgccagaaaggattctaataactcggtgtcaaagccaagacataaactcaaccccttctcttccaaaagcttcacgttacagcatggaagctgttgccaagtttgatttcactgcttcaggtgaggatgaactgagctttcacactggagatgttttgaagattttaagtaaccaagaggagtggtttaaggcggagcttgggagccaggaaggatatgtgcccaagaatttcatagacatccagtttcccaaatggtttcacgaaggcctctctcgacaccaggcagagaacttactcatgggcaaggaggttggcttcttcatcatccgggccagccagagctccccaggggacttctccatctctgtcaggcatgaggatgacgttcaacacttcaaggtcatgcgagacaacaagggtaattactttctgtggactgagaagtttccatccctaaataagctggtagactactacaggacaaattccatctccagacagaagcagatcttccttagagacagaacccgagaagaccagggtcaccggggcaacagcctggaccggaggtcccagggaggcccacacctcagtggggctgtgggagaagaaatccgaccttcgatgaaccggaagctgtcggatcaccccccgacccttcccctgcagcagcaccagcaccagccacagcctccgcaatatgccccagcgccccagcagctgcagcagcccccacagcagcgatatctgcagcaccaccatttccaccaggaacgccgaggaggcagccttgacataaatgatgggcattgtggcaccggcttgggcagtgaaatgaatgcggccctcatgcatcggagacacacagacccagtgcagctccaggcggcagggcgagtgcggtgggcccgggcgctgtatgactttgaggccctggaggatgacgagctggggttccacagcggggaggtggtggaggtcctggatagctccaacccatcctggtggaccggccgcctgcacaacaagctgggcctcttccctgccaactacgtggcacccatgacccgataaactcttcaggggacagaagctttttgtctggagctgcccacaagaaagagggcaaggaaaaaaggctggactccatgactatatatacatacatctatctacatctgcctgtgtacacacacaactttttatactagtaatttattggcaattgggctggtaattagttgatgcaaaagggaactcaggtggagaataatattgacacttgcttttctgcccccctcaggggtgtgtggaaggcagtgggggagttgggaggggggcagggaaatgaaatggagttttgtcctggc

SEQ ID NO: 1762 - protein, 330 aa, Homo sapien
MEAVAKFDFTASGEDELSFHTGDVLKILSNQEEWFKAELGSQEGYVPKNFIDIQFPKWFHEGLSRHQAENLLMGKEVGFFIIRASQSSPGDFSISVRHEDDVQHFKVMRDNKGNYFLWTEKFPSLNKLVDYYRTNSISRQKQIFLRDRTREDQGHRGNSLDRRSQGGPHLSGAVGEEIRPSMNRKLSDHPPTLPLQQHQHQPQPPQYAPAPQQLQQPPQQRYLQHHHFHQERRGGSLDINDGHCGTGLGSEMNAALMHRRHTDPVQLQAAGRVRWARALYDFEALEDDELGFHSGEVVEVLDSSNPSWWTGRLHNKLGLFPANYVAPMTR

SEQ ID NO: 1763 - DNA, 4607 bp, Homo sapien
gctggcggcggccgcccagggccggggccgcgcgcccagcctgagcccgccccgccgccgagcgtcaccgaacctgcttgaaatgcagccgaggagccggggcgggcggcagcggcggcggcggcggcggcgggggcagcggcaaccccggcgccgcggcaaggactcggagggctgagacgcggcggcggcggcgcggggagcgcggggcgcggcggccggagcccgggcccgccatgggcctccccgagccgggccctctccggcttctggcgctgctgctgctgctgctgctgctgctgctgctgcggctccagcatcttgcggcggcagcggctgatccgctgctcggcggccaagggccggccaaggagtgcgaaaaggaccaattccagtgccggaacgagcgctgcatcccctctgtgtggagatgcgacgaggacgatgactgcttagaccacagcgacgaggacgactgccccaagaagacctgtgcagacagtgacttcacctgtgacaacggccactgcatccacgaacggtggaagtgtgacggcgaggaggagtgtcctgatggctccgatgagtccgaggccacttgcaccaagcaggtgtgtcctgcagagaagctgagctgtggacccaccagccacaagtgtgtacctgcctcgtggcgctgcgacggggagaaggactgcgagggtggagcggatgaggccggctgtgctaccttgtgcgccccgcacgagttccagtgcggcaaccgctcgtgcctggccgccgtgttcgtgtgcgacggcgatgacgactgtggtgacggcagcgatgagcgcggctgtgcagacccggcctgcgggccccgcgagttccgctgcggcggcgatggcggcggcgcctgcatcccggagcgctgggtctgcgaccgccagtttgactgcgaggaccgctcggacgaggcagccgagctctgcggccgcccgggccccggggccacgtccgcgcccgccgcctgcgccaccgtctcccagttcgcctgccgcagcggcgagtgcgtgcacctgggctggcgctgcgacggcgaccgcgactgcaaagacaaatcggacgaggccgactgcccactgggcacctgccgtggggacgagttccagtgtggggatgggacatgtgtccttgcaatcaagcactgcaaccaggagcaggactgtccagatgggagtgatgaagctggctgcctacaggggctgaacgagtgtctgcacaacaatggcggctgctcacacatctgcactgacctcaagattggctttgaatgcacgtgcccagcaggcttccagctcctggaccagaagacctgtggcgacattgatgagtgcaaggacccagatgcctgcagccagatctgtgtcaattacaagggctattttaagtgtgagtgctaccctggctacgagatggacctactgaccaagaactgcaaggctgctggtggaaagagcccatccctaatcttcaccaaccggtacgaggtgcggaggatcgacctggtgaagcggaactattcacgcctcatccccatgctcaagaatgtcgtggcactagatgtggaagttgccaccaatcgcatctactggtgtgacctctcctaccgtaagatctatagcgcctacatggacaaggccagtgacccgaaagagcaggaggtcctcattgacgagcagttgcactctccagagggcctggcagtggactgggtccacaagcacatctactggactgactcgggcaataagaccatctcagtggccacagttgatggtggccgccgacgcactctcttcagccgtaacctcagtgaaccccgggccatcgctgttgaccccctgcgagggttcatgtattggtctgactggggggaccaggccaagattgagaaatctgggctcaacggtgtggaccggcaaacactggtgtcagacaatattgaatggcccaacggaatcaccctggatctgctgagccagcgcttgtactgggtagactccaagctacaccaactgtccagcattgacttcagtggaggcaacagaaagacgctgatctcctccactgacttcctgagccacccttttgggatagctgtgtttgaggacaaggtgttctggacagacctggagaacgaggccattttcagtgcaaatcggctcaatggcctggaaatctccatcctggctgagaacctcaacaacccacatgacattgtcatcttccatgagctgaagcagccaagagctccagatgcctgtgagctgagtgtccagcctaatggaggctgtgaatacctgtgccttcctgctcctcagatctccagccactctcccaagtacacatgtgcctgtcctgacacaatgtggctgggtccagacatgaagaggtgctaccgagcacctcaatctacctcaactacgacgttagcttctaccatgacgaggacagtacctgccaccacaagagcccccgggaccaccgtccacagatccacctaccagaaccacagcacagagacaccaagcctgacagctgcagtcccaagctcagttagtgtccccagggctcccagcatcagcccgtctaccctaagccctgcaaccagcaaccactcccagcactatgcaaatgaagacagtaagatgggctcaacagtcactgccgctgttatcgggatcatcgtgcccatagtggtgatagccctcctgtgcatgagtggatacctgatctggagaaactggaagcggaagaacaccaaaagcatgaattttgacaacccagtctacaggaaaacaacagaagaagaagatgaagatgagctccatatagggagaactgctcagattggccatgtctatcctgcagcaatcagcagctttgatcgcccactgtgggcagagccctgtcttggggagaccagagaaccggaagacccagcccctgccctcaaggagctttttgtcttgccgggggaaccaaggtcacagctgcaccaactcccgaagaaccctctttccgagctgcctgtcgtcaaatccaagcgagtggcattaagccttgaagatgatggactaccctgaggatgggatcacccccttcgtgcctcatggaattcagtcccatgcactacactctggatggtgtatgactggatgaatgggtttctatatatgggtctgtgtgagtgtatgtgtgtgtgtgattttttttttaaatttatgttgcggaaaggtaaccacaaagttatgatgaactgcaaacatccaaaggatgtgagagtttttctatgtataatgttttatacactttttaactggttgcactacccatgaggaattcgtggaatggctactgctgactaacatgatgcacataaccaaatgggggccaatggcacagtaccttactcatcatttaaaaactatatttacagaagatgtttggttgctgggggggcttttttgggttttggggcatttgttttttgtaaataagatgattatgctttgtggctatccatcaacataagtaaaaaaaaaaaaaaaacacttcaactccctcccccatttagattatttattaacatattttaaaaatcagatgagttctataaataatttagagaagtgagagtatttatttttggcatgtttggcccaccacacagactctgtgtgtgtatgtgtgtgtttatatgtgtatgtgtgtgacaggaaaatctgtagagaagaggcacatctatggctactgttcaaatacataaagataaatttattttcacacagtccacaaggggtatatcttgtagttttcagaaaagcctttggaaatctggatcaggaaatagataccatggtttgtgcaattatgtagtaaaaaaggcaaatcttttcacctctggctattcctgagaccccaggaagtcaggaaaagcctttcagctcacccatggctgctgtgactcctaccagggctttcttggctttggcgaaggtcagtgtacagacattccatggtaccagagtgctcagaaagtcaagataggatatgcctcaccctcagctactccttgttttaaagttcagctctttgagtaacttcttcaatttctttcaggacacttgggttgaattcagtaagtttcctctgaagcaccctgaagggtgccatccttacagagctaagtggagacgtttccagatcagcccaagtttactatagagactggcccaggcactgaatgtctaggacatgctgtggatgaagataaagatggtggaataggttttatcacatctcttatttctcttttccccttactctctaccatttcctttatgtggggaaacattttaaggtaataaataggttacttaccatcatatgttcatatagatgaaactaatttttggcttaagtcagaacaactggcccccaattgaagtcatatttgtggggggaaatggcatacgcaatattatattatattggatatttatgttcacacaggaatttggtttactgctttgtaaataaaagggaaaactccgggtatatgt

SEQ ID NO: 1764 - protein, 963 aa, Homo sapien
MGLPEPGPLRLLALLLLLLLLLLLRLQHLAAAAADPLLGGQGPAKECEKDQFQCRNERCIPSVWRCDEDDDCLDHSDEDDCPKKTCADSDFTCDNGHCIHERWKCDGEEECPDGSDESEATCTKQVCPAEKLSCGPTSHKCVPASWRCDGEKDCEGGADEAGCATLCAPHEFQCGNRSCLAAVFVCDGDDDCGDGSDERGCADPACGPREFRCGGDGGGACIPERWVCDRQFDCEDRSDEAAELCGRPGPGATSAPAACATVSQFACRSGECVHLGWRCDGDRDCKDKSDEADCPLGTCRGDEFQCGDGTCVLAIKHCNQEQDCPDGSDEAGCLQGLNECLHNNGGCSHICTDLKIGFECTCPAGFQLLDQKTCGDIDECKDPDACSQICVNYKGYFKCECYPGYEMDLLTKNCKAAGGKSPSLIFTNRYEVRRIDLVKRNYSRLIPMLKNVVALDVEVATNRIYWCDLSYRKIYSAYMDKASDPKEQEVLIDEQLHSPEGLAVDWVHKHIYWTDSGNKTISVATVDGGRRRTLFSRNLSEPRAIAVDPLRGFMYWSDWGDQAKIEKSGLNGVDRQTLVSDNIEWPNGITLDLLSQRLYWVDSKLHQLSSIDFSGGNRKTLISSTDFLSHPFGIAVFEDKVFWTDLENEAIFSANRLNGLEISILAENLNNPHDIVIFHELKQPRAPDACELSVQPNGGCEYLCLPAPQISSHSPKYTCACPDTMWLGPDMKRCYRAPQSTSTTTLASTMTRTVPATTRAPGTTVHRSTYQNHSTETPSLTAAVPSSVSVPRAPSISPSTLSPATSNHSQHYANEDSKMGSTVTAAVIGIIVPIVVIALLCMSGYLIWRNWKRKNTKSMNFDNPVYRKTTEEEDEDELHIGRTAQIGHVYPAAISSFDRPLWAEPCLGETREPEDPAPALKELFVLPGEPRSQLHQLPKNPLSELPVVKSKRVALSLEDDGLP

SEQ ID NO: 1765 - DNA, 1940 bp, Homo sapien
acccagggtccggcctgcgccttcccgccaggcctggacactggttcaacacctgtgacttcatgtgtgcgcgccggccacacctgcagtcacacctgtagccccctctgccaagagatccataccgaggcagcgtcggtggctacaagccctcagtccacacctgtggacacctgtgacacctggccacacgacctgtggccgcggcctggcgtctgctgcgacaggagcccttacctcccctgttataacacctgacagccacctaactgcccctgcagaaggagcaatggccttggctcctgagaggtaagagcccggcccaccctctccagatgccagtccccgagcgccctgcagccggccctgactctccgcggccgggcacccgcagggcagccccacgcgtgctgttcggagagtggctccttggagagatcagcagcggctgctatgaggggctgcagtggctggacgaggcccgcacctgtttccgcgtgccctggaagcacttcgcgcgcaaggacctgagcgaggccgacgcgcgcatcttcaaggcctgggctgtggcccgcggcaggtggccgcctagcagcaggggaggtggcccgccccccgaggctgagactgcggagcgcgccggctggaaaaccaacttccgctgcgcactgcgcagcacgcgtcgcttcgtgatgctgcgagataactcgggggacccggccgacccgcacaaggtgtacgcgctcagccgggagctgtgctggcgagaaggcccaggcacggaccagactgaggcagaggcccccgcagctgtcccaccaccacagggtgggcccccagggccattcctggcacacacacatgctggactccaagccccaggccccctccctgccccagctggtgacgagggggacctcctgctccaggcagtgcaacagagctgcctggcagaccatctgctgacagcgtcatggggggcagatccagtcccaaccaaggctcctggagagggacaagaagggcttcccctgactggggcctgtgctggaggcccagggctccctgctggggagctgtacgggtgggcagtagagacgacccccagccccgggccccagcccgcggcactaacgacaggcgaggccgcggccccagagtccccgcaccaggcagagccgtacctgtcaccctccccaagcgcctgcaccgcggtgcaagagcccagcccaggggcgctggacgtgaccatcatgtacaagggccgcacggtgctgcagaaggtggtgggacacccgagctgcacgttcctatacggccccccagacccagctgtccgggccacagacccccagcaggtagcattccccagccctgccgagctcccggaccagaagcagctgcgctacacggaggaactgctgcggcacgtggcccctgggttgcacctggagcttcgggggccacagctgtgggcccggcgcatgggcaagtgcaaggtgtactgggaggtgggcggccccccaggctccgccagcccctccaccccagcctgcctgctgcctcggaactgtgacacccccatcttcgacttcagagtcttcttccgagagctggtggaattccgggcacggcagcgccgtggctccccacgctataccatctacctgggcttcgggcaggacctgtcagctgggaggcccaaggagaagagcctggtcctggtgaagctggaaccctggctgtgccgagtgcacctagagggcacgcagcgtgagggtgtgtcttccctggatagcagcagcctcagcctctgcctgtccagcgccaacagcctctatgacgacatcgagtgcttccttatggagctggagcagcccgcctagaacccagtctaatgagaactccagaaagctggagcagcccacctagagctggcc

SEQ ID NO: 1766 - protein, 516 aa, Homo sapien
MPVPERPAAGPDSPRPGTRRAAPRVLFGEWLLGEISSGCYEGLQWLDEARTCFRVPWKHFARKDLSEADARIFKAWAVARGRWPPSSRGGGPPPEAETAERAGWKTNFRCALRSTRRFVMLRDNSGDPADPHKVYALSRELCWREGPGTDQTEAEAPAAVPPPQGGPPGPFLAHTHAGLQAPGPLPAPAGDEGDLLLQAVQQSCLADHLLTASWGADPVPTKAPGEGQEGLPLTGACAGGPGLPAGELYGWAVETTPSPGPQPAALTTGEAAAPESPHQAEPYLSPSPSACTAVQEPSPGALDVTIMYKGRTVLQKVVGHPSCTFLYGPPDPAVRATDPQQVAFPSPAELPDQKQLRYTEELLRHVAPGLHLELRGPQLWARRMGKCKVYWEVGGPPGSASPSTPACLLPRNCDTPIFDFRVFFRELVEFRARQRRGSPRYTIYLGFGQDLSAGRPKEKSLVLVKLEPWLCRVHLEGTQREGVSSLDSSSLSLCLSSANSLYDDIECFLMELEQPA

SEQ ID NO: 1767 - DNA, 9886 bp, Homo sapien
gcgagaggagtcgggatctgcgctgcagccaccgccgcggttgatactactttgaccttccgagtgcagtgaggcatacatcacaatttggaattatgcattggtttatcaatttacttgtttattgtcaccctgctgcccagatatgacttcatgaggacagtgatgtgtgttctgaaattgtgaaccatgagtctagtacttaatgatctgcttatctgctgccgtcaactagaacatgatagagctacagaacgaaagaaagaagttgagaaatttaagcgcctgattcgagatcctgaaacaattaaacatctagatcggcattcagattccaaacaaggaaaatatttgaattgggatgctgtttttagatttttacagaaatatattcagaaagaaacagaatgtctgagaatagcaaaaccaaatgtatcagcctcaacacaagcctccaggcagaaaaagatgcaggaaatcagtagtttggtcaaatacttcatcaaatgtgcaaacagaagagcacctaggctaaaatgtcaagaactcttaaattatatcatggatacagtgaaagattcatctaatggtgctatttacggagctgattgtagcaacatactactcaaagacattctttctgtgagaaaatactggtgtgaaatatctcagcaacagtggttagaattgttctctgtgtacttcaggctctatctgaaaccttcacaagatgttcatagagttttagtggctagaataattcatgctgttaccaaaggatgctgttctcagactgacggattaaattccaaatttttggactttttttccaaggctattcagtgtgcgagacaagaaaagagctcttcaggtctaaatcatatcttagcagctcttactatcttcctcaagactttggctgtcaactttcgaattcgagtgtgtgaattaggagatgaaattcttcccactttgctttatatttggactcaacataggcttaatgattctttaaaagaagtcattattgaattatttcaactgcaaatttatatccatcatccgaaaggagccaaaacccaagaaaaaggtgcttatgaatcaacaaaatggagaagtattttatacaacttatatgatctgctagtgaatgagataagtcatataggaagtagaggaaagtattcttcaggatttcgtaatattgccgtcaaagaaaatttgattgaattgatggcagatatctgtcaccaggtttttaatgaagataccagatccttggagatttctcaatcttacactactacacaaagagaatctagtgattacagtgtcccttgcaaaaggaagaaaatagaactaggctgggaagtaataaaagatcaccttcagaagtcacagaatgattttgatcttgtgccttggctacagattgcaacccaattaatatcaaagtatcctgcaagtttacctaactgtgagctgtctccattactgatgatactatctcagcttctaccccaacagcgacatggggaacgtacaccatatgtgttacgatgccttacggaagttgcattgtgtcaagacaagaggtcaaacctagaaagctcacaaaagtcagatttattaaaactctggaataaaatttggtgtattacctttcgtggtataagttctgagcaaatacaagctgaaaactttggcttacttggagccataattcagggtagtttagttgaggttgacagagaattctggaagttatttactgggtcagcctgcagaccttcatgtcctgcagtatgctgtttgactttggcactgaccaccagtatagttccaggagcggtaaaaatgggaatagagcaaaatatgtgtgaagtaaatagaagcttttctttaaaggaatcaataatgaaatggctcttattctatcagttagagggtgacttagaaaatagcacagaagtgcctccaattcttcacagtaattttcctcatcttgtactggagaaaattcttgtgagtctcactatgaaaaactgtaaagctgcaatgaattttttccaaagcgtgccagaatgtgaacaccaccaaaaagataaagaagaactttcattctcagaagtagaagaactatttcttcagacaacttttgacaagatggactttttaaccattgtgagagaatgtggtatagaaaagcaccagtccagtattggcttctctgtccaccagaatctcaaggaatcactggatcgctgtcttctgggattatcagaacagcttctgaataattactcatctgagattacaaattcagaaactcttgtccggtgttcacgtcttttggtgggtgtccttggctgctactgttacatgggtgtaatagctgaagaggaagcatataagtcagaattattccagaaagccaactctctaatgcaatgtgcaggagaaagtatcactctgtttaaaaataagacaaatgaggaattcagaattggttccttgagaaatatgatgcagctatgtacacgttgcttgagcaactgtaccaagaagagtccaaataagattgcatctggctttttcctgcgattgttaacatcaaagctaatgaatgacattgcagatatttgtaaaagtttagcatccttcatcaaaaagccatttgaccgtggagaagtagaatcaatggaagatgatactaatggaaatctaatggaggtggaggatcagtcatccatgaatctatttaacgattaccctgatagtagtgttagtgatgcaaacgaacctggagagagccaaagtaccataggtgccattaatcctttagctgaagaatatctgtcaaagcaagatctacttttcttagacatgctcaagttcttgtgtttgtgtgtaactactgctcagaccaatactgtgtcctttagggcagctgatattcggaggaaattgttaatgttaattgattctagcacgctagaacctaccaaatccctccacctgcatatgtatctaatgcttttaaaggagcttcctggagaagagtaccccttgccaatggaagatgttcttgaacttctgaaaccactatccaatgtgtgttctttgtatcgtcgtgaccaagatgtttgtaaaactattttaaaccatgtccttcatgtagtgaaaaacctaggtcaaagcaatatggactctgagaacacaagggatgctcaaggacagtttcttacagtaattggagcattttggcatctaacaaaggagaggaaatatatattctctgtaagaatggccctagtaaattgccttaaaactttgcttgaggctgatccttattcaaaatgggccattcttaatgtaatgggaaaagactttcctgtaaatgaagtatttacacaatttcttgctgacaatcatcaccaagttcgcatgttggctgcagagtcaatcaatagattgttccaggacacgaagggagattcttccaggttactgaaagcacttcctttgaagcttcagcaaacagcttttgaaaatgcatacttgaaagctcaggaaggaatgagagaaatgtcccatagtgctgagaaccctgaaactttggatgaaatttataatagaaaatctgttttactgacgttgatagctgtggttttatcctgtagccctatctgcgaaaaacaggctttgtttgccctgtgtaaatctgtgaaagagaatggattagaacctcaccttgtgaaaaaggttttagagaaagtttctgaaacttttggatatagacgtttagaagactttatggcatctcatttagattatctggttttggaatggctaaatcttcaagatactgaatacaacttatcttcttttccttttattttattaaactacacaaatattgaggatttctatagatcttgttataaggttttgattccacatctggtgattagaagtcattttgatgaggtgaagtccattgctaatcagattcaagaggactggaaaagtcttctaacagactgctttccaaagattcttgtaaatattcttccttattttgcctatgagggtaccagagacagtgggatggcacagcaaagagagactgctaccaaggtctatgatatgcttaaaagtgaaaacttattgggaaaacagattgatcacttattcattagtaatttaccagagattgtggtggagttattgatgacgttacatgagccagcaaattctagtgccagtcagagcactgacctctgtgacttttcaggggatttggatcctgctcctaatccacctcattttccatcgcatgtgattaaagcaacatttgcctatatcagcaattgtcataaaaccaagttaaaaagcattttagaaattctttccaaaagccctgattcctatcagaaaattcttcttgccatatgtgagcaagcagctgaaacaaataatgtttataagaagcacagaattcttaaaatatatcacctgtttgttagtttattactgaaagatataaaaagtggcttaggaggagcttgggcctttgttcttcgagacgttatttatactttgattcactatatcaaccaaaggccttcttgtatcatggatgtgtcattacgtagcttctccctttgttgtgacttattaagtcaggtttgccagacagccgtgacttactgtaaggatgctctagaaaaccatcttcatgttattgttggtacacttataccccttgtgtatgagcaggtggaggttcagaaacaggtattggacttgttgaaatacttagtgatagataacaaggataatgaaaacctctatatcacgattaagcttttagatccttttcctgaccatgttgtttttaaggatttgcgtattactcagcaaaaaatcaaatacagtagaggacccttttcactcttggaggaaattaaccattttctctcagtaagtgtttatgatgcacttccattgacaagacttgaaggactaaaggatcttcgaagacaactggaactacataaagatcagatggtggacattatgagagcttctcaggataatccgcaagatgggattatggtgaaactagttgtcaatttgttgcagttatccaagatggcaataaaccacactggtgaaaaagaagttctagaggctgttggaagctgcttgggagaagtgggtcctatagatttctctaccatagctatacaacatagtaaagatgcatcttataccaaggcccttaagttatttgaagataaagaacttcagtggaccttcataatgctgacctacctgaataacacactggtagaagattgtgtcaaagttcgatcagcagctgttacctgtttgaaaaacattttagccacaaagactggacatagtttctgggagatttataagatgacaacagatccaatgctggcctatctacagccttttagaacatcaagaaaaaagtttttagaagtacccagatttgacaaagaaaacccttttgaaggcctggatgatataaatctgtggattcctctaagtgaaaatcatgacatttggataaagacactgacttgtgcttttttggacagtggaggcacaaaatgtgaaattcttcaattattaaagccaatgtgtgaagtgaaaactgacttttgtcagactgtacttccatacttgattcatgatattttactccaagatacaaatgaatcatggagaaatctgctttctacacatgttcagggatttttcaccagctgtcttcgacacttctcgcaaacgagccgatccacaacccctgcaaacttggattcagagtcagagcactttttccgatgctgtttggataaaaaatcacaaagaacaatgcttgctgttgtggactacatgagaagacaaaagagaccttcttcaggaacaatttttaatgatgctttctggctggatttaaattatctagaagttgccaaggtagctcagtcttgtgctgctcactttacagctttactctatgcagaaatctatgcagataagaaaagtatggatgatcaagagaaaagaagtcttgcatttgaagaaggaagccagagtacaactatttctagcttgagtgaaaaaagtaaagaagaaactggaataagtttacaggatcttctcttagaaatctacagaagtataggggagccagatagtttgtatggctgtggtggagggaagatgttacaacccattactagactacgaacatatgaacacgaagcaatgtggggcaaagccctagtaacatatgacctcgaaacagcaatcccctcatcaacacgccaggcaggaatcattcaggccttgcagaatttgggactctgccatattctttccgtctatttaaaaggattggattatgaaaataaagactggtgtcctgaactagaagaacttcattaccaagcagcatggaggaatatgcagtgggaccattgcacttccgtcagcaaagaagtagaaggaaccagttaccatgaatcattgtacaatgctctacaatctctaagagacagagaattctctacattttatgaaagtctcaaatatgccagagtaaaagaagtggaagagatgtgtaagcgcagccttgagtctgtgtattcgctctatcccacacttagcaggttgcaggccattggagagctggaaagcattggggagcttttctcaagatcagtcacacatagacaactctctgaagtatatattaagtggcagaaacactcccagcttctcaaggacagtgattttagttttcaggagcctatcatggctctacgcacagtcattttggagatcctgatggaaaaggaaatggacaactcacaaagagaatgtattaaggacattctcaccaaacaccttgtagaactctctatactggccagaactttcaagaacactcagctccctgaaagggcaatatttcaaattaaacagtacaattcagttagctgtggagtctctgagtggcagctggaagaagcacaagtattctgggcaaaaaaggagcagagtcttgccctgagtattctcaagcaaatgatcaagaagttggatgccagctgtgcagcgaacaatcccagcctaaaacttacatacacagaatgtctgagggtttgtggcaactggttagcagaaacgtgcttagaaaatcctgcggtcatcatgcagacctatctagaaaaggcagtagaagttgctggaaattatgatggagaaagtagtgatgagctaagaaatggaaaaatgaaggcatttctctcattagcccggttttcagatactcaataccaaagaattgaaaactacatgaaatcatcggaatttgaaaacaagcaagctctcctgaaaagagccaaagaggaagtaggtctccttagggaacataaaattcagacaaacagatacacagtaaaggttcagcgagagctggagttggatgaattagccctgcgtgcactgaaagaggatcgtaaacgcttcttatgtaaagcagttgaaaattatatcaactgcttattaagtggagaagaacatgatatgtgggtattccggctttgttccctctggcttgaaaattctggagtttctgaagtcaatggcatgatgaagagagacggaatgaagattccaacatataaatttttgcctcttatgtaccaattggctgctagaatggggaccaagatgatgggaggcctaggatttcatgaagtcctcaataatctaatctctagaatttcaatggatcacccccatcacactttgtttattatactggccttagcaaatgcaaacagagatgaatttctgactaaaccagaggtagccagaagaagcagaataactaaaaatgtgcctaaacaaagctctcagcttgatgaggatcgaacagaggctgcaaatagaataatatgtactatcagaagtaggagacctcagatggtcagaagtgttgaggcactttgtgatgcttatattatattagcaaacttagatgccactcagtggaagactcagagaaaaggcataaatattccagcagaccagccaattactaaacttaagaatttagaagatgttgttgtccctactatggaaattaaggtggaccacacaggagaatatggaaatctggtgactatacagtcatttaaagcagaatttcgcttagcaggaggtgtaaatttaccaaaaataatagattgtgtaggttccgatggcaaggagaggagacagcttgttaagggccgtgatgacctgagacaagatgctgtcatgcaacaggtcttccagatgtgtaatacattactgcagagaaacacggaaactaggaagaggaaattaactatctgtacttataaggtggttcccctctctcagcgaagtggtgttcttgaatggtgcacaggaactgtccccattggtgaatttcttgttaacaatgaagatggtgctcataaaagatacaggccaaatgatttcagtgcctttcagtgccaaaagaaaatgatggaggtgcaaaaaaagtcttttgaagagaaatatgaagtcttcatggatgtttgccaaaattttcaaccagttttccgttacttctgcatggaaaaattcttggatccagctatttggtttgagaagcgattggcttatacgcgcagtgtagctacttcttctattgttggttacatacttggacttggtgatagacatgtacagaatatcttgataaatgagcagtcagcagaacttgtacatatagatctaggtgttgcttttgaacagggcaaaatccttcctactcctgagacagttccttttagactcaccagagatattgtggatggcatgggcattacgggtgttgaaggtgtcttcagaagatgctgtgagaaaaccatggaagtgatgagaaactctcaggaaactctgttaaccattgtagaggtccttctatatgatccactctttgactggaccatgaatcctttgaaagctttgtatttacagcagaggccggaagatgaaactgagcttcaccctactctgaatgcagatgaccaagaatgcaaacgaaatctcagtgatattgaccagagtttcaacaaagtagctgaacgtgtcttaatgagactacaagagaaactgaaaggagtggaagaaggcactgtgctcagtgttggtggacaagtgaatttgctcatacagcaggccatagaccccaaaaatctcagccgacttttcccaggatggaaagcttgggtgtgatcttcagtatatgaattaccctttcattcagcctttagaaattatattttagcctttatttttaacctgccaacatactttaagtagggattaatatttaagtgaactattgtgggtttttttgaatgttggttttaatacttgatttaatcaccactcaaaaatgttttgatggtcttaaggaacatctctgctttcactctttagaaataatggtcattcgggctgggcgcagcggctcacgcctgtaatcccagcactttgggaggccgaggtgagcggatcacaaggtcaggagttcgagaccagcctggccaagagaccagcctggccagtatggtgaaaccctgtctctactaaaaatacaaaaattagccgagcatggtggcgggcacctgtagtcccagctactcgagaggctgaggcaggagaatctcttgaacctgggaggtgaaggttgctgtgggccaaaatcatgccattgcactccagcctgggtgacaagagcgaaactccatctcaaaaa

SEQ ID NO: 1768 - protein, 2000 aa, Homo sapien
MSLVLNDLLICCRQLEHDRATERKKEVEKFKRLIRDPETIKHLDRHSDSKQGKYLNWDAVFRFLQKYIQKETECLRIAKPNVSASTQASRQKKMQEISSLVKYFIKCANRRAPRLKCQELLNYIMDTVKDSSNGAIYGADCSNILLKDILSVRKYWCEISQQQWLELFSVYFRLYLKPSQDVHRVLVARIIHAVTKGCCSQTDGLNSKFLDFFSKAIQCARQEKSSSGLNHILAALTIFLKTLAVNFRIRVCELGDEILPTLLYIWTQHRLNDSLKEVIIELFQLQIYIHHPKGAKTQEKGAYESTKWRSILYNLYDLLVNEISHIGSRGKYSSGFRNIAVKENLIELMADICHQVFNEDTRSLEISQSYTTTQRESSDYSVPCKRKKIELGWEVIKDHLQKSQNDFDLVPWLQIATQLISKYPASLPNCELSPLLMILSQLLPQQRHGERTPYVLRCLTEVALCQDKRSNLESSQKSDLLKLWNKIWCITFRGISSEQIQAENFGLLGAIIQGSLVEVDREFWKLFTGSACRPSCPAVCCLTLALTTSIVPGAVKMGIEQNMCEVNRSFSLKESIMKWLLFYQLEGDLENSTEVPPILHSNFPHLVLEKILVSLTMKNCKAAMNFFQSVPECEHHQKDKEELSFSEVEELFLQTTFDKMDFLTIVRECGIEKHQSSIGFSVHQNLKESLDRCLLGLSEQLLNNYSSEITNSETLVRCSRLLVGVLGCYCYMGVIAEEEAYKSELFQKANSLMQCAGESITLFKNKTNEEFRIGSLRNMMQLCTRCLSNCTKKSPNKIASGFFLRLLTSKLMNDIADICKSLASFIKKPFDRGEVESMEDDTNGNLMEVEDQSSMNLFNDYPDSSVSDANEPGESQSTIGAINPLAEEYLSKQDLLFLDMLKFLCLCVTTAQTNTVSFRAADIRRKLLMLIDSSTLEPTKSLHLHMYLMLLKELPGEEYPLPMEDVLELLKPLSNVCSLYRRDQDVCKTILNHVLHVVKNLGQSNMDSENTRDAQGQFLTVIGAFWHLTKERKYIFSVRMALVNCLKTLLEADPYSKWAILNVMGKDFPVNEVFTQFLADNHHQVRMLAAESINRLFQDTKGDSSRLLKALPLKLQQTAFENAYLKAQEGMREMSHSAENPETLDEIYNRKSVLLTLIAVVLSCSPICEKQALFALCKSVKENGLEPHLVKKVLEKVSETFGYRRLEDFMASHLDYLVLEWLNLQDTEYNLSSFPFILLNYTNIEDFYRSCYKVLIPHLVIRSHFDEVKSIANQIQEDWKSLLTDCFPKILVNILPYFAYEGTRDSGMAQQRETATKVYDMLKSENLLGKQIDHLFISNLPEIVVELLMTLHEPANSSASQSTDLCDFSGDLDPAPNPPHFPSHVIKATFAYISNCHKTKLKSILEILSKSPDSYQKILLAICEQAAETNNVYKKHRILKIYHLFVSLLLKDIKSGLGGAWAFVLRDVIYTLIHYINQRPSCIMDVSLRSFSLCCDLLSQVCQTAVTYCKDALENHLHVIVGTLIPLVYEQVEVQKQVLDLLKYLVIDNKDNENLYITIKLLDPFPDHVVFKDLRITQQKIKYSRGPFSLLEEINHFLSVSVYDALPLTRLEGLKDLRRQLELHKDQMVDIMRASQDNPQDGIMVKLVVNLLQLSKMAINHTGEKEVLEAVGSCLGEVGPIDFSTIAIQHSKDASYTKALKLFEDKELQWTFIMLTYLNNTLVEDCVKVRSAAVTCLKNILATKTGHSFWEIYKMTTDPMLAYLQPFRTSRKKFLEVPRFDKENPFEGLDDINLWIPLSENHDIWIKTLTCAFLDSGGTKCEILQLLKPMCEVKTDFCQTVLPYLIHDILLQDTNESWRNLLSTHVQGFFTSCLRHFSQTSRSTTPANLDSESEHFFRCCLDKKSQRTMLAVVDYMRRQKRPSSGTIFNDAFWLDLNYLEVAKVAQSCAAHFTALLYAEIYADKKSMDDQEKRSLAFEEGSQSTTISSLSEKSKEETGIS

SEQ ID NO: 1769 - DNA, 1410 bp, Homo sapien
cgcgcctcgggcggtacccagccagtccccagcgccgcgctaccgcgctgaccggccctccagacgcctcccggtacccgggaccccagcccggccgctcgcccgcagcccgccggccgcacacgtccccggagccgggcctagggcgggcggcagcggcggctcggcgcagtcaggctgggctctgtagcgtccccatggccgcggccggctggcgggacggctccggccaggagaagtaccggctcgtggtggtcggcgggggcggcgtgggcaagtcggcgctcaccatccagttcatccagtcctattttgtaacggattatgatccaaccattgaagattcttacacaaagcagtgtgtgatagatgacagagcagcccggctagatattttggatacagcaggacaagaagagtttggagccatgagagaacagtatatgaggactggcgaaggcttcctgttggtcttttcagtcacagatagaggcagttttgaagaaatctataagtttcaaagacagattctcagagtaaaggatcgtgatgagttcccaatgattttaattggtaataaagcagatctggatcatcaaagacaggtaacacaggaagaaggacaacagttagcacggcagcttaaggtaacatacatggaggcatcagcaaagattaggatgaatgtagatcaagctttccatgaacttgtccgggttatcaggaaatttcaagagcaggaatgtcctccttcaccagaaccaacacggaaagaaaaagacaagaaaggctgccattgtgtcattttctagaatcccttcagttttagctaccaacggccaggaaaagccctcatcttctctttctctcctcagtttacatcttgttggtacctttctagccttagacaaatgatcaccatgttagccttagaccaagaagctggctagtcctttctgtgaagctaatacaatggtcatttccagacaaatttaaaggaaacactaaggctgcttcaaagattatctgattcctttaaaatatatgtctatatacacagacatgctctttttttaagtgcttacattttaatagagatgaatcagttttggaatctaagctgtttgccaagctgaagctacaggttgtgaaataatttttaacttttggaatcatactgcctactgttactctaaatagaaatatagggttttttttaatgtgaatttttgcctatctttaaacatttcaatgtcagcctttgttaaccttaaatacactgaattgaatctacaaaagtgaaccatctcagacctttactgatactacaacttttgttttctgatggccaaaataccaaatgcctgttgtatttatggattaaaaactgcttataaaaaaaaaaaaaaa

SEQ ID NO: 1770 - protein, 204 aa, Homo sapien
MAAAGWRDGSGQEKYRLVVVGGGGVGKSALTIQFIQSYFVTDYDPTIEDSYTKQCVIDDRAARLDILDTAGQEEFGAMREQYMRTGEGFLLVFSVTDRGSFEEIYKFQRQILRVKDRDEFPMILIGNKADLDHQRQVTQEEGQQLARQLKVTYMEASAKIRMNVDQAFHELVRVIRKFQEQECPPSPEPTRKEKDKKGCHCVIF

SEQ ID NO: 1771 - DNA, 874 bp, Homo sapien
gctgcggccgcccgcgcggacccggcgagaggcggcggcgggagcggcggtgatggacgggtccggggagcagcccagaggcggggggcccaccagctctgagcagatcatgaagacaggggcccttttgcttcagggtttcatccaggatcgagcagggcgaatggggggggaggcacccgagctggccctggacccggtgcctcaggatgcgtccaccaagaagctgagcgagtgtctcaagcgcatcggggacgaactggacagtaacatggagctgcagaggatgattgccgccgtggacacagactccccccgagaggtctttttccgagtggcagctgacatgttttctgacggcaacttcaactggggccgggttgtcgcccttttctactttgccagcaaactggtgctcaaggccctgtgcaccaaggtgccggaactgatcagaaccatcatgggctggacattggacttcctccgggagcggctgttgggctggatccaagaccagggtggttgggtgagactcctcaagcctcctcacccccaccaccgcgccctcaccaccgcccctgccccaccgtccctgccccccgccactcctctgggaccctgggccttctggagcaggtcacagtggtgccctctccccatcttcagatcatcagatgtggtctataatgcgttttccttacgtgtctgatcaatccccgattcatctaccctgctgacctcccagtgacccctgacctcactgtgaccttgacttgattagtgccttctgccctccctggagcctccactgcctctggaattgctcaagttcattgatgaccctctgaccctagctctttcctttttttttttt

SEQ ID NO: 1772 - protein, 218 aa, Homo sapien
MDGSGEQPRGGGPTSSEQIMKTGALLLQGFIQDRAGRMGGEAPELALDPVPQDASTKKLSECLKRIGDELDSNMELQRMIAAVDTDSPREVFFRVAADMFSDGNFNWGRVVALFYFASKLVLKALCTKVPELIRTIMGWTLDFLRERLLGWIQDQGGWVRLLKPPHPHHRALTTAPAPPSLPPATPLGPWAFWSRSQWCPLPIFRSSDVVYNAFSLRV

SEQ ID NO: 1773 - DNA, 1542 bp, Homo sapien
ctcctcttcactcgcgagccctcggacatggtggcccccggctccgtgaccagccggctgggctcggtattccccttcctgctagtcctggtggatctgcagtacgaaggtgctgaatgtggagtaaatgcagatgttgagaaacatcttgaattgggcaagaaattacttgcagctggacagctagctgatgctttatctcagtttcatgctgccgtagatggtgaccctgataactatattgcttattatcggagggctactgtctttttagctatgggcaaatcaaaagctgcacttcctgatttaactaaagtgattcaattgaagatggacttcactgcagcaagattacagagaggtcacttattactcaaacaaggaaaacttgatgaagcagaagatgattttaaaaaagtgctcaaatctaatccaagtgaaaatgaagaaaaggaagcacagtctcaacttataaaatctgatgaaatgcagcgtttgcgttcacaagcacttaacgcttttggaagtggagattatactgctgctatagccttccttgataagattttagaggtttgtgtttgggatgcagaactacgggaacttcgagctgaatgttttataaaagaaggagaacctaggaaagctataagtgacttaaaagctgcgtcaaagttgaagaatgataatactgaagcgttttataaaataagcacactgtactaccaactaggagaccacgaactgtccctcagtgaagttcgggaatgtcttaaacttgaccaggatcataaaaggtgttttgcacactataaacaagtaaagaaacttaataagctgattgagtcagctgaagagctcatcagagatggcagatacacagatgctaccagcaaatatgaatctgtcatgaaaacagagccaagcattgctgaatatacagttcgttcaaaggagaggatttgccactgcttttctaaggacgagaagcctgttgaagctattagggtttgttctgaagttttacagatggaacctgacaatgtgaatgccctgaaagatcgagcagaggcctatttgatagaggaaatgtatgatgaagctattcaggattatgaaactgctcaggaacacaatgaaaatgatcagcagattcgagaaggtctagagaaagcacaaagattattgaaacagtcgcagaaacgagattattataaaatcttgggagtaaaaagaaatgccaaaaagcaagaaattattaaagcataccgaaaattagcactgcagtggcacccagataacttccagaatgaagaagaaaagaaaaaagctgagaaaaagttcattgatatagcagctgctaaagaagtcctctctgatccagaaatgagaaagaagtttgacgacggagaagatcctttggatgcagagagccagcaaggaggcggcggcaaccctttccacagaagctggaactcatggcaagggttcaatcccttcagctcaggcggaccatttagatttaaattccacttcaattaa

SEQ ID NO: 1774 - protein, 504 aa, Homo sapien
MVAPGSVTSRLGSVFPFLLVLVDLQYEGAECGVNADVEKHLELGKKLLAAGQLADALSQFHAAVDGDPDNYIAYYRRATVFLAMGKSKAALPDLTKVIQLKMDFTAARLQRGHLLLKQGKLDEAEDDFKKVLKSNPSENEEKEAQSQLIKSDEMQRLRSQALNAFGSGDYTAAIAFLDKILEVCVWDAELRELRAECFIKEGEPRKAISDLKAASKLKNDNTEAFYKISTLYYQLGDHELSLSEVRECLKLDQDHKRCFAHYKQVKKLNKLIESAEELIRDGRYTDATSKYESVMKTEPSIAEYTVRSKERICHCFSKDEKPVEAIRVCSEVLQMEPDNVNALKDRAEAYLIEEMYDEAIQDYETAQEHNENDQQIREGLEKAQRLLKQSQKRDYYKILGVKRNAKKQEIIKAYRKLALQWHPDNFQNEEEKKKAEKKFIDIAAAKEVLSDPEMRKKFDDGEDPLDAESQQGGGGNPFHRSWNSWQGFNPFSSGGPFRFKFHFN

SEQ ID NO: 1775 - DNA, 1083 bp, Homo sapien
atggacccagaagaaacttcagtttatttggattattactatgctacgagcccaaactctgacatcagggagacccactcccatgttccttacacctctgtcttccttccagtcttttacacagctgtgttcctgactggagtgctggggaaccttgttctcatgggagcgttgcatttcaaacccggcagccgaagactgatcgacatctttatcatcaatctggctgcctctgacttcatttttcttgtcacattgcctctctgggtggataaagaagcatctctaggactgtggaggacgggctccttcctgtgcaaagggagctcctacatgatctccgtcaatatgcactgcagtgtcctcctgctcacttgcatgagtgttgaccgctacctggccattgtgtggccagtcgtatccaggaaattcagaaggacagactgtgcatatgtagtctgtgccagcatctggtttatctcctgcctgctggggttgcctactcttctgtccagggagctcacgctgattgatgataagccatactgtgcagagaaaaaggcaactccaattaaactcatatggtccctggtggccttaattttcaccttttttgtccctttgttgagcattgtgacctgctactgttgcattgcaaggaagctgtgtgcccattaccagcaatcaggaaagcacaacaaaaagctgaagaaatctataaagatcatctttattgtcgtggcagcctttcttgtctcctggctgcccttcaatactttcaagttcctggccattgtctctgggttgcggcaagaacactatttaccctcagctattcttcagcttggtatggaggtgagtggacccttggcatttgccaacagctgtgtcaaccctttcatttactatatcttcgacagctacatccgccgggccattgtccactgcttgtgcccttgcctgaaaaactatgactttgggagtagcactgagacatcagatagtcacctcactaaggctctctccaccttcattcatgcagaagattttgccaggaggaggaagaggtctgtgtcactctaa

SEQ ID NO: 1776 - protein, 360 aa, Homo sapien
MDPEETSVYLDYYYATSPNSDIRETHSHVPYTSVFLPVFYTAVFLTGVLGNLVLMGALHFKPGSRRLIDIFIINLAASDFIFLVTLPLWVDKEASLGLWRTGSFLCKGSSYMISVNMHCSVLLLTCMSVDRYLAIVWPVVSRKFRRTDCAYVVCASIWFISCLLGLPTLLSRELTLIDDKPYCAEKKATPIKLIWSLVALIFTFFVPLLSIVTCYCCIARKLCAHYQQSGKHNKKLKKSIKIIFIVVAAFLVSWLPFNTFKFLAIVSGLRQEHYLPSAILQLGMEVSGPLAFANSCVNPFIYYIFDSYIRRAIVHCLCPCLKNYDFGSSTETSDSHLTKALSTFIHAEDFARRRKRSVSL

SEQ ID NO: 1777 - DNA, 597 bp, Homo sapien
atggcaaagcaaccttctgatgtaagttctgagtgtgaccgagaaggtagacaattgcagcctgcggagaggcctccccagctcagacctggggcccctacctccctacagacagagccacaaggtaatcctgaaggcaatcacggaggtgaaggggacagctgcccccacggcagccctcagggcccgctggccccacctgccagccctggcccttttgctaccagatccccgcttttcatctttatgagaagatcctccctgctgtctcgatcctccagtgggtatttctcttttgacacagacaggagcccagcacccatgagttgtgacaaatcaacacaaaccccaagtcctccttgccaggccttcaaccactatctcagtgcaatggcttccatgaggcaggctgaacctgcagatatgcgcccagagatatggatcgcccaagagttgcggcgtatcggagacgagtttaacgcttactatgcaaggagggtatttttgaataattaccaagcagccgaagaccacccacgaatggttatcttacgactgttacgttacattgtccgcctggtgtggagaatgcattga

SEQ ID NO: 1778 - protein, 198 aa, Homo sapien
MAKQPSDVSSECDREGRQLQPAERPPQLRPGAPTSLQTEPQGNPEGNHGGEGDSCPHGSPQGPLAPPASPGPFATRSPLFIFMRRSSLLSRSSSGYFSFDTDRSPAPMSCDKSTQTPSPPCQAFNHYLSAMASMRQAEPADMRPEIWIAQELRRIGDEFNAYYARRVFLNNYQAAEDHPRMVILRLLRYIVRLVWRMH

SEQ ID NO: 1779 - DNA, 257 bp, Homo sapien
accacgcttttcatctgtcccgctgcgtgttttcctcttgatcgggaactcctgcttctccttgcctcgaaatggaccccaactgctcctgctcgcctgttggctcctgtgcctgtgccggctcctgcaaatgcaaagagtgcaaatgcacctcctgcaagaagagctgctgctcctgctgccctgtcggctgtgccaagtgtgcccagggctgcatctgcaaagggacgtcagacaagtgcagctgctgtgcctga

SEQ ID NO: 1780 - protein, 61 aa, Homo sapien; identical to SEQ ID NO: 1116

SEQ ID NO: 1781 - DNA, 2010 bp, Homo sapien
atgtggctcttcttcgggatcactggattgctgacggcagccctctcaggtcatccatctccagccccacctgaccagctcaacaccagcagtgcagagagtgagctctgggagccaggggagcggcttccggtccgtctgacaaacgggagcagcagctgcagcgggacggtggaggtgcggctcgaggcgtcctgggagcccgcgtgcggggcgctctgggacagccgcgccgccgaggccgtgtgccgagcactgggctgcggcggggcggaggccgcctctcagctcgccccgccgacccctgagctgccgcccccgcctgcagccgggaacaccagcgtagcagctaatgccactctggccggggcgcccgccctcctgtgcagcggcgccgagtggcggctctgcgaggtggtggagcacgcgtgccgcagcgacgggaggcgggcccgtgtcacctgtgcagagaaccgcgcgctgcgcctggtggacggtggcggcgcctgcgccggccgcgtggagatgctggagcatggcgagtggggatcagtgtgcgatgacacttgggacctggaggacgcccacgtggtgtgcaggcaactgggctgcggctgggcagtccaggccctgcccggcttgcacttcacgcccggccgcgggcctatccaccgggaccaggtgaactgctcgggggccgaagcttacctgtgggactgcccggggctgccaggacagcactactgcggccacaaagaggacgcgggcgtggtgtgctcagagcaccagtcctggcgcctgacagggggcgctgaccgctgcgaggggcaggtggaggtacacttccgaggggtctggaacacagtgtgtgacagtgagtggtacccatcggaggccaaggtgctctgccagtccttgggctgtggaactgcggttgagaggcccaaggggctgccccactccttgtccggcaggatgtactactcatgcaatggggaggagctcaccctctccaactgctcctggcggttcaacaactccaacctctgcagccagtcgctggcagccagggtcctctgctcagcttcccggagtttgcacaatctgtccactcccgaagtccctgcaagtgttcagacagtcactatagaatcttctgtgacagtgaaaatagagaacaaggaatctcgggagctaatgctcctcatcccctccatcgttctgggaattctcctccttggctccctcatcttcatagccttcatcctcttgagaattaaaggaaaatatgccctccccgtaatggtgaaccaccagcacctacccaccaccatcccggcagggagcaatagctatcaaccggtccccatcaccatccccaaagaagttttcatgctgcccatccaggtccaggccccgccccctgaggactcagactctggctcggactcagactatgagcactatgacttcagcgcccagcctcctgtggccctgaccaccttctacaattcccagcggcatcgggtcacagatgaggaggtccagcaaagcaggttccagatgccacccttggaggaaggacttgaagagttgcatgcctcccacatcccaactgccaaccctggacactgcattacagacccgccatccctgggccctcagtatcacccgaggagcaacagtgagtcgagcacctcttcgggggaggattactgcaatagtcccaaaagcaagctgcctccatggaacccccaggtgttttcttcagagaggagttccttcctggagcagcccccaaacttggagctggccggcacccagccagccttttcagcagggcccccggctgatgacagctccagcacctcatccggggagtggtaccagaacttccagccaccaccccagcccccttcggaggagcagtttggctgtccagggtcccccagccctcagcctgactccaccgacaacgatgactacgatgacatcagcgcagcctaggcc

SEQ ID NO: 1782 - protein, 668 aa, Homo sapien
MWLFFGITGLLTAALSGHPSPAPPDQLNTSSAESELWEPGERLPVRLTNGSSSCSGTVEVRLEASWEPACGALWDSRAAEAVCRALGCGGAEAASQLAPPTPELPPPPAAGNTSVAANATLAGAPALLCSGAEWRLCEVVEHACRSDGRRARVTCAENRALRLVDGGGACAGRVEMLEHGEWGSVCDDTWDLEDAHVVCRQLGCGWAVQALPGLHFTPGRGPIHRDQVNCSGAEAYLWDCPGLPGQHYCGHKEDAGVVCSEHQSWRLTGGADRCEGQVEVHFRGVWNTVCDSEWYPSEAKVLCQSLGCGTAVERPKGLPHSLSGRMYYSCNGEELTLSNCSWRFNNSNLCSQSLAARVLCSASRSLHNLSTPEVPASVQTVTIESSVTVKIENKESRELMLLIPSIVLGILLLGSLIFIAFILLRIKGKYALPVMVNHQHLPTTIPAGSNSYQPVPITIPKEVFMLPIQVQAPPPEDSDSGSDSDYEHYDFSAQPPVALTTFYNSQRHRVTDEEVQQSRFQMPPLEEGLEELHASHIPTANPGHCITDPPSLGPQYHPRSNSESSTSSGEDYCNSPKSKLPPWNPQVFSSERSSFLEQPPNLELAGTQPAFSAGPPADDSSSTSSGEWYQNFQPPPQPPSEEQFGCPGSPSPQPDSTDNDDYDDISAA

SEQ ID NO: 1783 - DNA, 2978 bp, Homo sapien
aagggaagtcggctcaggaggaccgagtgagggcaccgaggcgggacgcacgcacccggcgaaggttgctccaccccggtcaggatcaggcgagggggaaccagcctgagtgcagctgccaactcccgccgagtgcgtctgcgaactcccggagcggagtcccgcgtgccgccacctccccgcggacgcactctcctcgctcccccgggccccgcgtcctccccccggccacccttccccacttttccccccttttccaatcacatggcattttaagaatgccggaaagatggcggtagcggcggcggcggcggcggctgggccggctggcgcgggaggcggccgggcgcagcggagcgggctgctggaagttttggtgcgggatcgctggcacaaagttctggtgaacttgagcgaggacgccctggttctgagcagcgaggagggcgctgcggcgtacaacggcatcgggaccgccaccaatggctcgttctgcaggggcgccggggctgggcacccgggcgcgggcggcgcgcagcccccggactcgcccgccggggtccgcaccgctttcaccgacctgcccgagcaggtgcccgagtccatctcgaaccagaagcgtggcgtgaaggtgctgaagcaggagctgggcgggctggggatcagcatcaaggggggcaaggagaacaagatgcccatcctcatcagcaagatcttcaaggggctggcggcggaccagacccaagccctgtacgtgggcgacgccatcctgtccgtgaacggagccgacctgcgggacgccacccacgacgaggcggtgcaggcgttgaagcgcgcgggcaaggaagtgctgctggaagtgaagtacatgcgagaagccacgccctatgtgaagaaaggatccccagtatccgagattgggtgggaaacacctccgcctgaatcccctcggttagggggcagcacctcagaccccccgtcatcgcagtccttctccttccacagagaccggaaaagcatccccctcaaaatgtgctacgtcactcggagtatggccttggccgaccctgagaacaggcagcttgaaatccactctccagatgctaagcacacggtgatcctaaggagcaaggactcagccacggcccaggcatggttcagtgccatccattccaacgttaatgacctgctgacccgagtgattgctgaggtcagagagcagctggggaaaacaggcattgctgggagccgagagattaggcatcttggctggcttgcagaaaaggtgccaggggagagcaagaaacagtggaaaccagccctggttgtgctgactgagaaagaccttttaatctatgacagcatgccacggaggaaggaagcctggttcagcccagttcacacataccctcttcttgccaccaggctggtccattcaggtccaggaaagggatcaccccaggctggtgtggatctgtcctttgcaacgcgaactggtaccaggcaagggattgaaacacatctcttcagagcagagaccagcagggacctctcccactggacaaggagcatagtacagggttgccacaattctgctgaactcattgctgaaatcagcactgcttgcacctacaaaaaccaggagtgccgtttgaccatacattatgagaatggattttctattaccactgaaccacaggagggtgcctttcccaagaccatcatacagtctccttatgaaaagctcaaaatgtcttcagatgatggaatcaggatgctgtatttagattttggaggcaaagatggagagattcaactggaccttcattcctgccccaagccaattgttttcatcattcattccttcctgtcagctaagattacaagactgggcttggtggcctgaagacaggggtgacttgcctttgagaaaagaagggctgcaatgccaccagagaacgtgatgtcagacaccatctgtagtgagcagcgcaccagatgtagcgtgctacagtcagctttagctctcaagagtcgtatgtaactgtcccagactcctctgtcagtttcagcaactacaagggataccctgcgaaagtaccatgagaaatatcagagtaaaactttctagaacagtacaaggttaaagaggtgaggtgacgggaaatacacagcatagctttgaaataatgacaaccaaggacatgaccattagaacagcatgtgcagatcttaatcatcccagttcctaggcaacttgttcaccaggtacgcaagggccgaatagttgagaaatggacatttttacctactcctcctagccccctatccccagtaacagtgatcccttttcttattgtgatttatttcctaattcttgctgagttgactttcccttgtaggaaaagaaaaatatttcaaatagaaacccaccttttatttaagtatgaagcagctgttactttttaaaaaatgaattatctttcaatggtgtagaatgattccaaagtgtctccattagcatatactgagcaggaattaaataaagcatcagatactgatctgagctgtaagctggtagaatctgagccaaagtagactgcttaaattgataagctttgctaaagagttgtatgcacaaaggatgattaattctgggactatactcacaccaaggtctgctgtcttatagccaagaattacagctttatttatagagagtgaattatgggtattttttcagaaaatattgtcatctgatatacacataaaacaactcacattgttggagttaactaattatccccatttcatggttttcagtggcaacttactgacccttgtttttgcctgtgcttgtatgcatgcattttcaagcaagtaataaagcagcctcatttaattctggataatgctgggttttacatatagactgaatgctataatcaaatctattgacagtatctgcagttctttca

SEQ ID NO: 1784 - protein, 538 aa, Homo sapien [sequence omitted]

SEQ ID NO: 1785 - DNA, 1474 bp, Homo sapien
aaaaagaaatcaagaatgcaattttatttacaatagtcacgccggaaatacctagaaataaatttaactgaggatgtaaaagacctctacaaggagagttcaatgcgtagcgggagcggagagctgaccccagagagccctgggcagccccacctccgccgccggcctagttaccatcacaccccggagagcccgcagctgccgcagccggccccagtcaccatcaccgcaaccatgagcagcgaggccgagacccagcagccgcccgccgccccccccgccgcccccgccctcagcgccgccgacaccaagcccggcactaccggagcggcgcagggagcggtggcccgggcggctcacatcggcggcgctggcgcgggcgacaagaaggtcatcgcaacgaaggttttgggaacagtaaaatggttcaatgtaaggaacggatatggtttcatcaacaggaatgacaccaaggaagatgtatttgtacaccagactgccataaagaagaataaccccaggaagtaccttcgcagtgtaggagatggagagactgtggagtttgatgttgttgaaggagaaaagggtgcggaggcagcaaatgttacaggtcctggtggtgttccagttcaaggcagtaaatatgcagcagaccgtaaccattatagacgctatccacgtcgtaggggtcctccacgcaattaccagcaaaattaccagaatagtgagagtggggaaaagaacgagggatcggagagtgctcccgaagccaggcccaacaacgccggccctacgcaggcgaaggttcccaccttactacatgcggagacctatgggcgtcgaccacagtattccaaccctcctgtgcagggagaagtgatggagggtgctgacaaccagggtgcaggagaacaaggtagaccagtgaggcagatatgtatcggggatatagaccacgattccgcaggggccctcctcgccaaaagacagcctagagaggacggcaatgaagaagataaagaaaatcaaggagatgagacccaaggtcagcagccacctcaagctcggtaccgccgcaacttcaattaccgacgcagacgcccagaaaaccctaaaccacaagatggcaaagagacaaaagcagccgatccaccagctgagaattcgtccgctcccgaggctgagcagggcggggctgagtaaatgccggcttaccatctctaccatcatccggtttagtcatccaacaagaagaaatatgaaattccagcaataagaaatgaacaaaagattggagctgaagacctaaagtgcttgctttttgcccgttgaccagataaatagaactatctgcattatctatgcagcatggggtttttattatgttttacctaaagacgtctctttttggtaataacaaaccgtgttttttaaaaaagcctggtttttctcaatacgcctttaaaggaattcc

SEQ ID NO: 1786 - protein, 322 aa, Homo sapien
MSSEAETQQPPAAPPAAPALSAADTKPGTTGAAQGAVARAAHIGGAGAGDKKVIATKVLGTVKWFNVRNGYGFINRNDTKEDVFVHQTAIKKNNPRKYLRSVGDGETVEFDVVEGEKGAEAANVTGPGGVPVQGSKYAADRNHYRRYPRRRGPPRNYQQNYQNSESGEKNEGSESAPEARPNNAGPTQAKVPTLLHAETYGRRPQYSNPPVQGEVMEGADNQGAGEQGRPVRQICIGDIDHDSAGALLAKRQPREDGNEEDKENQGDETQGQQPPQARYRRNFNYRRRRPENPKPQDGKETKAADPPAENSSAPEAEQGGAE

SEQ ID NO: 1787 - DNA, 589 bp, Homo sapien
ctccgccctctcccactctctctttccggtgtggagtctggagacgacgtgcagaaatggcacctcgaaaggggaaggaaaagaaggaagaacaggtcatcagcctcggacctcaggtggctgaaggagagaatgtatttggtgtctgccatatctttgcatccttcaatgacacttttgtccatgtcactgatctttctggcaaggaaaccatctgccgtgtgactggtgggatgaaggtaaaggcagaccgagatgaatcctcaccatatgctgctatgttggctgcccaggatgtggcccagaggtgcaaggagctgggtatcaccgccctacacatcaaactccgggccacaggaggaaataggaccaagacccctggacctggggcccagtcggccctcagagcccttgcccgctcgggtatgaagatcgggcggattgaggatgtcacccccatcccctctgacagcactcgcaggaaggggggtcgccgtggtcgccgtctgtgaacaagattcctcaaaatattttctgttaataaattgccttcatgtaaaaaaaaaaaaaaaaaaaaaaaaaaaaaaaa

SEQ ID NO: 1788 - protein, 151 aa, Homo sapien [sequence omitted]

SEQ ID NO: 1789 - DNA, 3038 bp, Homo sapien
cggacgcgtgggtcgacccacgcgtccggattgaggggttgactgagcgttgcgagccttagctttctcccgaacgccagcgctgaggacacgatgtcgcggctctcccgctcactgctttgggccgccacctgcctgggcgtgctctgcgtgctgtccgcggacaagaacacgacccagcacccgaacgtgacgactttagcgcccatctccaacgtaacctcggcgccggtgacgtccctcccgctggtcaccactccggcaccagaaacctgtgaaggtcgaaacagctgcgtttcctgttttaatgttagcgttgttaatactacctgcttttggatagaatgtaaagatgagagctattgttcacataactcaacagttagtgattgtcaagtggggaacacgacagacttctgttccgtttccacggccactccagtgccaacagccaattctacagctaaacccacagttcagccctccccttctacaacttccaagacagttactacatcaggtacaacaaataacactgtgactccaacctcacaacctgtgcgaaagtctacctttgatgcagccagtttcattggaggaattgtcctggtcttgggtgtgcaggctgtaattttctttctttataaattctgcaaatctaaagaacgaaattaccacactctgtaaacagacccattgaattaataaggactggtgattcatttgtgtaactcactgaagccaaaatactatcttttaagatgtcccacatggaagacgctattccaggatctttaaatttccatggatgcatataggatgtttgggagcatcatccgtgaagaaaaaatcaattaaatcattgtgttcaacaggaatatttaaaatattctgcatgaatcctgtggctgtcttattttaaatagctgctgctgtgggattatattttttttccttaacatgccaaatataactttctgaaagtgatggaaaatgttgtcttgtgcagacaacatcatggctcttggcagtttaaatttagtaattttaatttagtgaacagaattgagaagaacgtgccaaatgagaatcaattaggtggatttttggctgtcatttcaaaagtggaataaatttattaatttagtagtactaaatggtatccttagattaaaattttgtgcttgataacagctgttttttctacattagaaataagatgccacacaaggaactacattccagatttaaagaaatgaaaggataccattagtgtgtataacagattattgttcatacttgtaaagcatcttatgtcattgagaatataaagaacagtgccttagaagacagtgaaaggtaagctctagcttaatgtctatgatttgttctttgacattaaggaaggtaaggattggtcagaggatgtaacttgatgtgagcagtagtaaacctgttttagatatcatactgttaatattttattgaaaatttatttcagagcggagaaacttaagctaaagtctgttatacagaattgaaagccttcgtatcttgaacctcccaacatttttcttatggctgttgaaaagtatagagctaaattgatttaattacactttcctttgtactttaaaaaaaagtatgctagcactattgtaccttgaaaggatttccaccagactgtcttgagtagtgacttctttggtgaggcaagaaggatatacattattttagaatcatttactatttaaatgagacaatcatattattttagaatcatttattttaaatgagacaatcattttaagttttaagataacagaagtgaccaatgtaatttcacaacacctaaggattttttggttgatcaggttactgtagatttttactgattgtcctggatgaatagactgtgctttttctttttctctcccttccttcttggtttcccatagtataataagcatgcatactttaacttctatagttttctcctttagagggtcgtcttcagttttagaggtttacttctcccttgcctttgactcattggactagtgcagaggctttaagtagtttaaaatgggcttttgcttttctaggtcattaacgttttttatttagtttctttagccaatagtggctgagtttcgcacttgattttcaatattttatagtaagaaatgacaaactgctttgtttcatttcataaacaaactctgcatttagataactattaaaggttgttaagatgaagatttactgtttctttgttactcgttggtacagctgtttgttttacttgcacatttgtacatatacttaatgttttcaagtgccttaattgtttaaaatctctggcttcaaagtttcttggggaaaggtcggtttacctcacattttttgtttccattagtaatattctaggtacctcacaaaatgtattatggtgccatggctgttagtttttagtgagtgctgtaggattaattcgaaaataggcagaattccattcctcccaaggtggcaaaaattagctatactgatgtaattgtcatttacctgggtatgaattccctgacacacattcatgtcaacatatgtagcaaattttgtgaaaacataacaatttgaagcttctgtaattttgagcactgctctaacaacaagcataatataaaattagttagattttgcaagtctacaaatgagctcttgcaacagaactcacagcctttttacttttttcccctaactttagcaatgtagtatcttgagccattaatttttgggtttttttaaaatccagaaggtatatagaaaccttttcagatttttcatctgatttgttcttgcagatgttcttctatcaaataccttattttaccttacagatatttgttgcacaggcagatactgctgtatttagacatttctatttcagttcattaaaaactgcaaaaccaatctgtatcatgtaccaaactgacttaaaataaatctacatgtttattgaaaaaaaaaaaaaaaaaaaa

SEQ ID NO: 1790 - protein, 197 aa, Homo sapien
MSRLSRSLLWAATCLGVLCVLSADKNTTQHPNVTTLAPISNVTSAPVTSLPLVTTPAPETCEGRNSCVSCFNVSVVNTTCFWIECKDESYCSHNSTVSDCQVGNTTDFCSVSTATPVPTANSTAKPTVQPSPSTTSKTVTTSGTTNNTVTPTSQPVRKSTFDAASFIGGIVLVLGVQAVIFFLYKFCKSKERNYHTL

SEQ ID NO: 1791 - DNA, 1648 bp, Homo sapien
ggcacgagtgcgcctcagcccgcgcgctcgcagcttctcgctctcgcctgcctgcccgctcccttgcttgctcgcgctttcgctcgccctctcctcgaggatcgaggggactctgaccacagcctgtggctgggaagggagacagaggcggcggcggctcaggggaaacgaggctgcagtggtggtagtaggaagatgtcgggcgaggacgagcaacaggagcaaactatcgctgaggacctggtcgtgaccaagtataagatggggggcgacatcgccaacagggtacttcggtccttggtggaagcatctagctcaggtgtgtcggtactgagcctgtgtgagaaaggtgatgccatgattatggaagaaacagggaaaatcttcaagaaagaaaaggaaatgaagaaaggtattgcttttcccaccagcatttcggtaaataactgtgtatgtcacttctcccctttgaagagcgaccaggattatattctcaaggaaggtgacttggtaaaaattgaccttggggtccatgtggatggcttcatcgctaatgtagctcacacttttgtggttgatgtagctcaggggacccaagtaacagggaggaaagcagatgttattaaggcagctcacctttgtgctgaagctgccctacgcctggtcaaacctggaaatcagaacacacaagtgacagaagcctggaacaaagttgcccactcatttaactgcacgccaatagaaggtatgctgtcacaccagttgaagcagcatgtcatcgatggagaaaaaaccattatccagaatcccacagaccagcagaagaaggaccatgaaaaagctgaatttgaggtacatgaagtatatgctgtggatgttctcgtcagctcaggagagggcaaggccaaggatgcaggacagagaaccactatttacaaacgagacccctctaaacagtatggactgaaaatgaaaacttcacgtgccttcttcagtgaggtggaaaggcgttttgatgccatgccgtttactttaagagcatttgaagatgagaagaaggctcggatgggtgtggtggagtgcgccaaacatgaactgctgcaaccatttaatgttctctatgagaaggagggtgaatttgttgcccagtttaaatttacagttctgctcatgcccaatggccccatgcggataaccagtggtcccttcgagcctgacctctacaagtctgagatggaggtccaggatgcagagctaaaggccctcctccagagttctgcaagtcgaaaaacccagaaaaagaagaaaaagaaggcctccaagactgcagagaatgccaccagtggggaaacattagaagaaaatgaagctggggactgaggtgggtcccatctccccagcttgctgctcctgccctcatccccttcccaccaaaccccagactctgtgaagtgcagttcttctccacctaggaccgccagcagagcggggggatttccctgcccccaccccagttccccaacccactcccttccaacaacaaccagctccaactgaatttggttttgggaggtgaggcttcccaaccacggaagactactttaaatgaaaaaaagaaattgaataataaaatcaggagttaaaattc

SEQ ID NO: 1792 - protein, 340 aa, Homo sapien
MIMEETGKIFKKEKEMKKGIAFPTSISVNNCVCHFSPLKSDQDYILKEGDLVKIDLGVHVDGFIANVAHTFVVDVAQGTQVTGRKADVIKAAHLCAEAALRLVKPGNQNTQVTEAWNKVAHSFNCTPIEGMLSHQLKQHVIDGEKTIIQNPTDQQKKDHEKAEFEVHEVYAVDVLVSSGEGKAKDAGQRTTIYKRDPSKQYGLKMKTSRAFFSEVERRFDAMPFTLRAFEDEKKARMGVVECAKHELLQPFNVLYEKEGEFVAQFKFTVLLMPNGPMRITSGPFEPDLYKSEMEVQDAELKALLQSSASRKTQKKKKKKASKTAENATSGETLEENEAGD

SEQ ID NO: 1793 - DNA, 937 bp, Homo sapien
gttcttgcctggtgtcggtggttagtttctgcgacttgtgttgggactgctgataggaagatgtcttcaggaaatgctaaaattgggcaccctgcccccaacttcaaagccacagctgttatgccagatggtcagtttaaagatatcagcctgtctgactacaaaggaaaatatgttgtgttcttcttttaccctcttgacttcacctttgtgtgccccacggagatcattgctttcagtgatagggcagaagaatttaagaaactcaactgccaagtgattggtgcttctgtggattctcacttctgtcatctagcatgggtcaatacacctaagaaacaaggaggactgggacccatgaacattcctttggtatcagacccgaagcgcaccattgctcaggattatggggtcttaaaggctgatgaaggcatctcgttcaggggcctttttatcattgatgataagggtattcttcggcagatcactgtaaatgacctccctgttggccgctctgtggatgagactttgagactagttcaggccttccagttcactgacaaacatggggaagtgtgcccagctggctggaaacctggcagtgataccatcaagcctgatgtccaaaagagcaaagaatatttctccaagcagaagtgagcgctgggctgttttagtgccaggctgcggtgggcagccatgagaacaaaacctcttctgtattttttttttccattagtaaaacacaagacttcagattcagccgaattgtggtgtcttacaaggcaggcctttcctacagggggtggagagaccagcctttcttcctttggtaggaatggcctgagttggcgttgtgggcaggctactggtttgtatgatgtattagtagagcaacccattaatcttttgtagtttgtattaaacttgaactgag

SEQ ID NO: 1794 - protein, 199 aa, Homo sapien
MSSGNAKIGHPAPNFKATAVMPDGQFKDISLSDYKGKYVVFFFYPLDFTFVCPTEIIAFSDRAEEFKKLNCQVIGASVDSHFCHLAWVNTPKKQGGLGPMNIPLVSDPKRTIAQDYGVLKADEGISFRGLFIIDDKGILRQITVNDLPVGRSVDETLRLVQAFQFTDKHGEVCPAGWKPGSDTIKPDVQKSKEYFSKQK

SEQ ID NO: 1795 - DNA, 5015 bp, Homo sapien
cgggtggcggctcgggacggaggacgcgctagtgttcttctgtgtggcagttcagaatgatggatcaagctagatcagcattctctaacttgtttggtggagaaccattgtcatatacccggttcagcctggctcggcaagtagatggcgataacagtcatgtggagatgaaacttgctgtagatgaagaagaaaatgctgacaataacacaaaggccaatgtcacaaaaccaaaaaggtgtagtggaagtatctgctatgggactattgctgtgatcgtctttttcttgattggatttatgattggctacttgggctattgtaaaggggtagaaccaaaaactgagtgtgagagactggcaggaaccgagtctccagtgagggaggagccaggagaggacttccctgcagcacgtcgcttatattgggatgacctgaagagaaagttgtcggagaaactggacagcacagacttcaccggcaccatcaagctgctgaatgaaaattcatatgtccctcgtgaggctggatctcaaaaagatgaaaatcttgcgttgtatgttgaaaatcaatttcgtgaatttaaactcagcaaagtctggcgtgatcaacattttgttaagattcaggtcaaagacagcgctcaaaactcggtgatcatagttgataagaacggtagacttgtttacctggtggagaatcctgggggttatgtggcgtatagtaaggctgcaacagttactggtaaactggtccatgctaattttggtactaaaaaagattttgaggatttatacactcctgtgaatggatctatagtgattgtcagagcagggaaaatcacctttgcagaaaaggttgcaaatgctgaaagcttaaatgcaattggtgtgttgatatacatggaccagactaaatttcccattgttaacgcagaactttcattctttggacatgctcatctggggacaggtgacccttacacacctggattcccttccttcaatcacactcagtttccaccatctcggtcatcaggattgcctaatatacctgtccagacaatctccagagctgctgcagaaaagctgtttgggaatatggaaggagactgtccctctgactggaaaacagactctacatgtaggatggtaacctcagaaagcaagaatgtgaagctcactgtgagcaatgtgctgaaagagataaaaattcttaacatctttggagttattaaaggctttgtagaaccagatcactatgttgtagttggggcccagagagatgcatggggccctggagctgcaaaatccggtgtaggcacagctctcctattgaaacttgcccagatgttctcagatatggtcttaaaagatgggtttcagcccagcagaagcattatctttgccagttggagtgctggagactttggatcggttggtgccactgaatggctagagggatacctttcgtccctgcatttaaaggctttcacttatattaatctggataaagcggttcttggtaccagcaacttcaaggtttctgccagcccactgttgtatacgcttattgagaaaacaatgcaaaatgtgaagcatccggttactgggcaatttctatatcaggacagcaactgggccagcaaagttgagaaactcactttagacaatgctgctttccctttccttgcatattctggaatcccagcagtttctttctgtttttgcgaggacacagattatccttatttgggtaccaccatggacacctataaggaactgattgagaggattcctgagttgaacaaagtggcacgagcagctgcagaggtcgctggtcagttcgtgattaaactaacccatgatgttgaattgaacctggactatgagaggtacaacagccaactgctttcatttgtgagggatctgaaccaatacagagcagacataaaggaaatgggcctgagtttacagtggctgtattctgctcgtggagacttcttccgtgctacttccagactaacaacagatttcgggaatgctgagaaaacagacagatttgtcatgaagaaactcaatgatcgtgtcatgagagtggagtatcacttcctctctccctacgtatctccaaaagagtctcctttccgacatgtcttctggggctccggctctcacacgctgccagctttactggagaacttgaaactgcgtaaacaaaataacggtgcttttaatgaaacgctgttcagaaaccagttggctctagctacttggactattcagggagctgcaaatgccctctctggtgacgtttgggacattgacaatgagttttaaatgtgatacccatagcttccatgagaacagcagggtagtctggtttctagacttgtgctgatcgtgctaaattttcagtagggctacaaaacctgatgttaaaattccatcccatcatcttggtactactagatgtctttaggcagcagcttttaatacagggtagataacctgtacttcaagttaaagtgaataaccacttaaaaaatgtccatgatggaatattcccctatctctagaattttaagtgctttgtaatgggaactgcctctttcctgttgttgttaatgaaaatgtcagaaaccagttatgtgaatgatctctctgaatcctaagggctggtctctgctgaaggttgtaagtggtcgcttactttgagtgatcctccaacttcatttgatgctaaataggagataccaggttgaaagaccttctccaaatgagatctaagcctttccataaggaatgtagctggtttcctcattcctgaaagaaacagttaactttcagaagagatgggcttgttttcttgccaatgaggtctgaaatggaggtccttctgctggataaaatgaggttcaactgttgattgcaggaataaggccttaatatgttaacctcagtgtcatttatgaaaagaggggaccagaagccaaagacttagtatattttcttttcctctgtcccttcccccataagcctccatttagttctttgttatttttgtttcttccaaagcacattgaaagagaaccagtttcaggtgtttagttgcagactcagtttgtcagactttaaagaataatatgctgccaaattttggccaaagtgttaatcttaggggagagctttctgtccttttggcactgagatatttattgtttatttatcagtgacagagttcactataaatggtgtttttttaatagaatataattatcggaagcagtgccttccataattatgacagttatactgtcggttttttttaaataaaagcagcatctgctaataaaacccaacagatactggaagttttgcatttatggtcaacacttaagggttttagaaaacagccgtcagccaaatgtaattgaataaagttgaagctaagatttagagatgaattaaatttaattaggggttgctaagaagcgagcactgaccagataagaatgctggttttcctaaatgcagtgaattgtgaccaagttataaatcaatgtcacttaaaggctgtggtagtactcctgcaaaattttatagctcagtttatccaaggtgtaactctaattcccattttgcaaaatttccagtacctttgtcacaatcctaacacattatcgggagcagtgtcttccataatgtataaagaacaaggtagtttttacctaccacagtgtctgtatcggagacagtgatctccatatgttacactaagggtgtaagtaattatcgggaacagtgtttcccataattttcttcatgcaatgacatcttcaaagcttgaagatcgttagtatctaacatgtatcccaactcctataattccctatcttttagttttagttgcagaaacattttgtggtcattaagcattgggtgggtaaattcaaccactgtaaaatgaaattactacaaaatttgaaatttagcttgggtttttgttacctttatggtttctccaggtcctctacttaatgagatagtagcatacatttataatgtttgctattgacaagtcattttaactttatcacattatttgcatgttacctcctataaacttagtgcggacaagttttaatccagaattgaccttttgacttaaagcagggggactttgtatagaaggtttgggggctgtggggaaggagagtcccctgaaggtctgacacgtctgcctacccattcgtggtgatcaattaaatgtaggtatgaataagttcgaagctccgtgagtgaaccatcattataaacgtgatgatcagctgtttgtcatagggcagttggaaacggcctcctagggaaaagttcatagggtctcttcaggttcttagtgtcacttacctagatttacagcctcacttgaatgtgtcactactcacagtctctttaatcttcagttttatctttaatctcctcttttatcttggactgacatttagcgtagctaagtgaaaaggtcatagctgagattcctggttcgggtgttacgcacacgtacttaaatgaaagcatgtggcatgttcatcgtataacacaatatgaatacagggcatgcattttgcagcagtgagtctcttcagaaaacccttttctacagttagggttgagttacttcctatcaagccagtacgtgctaacaggctcaatattcctgaatgaaatatcagactagtgacaagctcctggtcttgagatgtcttctcgttaaggagatgggccttttggaggtaaaggataaaatgaatgagttctgtcatgattcactattctagaacttgcatgacctttactgtgttagctctttgaatgttcttgaaattttagactttctttgtaaacaaataatatgtccttatcattgtataaaagctgttatgtgcaacagtgtggagattccttgtctgatttaataaaatacttaaacactgaaaaaaaaaaaaaaaaaaa

SEQ ID NO: 1796 - protein, 760 aa, Homo sapien
MMDQARSAFSNLFGGEPLSYTRFSLARQVDGDNSHVEMKLAVDEEENADNNTKANVTKPKRCSGSICYGTIAVIVFFLIGFMIGYLGYCKGVEPKTECERLAGTESPVREEPGEDFPAARRLYWDDLKRKLSEKLDSTDFTGTIKLLNENSYVPREAGSQKDENLALYVENQFREFKLSKVWRDQHFVKIQVKDSAQNSVIIVDKNGRLVYLVENPGGYVAYSKAATVTGKLVHANFGTKKDFEDLYTPVNGSIVIVRAGKITFAEKVANAESLNAIGVLIYMDQTKFPIVNAELSFFGHAHLGTGDPYTPGFPSFNHTQFPPSRSSGLPNIPVQTISRAAAEKLFGNMEGDCPSDWKTDSTCRMVTSESKNVKLTVSNVLKEIKILNIFGVIKGFVEPDHYVVVGAQRDAWGPGAAKSGVGTALLLKLAQMFSDMVLKDGFQPSRSIIFASWSAGDFGSVGATEWLEGYLSSLHLKAFTYINLDKAVLGTSNFKVSASPLLYTLIEKTMQNVKHPVTGQFLYQDSNWASKVEKLTLDNAAFPFLAYSGIPAVSFCFCEDTDYPYLGTTMDTYKELIERIPELNKVARAAAEVAGQFVIKLTHDVELNLDYERYNSQLLSFVRDLNQYRADIKEMGLSLQWLYSARGDFFRATSRLTTDFGNAEKTDRFVMKKLNDRVMRVEYHFLSPYVSPKESPFRHVFWGSGSHTLPALLENLKLRKQNNGAFNETLFRNQLALATWTIQGAANALSGDVWDIDNEF

SEQ ID NO: 1797 - DNA, 2742 bp, Homo sapien
gtcactcgtataaaaacctatgctttgaaggttctcgtgtgtctcggcctgcaggtctcgctcagagctgtgtccctgaacatccaccctgctggggtggcttgacgcacttctgtgcaaatctgttcgctcgcaaccctacctacctctctcccgaaccggagaaaaccttcggcggggtccttccgggttttgtgtcgaatctgcggcggcgacccggcgccgcgtcacgcggtggtgaatgtgcggcagtacgcgcgccgcgtcgtttacgcggcgatttcatcatgctccgagccggcggcgcgcgccgcttccgtcgccaccctctctggacagcccagggccgcaggctcatgccctctccgcgtccagtgctgcttagaggtgctcgcgccgctctgctgctgctgctgccgccccggctcttagcccgaccctcgctcctcctccgccggtccctcagcgcggcctcctgcgccccgatctccttgcccgccgccgcctcccggagcagcatggacggcgcgggggctgaggaggtgctggcacctctgaggctagcagtgcgccagcagggagatcttgtgcgaaaactcaaagaagataaagcaccccaagtagacgtagacaaagcagtggctgagctcaaagcccgcaagagggttctggaagcaaaggagctggcgttacagcccaaagatgatattgtagaccgagcaaaaatggaagataccctgaagaggaggtttttctatgatcaagcttttgctatttatggaggtgttagtggtctgtatgactttgggccagttggctgtgctttgaagaacaatattattcagacctggaggcagcactttatccaagaggaacagatcctggagatcgattgcaccatgctcacccctgagccagttttaaagacctctggccatgtagacaaatttgctgacttcatggtgaaagacgtaaaaaatggagaatgttttcgtgctgaccatctattaaaagctcatttacagaaattgatgtctgataagaagtgttctgtcgaaaagaaatcagaaatggaaagtgttttggcccagcttgataactatggacagcaagaacttgcggatctttttgtgaactataatgtaaaatctcccattactggaaatgatctatcccctccagtgtcttttaacttaatgttcaagactttcattgggcctggaggaaacatgcctgggtacttgagaccagaaactgcacaggggattttcttgaatttcaaacgacttttggagttcaaccaaggaaagttgccttttgctgctgcccagattggaaattcttttagaaatgagatctcccctcgatctggactgatcagagtcagagaattcacaatggcagaaattgagcactttgtagatcccagtgagaaagaccaccccaagttccagaatgtggcagaccttcacctttatttgtattcagcaaaagcccaggtcagcggacagtccgctcggaaaatgcgcctgggagatgctgttgaacagggtgtgattaataacacagtattaggctatttcattggccgcatctacctctacctcacgaaggttggaatatctccagataaactccgcttccggcagcacatggagaatgagatggcccattatgcctgtgactgttgggatgcagaatccaaaacatcctacggttggattgagattgttggatgtgctgatcgttcctgttatgacctctcctgtcatgcacgagccaccaaagtcccacttgtagctgagaaacctctgaaagaacccaaaacagtcaatgttgttcagtttgaacccagtaagggagcaattggtaaggcatataagaaggatgcaaaactggtgatggagtatcttgccatttgtgatgagtgctacattacagaaatggagatgctgctgaatgagaaaggggaattcacaattgaaactgaagggaaaacatttcagttaacaaaagacatgatcaatgtgaagagattccagaaaacactatatgtggaagaagttgttccgaatgtaattgaaccttccttcggcctgggtaggatcatgtatacggtatttgaacatacattccatgtacgagaaggagatgaacagagaacattcttcagtttccctgctgtagttgctccattcaaatgttccgtcctcccactgagccaaaaccaggagttcatgccatttgtcaaggaattatcggaagccctgaccaggcatggagtatctcacaaagtagacgattcctctgggtcaatcggaaggcgctatgccaggactgatgagattggcgtggcttttggtgtcaccattgactttgacacagtgaacaagaccccccacactgcaactctgagggaccgtgactcaatgcggcagataagagcagagatctctgagctgcccagcatagtccaagacctagccaatggcaacatcacatgggctgatgtggaggccaggtatcctctgtttgaagggcaagagactggtaaaaaagagacaatcgaggaatgaggacaattttgacaacttttgaccacttgcgctaataaaaaaaaaaaaactactcttatgtccactttacaaaagaaaacagcattgtgattactcccagggaccgtattttatcttcagtggctgcctgattttacccccacaattaaagttgaaggaatcctga

SEQ ID NO: 1798 - protein, 685 aa, Homo sapien
MDGAGAEEVLAPLRLAVRQQGDLVRKLKEDKAPQVDVDKAVAELKARKRVLEAKELALQPKDDIVDRAKMEDTLKRRFFYDQAFAIYGGVSGLYDFGPVGCALKNNIIQTWRQHFIQEEQILEIDCTMLTPEPVLKTSGHVDKFADFMVKDVKNGECFRADHLLKAHLQKLMSDKKCSVEKKSEMESVLAQLDNYGQQELADLFVNYNVKSPITGNDLSPPVSFNLMFKTFIGPGGNMPGYLRPETAQGIFLNFKRLLEFNQGKLPFAAAQIGNSFRNEISPRSGLIRVREFTMAEIEHFVDPSEKDHPKFQNVADLHLYLYSAKAQVSGQSARKMRLGDAVEQGVINNTVLGYFIGRIYLYLTKVGISPDKLRFRQHMENEMAHYACDCWDAESKTSYGWIEIVGCADRSCYDLSCHARATKVPLVAEKPLKEPKTVNVVQFEPSKGAIGKAYKKDAKLVMEYLAICDECYITEMEMLLNEKGEFTIETEGKTFQLTKDMINVKRFQKTLYVEEVVPNVIEPSFGLGRIMYTVFEHTFHVREGDEQRTFFSFPAVVAPFKCSVLPLSQNQEFMPFVKELSEALTRHGVSHKVDDSSGSIGRRYARTDEIGVAFGVTIDFDTVNKTPHTATLRDRDSMRQIRAEISELPSIVQDLANGNITWADVEARYPLFEGQETGKKETIEE

SEQ ID NO: 1799 - DNA, 1961 bp, Homo sapien
ggcacgagggccctcccgagaaagggaagtgcattctcgcttccgtagcggtctccgccggttgggggaaagtaattccggctgttgcaccatggcgtccatggggaccctcgccttcgatgaatatgggcgccctttcctcatcatcaaggatcaggaccgcaagtcccgtcttatgggacttgaggccctcaagtctcatataatggcagcaaaggctgtagcaaatacaatgagaacatcacttggaccaaatgggcttgataagatgatggtggataaggatggggatgtgactgtaactaatgatggggccaccatcttaagcatgatggatgttgatcatcagattgccaagctgatggtggaactgtccaagtctcaggatgatgaaattggagatggaaccacaggagtggttgtcctggctggtgccttgttagaagaagcggagcaattgctagaccgaggcattcacccaatcagaatagccgatggctatgagcaggctgctcgcgttgctattgaacacctggacaagatcagcgatagcgtccttgttgacataaaggacaccgaacccctgattcagacagcaaaaaccacgctgggctccaaagtggtcaacagttgtcaccgacagatggctgagattgctgtgaatgccgtcctcactgtagcagatatggagcggagagacgttgactttgagcttatcaaagtagaaggcaaagtgggcggcaggctggaggacactaaactgattaagggcgtgattgtggacaaggatttcagtcacccacagatgccaaaaaaagtggaagatgcgaagattgcaattctcacatgtccatttgaaccacccaaaccaaaaacaaagcataagctggatgtgacctctgtcgaagattataaagcccttcagaaatacgaaaaggagaaatttgaagagatgattcaacaaattaaagagactggtgctaacctagcaatttgtcagtggggctttgatgatgaagcaaatcacttacttcttcagaacaacttgcctgcggttcgctgggtaggaggacctgaaattgagctgattgccatcgcaacaggagggcggatcgtccccaggttctcagagctcacagccgagaagctgggctttgctggtcttgtacaggagatctcatttgggacaactaaggataaaatgctggtcatcgagcagtgtaagaactccagagctgtaaccatttttattagaggaggaaataagatgatcattgaggaggcgaaacgatcccttcacgatgctttgtgtgtcatccggaacctcatccgcgataatcgtgtggtgtatggaggaggggctgctgagatatcctgtgccctggcagttagccaagaggcggataagtgccccaccttagaacagtatgccatgagagcgtttgccgacgcactggaggtcatccccatggccctctctgaaaacagtggcatgaatcccatccagactatgaccgaagtccgagccagacaggtgaaggagatgaaccctgctcttggcatcgactgtttgcacaaggggacaaatgatatgaagcaacagcatgtcatagaaaccttgattggcaaaaagcaacagatatctcttgcaacacaaatggttagaatgattttgaagattgatgacattcgtaagcctggagaatctgaagaatgaagacattgagaaaactatgtagcaagatccacttctgtgattaagtaaatggatgtctcgtgatgcgtctacagttatttattgttacatccttttccagacactgtagatgctataataaaaatagctgtttggtaaccatagtttcacttgttcaaagctgtgtaatcgtgggggtactatctcaactgcttttgtattcattgtattaaaagaatctgtttaaaaaaaaaaaaaaaaaaaa

SEQ ID NO: 1800 - protein, 541 aa, Homo sapien
MASMGTLAFDEYGRPFLIIKDQDRKSRLMGLEALKSHIMAAKAVANTMRTSLGPNGLDKMMVDKDGDVTVTNDGATILSMMDVDHQIAKLMVELSKSQDDEIGDGTTGVVVLAGALLEEAEQLLDRGIHPIRIADGYEQAARVAIEHLDKISDSVLVDIKDTEPLIQTAKTTLGSKVVNSCHRQMAEIAVNAVLTVADMERRDVDFELIKVEGKVGGRLEDTKLIKGVIVDKDFSHPQMPKKVEDAKIAILTCPFEPPKPKTKHKLDVTSVEDYKALQKYEKEKFEEMIQQIKETGANLAICQWGFDDEANHLLLQNNLPAVRWVGGPEIELIAIATGGRIVPRFSELTAEKLGFAGLVQEISFGTTKDKMLVIEQCKNSRAVTIFIRGGNKMIIEEAKRSLHDALCVIRNLIRDNRVVYGGGAAEISCALAVSQEADKCPTLEQYAMRAFADALEVIPMALSENSGMNPIQTMTEVRARQVKEMNPALGIDCLHKGTNDMKQQHVIETLIGKKQQISLATQMVRMILKIDDIRKPGESEE

SEQ ID NO: 1801 - DNA, 1510 bp, Homo sapien
ggactcccttttctttggcaagatggcggagtacgacttgactactcgcatcgcgcactttttggatcggcatctagtctttccgcttcttgaatttctctctgtaaaggagatatataatgaaaaggaattattacaaggtaaattggaccttcttagtgataccaacatggtagactttgctatggatgtatacaaaaacctttattctgatgatattcctcatgctttgagagagaaaagaaccacagtggttgcacaactgaaacagcttcaggcagaaacagaaccaattgtgaagatgtttgaagatccagaaactacaaggcaaatgcagtcaaccagggatggtaggatgctctttgactacctggcggacaagcatggttttaggcaggaatatttagatacactctacagatatgcaaaattccagtacgaatgtgggaattactcaggagcagcagaatatctttatttttttagagtgctggttccagcaacagatagaaatgctttaagttcactctggggaaagctggcctctgaaatcttaatgcagaattgggatgcagccatggaagaccttacacggttaaaagagaccatagataataattctgtgagttctccacttcagtctcttcagcagagaacatggctcattcactggtctctgtttgttttcttcaatcaccccaaaggtcgcgataatattattgacctcttcctttatcagccacaatatcttaatgcaattcagacaatgtgtccacacattcttcgctatttgactacagcagtcataacaaacaaggatgttcgaaaacgtcggcaggttctaaaagatctagttaaagttattcaacaggagtcttacacatataaagacccaattacagaatttgttgaatgtttatatgttaactttgactttgatggggctcagaaaaagctgagggaatgtgaatcagtgcttgtgaatgacttcttcttggtggcttgtcttgaggatttcattgaaaatgcccgtctcttcatatttgagactttctgtcgcatccaccagtgtatcagcattaacatgttggcagataaattgaacatgactccagaagaagctgaaaggtggattgtaaatttgattagaaatgcaagactggatgccaagattgattctaaattaggtcatgtggttatgggtaacaatgcagtctcaccctatcagcaagtgattgaaaagaccaaaagcctttcctttagaagccagatgttggccatgaatattgagaagaaacttaatcagaatagcaggtcagaggctcctaactgggcaactcaagattctggcttctactgaagaaccataaagaaaagatgaaaaaaaaaactatcaaagaaagatgaaataataaaactattatataaagggtgacttacattttggaaacaacatattacgtataaattttgaagaattggaataaaattgattcattttaaaaaaaaa

SEQ ID NO: 1802 - protein, 445 aa, Homo sapien
MAEYDLTTRIAHFLDRHLVFPLLEFLSVKEIYNEKELLQGKLDLLSDTNMVDFAMDVYKNLYSDDIPHALREKRTTVVAQLKQLQAETEPIVKMFEDPETTRQMQSTRDGRMLFDYLADKHGFRQEYLDTLYRYAKFQYECGNYSGAAEYLYFFRVLVPATDRNALSSLWGKLASEILMQNWDAAMEDLTRLKETIDNNSVSSPLQSLQQRTWLIHWSLFVFFNHPKGRDNIIDLFLYQPQYLNAIQTMCPHILRYLTTAVITNKDVRKRRQVLKDLVKVIQQESYTYKDPITEFVECLYVNFDFDGAQKKLRECESVLVNDFFLVACLEDFIENARLFIFETFCRIHQCISINMLADKLNMTPEEAERWIVNLIRNARLDAKIDSKLGHVVMGNNAVSPYQQVIEKTKSLSFRSQMLAMNIEKKLNQNSRSEAPNWATQDSGFY

SEQ ID NO: 1803 - DNA, 3899 bp, Homo sapien
agcttgagcgcggcggcggcgttgttcagtcagagcgagaacattccagaggtcgcccagctccggcgctgacgggtgtggaccgcggacgtcgctgggacagcccctccccgctgctcggcggcggcatctggcccggccgctcctcgctgcgcttcgcctccgcctcctcggactcggactcgggtttatatcgcgcctcacttcatcccagtcccgggcgagcagcgttgggtttatgtctttatttgacgaaaacgagctgttgcgcagccattggtacctgtattggggaaacatagcatacaagcaagaagcttacagcctcagtggcgaaaattttttcatgtcagagaccgagaactcttgcagtcgtttatgtcatcccttcttctccagacagaagataccaaaaagttgcaatcaaagatctcttcatcttattgataaagccactaataagccaaaatgtctgtcaatgtcaaccgcagcgtgtcagaccagttctatcgctacaagatgccccgtctgattgccaaggttgagggcaaaggcaatggaatcaagacagttatagtcaacatggttgacgttgcaaaggcgcttaatcggcctccaacgtatcccaccaaatattttggttgtgagctgggagcacagacccagtttgatgttaagaatgaccgttacattgtcaatggatctcatgaggcgaataagctgcaagacatgttggatggattcattaaaaaatttgttctctgtcctgaatgtgagaatcctgaaacagatttgcatgtcaatccaaagaagcaaacaataggtaattcttgtaaagcctgtggctatcgaggcatgcttgacacacatcataaactctgcacattcattctcaaaaacccacctgagaatagtgacagtggtacaggaaagaaagaaaaagaaaagaaaaacagaaagggcaaagacaaggaaaatggctccgtatccagcagtgagacaccaccaccaccaccaccaccaaatgaaattaatcctcctccacatacaatggaagaagaggaggatgatgactggggagaagatacaactgaggaagctcaaaggcgtcgaatggatgaaatcagtgaccatgcaaaagttctgacactcagtgatgatttggaaagaacaattgaggagagggtcaatatcctctttgattttgttaagaaaaagaaagaagagggtgttattgattcatctgacaaagaaatcgttgctgaagcagaaagactggatgtaaaagccatgggccctcttgttctaactgaagttctttttaatgagaagattagagaacagattaagaaatacaggcgccatttcctacgattttgtcacaacaacaaaaaagcccaacggtaccttcttcatggtttggagtgtgtggtagcaatgcatcaagctcagcttatctccaagattccacatatcttgaaggagatgtacgatgcagaccttttagaagaagaggtcatcatcagctggtcggaaaaggcctctaagaaatatgtctccaaagaacttgccaaagagattcgtgtcaaagcagaaccatttataaaatggttgaaggaggcagaggaagaatcttctggtggcgaagaagaagatgaagatgagaacattgaggtggtgtattcgaaggctgccagtgtaccgaaagttgagactgtaaagtcagacaacaaggatgacgacatcgatattgatgccatttaaagggatggatgcaacctagcttaacagtataatgctgcaaattttcctccattatcagccagaagtgcaacatgtatgtgcaaaagctaaaatggcttaacatcatgctacactttacactaaaaatctattactgtgagtggtctgttattaagcccaatgagacatctagggagtccatacacatcagtgagcagatgtagtttgcttatttatagcatgtttctttttgaaaaactagtggtggacacatttggatcacatttatacagttataaaaataaaggtttgattttggtcgttcttcagatgtttggctctgaatgacttaagctgaagtaactggctccttactttaaatgttctgccatcatttcacctgatgagcattcttggagcctgccagatattgttaggtcctggggctgcaaagaggtcctcaacaggatgtaaagcaaacttaattgtaattaatttattcagcccattaagaaagtactaaagttttatctctgtagttcctcaaattggcatctggtaatgtacattgtgaggtagactgataatgaaatgacagtgcaacatcttaaccaagaagtaaatatgacctcagtgtcctataaataatgtaagagcaggatttgaaacttggagagctgttttctcatttcatgtacacttgccccaaattgtctttgaagtcgtgtgcattgcacgttggatgagccagggaaattattacattaacaagcattttgtgtgtgcgtagtagttactttgtactgagagaacttgctttggggtgcaattaaacaataaactgattttatttgggagaaacaaggaagggtgcacttaactagcaacctaagcatgatttttcagcttttgcccttagggtttaaattacaattccaaaatgttagacatactgtattttttcgttcagtgtggctttaattttcccctcttgcagtttgttctgtaatgccttttacatttggacacatagtttatgctttttagattttggttgctttcttgccaaaataagtgttaactgtgtttcaaacttgattttctttcttttttctttttttttcttccagaatgtcttatttaaaaagaaagctaaaagcatacttctaagtcagagcctctattttggtgtaagacttgggatattttttacttcacattgaatatagccaggcacccaagaagtctgatggccacctgagtgcaggtgacaaggacctgacagagcccatgcagggctttagatttggacacacaagagttgataacttcctcatgaactccttgcctgatctaaactcatattatgggttctgactgtttgagtaatcgtcttcaaggttaaacctcttggcagttacccttttcacaaagtgcacagtgggaatcgagaatcgatagggttaattttggagcagtggcttataccattcacctctgtttttttgtgattatttcacagataatgagaccttaataacaaataggcgtaaaaaaattttcacattgaaatgatagaaacatttgatgtaataaaacttggttggcttgatattttaaggaattgaaacctagcaatcttattggagagacaagaattggtctccagctgcctttgatcaagattcgggtgcaagtggagcaggagccatatacctggagggaatgtgctttgtcacaccaaagaggattttttttttcttcaaacttgtatgttgcctaggtttcaaattctttgccgcaaggctgatctgctttcattaactggaattctgtaggagatactggtgacctaagctaagttgcactcagcatactcagtgtcaagctaatgaggttctattataaaggttctacttttaatctgagggaaaacatgttcagggcttctagaacactaaaaaatttggcttaaaccagtgttcagtctggtgccaaacttcgaatggaatacaaattcacataatctgaactttgttcacaggttatcctaatagagtaattcttcactttgctctattgaactgtcttaaggatttgtttaaacagctaagttacttgattaaaataatgataaaattgtaaaaaaaaaaaaa

SEQ ID NO: 1804 - protein, 431 aa, Homo sapien
MSVNVNRSVSDQFYRYKMPRLIAKVEGKGNGIKTVIVNMVDVAKALNRPPTYPTKYFGCELGAQTQFDVKNDRYIVNGSHEANKLQDMLDGFIKKFVLCPECENPETDLHVNPKKQTIGNSCKACGYRGMLDTHHKLCTFILKNPPENSDSGTGKKEKEKKNRKGKDKENGSVSSSETPPPPPPPNEINPPPHTMEEEEDDDWGEDTTEEAQRRRMDEISDHAKVLTLSDDLERTIEERVNILFDFVKKKKEEGVIDSSDKEIVAEAERLDVKAMGPLVLTEVLFNEKIREQIKKYRRHFLRFCHNNKKAQRYLLHGLECVVAMHQAQLISKIPHILKEMYDADLLEEEVIISWSEKASKKYVSKELAKEIRVKAEPFIKWLKEAEEESSGGEEEDEDENIEVVYSKAASVPKVETVKSDNKDDDIDIDAI

SEQ ID NO: 1805 - DNA, 1186 bp, Homo sapien
aagtgcgatcttcgggctgtcagagttggtctgttactcggtggtggcggagtctacggaagccgttttcgcttcacttttcctggctgtagagcgctttccccctggcgggtgagagtgcagagacgaaggtgcgagatgagcactatgttcgcggacactctcctcatcgtttttatctctgtgtgcacggctctgctcgcagagggcataacctgggtcctggtttacaggacagacaagtacaagagactgaaggcagaagtggaaaaacagagtaaaaaattggaaaagaagaaggaaacaataacagagtcagctggtcgacaacagaaaaagaaaatagagagacaagaagagaaactgaagaataacaacagagatctatcaatggttcgaatgaaatccatgtttgctattggcttttgttttactgccctaatgggaatgttcaattccatatttgatggtagagtggtggcaaagcttccttttacccctctttcttacatccaaggactgtctcatcgaaatctgctgggagatgacaccacagactgttccttcattttcctgtatattctctgtactatgtcgattcgacagaacattcagaagattctcggccttgccccttcacgagccgccaccaagcaggcaggtggatttcttggcccaccacctccttctgggaagttctcttgaactcaagaactctttattttctatcattctttctagacacacacacatcagactggcaactgttttgtagcaagagccataggtagccttactacttgggcctctttctagttttgaattatttctaagccttttgggtatgattagagtgaaaatggcagccagcaaacttgatagtgcttttggtcctagatgatttttatcaaataagtggattgattagttaagttcaggtaatgtttatgtaatgaaaaacaaatagcatccttcttgtttcatttacataagtattttctgtgggaccgactctcaaggcactgtgtatgccctgcaagttggctgtctatgagcatttagagatttagaagaaaaatttagtttgtttaacccttgtaactgtttgttttgttgttgtttttttttcaagccaaatacatgacataagatcaataaagaggccaaatttttagctgttttatgt

SEQ ID NO: 1806 - protein, 188 aa, Homo sapien
MSTMFADTLLIVFISVCTALLAEGITWVLVYRTDKYKRLKAEVEKQSKKLEKKKETITESAGRQQKKKIERQEEKLKNNNRDLSMVRMKSMFAIGFCFTALMGMFNSIFDGRVVAKLPFTPLSYIQGLSHRNLLGDDTTDCSFIFLYILCTMSIRQNIQKILGLAPSRAATKQAGGFLGPPPPSGKFS

SEQ ID NO: 1807 - DNA, 1439 bp, Homo sapien
ggggtgtcgtttcctttcgctgatgcaagagcctagtgcggtggtgggagaggtatcggcaggggcagcgctgccgccggggcctggggctgacccgtctgacttcccgtccgtgccgagcccactcgagccgcagccatgtctggggacgagatgatttttgatcctactatgagcaagaagaaaaagaagaagaagaagccttttatgttagatgaggaaggggatacccaaacagaggaaacccagccttcagaaacaaaagaagtggagccagagccaactgaggacaaggatttggaagctgatgaagaggacactaggaaaaaagatgcttctgatgatctagatgacttgaacttctttaatcaaaagaaaaagaagaaaaaaactaaaaagatatttgatattgatgaagctgaagaaggtgtaaaggatcttaagattgaaagtgatgttcaagaaccaactgaaccagaggatgaccttgacattatgcttggcaataaaaagaagaaaaagaagaatgttaagttcccagatgaggatgaaatactagagaaagatgaagctctagaagatgaagacaacaaaaaagatgatggtatctcattcagtaatcagacaggccctgcttgggcaggctcagaaagagactacacatacgaggagctgctgaatcgagtgttcaacatcatgagggaaaagaatccagatatggttgctggggagaaaaggaaatttgtcatgaaacctccacaagtcgtccgagtaggaaccaagaaaacttcttttgtcaactttacagatatctgtaaactattacatcgtcagcccaaacatctccttgcatttttgttggctgaattgggtacaagtggttctatagatggtaataaccaacttgtaatcaaaggaagattccaacagaaacagatagaaaatgtcttgagaagatatatcaaggaatatgtcacttgtcacacatgccgatcaccggacacaatcctgcagaaggacacacgactctatttcctacagtgcgaaacttgtcattctagatgttctgttgccagtatcaaaaccggcttccaggctgtcacgggcaagcgagcacagctccgtgccaaagctaactaatttgctaatcactgattttgcaaagcttgttgtggagatgtggctggacaggtttgccatcagagtggatataccgttgtattaaaaacaagataaaaaagctgccaagatttttggcgagtggttggtctgaagtccttgcaagacgctgatgctcaagctgttgacatactcattgcctactttaacacctgtcagagaaacgtgatatggggtaaggaggtgcttttttaaaatcgttcatagacttctgtaaaatgcaagataaattaaagttattataacagtgattctttcaa

SEQ ID NO: 1808 - protein, 333 aa, Homo sapien
MSGDEMIFDPTMSKKKKKKKKPFMLDEEGDTQTEETQPSETKEVEPEPTEDKDLEADEEDTRKKDASDDLDDLNFFNQKKKKKKTKKIFDIDEAEEGVKDLKIESDVQEPTEPEDDLDIMLGNKKKKKKNVKFPDEDEILEKDEALEDEDNKKDDGISFSNQTGPAWAGSERDYTYEELLNRVFNIMREKNPDMVAGEKRKFVMKPPQVVRVGTKKTSFVNFTDICKLLHRQPKHLLAFLLAELGTSGSIDGNNQLVIKGRFQQKQIENVLRRYIKEYVTCHTCRSPDTILQKDTRLYFLQCETCHSRCSVASIKTGFQAVTGKRAQLRAKAN

SEQ ID NO: 1809 - DNA, 1110 bp, Homo sapien
gcaagcgcagattgtgggcggctgtgtcagctgacccaaggggccttcgaggtgccttaggccgcttgccttgctctcagaatcgctgccgccatggctagtcagtctcaggggattcagcagctgctgcaggccgagaagcgggcagccgagaaggtgtccgaggcccgcaaaagaaagaaccggaggctgaagcaggccaaagaagaagctcaggctgaaattgaacagtaccgcctgcagagggagaaagaattcaaggccaaggaagctgcggcattgggatcccgtggcagttgcagcactgaagtggagaaggagacccaggagaagatgaccatcctccagacatacttccggcagaacagggatgaagtcttggacaacctcttggcttttgtctgtgacattcggccagaaatccatgaaaactaccgcataaatggatagaagagagaagcacctgtgctgtggagtggcattttagatgccctcacgaatatgaagcttagcacagctctagttacattcttatgatatggcattaaattatttccatatattatataataggtccttccactttttggagagtagcaaatctagcttttttgtacagacttagaaattatctaaagatttcatctttttacctcatatttcttaggaatttaatggttatatgttgtctttttttcctatgtcttttggctcaagcaacatgtatatcagtgttgactttttctttcttagatctagtttaaaaaaaaaaaaaaccacataacaattctttgaagaaaggaagggattaaataatttttttccctaacactttcttgaaggtcaggggctttatctatgaaaaagtagtaaatagttctttgtaacctgtgtgaagcagcagccagccttaaagtagtccattcttgctaatggttagaacagtgaatactagtggaattgtttgggctgcttttagtttctcttaatcaaaattactagatgatagaattcaagaacttgttacatgtattacttggtgtatcgataatcatttaaaagtaaagactctgtcatgcaaaaaaaaaaaaaaaaaaaaaaaaaaaaaaa

SEQ ID NO: 1810 - protein, 118 aa, Homo sapien
MASQSQGIQQLLQAEKRAAEKVSEARKRKNRRLKQAKEEAQAEIEQYRLQREKEFKAKEAAALGSRGSCSTEVEKETQEKMTILQTYFRQNRDEVLDNLLAFVCDIRPEIHENYRING

SEQ ID NO: 1811 - DNA, 1154 bp, Homo sapien
gggggccttccggcgggtgacattcagccggcggttcggggcgacggactctccattccagaaccatggcccaatttgtccgtaaccttgtggagaagaccccggcgctggtgaacgctgctgtgacttactcgaagcctcgattggccacattttggtactacgccaaggttgagctggttcctcccacccctgctgagatccctagagctattcagagcctgaaaaaaatagccaatagtgctcagactggtagcttcaaacagctcacagttaaggaagctgtgctgaatggtttggtggccactgaggtgttgatgtggttttatgtcggagagattataggcaagcggggcatcattggctatgatgtttgaagaccaatctttaacatctgattatatttgatttattatttgagtgttgttggaccatgtgtgatcagactgctatctgaataaaataagatttgtcaaaactcagtgttttctccatcagatactccatgaaaggtcacaatttctcttgatattaagctgggttgtctttaaacaaccctaaatacacgtctgtttagcccgcaattggaaaggatatatgtggcaatattaacctggtacatgaatatatggggataacattttaatttgaaggtttggaatatatatatttaagctttatttccagaacagtgagggttaggtcttgggaaaactataacttgccaaagtagaagaaatagtagtaccatatgccaaagtgatagagatgaatcatgtcagtagttagaataacatttcaactgttttctttgctaaaatcacagaaagaccctattgacaacatctatgtctgtaaaaatgttagagtacttgtcatcttgaatatagcctccccaagagagaacagggtggtattctaagtatgtttctttgtaacatctttagcagtaggacagagccatacatgtgaaatctgatttttatgtgtgttattcgtttgtctggttttactacctttgcaaaaacaaaataccccaaagatatttaaacaaggttataatttagcatcttccctggatctaaatagtatattatatcctgaaataaatgaaatgattgctcaaaaaaaaaaaaaaaaaaaaaaaaaaaaaa

SEQ ID NO: 1812 - protein, 103 aa, Homo sapien
MAQFVRNLVEKTPALVNAAVTYSKPRLATFWYYAKVELVPPTPAEIPRAIQSLKKIANSAQTGSFKQLTVKEAVLNGLVATEVLMWFYVGEIIGKRGIIGYDV

SEQ ID NO: 1813 - DNA, 1839 bp, Homo sapien
agcaacggggtgcggcagggtggggaacgcgggagcggggccagctcccaggaaagctggtctgcgagcggcccctgcccggctcccaggtccctgcgcgaccccgcccttcccgagaccccagccgggctgccgcccgcgtcccggaagctccagcctgaaccatgtttttcacttgtggcccaaatgaggccatggtggtctccgggttctgccgaagccccccagtcatggtggctggagggcgtgtctttgtcctgccctgcatccaacagatccagaggatctctctcaacacactgaccctcaatgtcaagagtgaaaaggtttacactcgccatggggtccccatctcagtcactggcattgcccaggtaaaaatccaggggcagaacaaggagatgttggcggccgcctgtcagatgttcctggggaagacggaggctgagattgcccacattgccctggagacgttagagggccaccagagggccatcatggcccacatgactgtggaggagatctataaggacaggcagaaattctcagaacaggttttcaaagtggcctcctcagacctggtcaacatgggcatcagtgtggttagctacactctgaaggacattcacgatgaccaggactatttgcactctttggggaaggctcgaacagctcaagtccaaaaagatgcacggattggagaagcagaggccaagagagatgctgggatccgggaagctaaagccaagcaggaaaaggtgtctgctcagtacctgagtgagatcgagatggccaaggcacagagagattacgaactgaagaaggccgcctatgacatcgaggtcaacacccgccgagcacaggctgacctggcctatcagcttcaggtggccaagactaagcagcagattgaggagcagcgggtgcaggtgcaggtggtggagcgggcccagcaggtggcagtgcaggagcaggagatcgcccggcgggagaaggagctggaggcccgggtgcggaagccagcggaagcggagcgctacaagctggagcgcctagccgaggcagagaagtcccaactaattatgcaggcggaggcagaagccgcgtctgtgcggatgcgtggggaagctgaggcctttgccataggggcccgagcccgagccgaggctgagcagatggccaagaaggcagaagccttccagctgtaccaagaggctgctcagctggacatgctgctagagaagctgccccaggtggcagaggagatcagtggtcccttgacttcagccaataagatcacactggtgtccagcggcagtgggaccatgggggcagccaaagtgactggggaagtactggacattctaactcgcctgccagagagtgtggaaagactcacaggcgtgagcatctcccaggtgaatcacaagcctttgagaacagcctgagccttcagccctcacagatgcccagcctcatagctgaagttgcctgaatgatcctcctgttgcatgtaacccactggcctccctgagcatgtccattgacagtgaggtcccacccctcatctctccttgccaaatagtttgtgccttgtcttgaagggggttgctccccttgccaacctcacactgctatgattgccaactccagcggtcccatgtcagccttctgatgatcccactccaccccacctcaacttatttaacttcctaattaaatcagactgtttgagcctgttgtctagaatattttcctgaccaagactgagggatgggctggaggttttcaactttgctacccaaataaattgctgtaagtaagtactaaaaaaaaaaa

SEQ ID NO: 1814 - protein, 427 aa, Homo sapien
MFFTCGPNEAMVVSGFCRSPPVMVAGGRVFVLPCIQQIQRISLNTLTLNVKSEKVYTRHGVPISVTGIAQVKIQGQNKEMLAAACQMFLGKTEAEIAHIALETLEGHQRAIMAHMTVEEIYKDRQKFSEQVFKVASSDLVNMGISVVSYTLKDIHDDQDYLHSLGKARTAQVQKDARIGEAEAKRDAGIREAKAKQEKVSAQYLSEIEMAKAQRDYELKKAAYDIEVNTRRAQADLAYQLQVAKTKQQIEEQRVQVQVVERAQQVAVQEQEIARREKELEARVRKPAEAERYKLERLAEAEKSQLIMQAEAEAASVRMRGEAEAFAIGARARAEAEQMAKKAEAFQLYQEAAQLDMLLEKLPQVAEEISGPLTSANKITLVSSGSGTMGAAKVTGEVLDILTRLPESVERLTGVSISQVNHKPLRTA

SEQ ID NO: 1815 - DNA, 3582 bp, Homo sapien
ctgctcgcggcgccgcctcctgctcctcccgctgctgctgccgctgccgccctgagtcactgcctgcgcagctccggccgcctggctccccatactagtcgccgatatttggagttcttacaacatggcagacattgacaacaaagaacagtctgaacttgatcaagatttggatgatgttgaagaagtagaagaagaggaaactggtgaagaaacaaaactcaaagcacgtcagctaactgttcagatgatgcaaaatcctcagattcttgcagcccttcaagaaagacttgatggtctggtagaaacaccaacaggatacattgaaagcctgcctagggtagttaaaagacgagtgaatgctctcaaaaacctgcaagttaaatgtgcacagatagaagccaaattctatgaggaagttcacgatcttgaaaggaagtatgctgttctctatcagcctctatttgataagcgatttgaaattattaatgcaatttatgaacctacggaagaagaatgtgaatggaaaccagatgaagaagatgagatttcggaggaattgaaagaaaaggccaagattgaagatgagaaaaaggatgaagaaaaagaagaccccaaaggaattcctgaattttggttaactgtttttaagaatgttgacttgctcagtgatatggttcaggaacacgatgaacctattctgaagcacttgaaagatattaaagtgaagttctcagatgctggccagcctatgagttttgtcttagaatttcactttgaacccaatgaatattttacaaatgaagtgctgacaaagacatacaggatgaggtcagaaccagatgattctgatcccttttcttttgatggaccagaaattatgggttgtacagggtgccagatagattggaaaaaaggaaagaatgtcactttgaaaactattaagaagaagcagaaacacaagggacgtgggacagttcgtactgtgactaaaacagtttccaatgactctttctttaacttttttgcccctcctgaagttcctgagagtggagatctggatgatgatgctgaagctatccttgctgcagacttcgaaattggtcactttttacgtgagcgtataatcccaagatcagtgttatattttactggagaagctattgaagatgatgatgatgattatgatgaagaaggtgaagaagcggatgaggaaggggaagaagaaggagatgaggaaaatgatccagactatgacccaaagaaggatcaaaacccagcagagtgcaagcagcagtgaagcaggatgtatgtggccttgaggataacctgcactgtaatagcctaaacacaactcttatttacttacagccttatgtttttgtattttcttggtagactaggtaatttttttttaaaggacaggaaactgatattttaaagaccaatttgttctacctagcattttaactagtttttctgccagctatgttgaatgcacaaattctgtcacgcatgttcattcattgctacataatttggttcttctggaatatttttatgtagctcttggagtacagctatgaaaattaacaactgttaaaggaaataccttttttttttttttgtaattttttccttgaagaaccaaagtattttttcagctggttgttgaatagggttaagtccgcttggattagctgtgcctttcattactttgttacagaaatgcagtgacttatactaagacaatttattgtttaaaaaaaaaattggcaagacaactatatggttaagaatttccagtatgaccacacccaataactgttattagagtgttaatggattattgtgttttaggtgacatagttaactgtaaagtaacctgactcagtatagttactggtaccacagtgaggtgaataaaacgggattttcagaagttagcctgaatttaactgtatttttaaatttaacctccattaactaagcatcttttctttgtggtagggtctaccttctgcttccctggaaaggatgaatttacatcatttgacaagcctattttcaagttatttgttgtttgtttgcttgtttttgtttttgcagctaaaataaaaatttcaaatacaattttagttcttacaagataatgtcttaattttgtaccaattcaggtagaagtagaggcctaccttgaattaagggttatactcagtttttaacacattgttgaagaaaaggtaccagctttggaacgagatgctatactaataagcaagtgtaaaaaaaaaaaaaaaagaggaagaaaatcttaagtgattgatgctgttttcttttaaaaaaaaaaaaaaaaattcattttctttgggttagagctagagagaaggccccaagcttctatggtttcttctaattcttattgcttaaagtatgagtatgtcacttacccgtgcttctgtttactgtgtaattaaaatgggtagtactgtttacctaactacctcatggatgtgttaaggcatattgagttaaatctcatataatgtttctcaatcttgttaaaagctcaaaattttgggcctatttgtaatgccagtgtgacactaagcattttgttcacaccacgctttgataactaaactggaaaacaaaggtgttaagtacctctgttctggatctgggcagtcagcactctttttagatctttgtgtggctcctatttttatagaagtggagggatgcactatttcacaaggtccaagatttgttttcagatatttttgatgactgtattgtaaatactacagggatagcactatagtattgtagtcatgagacttaaagtggaaataagactatttttgacaaaagatgccattaaatttcagactgtagagccacatttacaatacctcaggctaattactgttaattttggggttgaactttttttgacagtgagggtggattattggattgtcattagaggaaggtctagatttcctgctcttaataaaattacattgaattgatttttagaggtaatgaaaacttcctttctgagaagttagtgttaaggtcttggaatgtgaacacattgtttgtagtgctatccattcctctcctgagattttaacttactactggaaatccttaaccaattataatagctttttttctttattttcaaaatgatttcctttgctttgattagacactatgtgctttttttttttaaccatagttcatcgaaatgcagctttttctgaacttcaaagatagaatcccatttttaatgaactgaagtagcaaaatcatctttttcattctttaggaaatagctattgccaaagtgaaggtgtagataatacctagtcttgttacataaaggggatgtggtttgcagaagaattttctttataaaattgaagttttaagggacgtcagtgtttatgccatttttccagttccaaaatgattccattccattctagaaatttgaagtatgtaacctgaaatccttaataaaatttggatttaattttataaaaaaaaaaaaaaaaaaaaaaaaaaaaaaaa

SEQ ID NO: 1816 - protein, 391 aa, Homo sapien
MADIDNKEQSELDQDLDDVEEVEEEETGEETKLKARQLTVQMMQNPQILAALQERLDGLVETPTGYIESLPRVVKRRVNALKNLQVKCAQIEAKFYEEVHDLERKYAVLYQPLFDKRFEIINAIYEPTEEECEWKPDEEDEISEELKEKAKIEDEKKDEEKEDPKGIPEFWLTVFKNVDLLSDMVQEHDEPILKHLKDIKVKFSDAGQPMSFVLEFHFEPNEYFTNEVLTKTYRMRSEPDDSDPFSFDGPEIMGCTGCQIDWKKGKNVTLKTIKKKQKHKGRGTVRTVTKTVSNDSFFNFFAPPEVPESGDLDDDAEAILAADFEIGHFLRERIIPRSVLYFTGEAIEDDDDDYDEEGEEADEEGEEEGDEENDPDYDPKKDQNPAECKQQ

SEQ ID NO: 1817 - DNA, 2068 bp, Homo sapien
cggcagccctcctacctgcgcacgtggtgccgctgctgctgcctcccgctcgccctgaacccagtgcctgcagccatggctcccggccagctcgccttatttagtgtctctgacaaaaccggccttgtggaatttgcaagaaacctgaccgctcttggtttgaatctggtcgcttccggagggactgcaaaagctctcagggatgctggtctggcagtcagagatgtctctgagttgacgggatttcctgaaatgttggggggacgtgtgaaaactttgcatcctgcagtccatgctggaatcctagctcgtaatattccagaagataatgctgacatggccagacttgatttcaatcttataagagttgttgcctgcaatctctatccctttgtaaagacagtggcttctccaggtgtaactgttgaggaggctgtggagcaaattgacattggtggagtaaccttactgagagctgcagccaaaaaccacgctcgagtgacagtggtgtgtgaaccagaggactatgtggtggtgtccacggagatgcagagctccgagagtaaggacacctccttggagactagacgccagttagccttgaaggcattcactcatacggcacaatatgatgaagcaatttcagattatttcaggaaacagtacagcaaaggcgtatctcagatgcccttgagatatggaatgaacccacatcagacccctgcccagctgtacacactgcagcccaagcttcccatcacagttctaaatggagcccctggatttataaacttgtgcgatgctttgaacgcctggcagctggtgaaggaactcaaggaggctttaggtattccagccgctgcctctttcaaacatgtcagcccagcaggtgctgctgttggaattccactcagtgaagatgaggccaaagtctgcatggtttatgatctctataaaaccctcacacccatctcagcggcatatgcaagagcaagaggggctgataggatgtcttcatttggtgattttgttgcattgtccgatgtttgtgatgtaccaactgcaaaaattatttccagagaagtatctgatggtataattgccccaggatatgaagaagaagccttgacaatactttccaaaaagaaaaatggaaactattgtgtccttcagatggaccaatcttacaaaccagatgaaaatgaagttcgaactctctttggtcttcatttaagccagaagagaaataatggtgtcgtcgacaagtcattatttagcaatgttgttaccaaaaataaagatttgccagagtctgccctccgagacctcatcgtagccaccattgctgtcaagtacactcagtctaactctgtgtgctacgccaagaacgggcaggttatcggcattggagcaggacagcagtctcgtatacactgcactcgccttgcaggagataaggcaaactattggtggcttagacaccatccacaagtgctttcgatgaagtttaaaacaggagtgaagagagcagaaatctccaatgccatcgatcaatatgtgactggaaccattggcgaggatgaagatttgataaagtggaaggcactgtttgaggaagtccctgagttactcactgaggcagagaagaaggaatgggttgagaaactgactgaagtttctatcagctctgatgccttcttccctttccgagataacgtagacagagctaaaaggagtggtgtggcgtacattgcggctccctccggttctgctgctgacaaagttgtgattgaggcctgcgacgaactgggaatcatcctcgctcatacgaaccttcggctcttccaccactgattttaccacacactgttttttggcttgcttatgtgtaggtgaacagtcacgcctgaaactttgaggataactttttaaaaaaataaaacagtatctcttaaaacaatgttttgatctacataaacattgtaaaaattttcaatcacgctttttaactttcttaccacaaaaaaatgataagtgggtgaagtgatggttatgttaattagcgtgc

SEQ ID NO: 1818 - protein, 592 aa, Homo sapien
MAPGQLALFSVSDKTGLVEFARNLTALGLNLVASGGTAKALRDAGLAVRDVSELTGFPEMLGGRVKTLHPAVHAGILARNIPEDNADMARLDFNLIRVVACNLYPFVKTVASPGVTVEEAVEQIDIGGVTLLRAAAKNHARVTVVCEPEDYVVVSTEMQSSESKDTSLETRRQLALKAFTHTAQYDEAISDYFRKQYSKGVSQMPLRYGMNPHQTPAQLYTLQPKLPITVLNGAPGFINLCDALNAWQLVKELKEALGIPAAASFKHVSPAGAAVGIPLSEDEAKVCMVYDLYKTLTPISAAYARARGADRMSSFGDFVALSDVCDVPTAKIISREVSDGIIAPGYEEEALTILSKKKNGNYCVLQMDQSYKPDENEVRTLFGLHLSQKRNNGVVDKSLFSNVVTKNKDLPESALRDLIVATIAVKYTQSNSVCYAKNGQVIGIGAGQQSRIHCTRLAGDKANYWWLRHHPQVLSMKFKTGVKRAEISNAIDQYVTGTIGEDEDLIKWKALFEEVPELLTEAEKKEWVEKLTEVSISSDAFFPFRDNVDRAKRSGVAYIAAPSGSAADKVVIEACDELGIILAHTNLRLFHH

SEQ ID NO: 1819 - DNA, 2045 bp, Homo sapien
tttctcccccgttccccgccgctgcagcggtcgccttcggagcgaagggtaccgacccggcagaagctcggagctctcggggtatcgaggaggcaggcccgcgggcgcacgggcgagcgggccgggagccggaggggcggaggagccggcagcagcggcgcggcgggctccaggcgaggcggtcgacgctcctgaaaacttgcgcgcgcgctcgcgccactgcgcccggagcgatgaagatggtcgcgccctggacgcggttctactccaacagctgctgcttgtgctgccatgtccgcaccggcaccatcctgctcggcgtctggtatctgatcatcaatgctgtggtactgttgattttattgagtgccctggctgatccggatcagtataacttttcaagttctgaactgggaggtgactttgagttcatggatgatgccaacatgtgcattgccattgcgatttctcttctcatgatcctgatatgtgctatggctacttacggagcgtacaagcaacgcgcagcctggatcatcccattcttctgttaccagatctttgactttgccctgaacatgttggttgcaatcactgtgcttatttatccaaactccattcaggaatacatacggcaactgcctcctaattttccctacagagatgatgtcatgtcagtgaatcctacctgtttggtccttattattcttctgtttattagcattatcttgacttttaagggttacttgattagctgtgtttggaactgctaccgatacatcaatggtaggaactcctctgatgtcctggtttatgttaccagcaatgacactacggtgctgctacccccgtatgatgatgccactgtgaatggtgctgccaaggagccaccgccaccttacgtgtctgcctaagccttcaagtgggcggagctgagggcagcagcttgactttgcagacatctgagcaatagttctgttatttcacttttgccatgagcctctctgagcttgtttgttgctgaaatgctactttttaaaatttagatgttagattgaaaactgtagttttcaacatatgctttgctagaacactgtgatagattaactgtagaattcttcctgtacgattggggatataatgggcttcactaaccttccctaggcattgaaacttcccccaaatctgatggacctagaagtctgcttttgtacctgctgggccccaaagttgggcatttttctctctgttccctctcttttgaaaatgtaaaataaaaccaaaaatagacaactttttcttcagccattccagcatagagaacaaaaccttatggaaacaggaatgtcaattgtgtaatcattgttctaattaggtaaatagaagtccttatgtatgtgttacaagaatttcccccacaacatcctttatgactgaagttcaatgacagtttgtgtttgggtggtaaaggattttctccatggcctgaattaagaccattagaaagcaccaggccgtgggagcagtgaccatctgctgactgttcttgtggatcttgtgtccagggacatggggtgacatgcctcgtatgtgttagagggtggaatggatgtgtttggcgctgcatgggatctggtgcccctcttctcctggattcacatccccacccagggcccgcttttactaagtgttctgccctagattggttcaaggaggtcatccaactgactttatcaagtggaattgggatatatttgatatacttctgcctaacaacatggaaaagggttttcttttccctgcaagctacatcctactgctttgaacttccaagtatgtctagtcaccttttaaaatgtaaacattttcagaaaaatgaggattgccttccttgtatgcgctttttaccttgactacctgaattgcaagggatttttatatattcatatgttacaaagtcagcaactctcctgttggttcattattgaatgtgctgtaaattaagttgtttgcaattaaaacaaggtttgcccacaaaaaaaaaa

SEQ ID NO: 1820 - protein, 283 aa, Homo sapien
MVNYAWAGRSQRKLWWRSVAVLTCKSVVRPGYRGGLQARRSTLLKTCARARATAPGAMKMVAPWTRFYSNSCCLCCHVRTGTILLGVWYLIINAVVLLILLSALADPDQYNFSSSELGGDFEFMDDANMCIAIAISLLMILICAMATYGAYKQRAAWIIPFFCYQIFDFALNMLVAITVLIYPNSIQEYIRQLPPNFPYRDDVMSVNPTCLVLIILLFISIILTFKGYLISCVWNCYRYINGRNSSDVLVYVTSNDTTVLLPPYDDATVNGAAKEPPPPYVSA

SEQ ID NO: 1821 - DNA, 1598 bp, Homo sapien
cgtcggcggccgcggccggggacggtgtgagagcggtaagatggcggcggcggcggtggtggagttccagagagcccagtctctactcagcaccgaccgggaggcctccatcgacatcctccactccatcgtgaagcgtgacattcaggaaaacgatgaagaggcagtgcaagtcaaagagcagagcatcctggaactgggatctctcctggcaaagactggacaagctgcagagcttggaggactcctgaagtatgtacgacccttcttgaattccatcagcaaggctaaagcagctcgcctggtccgatctcttcttgatctgtttcttgatatggaagcagctacagggcaggaggtcgagctgtgtttagagtgcatcgaatgggccaagtcagagaaaagaactttcttacgccaagctttggaggcaagactggtgtctttgtactttgataccaagaggtaccaggaagcattgcatttgggttctcagctgctgcgggagttgaaaaagatggacgacaaagctcttttggtggaagtacagcttttagaaagcaaaacataccatgccctgagcaacctgccgaaagcccgagctgccttaacttctgctcgaaccacagcaaatgccatctactgcccccctaaattgcaggccaccttggacatgcagtcgggtattatccatgcagcagaagagaaggactggaaaactgcgtactcatacttctatgaggcatttgagggttatgactccatcgacagccccaaggccatcacatctctgaagtacatgttgctgtgcaaaatcatgctcaacaccccagaagatgtccaggctttggtgagcgggaagcttgcacttcggtatgcagggaggcagacagaagcattaaaatgcgtggctcaggctagcaagaacagatcactggcagattttgaaaaggctctgacagattaccgggcagagctccgggatgacccaatcatcagcacacacttggccaagttgtatgataacttactagaacagaatctgatccgagtcattgagcctttttccagagtacagattgaacacatatctagtctcatcaaactctccaaggccgacgtggaaaggaaattatcacagatgattcttgacaagaaatttcatgggattttggaccagggggagggtgtcctgattattttcgatgaacccccagtagataaaacttacgaagctgctctggaaacaattcagaacatgagcaaagtagtggattccctctacaacaaagccaagaaactgacatagagttggatctgtagcggtcctttggagagtgtgtgtggcgggagagtgaaaccttgggggaaaatgctaggagattcttttttctttttgttctacttttcgctcggaaagtttttaaatcctcatttggtgcatctgtattccagccaataggtgtgccagttttcatgtaatctttactggcccaacttgggagtggggaaattgcttaaaaaaaaagaaaaagaaaaaaaaaaagattattctaaataaaaggaaaaaggcttacactaaaaaaaaaaaaaaaaaa

SEQ ID NO: 1822 - protein, 422 aa, Homo sapien
MAAAAVVEFQRAQSLLSTDREASIDILHSIVKRDIQENDEEAVQVKEQSILELGSLLAKTGQAAELGGLLKYVRPFLNSISKAKAARLVRSLLDLFLDMEAATGQEVELCLECIEWAKSEKRTFLRQALEARLVSLYFDTKRYQEALHLGSQLLRELKKMDDKALLVEVQLLESKTYHALSNLPKARAALTSARTTANAIYCPPKLQATLDMQSGIIHAAEEKDWKTAYSYFYEAFEGYDSIDSPKAITSLKYMLLCKIMLNTPEDVQALVSGKLALRYAGRQTEALKCVAQASKNRSLADFEKALTDYRAELRDDPIISTHLAKLYDNLLEQNLIRVIEPFSRVQIEHISSLIKLSKADVERKLSQMILDKKFHGILDQGEGVLIIFDEPPVDKTYEAALETIQNMSKVVDSLYNKAKKLT

SEQ ID NO: 1823 - DNA, 2019 bp, Homo sapien
acgtgtatcgctgccgtcaagatggaggggcctttgtccgtgttcggtgaccgcagcactggggaaacgatccgctcccaaaacgttatggctgcagcttcgattgccaatattgtaaaaagttctcttggtccagttggcttggataaaatgttggtggatgatattggtgatgtaaccattactaacgatggtgcaaccatcctgaagttactggaggtagaacatcctgcagctaaagttctttgtgagctggctgatctgcaagacaaagaagttggagatggaactacttcagtggttattattgcagcagaactcctaaaaaatgcagatgaattagtcaaacagaaaattcatcccacatcagttattagtggctatcgacttgcttgcaaggaagcagtgcgttatatcaatgaaaacctaattgttaacacagatgaactgggaagagattgcctgattaatgctgctaagacatccatgtcttccaaaatcattgggataaatggtgatttctttgctaacatggtagtagatgctgtacttgctattaaatacacagacataagaggccagccacgctatccagtcaactctgttaatattttgaaagcccatgggagaagtcaaatggagagtatgctcatcagtggctatgcactcaactgtgtggtgggatcccagggcatgcccaagagaatcgtaaatgcaaaaattgcttgccttgacttcagcctgcaaaaaacaaaaatgaagcttggtgtacaggtggtcattacagaccctgaaaaactggaccaaattagacagagagaatcagatatcaccaaggagagaattcagaagatcctggcaactggtgccaatgttattctaaccactggtggaattgatgatatgtgtctgaagtattttgtggaggctggtgctatggcagttagaagagttttaaaaagggaccttaaacgcattgccaaagcttctggagcaactattctgtcaaccctggccaatttggaaggtgaagaaacttttgaagctgcaatgttgggacaggcagaagaagtggtacaggagagaatttgtgatgatgagctgatcttaatcaaaaatactaaggctcgtacgtctgcatcgattatcttacgtggggcaaatgatttcatgtgtgatgagatggagcgctctttacatgatgcactttgtgtagtgaagagagttttggagtcaaaatctgtggttcccggtgggggtgctgtagaagcagccctttccatataccttgaaaactatgcaaccagcatggggtctcgggaacagcttgcgattgcagagtttgcaagatcacttcttgttattcccaatacactagcagttaatgctgcccaggactccacagatctggttgcaaaattaagagcttttcataatgaggcccaggttaacccagaacgtaaaaatctaaaatggattggtcttgatttgagcaatggtaaacctcgagacaacaaacaagcaggggtgtttgaaccaaccatagttaaagttaagagtttgaaatttgcaacagaagctgcaatcaccattcttcgaattgatgatcttattaaattacatccagaaatccttcggattaaacatggaagttatgaagatgctgttcactctggagcccttaatgattgatctgatgttccttttatttataacaatgttaaatgcaatgtcttgtaccttgagttgagtattacacattaaagtaaagtacaagctgtaaacttgggtttttgtgatgtaggaaatggtttccatctgtactttggtcctctgatttcagatattgcaacctagtactttattagtttaaaaagaaattgaggttgttcaaagtttaagcaattcattctctctgaacacacattgctattcccatcccacccccaatgcacagggctgcaacaccacgacttctgcccattctctccagtgtgtgtaacagggtcacaagaattc

SEQ ID NO: 1824 - protein, 556 aa, Homo sapien
MEGPLSVFGDRSTGETIRSQNVMAAASIANIVKSSLGPVGLDKMLVDDIGDVTITNDGATILKLLEVEHPAAKVLCELADLQDKEVGDGTTSVVIIAAELLKNADELVKQKIHPTSVISGYRLACKEAVRYINENLIVNTDELGRDCLINAAKTSMSSKIIGINGDFFANMVVDAVLAIKYTDIRGQPRYPVNSVNILKAHGRSQMESMLISGYALNCVVGSQGMPKRIVNAKIACLDFSLQKTKMKLGVQVVITDPEKLDQIRQRESDITKERIQKILATGANVILTTGGIDDMCLKYFVEAGAMAVRRVLKRDLKRIAKASGATILSTLANLEGEETFEAAMLGQAEEVVQERICDDELILIKNTKARTSASIILRGANDFMCDEMERSLHDALCVVKRVLESKSVVPGGGAVEAALSIYLENYATSMGSREQLAIAEFARSLLVIPNTLAVNAAQDSTDLVAKLRAFHNEAQVNPERKNLKWIGLDLSNGKPRDNKQAGVFEPTIVKVKSLKFATEAAITILRIDDLIKLHPEILRIKHGSYEDAVHSGALND

SEQ ID NO: 1825 - DNA, 1750 bp, Homo sapien
gctttctttccgtcgcagagagcatcggccggcgaccgttccggcggccattgcgaaaacttccccacggctactgcgtccacgtggcggtggcgtggggactccctgaaagcagagcggcagggcgcccggaagtcgtgagtcgagtcttcccgggctaatccatgccgggttggaggctgctgacgcaggtcggcgcccaggtgctgggtcgactcggggacggcctgggtgctgccctgggcccggggaacagaacacacatctggctttttgttagaggtcttcatggaaagagtggtacatggtgggatgagcatctttctgaagaaaatgtcccattcattaagcagttggtctctgatgaagataaagcccaattagcaagtaaactgtgtcctctgaaagatgaaccatggcctatacatccttgggaaccaggttcctttagagttggtcttattgccttgaagctgggcatgatgcctttatggaccaaggatggtcaaaagcatgtggtcacattacttcaggtacaagactgtcatgtcttaaaatatacgtcaaaggaaaactgtaatggaaaaatggcaaccctgtctgtaggaggaaaaactgtatcacgttttcgtaaagctacatccatattggaattttaccgggaacttggattgccgccgaaacagacagttaaaatctttaatataacagataatgctgcaattaaaccaggcactcctctttatgctgctcactttcgtccaggacagtatgtggatgtcacagccaaaactattggtaaaggttttcaaggtgtcatgaaaagatggggatttaaaggccagcctgctacgcatggtcaaacgaaaacccacaggagacctggagctgttgcaactggtgatattggcagagtctggcctggaactaaaatgcctggaaaaatgggaaacatatacaggacagaatatggactgaaagtgtggagaataaacacaaagcacaacataatctatgtaaatggctctgtacctggacataaaaattgcttagtaaaggtcaaagattctaaactgcctgcatataaggatctcggtaaaaatctaccattccctacatattttcctgatggagatgaagaggaactgccagaagatttgtatgatgaaaacgtgtgtcagcccggtgcgccttctattacatttgcctaacatctttggacgtggcagaaccttacatattctgtgagcttcgatgagccagagtgatatcataaccaccagaaatcatactctcctttcttagtcacaacaaaatcacacatgtcatctttgtcaagggcataaatatatcattcatacccccattaaattttgttagaaaaattaccacattaaatatatgagttaagtagattggatttgctgaaattggtgttgggcatattagcaaaatattcttaatttgtggactcgattcttttttactacatatttcccaagttatcttaagatgtctgtaaatttaacttttattaaagttttgtcaatctttgtgaaatagtggttgtggaacagtagaaaaccatatggggactatagtgcaacctatttgggtaaagaaaccatttgctaaaatggagaaagtaaatagatttttatttaaattacagaaacatgttaaaggccggacaaaggaaagacaataaaatcataaattatcggtcctgtttaaaaaaaaaaaaaaaaaa

SEQ ID NO: 1826 - protein, 348 aa, Homo sapien [sequence omitted]

SEQ ID NO: 1827 - DNA, 1676 bp, Homo sapien
gaattccgccgctgaccgaggcgtgcaaagactccagaattggaggcatgatgaagactctgctgctgtttgtggggctgctgctgacctgggagagtgggcaggtcctgggggaccagacggtctcagacaatgagctccaggaaatgtccaatcagggaagtaagtacgtcaataaggaaattcaaaatgctgtcaacggggtgaaacagataaagactctcatagaaaaaacaaacgaagagcgcaagacactgctcagcaacctagaagaagccaagaagaagaaagaggatgccctaaatgagaccagggaatcagagacaaagctgaaggagctcccaggagtgtgcaatgagaccatgatggccctctgggaagagtgtaagccctgcctgaaacagacctgcatgaagttctacgcacgcgtctgcagaagtggctcaggcctggttggccgccagcttgaggagttcctgaaccagagctcgcccttctacttctggatgaatggtgaccgcatcgactccctgctggagaacgaccggcagcagacgcacatgctggatgtcatgcaggaccacttcagccgcgcgtccagcatcatagacgagctcttccaggacaggttcttcacccgggagccccaggatacctaccactacctgcccttcagcctgccccaccggaggcctcacttcttctttcccaagtcccgcatcgtccgcagcttgatgcccttctctccgtacgagcccctgaacttccacgccatgttccagcccttccttgagatgatacacgaggctcagcaggccatggacatccacttccacagcccggccttccagcacccgccaacagaattcatacgagaaggcgacgatgaccggactgtgtgccgggagatccgccacaactccacgggctgcctgcggatgaaggaccagtgtgacaagtgccgggagatcttgtctgtggactgttccaccaacaacccctcccaggctaagctgcggcgggagctcgacgaatccctccaggtcgctgagaggttgaccaggaaatacaacgagctgctaaagtcctaccagtggaagatgctcaacacctcctccttgctggagcagctgaacgagcagtttaactgggtgtcccggctggcaaacctcacgcaaggcgaagaccagtactatctgcgggtcaccacggtggcttcccacacttctgactcggacgttccttccggtgtcactgaggtggtcgtgaagctctttgactctgatcccatcactgtgacggtccctgtagaagtctccaggaagaaccctaaatttatggagaccgtggcggagaaagcgctgcaggaataccgcaaaaagcaccgggaggagtgagatgtggatgttgcttttgcaccttacgggggcatcttgagtccagctccccccaagatgagctgcagccccccagagagagctctgcacgtcaccaagtaaccaggccccagcctccaggcccccaactccgcccagcctctccccgctctggatcctgcactctaacactcgactctgctgctcatgggaagaacagaattgctcctgcatgcaactaattcaataaaactgtcttgtgagctgaaaaaaaaaaaaaaaaaaaaaaaaaaggaattc

SEQ ID NO: 1828 - protein, 449 aa, Homo sapien
MMKTLLLFVGLLLTWESGQVLGDQTVSDNELQEMSNQGSKYVNKEIQNAVNGVKQIKTLIEKTNEERKTLLSNLEEAKKKKEDALNETRESETKLKELPGVCNETMMALWEECKPCLKQTCMKFYARVCRSGSGLVGRQLEEFLNQSSPFYFWMNGDRIDSLLENDRQQTHMLDVMQDHFSRASSIIDELFQDRFFTREPQDTYHYLPFSLPHRRPHFFFPKSRIVRSLMPFSPYEPLNFHAMFQPFLEMIHEAQQAMDIHFHSPAFQHPPTEFIREGDDDRTVCREIRHNSTGCLRMKDQCDKCREILSVDCSTNNPSQAKLRRELDESLQVAERLTRKYNELLKSYQWKMLNTSSLLEQLNEQFNWVSRLANLTQGEDQYYLRVTTVASHTSDSDVPSGVTEVVVKLFDSDPITVTVPVEVSRKNPKFMETVAEKALQEYRKKHREE

SEQ ID NO: 1829 - DNA, 4578 bp, Homo sapien
tgcttgagctctttgggcctctgttttcacgtctgtatgatagaggtggtattgtttgacttgtatttgtgaagtttcaatgagattgataattgtcgattttatgttaatccctagtacatggcctgctgtcaacaccccaggacacccaggatatggtctttgctgtttgattttcctcatccccagtctcaaggggaagccaggacaatgagaccagccacttcccatcaggagtcactgcaaggcccccagggtggggtggtggggagataagaaccgtgagagaagttggcacaaaggagttatgggacaaagggtccaagataggcagaaaagaaaatgttgccagttgatggggaagaaaggaagtcggagggctcagacactgagggggacagaacatctccatgtgcagtctcatctgctaccctgaaggatctggaggtaggaggctctgggcggaggtgcagtgaccccgcaggccagccctccaacctcctcccgcagcggggactgggtgcccctctgccagctgagacagcccacacacaacccagccctaatgatcgttctctctacctctcccccaagtcctcctccgcctcctcctctctgcatgcgcgtcagagcccgtgccaagaacaagcagcagtcctgaactcgaggtccataaaaatcagtcgactgaatgacaccatcaaatctttgaaacaacagaagaaacaagtggaacatcagctggaagaagaaaagaaagcaaacaatgagaaacagaaagctgaaagggagctagagggtcaaatccagagattgaacacagagaaaaagaaactaaatacggacctgtatcacatgaaacattctctcagatactttgaagaagagtccaaggatctggccggccgcctgcaacgttcatcgcagcgtataggagagttagagtggtctctctgtgctgtcgccgccacacagaagaagaagccggatgggttctcgagccgcagtaaagcacttctcaagcggcagttagagcagtccatacgggagcagatactgctgaaaggacacgtgacacagttgaaggagtcgcttaaagaagtccagctggagagagatcaatatgctgaacaaataaaaggagagagggcccagtggcagcagaggatgaggaaaatgtcgcaggaggtttgcacattgaaggaggagaagaagcatgatacgcatcgggtagaggagctggagaggagcttgtccagactcaaaaaccagatggctgagccactgcccccggatgccccagcagtgtcctctgaggtggagctgcaagacctgaggaaggagctggagagagtggcaggagagctccaggctcaggtggaaaacaatcagtgcatcagtctcctgaaccgtgggcaaaaggagaggcttcgcgagcaggaggagaggcttcaggagcagcaggagaggcttcgggaacgggagaagaggcttcagcagctggccgagccacagagcgacttggaggagctgaagcacgagaacaagagcgcactgcagttggagcagcaagtaaaggagctgcaggagaagctgggccaggtgatggagacgctcacctcggccgagaaggagccagaggcagcagtcccagcctcagggactgggggcgagtctagcggccttatggacctcctggaggagaaggcggacctgagggagcatgtggagaaactggaacttggattcatccagtaccggagagagagatgccatcagaacgtacatcgccttctaacagagccaggggacagtgccaaagatgcgtcaccgggaggaggccatcatcaggctggcccaggacaaggaggagaggaaggtgaagctgctggagctgcaggagatggtgttgcggcttgtggcagctacaacgaggggcacggcaaattcctggccgctgcccagaaccctgctgctgaacccagtccaggagccccagccccccaggagctcggggctgccgacaagcatggtgatctttgtgaggcgagcctcaccaacagcgtggagcctgcacaaggagaagccagggagggttcttcccaggacaaccctactgcacagccaatcgtgcagctccttggtgagatgcaggaccaccaggagcacccaggcttgggcagcaactgctgtgtgccatgcttttgctgggcttggctgccgagaagaaggagataaacaccaccatcatcaaagagctgctcaagaaatttttaaaaacgaaacaaagttatggggttaatctcctacacaattcatttacttcatttgaatgttagagctactcatgattatttgtgtttctaatttatagtttaagtttatttgtaaaaagttaaaagagagtgggtctctgtggctctcactgatgttcactctggcatccttcagcatttttcttttttcatttcataattgtaggtcattagcatgcatatcgagtttgcccttacgtggtgggagttcaaacacacaaagacccactctttgcacaaaactgttctcgctggtttggaataggctcccgtgcttttctaatgttattgcagcatggatgtccattacagaattcagataaaatttgctaatgttctgctatgatgtttgatctcatcttaatcacagtgagctcttctatagctcaatatgcggtttgccctcaagtgtgcactgtttattactttgtaatatgccactgtgagtactgacatttagagctgtttaaaggccgagaactggaaacagcctttcctccattttctgtgtattggtgatgggagtgataaccttttgggggagctttctaaatctcacagaagaggaaagtggcctgctctggcaggtatgtgcaggatacagtgtgtttcatctgttccggtgccaagaatgagcagtgtactgtggcagttccctttggatttgtatgtgctctgggctcatgaagatattgcatcgtgagctgcagcagttgcactctttttcaatgacctaaaaagggcttatttccgaggaatgaaaggctgccatcattggctgtgggtgtgaaaaacctttcctagcttagagcatttgtatctacaatacattttaaagtcagagttcgtgttccctgttttaatcacatgactacctgtcccagtacacgaaagggcgctggttggcattcttcttaatgtatttagtgaagatcataagaaatcctttaagagtttaaatgtctctgaaacaggcatacaggctctagtcaagaatgaattagagtgaaggaaagctgtgtgacacctggcattcctctctgttcatggagcttctttgaggcttgaagtttgattttactatctagacctctctggctaatacctattcttcaaccacctcggttactctgacataggaatttacttcttttccttgagtggaaaacactttagaaagtaataacaaacattattataaactaatatatgtgagagtacttagttgaaacaaaaaggaattttagtagacagtattatattatctttgaaaatcaaggagaagtttatgcaacttaaaatgtttacacactgtggtgcaatctactgtttgtgaatgtctgtattatcaggaaacatgtctatacgatcgcagagttgtatttcctcacaaacttctttacgaagagtgaaatacgtttttgtacctctcattttcagtcagggacatactttgtgcaatatttctgtgattgtgcctatgcatgatgaatgaatgcatttcaatcatacattgcctaaatcataacttgatgatgcttgggaaagaatcaacagttaaaacttcatgaagttctaatgtctgtgttccaaaacacatcacattattaggttgtagggagatatgtaggtgtgctccctggggtggggagttttctagttactagaccatctccatttttagcacttggcagcctcatgatccttttataaatgtgagattaacaggagagcagcaatacgattttgccaatggaataacagatttgccggcattcactgaaagagggcagatattgggtccttgtaacttcaactgactcttccaaattgtatgaatttatcaatgtattacacaaatccagtttcagaatgataaaaaatgttagaccaaataatgcggctaattaacagtcgtatgatttctagcccatgggtttaaaactgtatcttaaagagtcattttaaaataatataaatattaaaaaatgtaactgctatcttaatgttctgaaataaaacattttaaaatataaatcctgtagtttaaaaggaagaaatggtgggaaggaaaagtagagaaagaaatgccaattacaggccaaagcgttatttgccaagttttcttagaatgaattttaccaatgtatgagttcttgttaacagaatgtgtaacggaaatactgaaagacttttgcttaaagtggcattattgactgctgatgtgatgctactgtaatgcaataaatttttaaattgttgc

SEQ ID NO: 1830 - protein, 631 aa, Homo sapien
MLPVDGEERKSEGSDTEGDRTSPCAVSSATLKDLEVGGSGRRCSDPAGQPSNLLPQRGLGAPLPAETAHTQPSPNDRSLYLSPKSSSASSSLHARQSPCQEQAAVLNSRSIKISRLNDTIKSLKQQKKQVEHQLEEEKKANNEKQKAERELEGQIQRLNTEKKKLNTDLYHMKHSLRYFEEESKDLAGRLQRSSQRIGELEWSLCAVAATQKKKPDGFSSRSKALLKRQLEQSIREQILLKGHVTQLKESLKEVQLERDQYAEQIKGERAQWQQRMRKMSQEVCTLKEEKKHDTHRVEELERSLSRLKNQMAEPLPPDAPAVSSEVELQDLRKELERVAGELQAQVENNQCISLLNRGQKERLREQEERLQEQQERLREREKRLQQLAEPQSDLEELKHENKSALQLEQQVKELQEKLGQVMETLTSAEKEPEAAVPASGTGGESSGLMDLLEEKADLREHVEKLELGFIQYRRERCHQNVHRLLTEPGDSAKDASPGGGHHQAGPGQGGEEGEAAGAAGDGVAACGSYNEGHGKFLAAAQNPAAEPSPGAPAPQELGAADKHGDLCEASLTNSVEPAQGEAREGSSQDNPTAQPIVQLLGEMQDHQEHPGLGSNCCVPCFCWAWLPRRRR

SEQ ID NO: 1831 - DNA, 1050 bp, Homo sapien
ctttctgcccacactagacatggcgcttgccagcgtgttggagagaccgctaccggtgaaccagcgcgggtttttcggacttgggggtcgtgcagatctgctggatctaggtccagggagtctcagtgatggtctgagcctggccgcgccaggctggggtgtcccagaagagccaggaatcgaaatgcttcatggaacaaccaccctggccttcaagttccgccatggagtcatagttgcagctgactccagggctacagcgggtgcttacattgcctcccagacggtgaagaaggtgatagagatcaacccatacctgctaggcaccatggctgggggcgcagcggattgcagcttctgggaacggctgttggctcggcaatgtcgaatctatgagcttcgaaataaggaacgcatctctgtagcagctgcctccaaactgcttgccaacatggtgtatcagtacaaaggcatggggctgtccatgggcaccatgatctgtggctgggataagagaggccctggcctctactacgtggacagtgaagggaaccggatttcaggggccaccttctctgtaggttctggctctgtgtatgcatatggggtcatggatcggggctattcctatgacctggaagtggagcaggcctatgatctggcccgtcgagccatctaccaagccacctacagagatgcctactcaggaggtgcagtcaacctctaccacgtgcgggaggatggctggatccgagtctccagtgacaatgtggctgatctacatgagaagtatagtggctctaccccctgaaagagggtggatgcagctgcttgtgtttcttggggtgactgtcattggtaatacggacacagtgacccatcctccatcctatttatagtggaagggccttcaattgtatcagtacttttttttaagctctggcacattgacctctatgtgttaccagtcattaatgagctgctgcagaggtgactatttgttttactttcttggatgttaaacattacactactcactactcaatctca

SEQ ID NO: 1832 - protein, 263 aa, Homo sapien
MALASVLERPLPVNQRGFFGLGGRADLLDLGPGSLSDGLSLAAPGWGVPEEPGIEMLHGTTTLAFKFRHGVIVAADSRATAGAYIASQTVKKVIEINPYLLGTMAGGAADCSFWERLLARQCRIYELRNKERISVAAASKLLANMVYQYKGMGLSMGTMICGWDKRGPGLYYVDSEGNRISGATFSVGSGSVYAYGVMDRGYSYDLEVEQAYDLARRAIYQATYRDAYSGGAVNLYHVREDGWIRVSSDNVADLHEKYSGSTP

SEQ ID NO: 1833 - DNA, 7711 bp, Homo sapien
agggccccaggtctgtggggcatcctgtcttcctttatgtggggtaactctccgttccgttccccaagccttcacagagtgacaccttcacagataatggggtggggggcctggggtcctctggcagagacatctggggagaaagccagggacctatccctgctgaagcaggtacaggccatcctctggatttgtgggcctgagagtgtgtgtgggtgtgggtgcgcgcgtgcgcgcgcgtgcttttgagaaggcatatgctgggtgtgtctgtctgtgcctatatctttgtttgggtctcccatactgcgtatagatgaatgggtcaggatatctggaacaaaatatggaggtgaagggtgagatcgggaaacaaagggtatggccccctagttcccaaagggagcagggagatgggaatagaattgaaggtaggttttaggctacttgggaggaggaatatttaggtaattgtggagactttctcctgtgtgatgaaggcggcagacactgtgatcctgtgggcaagaagtaaaaatgaccagctgaggatttcttttcctccaggactgtgttggggtgacaggatgcctgataaggatgacattcggctgctgccgtcagcattgggtgtgaagaagagaaaacgaggacccaagaagcagaaggagaacaagccaggaaaaccccgaaaacgcaagaagcgtgacagtgaggaggaatttggttctgagcgagatgagtaccgggagaagtcagagagtgggggcagtgaatatggaaccggaccgggtcggaaacgaagaaggaagcaccgagaaaaaaaggagaagaagacaaagcggcggaaaaagggggagggagatggggggcaaaagcaagtggaacagaagtcatcagcaactctgcttctgacctggggcctggaggatgtggagcatgtgttctctgaggaggattaccacacgctcaccaactacaaagccttcagccagttcatgaggcccctaattgctaagaagaatcctaagatcccaatgtctaagatgatgaccatccttggggccaaatggagagagttcagtgccaacaaccccttcaaggggtcagcagctgctgtggcggcaggcagcggcagcagcagcagcagctgtagctgagcaggtgtcagctgctgtctcgtcggccacccccatagcaccctccggaccccccgcccttccaccaccccctgctgctgatatccagcccccacccatccgaagagccaaaaccaaagagggcaaaggtccaggccataagaggcggagtaagagcccccgagtgcctgatggacgcaagaagcttcggggaaagaaaatggcaccactcaaaataaaactagggcttctgggtggcaagaggaagaaaggaggctcgtatgtttttcagagcgacgaaggtcctgaaccagaggctgaggaatcagacctggacagtggcagtgtccacagtgcctcaggccggcctgatggccctgtccgcaccaagaaactaaagagaggccggccaggaaggaagaagaagaaggtcctgggctgtcctgcagtggccggggaggaggaggttgatggctacgagacggatcaccaggattactgtgaggtgtgccagcagggtggggaaattattctgtgtgacacctgccctcgtgcctaccacctcgtctgccttgatcctgagcttgaccgggctccagagggcaaatggagctgccctcactgtgagaaggagggggtccagtgggaggccaaggaggaagaagaagaatacgaagaggagggagaggaagaacgggagaaggaggaggaggatgatcacatggagtactgccgcgtatgcaaggacggcggggagctcctgtgctgtgacgcgtgcatctcctcctaccacattcattgtctaaaccctcccctgcctgacattcccaatggtgaatggctgtgtccccgatgcacatgccccgtgctgaagggtcgagtgcagaagatcctacattggcggtggggggagccacctgtagcagtgccagcccctcaacaggcagatggaaatccagatgtcccacccccccgtcctcttcaaggcagatcagagcgagagttctttgtcaagtgggtaggactatcctactggcactgctcctgggccaaggagcttcagctggaaatcttccatttggttatgtatcgaaactaccagcggaagaatgacatggatgagcccccacccctggactatggctccggcgaggatgatgggaagagcgacaagcgtaaagtgaaagacccgcactatgctgagatggaggagaagtactatcgttttggcatcaagccagagtggatgaccgtccaccgcatcatcaaccacagtgtggataaaaaggggaattaccactatctagtaaaatggagggacttaccatatgaccagtccacgtgggaggaagatgaaatgaatatccctgaatacgaagaacataagcaaagctactggagacaccgagaactaattatgggggaagaccctgcccagccccgcaagtataagaagaagaagaaggagctacagggtgatgggcctcccagttctcccactaatgatcctaccgtgaaatatgagactcagccacggtttatcacagccactggaggcaccctgcacatgtatcagttggaagggctgaactggctacgcttctcctgggcccagggcactgacaccattctcgctgatgagatggggctaggcaagaccatacaaaccatcgtcttcctctactcactctacaaggagggccacacaaaaggtcccttcctggtgagtgccccactctctaccatcattaactgggagcgggagttccagatgtgggcacccaaattctatgtggtgacatacacgggtgacaaggacagccgggccatcattcgtgagaatgaattctcctttgaggacaatgccatcaaagggggcaagaaagcttttaagatgaagagggaggcacaggtgaagttccatgttctcctgacatcgtatgagctgatcaccattgatcaggcagcacttggttccatccgctgggcctgtcttgtggtagatgaggcccatcgactcaagaacaaccagtccaagtttttcagggttctcaatggttacaagatagatcataagttgctgctgacaggaaccccattgcagaataatctggaggagctcttccatctcctgaacttcctcaccccagagagatttaacaacttggagggcttcctggaggagtttgctgacatatccaaagaggaccagatcaagaaactgcatgatttgctggggccacacatgctgcggagactcaaggcagatgtctttaagaacatgccagccaagacagagctcatcgttcgggtggagctaagccccatgcagaagaaatactacaaatacatcctgactcgaaattttgaggccttgaattcacgaggtggtgggaaccaggtgtcgctgcttaatatcatgatggatcttaagaagtgctgcaaccatccatacctttttcccgtggctgctatggagtcccccaaactccccagtggggcttatgagggtggggcacttattaagtcgtctgggaagctcatgctgctccagaagatgctgcgaaagctgaaggagcaaggacaccgagtgctcatcttctcgcagatgaccaaaatgttagacttgcttgaggacttcttagactatgaaggctacaagtatgagcgcatcgatggtggtatcacgggtgccctgaggcaggaggccatcgatcggtttaatgctcctggggcccaacaattctgcttcctcctgtccacccgagctgggggcctgggcatcaatctggccactgctgacactgtcatcatctttgattctgactggaacccccataatgacatccaggcctttagccgggctcatcggattggccaggccaacaaagtgatgatttaccggtttgtgactcgcgcgtcagtggaagagcgaatcacacaagtggccaagagaaagatgatgctgacacacctggttgtgcggcctgggctgggctccaaggcaggctccatgtccaagcaggagcttgacgacattctcaaatttggcactgaagagctattcaaggatgaaaacgagggggagaacaaggaggaggacagcagtgtgattcattatgacaatgaggccatcgctcggctgttggaccggaaccaggatgcaactgaggacactgacgtgcagaacatgaatgagtatctcagctccttcaaggtggcacagtacgtcgtgcgggaagaagacaagattgaggaaattgagcgagagatcatcaagcaggaggagaatgtggaccctgactactgggagaagctgctgaggcatcactatgagcaacagcaggaagacctagcccggaatctaggcaagggcaagcgggttcgcaagcaagttaactacaatgatgctgctcaggaagaccaagacaaccagtcagagtactcggtgggttcagaggaggaggatgaagacttcgatgaacgtcctgaagggcgtagacagtcaaagaggcagctccggaatgagaaagataagccactgcctccactgctggcccgagtcgggggcaacattgaggtgctgggcttcaacacccgtcagcggaaggctttcctcaatgctgtgatgcgctgggggatgccaccacaggatgccttcaccacacagtggctggtgcgggacctgaggggcaagactgagaaggagtttaaggcctatgtgtctttgttcatgcgccatctgtgtgagcctggggcagacggctctgaaacctttgccgatggggtccctcgggagggactgagtcgccagcaggtgttgacccgcattggagtcatgtctctcgtcaaaaagaaggtgcaggagtttgagcacatcaatgggcgttggtcaatgccggaactgatgcctgaccccagcgccgattctaagcgctcctccagagcctcctctcctaccaaaacgtctcccaccactcctgaggcttctgctaccaacagtccctgcacctctaaacctgctactccagctccaagtgagaaaggagaaggcataaggacacctcttgagaaggaggaagctgaaaaccaggaggaaaagccagagaagaacagcagaattggggagaagatggagacagaggctgatgcccccagcccagccccatcacttggggagcggctggagccaaggaagattcctctagaggatgaggtgccaggggtgcctggagagatggagcctgaacctgggtaccgtggggacagagagaagtcagccacagagtcgacgccaggagaaaggggggaggagaagccgttggatggacaggaacacagggagaggccggagggggaaacaggggatttgggcaagagagaagatgtaaaaggtgaccgggagcttcgaccagggcctcgagatgagccacggtccaatgggcgacgagaggaaaagacagagaagccccggttcatgttcaatatcgccgatggtggcttcacagagcttcacacactgtggcagaatgaggaacgggcagctatttcctcggggaaactcaatgagatctggcacagaagacatgactattggcttctggctgggattgtcctccatggctatgcacggtggcaggacatccagaatgatgctcaatttgccattatcaacgagccatttaaaactgaagccaataaggggaactttctggagatgaaaaataagttcctggcccggaggttcaagctcctggagcaggcgctggtgattgaggagcagctgcggcgggcggcctacctgaacctgtcgcaggagccggcgcaccccgccatggccctccacgcccgcttcgccgaggccgagtgcctggccgagagccaccagcacctctccaaggagtcgctggcggggaacaagccggccaacgccgtcctgcacaaggttctgaaccagctggaggagttgctgagcgacatgaaggcggacgtgacccgcctgccagccacgctgtcccgaataccccccatcgcagcccgccttcagatgtccgagcgcagcatcctcagccggctggccagcaagggcacggagcctcaccccacaccggcctacccgccgggtccctacgctacacctccggggtacggggcggccttcagcgccgcacccgtaggggccctggccgccgcaggcgccaattacagccagatgcctgcagggtccttcatcacagccgccaccaacggccctccagtgcttgtgaagaaggagaaggaaatggtgggggcattggtgtcagacgggctggatcggaaggagccccgagccggggaggtgatctgtatagacgactgactggatcccaggcctgcccttcacccaggccccgtccccgaggccgacccccagctcaagcgctggggcctgctgccagccctccaccttccccaccccttgggccatcactgggctaggaacccctttgcccctctctgcagctcctctcttcaagaagggccctttgtctttctccactcccacacacctttcccaccaagccttgaagactgtgctggtgagaagaagtctgggtgggagatggctggcagggtcttccaagtaccttcctcccacactgccaagtatacacaacttcccagtaaatggttgtggggaggaaagaggtggagcctccccagccgtttccctgcagaatcagctctgtctcatgtggaagtggagaatcagccttgcctggcctttaggaacttttgtggggaagagagctttgaagagaggagggggactttagagagggatgaaaatgagccctgggagggaggaagggacgaggaggggtggctgcatgttaccgtcccctacctctccccacgtggagggtggagcagttatgagggaggaagtcaactgctgttcagcctcagaataaaggtgccgttcactggctcagttacctcctgtgtaccggcatcttgtgttgggaatgttcccccctccctagggaccaaggaccacccctacaaaaagagtaatggttgggtgatactccctcaagccaaagaggagctccccaacctgttctagggacccaggtaacctagaagggtgggagagaatacaatgggccagatgtggtggaagcccagctctggggctcaggttcctggaagacttctactaccctccctcctcaaggcctggatacagactaaatttgtataagtcaggcaggggacctagtcagggtcttgggagctaccttgtcgttgggaccagagcaaaatagtggagggcaggctagggaaatgtgggcacatcccccctcccaggaggggccggggagagtggcagtttgcatggcgaaccccccacttcctctttgctgccccttcactttcttgctgcccctttcccagtctctcttcacacccactcctggtctgtcctgatcccctcttctgtatcaggtttattggttgtacatataaattatactttcctttcaaaaaaaatctatgtcgggtgcggagaaagaggtaatgaaatg

SEQ ID NO: 1834 - protein, 2001 aa, Homo sapien
MKAADTVILWARSKNDQLRISFPPGLCWGDRMPDKDDIRLLPSALGVKKRKRGPKKQKENKPGKPRKRKKRDSEEEFGSERDEYREKSESGGSEYGTGPGRKRRRKHREKKEKKTKRRKKGEGDGGQKQVEQKSSATLLLTWGLEDVEHVFSEEDYHTLTNYKAFSQFMRPLIAKKNPKIPMSKMMTPSLGPNGESSVPTTPSRGQQLLWRQAAAAAAAAVAEQVSAAVSSATPIAPSGPPALPPPPAADIQPPPIRRAKTKEGKGPGHKRRSKSPRVPDGRKKLRGKKMAPLKIKLGLLGGKRKKGGSYVFQSDEGPEPEAEESDLDSGSVHSASGRPDGPVRTKKLKRGRPGRKKKKVLGCPAVAGEEEVDGYETDHQDYCEVCQQGGEIILCDTCPRAYHLVCLDPELDRAPEGKWSCPHCEKEGVQWEAKEEEEEYEEEGEEEREKEEEDDHMEYCRVCKDGGELLCCDACISSYHIHCLNPPLPDIPNGEWLCPRCTCPVLKGRVQKILHWRWGEPPVAVPAPQQADGNPDVPPPRPLQGRSEREFFVKWVGLSYWHCSWAKELQLEIFHLVMYRNYQRKNDMDEPPPLDYGSGEDDGKSDKRKVKDPHYAEMEEKYYRFGIKPEWMTVHRIINHSVDKKGNYHYLVKWRDLPYDQSTWEEDEMNIPEYEEHKQSYWRHRELIMGEDPAQPRKYKKKKKELQGDGPPSSPTNDPTVKYETQPRFITATGGTLHMYQLEGLNWLRFSWAQGTDTILADEMGLGKTIQTIVFLYSLYKEGHTKGPFLVSAPLSTIINWEREFQMWAPKFYVVTYTGDKDSRAIIRENEFSFEDNAIKGGKKAFKMKREAQVKFHVLLTSYELITIDQAALGSIRWACLVVDEAHRLKNNQSKFFRVLNGYKIDHKLLLTGTPLQNNLEELFHLLNFLTPERFNNLEGFLEEFADISKEDQIKKLHDLLGPHMLRRLKADVFKNMPAKTELIVRVELSPMQKKYYKYILTRNFEALNSRGGGNQVSLLNIMMDLKKCCNHPYLFPVAAMESPKLPSGAYEGGALIKSSGKLMLLQKMLRKLKEQGHRVLIFSQMTKMLDLLEDFLDYEGYKYERIDGGITGALRQEAIDRFNAPGAQQFCFLLSTRAGGLGINLATADTVIIFDSDWNPHNDIQAFSRAHRIGQANKVMIYRFVTRASVEERITQVAKRKMMLTHLVVRPGLGSKAGSMSKQELDDILKFGTEELFKDENEGENKEEDSSVIHYDNEAIARLLDRNQDATEDTDVQNMNEYLSSFKVAQYVVREEDKIEEIEREIIKQEENVDPDYWEKLLRHHYEQQQEDLARNLGKGKRVRKQVNYNDAAQEDQDNQSEYSVGSEEEDEDFDERPEGRRQSKRQLRNEKDKPLPPLLARVGGNIEVLGFNTRQRKAFLNAVMRWGMPPQDAFTTQWLVRDLRGKTEKEFKAYVSLFMRHLCEPGADGSETFADGVPREGLSRQQVLTRIGVMSLVKKKVQEFEHINGRWSMPELMPDPSADSKRSSRASSPTKTSPTTPEASATNSPCTSKPATPAPSEKGEGIRTPLEKEEAENQEEKPEKNSRIGEKMETEADAPSPAPSLGERLEPRKIPLEDEVPGVPGEMEPEPGYRGDREKSATESTPGERGEEKPLDGQEHRERPEGETGDLGKREDVKGDRELRPGPRDEPRSNGRREEKTEKPRFMFNIADGGFTELHTLWQNEERAAISSGKLNEIWHRRHDYWLLAGIVLHGYARWQDIQNDAQFAIINEPFKTEANKGNFLEMKNKFLARRFKLLEQALVIEEQLRRAAYLNLSQEPAHPAMALHARFAEAECLAESHQHLSKESLAGNKPANAVLHKVLNQLEELLSDMKADVTRLPATLSRIPPIAARLQMSERSILSRLASKGTEPHPTPAYPPGPYATPPGYGAAFSAAPVGALAAAGANYSQMPAGSFITAATNGPPVLVKKEKEMVGALVSDGLDRKEPRAGEVICIDD

SEQ ID NO: 1835 - DNA, 1941 bp, Homo sapien
tctcttgattcctagtctctcgatatggcacctccgtcagtctttgccgaggttccgcaggcccagcctgtcctggtcttcaagctcactgccgacttcagggaggatccggacccccgcaaggtcaacctgggagtgggagcatatcgcacggatgactgccatccctgggttttgccagtagtgaagaaagtggagcagaagattgctaatgacaatagcctaaatcacgagtatctgccaatcctgggcctggctgagttccggagctgtgcttctcgtcttgcccttggggatgacagcccagcactcaaggagaagcgggtaggaggtgtgcaatctttggggggaacaggtgcacttcgaattggagctgatttcttagcgcgttggtacaatggaacaaacaacaagaacacacctgtctatgtgtcctcaccaacctgggagaatcacaatgctgtgttttccgctgctggttttaaagacattcggtcctatcgctactgggatgcagagaagagaggattggacctccagggcttcctgaatgatctggagaatgctcctgagttctccattgttgtcctccacgcctgtgcacacaacccaactgggattgacccaactccggagcagtggaagcagattgcttctgtcatgaagcaccggtttctgttccccttctttgactcagcctatcagggcttcgcatctggaaacctggagagagatgcctgggccattcgctattttgtgtctgaaggcttcgagttcttctgtgcccagtccttctccaagaacttcgggctctacaatgagagagtcgggaatctgactgtggttggaaaagaacctgagagcatcctgcaagtcctttcccagatggagaagatcgtgcggattacttggtccaatccccccgcccagggagcacgaattgtggccagcaccctctctaaccctgagctctttgaggaatggacaggtaatgtgaagacaatggctgaccggattctgaccatgagatctgaactcagggcacgactagaagccctcaaaacccctgggacctggaaccacatcactgatcaaattggcatgttcagcttcactgggttgaaccccaagcaggttgagtatctggtcaatgaaaagcacatctacctgctgccaagtggtcgaatcaacgtgagtggcttaaccaccaaaaatctagattacgtggccacctccatccatgaagcagtcaccaaaatccagtgaagaaacaccacccgtccagtaccaccaaagtagttctctgtcatgtgtgttccctgcctgcacaaacctacatgtacataccatggattagagacacttgcaggactgaaagctgctctggtgaggcagcctctgtttaaaccggccccacatgaagagaacatcccttgagacgaatttggagactgggattagagcctttggaggtcaaagcaaattaagatttttatttaagaataaaagagtactttgatcatgagacataggtatcttgtccctctcactaaaaaggagtgttgtgtgtggcggccacgtgcttctatgtggtgtttgactctgtacaaattctagtcccaaagatcaagttgtctgaaggagccaaagtgtgaatgtgggtgtcggctgcggcattaaattcatcatctcaacccagagtgtctggtctccctgctctttctgcatggttgtgtccctagtcctaagctttggttctttagggtgactgtggtaagaaggatatttaatcatgacatgcacggacacgtacatatttaactgaaacaagttttaccaaacagtatttactcgtgatgtgcgtagtgcattctgatatttttgagccattctattgtgttctacttcacctaaaaaaataaaataaaaatgttgatcaag

SEQ ID NO: 1836 - protein, 413 aa, Homo sapien
MAPPSVFAEVPQAQPVLVFKLTADFREDPDPRKVNLGVGAYRTDDCHPWVLPVVKKVEQKIANDNSLNHEYLPILGLAEFRSCASRLALGDDSPALKEKRVGGVQSLGGTGALRIGADFLARWYNGTNNKNTPVYVSSPTWENHNAVFSAAGFKDIRSYRYWDAEKRGLDLQGFLNDLENAPEFSIVVLHACAHNPTGIDPTPEQWKQIASVMKHRFLFPFFDSAYQGFASGNLERDAWAIRYFVSEGFEFFCAQSFSKNFGLYNERVGNLTVVGKEPESILQVLSQMEKIVRITWSNPPAQGARIVASTLSNPELFEEWTGNVKTMADRILTMRSELRARLEALKTPGTWNHITDQIGMFSFTGLNPKQVEYLVNEKHIYLLPSGRINVSGLTTKNLDYVATSIHEAVTKIQ

SEQ ID NO: 1837 - DNA, 2839 bp, Homo sapien
gcacgagctgcggctccgctctcgtcgcaacgagatctttcgagatcttctccgcccccgctaccggcgcctcctctgcggccactgagccggagccggcctgagcagcgctctcggttgcagtacccactggaaggacttaggcgctcgcgtggacaccgcaagcccctcagtagcctcggcccaagaggcctgctttccactcgctagccccgccggggtccgtgtcctgtctcggtggccggacccgggcccgagcccgagcagtagccggcgccatgtcggtggtgggcatagacctgggcttccagagctgctacgtcgctgtggcccgcgccggcggcatcgagactatcgctaatgagtatagcgaccgctgcacgccggcttgcatttcttttggtcctaagaatcgttcaattggagcagcagctaaaagccaggtaatttctaatgcaaagaacacagtccaaggatttaaaagattccatggccgagcattctctgatccatttgtggaggcagaaaaatctaaccttgcatatgatattgtgcagttgcctacaggattaacaggtataaaggtgacatatatggaggaagagcgaaattttaccactgagcaagtgactgccatgcttttgtccaaactgaaggagacagccgaaagtgttcttaagaagcctgtagttgactgtgttgtttcggttccttgtttctatactgatgcagaaagacgatcagtgatggatgcaacacagattgctggtcttaattgcttgcgattaatgaatgaaaccactgcagttgctcttgcatatggaatctataagcaggatcttcctgccttagaagagaaaccaagaaatgtagtttttgtagacatgggccactctgcttatcaagtttctgtatgtgcatttaatagaggaaaactgaaagttctggccactgcatttgacacgacattgggaggtagaaaatttgatgaagtgttagtaaatcacttctgtgaagaatttgggaagaaatacaagctagacattaagtccaaaatccgtgcattattacgactctctcaggagtgtgagaaactcaagaaattgatgagtgcaaatgcttcagatctccctttgagcattgaatgttttatgaatgatgttgatgtatctggaactatgaatagaggcaaatttctggagatgtgcaatgatctcttagctagagtggagccaccacttcgtagtgttttggaacaaaccaagttaaagaaagaagatatttatgcagtggagatagttggtggtgctacacgaatccctgcggtaaaagagaagatcagcaaatttttcggtaaagaacttagtacaacattaaatgctgatgaagctgtcactcgaggctgtgcattgcagtgtgccatcttatcgcctgctttcaaagtcagagaattttctatcactgatgtagtaccatatccaatatctctgagatggaattctccagctgaagaagggtcaagtgactgtgaagtcttttccaaaaatcatgctgctcctttctctaaagttcttacattttatagaaaggaacctttcactcttgaggcctactacagctctcctcaggatttgccctatccagatcctgctatagctcagttttcagttcagaaagtcactcctcagtctgatggctccagttcaaaagtgaaagtcaaagttcgagtaaatgtccatggcattttcagtgtgtccagtgcatctttagtggaggttcacaagtctgaggaaaatgaggagccaatggaaacagatcagaatgcaaaggaggaagagaagatgcaagtggaccaggaggaaccacatgttgaagagcaacagcagcagacaccagcagaaaataaggcagagtctgaagaaatggagacctctcaagctggatccaaggataaaaagatggaccaaccaccccaagccaagaaggcaaaagtgaagaccagtactgtggacctgccaatcgagaatcagctattatggcagatagacagagagatgctcaacttgtacattgaaaatgagggtaagatgatcatgcaggataaactggagaaggagcggaatgatgctaagaacgcagtgagggaatatgtgtatgaaatgagagacaagcttagtggtgaatatgagaagtttgtgagtgaagatggtcgtaacagttttactttgaaactggaagatactgaaaattggttgtatgaggatggagaagaccagccaaagcaagtttatgttgataagttggctgaattaaaaaatctaggtcaacctattaagatacgtttccaggaatctgaagaacgaccaaaattatttgaagaactagggaaacagatccaacagtatatgaaaataatcagctctttcaaaaacaaggaggaccagtatgatcatttggatgctgctgacatgacaaaggtagaaaaaagcacaaatgaagcaatggagtggatgaataacaagctaaatctgcagaacaagcagagtttgaccatggatccagttgtcaagtcaaaagagattgaagctaaaattaaggagctgacaagtacttgtagccctataatttcaaagcccaaacccaaagtggaacctccaaaagaggaacaaaaaaatgcagagcagaatggaccagtggatggacaaggagacaacccaggcccccaggctgctgagcagggtacagacacagctgtgccttcggattcagacaagaagcttcctgaaatggacattgattgattccaacacttgtttctattaaaacagactattataaa

SEQ ID NO: 1838 - protein, 840 aa, Homo sapien
MSVVGIDLGFQSCYVAVARAGGIETIANEYSDRCTPACISFGPKNRSIGAAAKSQVISNAKNTVQGFKRFHGRAFSDPFVEAEKSNLAYDIVQLPTGLTGIKVTYMEEERNFTTEQVTAMLLSKLKETAESVLKKPVVDCVVSVPCFYTDAERRSVMDATQIAGLNCLRLMNETTAVALAYGIYKQDLPALEEKPRNVVFVDMGHSAYQVSVCAFNRGKLKVLATAFDTTLGGRKFDEVLVNHFCEEFGKKYKLDIKSKIRALLRLSQECEKLKKLMSANASDLPLSIECFMNDVDVSGTMNRGKFLEMCNDLLARVEPPLRSVLEQTKLKKEDIYAVEIVGGATRIPAVKEKISKFFGKELSTTLNADEAVTRGCALQCAILSPAFKVREFSITDVVPYPISLRWNSPAEEGSSDCEVFSKNHAAPFSKVLTFYRKEPFTLEAYYSSPQDLPYPDPAIAQFSVQKVTPQSDGSSSKVKVKVRVNVHGIFSVSSASLVEVHKSEENEEPMETDQNAKEEEKMQVDQEEPHVEEQQQQTPAENKAESEEMETSQAGSKDKKMDQPPQAKKAKVKTSTVDLPIENQLLWQIDREMLNLYIENEGKMIMQDKLEKERNDAKNAVREYVYEMRDKLSGEYEKFVSEDGRNSFTLKLEDTENWLYEDGEDQPKQVYVDKLAELKNLGQPIKIRFQESEERPKLFEELGKQIQQYMKIISSFKNKEDQYDHLDAADMTKVEKSTNEAMEWMNNKLNLQNKQSLTMDPVVKSKEIEAKIKELTSTCSPIISKPKPKVEPPKEEQKNAEQNGPVDGQGDNPGPQAAEQGTDTAVPSDSDKKLPEMDID

SEQ ID NO: 1839 - DNA, 849 bp, Homo sapien
acagttgctttgaggcagtaccggaggagaaagatggcggctaccttactagctgctcggggagccgggccagcaccggcttgggggccggaggcgttcactccagactgggaaagccgagaagtttccactgggaccactatcatggccgtgcagtttgacgggggcgtggttctgggggcggactccagaacaaccactgggtcctacatcgccaatcgagtgactgacaagctgacacctattcacgaccgcattttctgctgtcgctcaggctcagctgctgatacccaggcagtagctgatgctgtcacctaccagctcggtttccacagcattgaactgaatgagcctccactggtccacacagcagccagcctctttaaggagatgtgttaccgataccgggaagacctgatggcgggaatcatcatcgcaggctgggaccctcaagaaggagggcaggtgtactcagtgcctatggggggtatgatggtaaggcagtcctttgccattggaggctccgggagctcctacatctatggctatgttgatgctacctaccgggaaggcatgaccaaggaagagtgtctgcaattcactgccaatgctctcgctttggccatggagcgggatggctccagtggaggagtgatccgcctggcagccattgcagagtcaggggtagagcggcaagtacttttgggagaccagatacccaaattcgccgttgccactttaccacccgcctgaatcctgggattctagtatgcaataagagatgccctgtactgatgcaaaatttaataaagtttgtcacagagaaaaaaaaaaaaaaaaaaaaaaaaa

SEQ ID NO: 1840 - protein, 239 aa, Homo sapien
MAATLLAARGAGPAPAWGPEAFTPDWESREVSTGTTIMAVQFDGGVVLGADSRTTTGSYIANRVTDKLTPIHDRIFCCRSGSAADTQAVADAVTYQLGFHSIELNEPPLVHTAASLFKEMCYRYREDLMAGIIIAGWDPQEGGQVYSVPMGGMMVRQSFAIGGSGSSYIYGYVDATYREGMTKEECLQFTANALALAMERDGSSGGVIRLAAIAESGVERQVLLGDQIPKFAVATLPPA

SEQ ID NO: 1841 - DNA, 4117 bp, Homo sapien
tccgcctctctctttactgcggcgcggggcaaggtgtgcgggcgggaaggggcacgggcacccccgcggtccccgggaggctagagatcatggaagggaagtggttgctgtgtatgttactggtgcttggaactgctattgttgaggctcatgatggacatgatgatgatgtgattgatattgaggatgaccttgacgatgtcattgaagaggtagaagactcaaaaccagataccactgctcctccttcatctcccaaggttacttacaaagctccagttccaacaggggaagtatattttgctgattcttttgacagaggaactctgtcagggtggattttatccaaagccaagaaagacgataccgatgatgaaattgccaaatatgatggaaagtgggaggtagaggaaatgaaggagtcaaagcttccaggtgataaaggacttgtgttgatgtctcgggccaagcatcatgcgatctctgctaaactgaacaagcccttcctgtttgacaccaagcctctcattgttcagtatgaggttaatttccaaaatggaatagaatgtggtggtgcctatgtgaaactgctttctaaaacaccagaactcaacctggatcagttccatgacaagaccccttatacgattatgtttggtccagataaatgtggagaggactataaactgcacttcatcttccgacacaaaaaccccaaaacgggtatctatgaagaaaaacatgctaagaggccagatgcagatctgaagacctattttactgataagaaaacacatctttacacactaatcttgaatccagataatagttttgaaatactggttgaccaatctgtggtgaatagtggaaatctgctcaatgacatgactcctcctgtaaatccttcacgtgaaattgaggacccagaagaccggaagcccgaggattgggatgaaagaccaaaaatcccagatccagaagctgtcaagccagatgactgggatgaagatgcccctgctaagattccagatgaagaggccacaaaacccgaaggctggttagatgatgagcctgagtacgtacctgatccagacgcagagaaacctgaggattgggatgaagacatggatggagaatgggaggctcctcagattgccaaccctagatgtgagtcagctcctggatgtggtgtctggcagcgacctgtgattgacaaccccaattataaaggcaaatggaagcctcctatgattgacaatcccagttaccagggaatctggaaacccaggaaaataccaaatccagatttctttgaagatctggaacctttcagaatgactccttttagtgctattggtttggagctgtggtccatgacctctgacattttttttgacaactttatcatttgtgctgatcgaagaatagttgatgattgggccaatgatggatggggcctgaagaaagctgctgatggggctgctgagccaggcgttgtggggcagatgatcgaggcagctgaagagcgcccgtggctgtgggtagtctatattctaactgtagcccttcctgtgttcctggttatcctcttctgctgttctggaaagaaacagaccagtggtatggagtataagaaaactgatgcacctcaaccggatgtgaaggaagaggaagaagagaaggaagaggaaaaggacaagggagatgaggaggaggaaggagaagagaaacttgaagagaaacagaaaagtgatgctgaagaagatggtggcactgtcagtcaagaggaggaagacagaaaacctaaagcagaggaggatgaaattttgaacagatcaccaagaaacagaaagccacgaagagagtgaaacaatcttaagagcttgatctgtgatttcttctccctcctcccctgcaagagtggtcctaggagaggacctggcacaccttaggttgacattcagaaaacttcaagacatcaccatcagcaggctccagttgaacactagtctgtgtaactttaaacatctagcagtaaatacttgcagttgtgatataaaggaccctgtttctgtagaaaagaaaacatttaacataatggttgtgaaatgtaacatgaagcaaactaacttttttttttttaacatctttgtttttaaaatagaatgatagaactttgccagtctttaagatcttggcttaatttaatgtattaatctgtttgtgcaaacataataccaccatttaaaaatgttagggagatgagttgcagtttttataatagattttttttaaagtttggtattgtaaaacattcacacctctgtccctcaaaattgataattacgtttaaagtgcagtcatttgtggttagaatcttgttttgtttgcttccattattgagttcctcctaaggaaattgaggagagggactgaatagaagcccaaattcatataaaagttgcgtttaagttgtattaaaaatagatatataagaaaaaattctttcacttgatgtttgttagaccagaaagtgtgtgtgttctgtagctcagttcccagacagctttttaggtagtggaggaggtggcttcatgtggcacttgggcatttatattccacttgggagggtcaggcctgtggcttctggagcaggtggcttgttaaggaacgctagcagggcatggcacgtgagctccggaatagatgtcttcatcacttcttccactgtgtgttgacactgttttccttacctatttcctcagatccccagctttctcctcgctatgcattttcttcacagtgcagcttgcagtccgttgctgaaaatgattataagccctgcataatgttaagctttattgtgattacgtgtatgtttcttctttcttttaagcagacccatacctttccagggtcaaagtacagaatagaatacattgatacaaagtacagaaaaatactttgatttttatccatttcttttactctgtgtaaagactttagaagtctaattcacaggcaaaccaatacagaattgactgcagttgaacagactagaagtatttgtgggaggagtgacatgaagcatgagttatctgattttttttgtagctgctatatattttaagccttcatttgcaattcatgtaacagttgtgtcataaattacacaataaagcagtcctgttcaaatttttttttaacgtggcttgtagaatttttaaaaaagtgatcttaggtttgttttttcatgcgggatgcagatgggtgctatcagagcctctcccacaccactatagtgtaataatgttattattactctacactgaaacgtattcagagttagatattattttagcttcagttgttctttagaggctttcaaatgtaccgatgatactgtttcttgcactgaatatataaacactccacagtgtttatattgggaagatattgggaaggaaatatatttgtaaaagatgaaggctgtatctatttttttttctttttaaactggttcacttaaattcttttgaggatgggatgtatttttcttgctgttcagtgctttttccttttcatctgttgttctgtggtcacagtgaccttagctacatagcagactttcccaaatgtattgattacaaataaacagttgttacttagcaagacctgaaaatatgtctgcaggtttctccttgaagcaaatgtgtgggatcattgcatttccagaaatctgcctccttcacccaccgttgacagtatatgtcatgcctcactttcttgtagctgagctttaaatcattagagcttaaattgtcagatcgttcattgcctttccagggttatttagtaaagtttgttgaaaacaaaaacgccttttcttggttcttttttcagttattttgaaggtccagcatcctgattaaatgtctgacacttaatgaatgaccagcagcagctttcagctcttaaaaagacacttatattttgattttacatgctggttacctgttccattgttgtcaaatgcccagtgtccatcagatgtgttcctccattttcttatccacaaagtactcctcacttttcaatttgtcatgttactaaaccc

SEQ ID NO: 1842 - protein, 592 aa, Homo sapien
MEGKWLLCMLLVLGTAIVEAHDGHDDDVIDIEDDLDDVIEEVEDSKPDTTAPPSSPKVTYKAPVPTGEVYFADSFDRGTLSGWILSKAKKDDTDDEIAKYDGKWEVEEMKESKLPGDKGLVLMSRAKHHAISAKLNKPFLFDTKPLIVQYEVNFQNGIECGGAYVKLLSKTPELNLDQFHDKTPYTIMFGPDKCGEDYKLHFIFRHKNPKTGIYEEKHAKRPDADLKTYFTDKKTHLYTLILNPDNSFEILVDQSVVNSGNLLNDMTPPVNPSREIEDPEDRKPEDWDERPKIPDPEAVKPDDWDEDAPAKIPDEEATKPEGWLDDEPEYVPDPDAEKPEDWDEDMDGEWEAPQIANPRCESAPGCGVWQRPVIDNPNYKGKWKPPMIDNPSYQGIWKPRKIPNPDFFEDLEPFRMTPFSAIGLELWSMTSDIFFDNFIICADRRIVDDWANDGWGLKKAADGAAEPGVVGQMIEAAEERPWLWVVYILTVALPVFLVILFCCSGKKQTSGMEYKKTDAPQPDVKEEEEEKEEEKDKGDEEEEGEEKLEEKQKSDAEEDGGTVSQEEEDRKPKAEEDEILNRSPRNRKPRRE

SEQ ID NO: 1843 - DNA, 501 bp, Homo sapien
gaattcgctttggatccatttccatcggtccttacagccgctcgtcagactccagcagccaagatggtgaagcagatcgagagcaagactgcttttcaggaagccttggacgctgcaggtgataaacttgtagtagttgacttctcagccacgtggtgtgggccttgcaaaatgatcaaccctttctttcattccctctctgaaaagtattccaacgtgatattccttgaagtagatgtggatgactgtcaggatgttgcttcagagtgtgaagtcaaatgcacgccaacattccagttttttaagaagggacaaaaggtgggtgaattttctggagccaataaggaaaagcttgaagccaccattaatgaattagtctaatcatgttttctgaaaacataaccagccattggctatttaaacttgtatttttttatttacaaaatataaatatgaagacataaccagttgccatctgcgtgacaataaacattatgctaa

SEQ ID NO: 1844 - protein, 105 aa, Homo sapien
MVKQIESKTAFQEALDAAGDKLVVVDFSATWCGPCKMINPFFHSLSEKYSNVIFLEVDVDDCQDVASECEVKCTPTFQFFKKGQKVGEFSGANKEKLEATINELV

SEQ ID NO: 1845 - DNA, 1933 bp, Homo sapien
cgtcacagcccgacgcgccacccagctgtttttgtgctcacaagctctagcgaaaagccgccggtatttctccatctggctctcctctacctccaggcaggctcacccgagatccccgccccgaaccccccctgcacactcggcccagcgctgttgcccccggagcggacgtttctgcagctattctgagcacaccttgacgtcggctgagggagcgggacagggtcagcggcgaaggaggcaggccccgcgcggggatctcggaagccctgcggtgcatcatgaagttccagtacaaggaggaccatccctttgagtatcggaaaaaggaaggagaaaagatccggaagaaatatccggacagggtccccgtgattgtagagaaggctccaaaagccagggtgcctgatctggacaagaggaagtacctagtgccctctgaccttactgttggccagttctacttcttaatccggaagagaatccacctgagacctgaggacgccttattcttctttgtcaacaacaccatccctcccaccagtgctaccatgggccaactgtatgaggacaatcatgaggaagactattttctgtatgtggcctacagtgatgagagtgtctatgggaaatgagtggttggaagcccagcagatgggagcacctggacttgggggtaggggaggggtgtgtgtgcgcgacatggggaaagagggtggctcccaccgcaaggagacagaaggtgaagacatctagaaacattacaccacacacaccgtcatcacattttcacatgctcaattgatattttttgctgcttcctcggcccagggagaaagcatgtcaggacagagctgttggattggctttgatagaggaatggggatgatgtaagtttacagtattcctggggtttaattgttgtgcagtttcatagatgggtcaggaggtggacaagttggggccagagatgatggcagtccagcagcaactccctgtgctcccttctctttgggcagagattctatttttgacatttgcacaagacaggtagggaaaggggacttgtggtagtggaccatacctggggaccaaaagagacccactgtaattgatgcattgtggcccctgatcttccctgtctcacacttcttttctcccatcccggttgcaatctcactcagacatcacagtaccaccccaggggtggcagtagacaacaacccagaaatttagacagggatctcttacctttggaaaataggggttaggcatgaaggtggttgtgattaagaagatggttttgttattaaatagcattaaactggaattgacaagagtgttgagcatccctgtctaacctgctctttctctttggtgccccttatctcaccccttccttggaatttaataagtctcaggcatttccaattgtagactaaaaccactcttagcatctcctctagtattttccatgtatcaggacagaggtgtcttatgtagggagggggcaagtatgaagtaaggtaattatatactactctcattcaggattcttgctcccatgctgctgtcccttcaggctcacatgcacaggaatgctacatgatggccagctgcttccctccttggttatcatccactgcagctgctagttagaaaggtttggagggatgacttttagtaaatcatggggattttattgatttattttcacttttgggattttgtggggtgggagtggggagcaggaattgcactcagacatgacatttcaattcatctctgctaatgaaaagggttctttctcttgggggaaatgtgtgtgtcagttctgtcagctgcaagttcttgtataatgaagtcaatgccatcaggccaaggaaataaaataattgcttaccttaaaaaaaaaaaaaaaaaaaaaaaaaaa

SEQ ID NO: 1846 - protein, 117 aa, Homo sapien
MKFQYKEDHPFEYRKKEGEKIRKKYPDRVPVIVEKAPKARVPDLDKRKYLVPSDLTVGQFYFLIRKRIHLRPEDALFFFVNNTIPPTSATMGQLYEDNHEEDYFLYVAYSDESVYGK

SEQ ID NO: 1847 - DNA, 2709 bp, Homo sapien
cttggagggagggattagaagccgctagactttttttcctcccctctcagtagcacggagtccgaattaattggatttcattcactggggaggaacaaaaactatctgggcagcttcattgagagagattcattgacactaagagccagcggctgcagctgggtgcagagagaacctccggctttacttctgtctcgtctgccccaaccgctagcctcggcttgggtaaggcgaggcggaattaaaccccgctccgagagcggcagcttcgcgcgcggtgcgctcggcctatgcctgccccgaggggcgtctggtaggcaccccgccctctcccgcagctcgacccccatgatagatacgctcagacccgtgcccttcgcgtcggaaatggcgatcagcaagacggtggcgtggctcaacgagcagctggagctgggcaacgagcggctgctgctgatggactgccggccgcaggagctatacgagtcgtcgcacatcgagtcggccatcaacgtggccatcccgggcatcatgctgcggcgcctgcagaagggtaacctgccggtgcgcgcgctcttcacgcgcggcgaggaccgggaccgcttcacccggcgctgtggcaccgacacagtggtgctctacgacgagagcagcagcgactggaacgagaatacgggcggcgagtcgttgctcgggctgctgctcaagaagctcaaggacgagggctgccgggcgttctacctggaaggtggcttcagtaagttccaagccgagttctccctgcattgcgagaccaatctagacggctcgtgtagcagcagctcgccgccgttgccagtgctggggctcgggggcctgcggatcagctctgactcttcctcggacatcgagtctgaccttgaccgagaccccaatagtgcaacagactcggatggtagtccgctgtccaacagccagccttccttcccagtggagatcttgcccttcctctacttgggctgtgccaaagactccaccaacttggacgtgttggaggaattcggcatcaagtacatcttgaacgtcacccccaatttgccgaatctctttgagaacgcaggagagtttaaatacaagcaaatccccatctcggatcactggagccaaaacctgtcccagtttttccctgaggccatttctttcatagatgaagcccggggcaagaactgtggtgtcttggtacattgcttggctggcattagccgctcagtcactgtgactgtggcttaccttatgcagaagctcaatctgtcgatgaacgatgcctatgacattgtcaaaatgaaaaaatccaacatatcccctaacttcaacttcatgggtcagctgctggacttcgagaggacgctgggactcagcagcccatgtgacaacagggttccagcacagcagctgtattttaccaccccttccaaccagaatgtataccaggtggactctctgcaatctacgtgaaagaccccacatccctccttgctggaatgtgtctggcccttcagcagtttctcttggcagcatcagctgggctgctttctttgtgtgtggccccaggtgtcaaaatgacaccagctgtctgtactagacaaggttaccaagtgcggaattggttaatactaacagagagatttgctccattctctttggaataacaggacatgctgtatagatacaggcagtaggtttgctctgtacccatgtgtacagcctacccatgcagggactgggattcgaggacttccaggcgcatagggtagaaccaaatgatagggtaggagcatgtgttctttagggccttgtaaggctgtttccttttgcatctggaactgactatataattgtcttcaatgaagactaattcaattttgcatatagaggagccaaagagagatttcagctctgtatttgtggtatcagtttggaaaaaaaaatctgatactccatttgattattgtaaatatttgatcttgaatcacttgacagtgtttgtttgaattgtgtttgttttttcctttgatgggcttaaaagaaattatccaaagggagaaagagcagtatgccacttcttaaaacagaacaaaacaaaaaaagaaaattgtgctcttttctaatccaaagggtatatttgcagcatgcttgactttaccaattctgatgacatctttacggacactattatcactaagaccttgttatggcgaagtctttagtctttttcatgtattttcctcatgattttttctctttatgtagtttgactatgccttacctttgtaaatatttttgcttgtgttgtcgcaaaggggataatctgggaaagacaccaaatcatgggctcactttaaaaaaagaaagaataaaaaaaccttcagctgtgctaaacagtatattacctctgtataaaattcttcagggagtgtcacctcaaatgcaatactttgggttggtttctttcctttaaaaaaatttgtataaaactggaagtgtgtgtgtgtgagcatgggtacccatttgataagagaaatgcatttgattgtgaagaagggagagttaaattctccattatgttcgtggtgtaaagtttagagctggaatttattataagaatgtaaaaccttaaattattaataaataactattttggctattgaaaaaaaaaaaaaaaaaaaaaaa

SEQ ID NO: 1848 - protein, 381 aa, Homo sapien
MIDTLRPVPFASEMAISKTVAWLNEQLELGNERLLLMDCRPQELYESSHIESAINVAIPGIMLRRLQKGNLPVRALFTRGEDRDRFTRRCGTDTVVLYDESSSDWNENTGGESLLGLLLKKLKDEGCRAFYLEGGFSKFQAEFSLHCETNLDGSCSSSSPPLPVLGLGGLRISSDSSSDIESDLDRDPNSATDSDGSPLSNSQPSFPVEILPFLYLGCAKDSTNLDVLEEFGIKYILNVTPNLPNLFENAGEFKYKQIPISDHWSQNLSQFFPEAISFIDEARGKNCGVLVHCLAGISRSVTVTVAYLMQKLNLSMNDAYDIVKMKKSNISPNFNFMGQLLDFERTLGLSSPCDNRVPAQQLYFTTPSNQNVYQVDSLQST

SEQ ID NO: 1849 - DNA, 2390 bp, Homo sapien
ccagcctcggagggagggattagaagccgctagactttttttcctcccctctcagtagcacggagtccgaattaattggatttcattcactggggaggaacaaaaactatctgggcagcttcattgagagagattcattgacactaagagccagcgctgcagctggtgcagagagaacctccggctttgacttctgtctcgtctgccccaaggccgctagcctcggcttgggaaggcgaggcggaattaaaccccgctccgagagcgcacgttcgcgcgcggtgcgtcggccattgcctgccccgaggggcgtctggtaggcaccccgccctctcccgcagctcgacccccatgatagatacgctcagacccgtgcccttcgcgtcggaaatggcgatcagcaagacggtggcgtggctcaacgagcagctggagctgggcaacgagcggctgctgctgatggactgccggccgcaggagctatacgagtcgtcgcacatcgagtcggccatcaacgtggccatcccgggcatcatgctgcggcgcctgcagaagggtaacctgccggtgcgcgcgctcttcacgcgcggcgaggaccgggaccgcttcacccggcgctgtggcaccgacacagtggtgctctacgacgagagcagcagcgactggaacgagaatacgggcggcgagtcgttgctcgggctgctgctcaagaagctcaaggacgagggctgccgggcgttctacctggaaggtggcttcagtaagttccaagccgagttctccctgcattgcgagaccaatctagacggctcgtgtagcagcagctcgccgccgttgccagtgctggggctcgggggcctgcggatcagctctgactcttcctcggacatcgagtctgaccttgaccgagaccccaatagtgcaacagactcggatggtagtccgctgtccaacagccagccttccttcccagtggagatcttgcccttcctctacttgggctgtgccaaagactccaccaacttggacgtgttggaggaattcggcatcaagtacatcttgaacgtcacccccaatttgccgaatctctttgagaacgcaggagagtttaaatacaagcaaatccccatctcggatcactggagccaaaacctgtcccagtttttccctgaggccatttctttcatagatgaagcccggggcaagaactgtggtgtcttggtacattgcttggctggcattagccgctcagtcactgtgactgtggcttaccttatgcagaagctcaatctgtcgatgaacgatgcctatgacattgtcaaaatgaaaaaatccaacatatcccctaacttcaacttcatgggtcagctgctggacttcgagaggacgctgggactcagcagcccatgtgacaacagggttccagcacagcagctgtattttaccaccccttccaaccagaatgtataccaggtggactctctgcaatctacgtgaaagaccccacacccctccttgctggaatgtgtctggcccttcagcagtttctcttggcagcatcagctgggctgctttctttgtgtgtggccccaggtgtcaaaatgacaccagctgtctgtactagacaaggttaccaagtgcggaattggttaatactaacagagagatttgctccattctctttggaataacaggacatgctgtatagatacaggcagtaggtttgctctgtacccatgtgtacagcctacccatgcagggactgggattcgaggacttccaggcgcatagggtagaaccaaatgatagggtaggagcatgtgttctttagggccttgtaaggctgtttccttttgcatctggaactgactatataattgtcttcaagtgaagactaattcaattttgcatatagaggagccaaagagagatttcagctctgtatttgtggtatcagtgttggaaaagagaaatctgatactccatttggattattgtaaatatttgatcttgaatcacttgacagtgtttgtttgaattgtgtttgttttttcctttgatgggcttaaaagaaattatccaaagggagaaagagcagtatgccacttcttaaaacagaacaaaacaaaaaaagaaaattgtgctctgttgtaatccaaaggggagatttgcagcatgcttgactttaccaattctgatgacatctttacggacactattatcactaagaccttgttatggcgaagtctttagtctttttcatgtattttcctcatgattttttctctttatgtagtttgagtatgccttacctttgtaaatatttttgcttgtgttgtcgcaaaggggataatctgggaaagacaccaaatcatgggctcactttaaaa

SEQ ID NO: 1850 - protein, 381 aa, Homo sapien; identical to SEQ ID NO: 1848

SEQ ID NO: 1851 - DNA, 1952 bp, Homo sapien
ccagcctcggagggagggattagaagccgctagactttttttcctcccctctcagtagcacggagtccgaattaattggatttcattcactggggaggaacaaaaactatctgggcagcttcattgagagagattcattgacactaagagccagcgctgcagctggtgcagagagaacctccggctttgacttctgtctcgtctgccccaaggccgctagcctcggcttgggaaggcgaggcggaattaaaccccgctccgagagcgcacgttcgcgcgcggtgcgtcggccattgcctgccccgaggggcgtctggtaggcaccccgccctctcccgcagctcgacccccatgatagatacgctcagacccgtgcccttcgcgtcggaaatggcgatcagcaagacggtggcgtggctcaacgagcagctggagctgggcaacgagcggctgctgctgatggactgccggccgcaggagctatacgagtcgtcgcacatcgagtcggccatcaacgtggccatcccgggcatcatgctgcggcgcctgcagaagggtaacctgccggtgcgcgcgctcttcacgcgcggcgaggaccgggaccgcttcacccggcgctgtggcaccgacacagtggtgctctacgacgagagcagcagcgactggaacgagaatacgggcggcgagtcgttgctcgggctgctgctcaagaagctcaaggacgagggctgccgggcgttctacctggaagatgaagcccggggcaagaactgtggtgtcttggtacattgcttggctggcattagccgctcagtcactgtgactgtggcttaccttatgcagaagctcaatctgtcgatgaacgatgcctatgacattgtcaaaatgaaaaaatccaacatatcccctaacttcaacttcatgggtcagctgctggacttcgagaggacgctgggactcagcagcccatgtgacaacagggttccagcacagcagctgtattttaccaccccttccaaccagaatgtataccaggtggactctctgcaatctacgtgaaagaccccacacccctccttgctggaatgtgtctggcccttcagcagtttctcttggcagcatcagctgggctgctttctttgtgtgtggccccaggtgtcaaaatgacaccagctgtctgtactagacaaggttaccaagtgcggaattggttaatactaacagagagatttgctccattctctttggaataacaggacatgctgtatagatacaggcagtaggtttgctctgtacccatgtgtacagcctacccatgcagggactgggattcgaggacttccaggcgcatagggtagaaccaaatgatagggtaggagcatgtgttctttagggccttgtaaggctgtttccttttgcatctggaactgactatataattgtcttcaagtgaagactaattcaattttgcatatagaggagccaaagagagatttcagctctgtatttgtggtatcagtgttggaaaagagaaatctgatactccatttggattattgtaaatatttgatcttgaatcacttgacagtgtttgtttgaattgtgtttgttttttcctttgatgggcttaaaagaaattatccaaagggagaaagagcagtatgccacttcttaaaacagaacaaaacaaaaaaagaaaattgtgctctgttgtaatccaaaggggagatttgcagcatgcttgactttaccaattctgatgacatctttacggacactattatcactaagaccttgttatggcgaagtctttagtctttttcatgtattttcctcatgattttttctctttatgtagtttgagtatgccttacctttgtaaatatttttgcttgtgttgtcgcaaaggggataatctgggaaagacaccaaatcatgggctcactttaaaa

SEQ ID NO: 1852 - protein, 235 aa, Homo sapien
MIDTLRPVPFASEMAISKTVAWLNEQLELGNERLLLMDCRPQELYESSHIESAINVAIPGIMLRRLQKGNLPVRALFTRGEDRDRFTRRCGTDTVVLYDESSSDWNENTGGESLLGLLLKKLKDEGCRAFYLEDEARGKNCGVLVHCLAGISRSVTVTVAYLMQKLNLSMNDAYDIVKMKKSNISPNFNFMGQLLDFERTLGLSSPCDNRVPAQQLYFTTPSNQNVYQVDSLQST

SEQ ID NO: 1853 - DNA, 1237 bp, Homo sapien
attcttgtctgttctgcctcactcccgagctctactgactcccaaaagagcgcccaagaagaaaatggccataagtggagtccctgtgctaggatttttcatcatagctgtgctgatgagcgctcaggaatcatgggctatcaaagaagaacatgtgatcatccaggccgagttctatctgaatcctgaccaatcaggcgagtttatgtttgactttgatggtgatgagattttccatgtggatatggcaaagaaggagacggtctggcggcttgaagaatttggacgatttgccagctttgaggctcaaggtgcattggccaacatagctgtggacaaagccaacctggaaatcatgacaaagcgctccaactatactccgatcaccaatgtacctccagaggtaactgtgctcacgaacagccctgtggaactgagagagcccaacgtcctcatctgtttcatcgacaagttcaccccaccagtggtcaatgtcacgtggcttcgaaatggaaaacctgtcaccacaggagtgtcagagacagtcttcctgcccagggaagaccaccttttccgcaagttccactatctccccttcctgccctcaactgaggacgtttacgactgcagggtggagcactggggcttggatgagcctcttctcaagcactgggagtttgatgctccaagccctctcccagagactacagagaacgtggtgtgtgccctgggcctgactgtgggtctggtgggcatcattattgggaccatcttcatcatcaagggagtgcgcaaaagcaatgcagcagaacgcagggggcctctgtaaggcacatggaggtgatgatgtttcttagagagaagatcactgaagaaacttctgctttaatgactttacaaagctggcaatattacaatccttgacctcagtgaaagcagtcatcttcagcgttttccagccctatagccaccccaagtgtggttatgcctcctcgattgctccgtactctaacatctagctggctttccctgtctattgccttttcctgtatctattttcctctatttcctatcattttattatcaccatgcaatgcctctggaataaaacatacaggagtctgtctctgctatggaatgccccatggggctctcttgtgtacttattgtttaaggtttcctcaaactgtgatttttctgaacacaataaactattttgatgatcttgggtggaaaa

SEQ ID NO: 1854 - protein, 254 aa, Homo sapien
MAISGVPVLGFFIIAVLMSAQESWAIKEEHVIIQAEFYLNPDQSGEFMFDFDGDEIFHVDMAKKETVWRLEEFGRFASFEAQGALANIAVDKANLEIMTKRSNYTPITNVPPEVTVLTNSPVELREPNVLICFIDKFTPPVVNVTWLRNGKPVTTGVSETVFLPREDHLFRKFHYLPFLPSTEDVYDCRVEHWGLDEPLLKHWEFDAPSPLPETTENVVCALGLTVGLVGIIIGTIFIIKGVRKSNAAERRGPL

SEQ ID NO: 1855 - DNA, 3990 bp, Homo sapien
ggacgtccggcttcggagcgggagtgttcgttgtgccagcgactaaaaagagaattaaatatgggtgatgttgagaaaggcaagaagatttttattatgaagtgttcccagtgccacaccgttgaaaagggaggcaagcacaagactgggccaaatctccatggtctctttgggcggaagacaggtcaggcccctggatactcttacacagccgccaataagaacaaaggcatcatctggggagaggatacactgatggagtatttggagaatcccaagaagtacatccctggaacaaaaatgatctttgtcggcattaagaagaaggaagaaagggcagacttaatagcttatctcaaaaaagctactaatgagtaataattggccactgccttatttattacaaaacagaaatgtctcatgacttttttatgtgtaccatcctttaatagatctcatacaccagaattcagatcatgaatgactgacagaatattttgttgggcagtcctgatttaaaactaagactggcttgtggttaaatgaatatgttcagtttttgaattttaatagtaactccaattcagtaaatggtatcactgtttaccccttttaaagatatgattagacttcgttagtaatgttcaacttttcacaaagatggtgagtgccatcttaaaacttactggagattggttttatatttagatttatataactggttatgtgaatatatttaaatactggggaaattgcttcactgtcttagaaccaagcaagattcacctgtgttttgtgttcatgttcatttgcctcttaaaggcaagggttgaagataaataaggttgcaatgtctatagttttggccttaactatgccaatctaattataattccctgtatttaaaatggtttcttttacttattgaaaggcattttagtgtggtttatgtgtaatattaaagattattcaacacctctcacatcttacagatctataaggtcacatgcttttaaaatagtagcaagttaaacttcactcttgaattctttacaatctaagtcaaactaagttataatttaggattgtctttaaacagccattcagaaacaaaactgtagaactgtgtatttgattgggaatggtgcttttgccaacttaaaaggattaaagtaacggagatatacacaaattttaaaattatgtgtgatcacaagactaaagataattaaaaagaaaaccacagatcatgactttttgactgtgcttgatttcatgactgatgcacaaattttaatgattaaaaagtgcaggagccctaaatgtcagtgcagcagccctaaatgtcagtgcagcagtgttaaccagtcatggtgctagattgtttacttggttttctaggactgcctcaactagaataacacttcactaattgactcttagtttctttgctcagattgagaactgcagcatttatgccagacatggacagaggaatgcctgtggtcatagttttgtgatgtgtaacagtgtataattacatactgaattatttcatgcatagtctgtgccatacacatttagagtagtccttggagattttatggagatggtgagcacaaggtaagtcataaagaataatgagaaaataaatctatgctggtgcagctgagaactgtatctttgtgggacagtgagaagactgagaagatgtgaatccatggtctcaaaggtgatagggacgattagataggtgttttaaggcctgaaagcaatttataacatatgagtcttatttttatttatagaaatgtggaaagcttgctgtaattcatatttgaagtcctagtctgagttctggtggggaatttaaaaatgcatcctggaaatcctttaaagatttcagactttgaaaggccttgtagcagaggacttggtgactgtataaagttagtggtattcagggacagtgtagcaagtagcttacaaggggacaattctggactaatgagaaagacctgaagtgaaggctagagagttgattttttttttttttggcatcctggaaatgatacaggaaacatattaagatagatacagaaatgtgttcaaccttccatcttggctagttgtggcgtttagtttgttttttgagacatggtcacgctgtgtcgccaaggctggagtgcagtggtgcgatctcggctggctgcagcctctatttcccaggctcaagcgattctctcacttcagcttcccaagtagctgggactgcgggtgttcgccaccatgcccagctaatttttttgtagagatggagttttgccatgtggtcccaggctggtctcaaactcctgagctcaagcaatccgtccacttgccttggctccccaaagtgctgggattgcaggcgtgagccaccaggccctgcctggttttcaaattcagaaatcttattatttaacccagaagtaatcagcccagtagtaacttaggtttaattttttttcaggtttaaaatttttctcatttattttttctgagacggagtttcgcccttttcgcccaggctgagtacagtggtgcaatctcactgcaacctccgccttccagttgcaagtgattctcctgcctcagcctcctgagtagctgggattgcaggcacccgccaccacgcctggctaatttttgtatttttagtggagatggtgtttcaccatgttggccagactggtcttggactcctgacctcgtgatccacccaccttggcctcccaaagttctaggattacaggtgtgagccaccacgtccggccaatttttctcatttctatgcctcctatattaaggtctgtgttggcacagatgagtaactgccatgttctaggtcagttatacccaagcacttctggtggtttaaaatgtgattctgtaacttttttatttttatttttttgagataatttcactcttgttgcccaggctggagtgcaatggcgtgatcgctgctcaccgcaacctccgccttccaggttcaagcgattctcctgactcagcctctcaagtagctgggattacaagcatgcgccaccatgcccagcttattttgtgtttttagtagagacagggtttctccatgctggacaggctggtcttgaactcccgacgtcgggtgatctgcctgcctcggcctcccaaagtgctgggattacaggcgtgagccaccacgcctggccaattatgtaattttttaaaaaggacatttctatcagggatatataccttcagaaataaggaaataggggaaaaaaagagcactataaaccacatgttttcatttctagtgcttcgctgtaagtggctaggttggtagaatcaaaaacaagggccagatgtatttaaggggtattcagatgccacctacatgcttattttgtctagaacagtgctgtctaatagaactttctgtgacgatggatattttgtagacttttgctgtccagtgtggtagccactaaccacatgtggctgttaagcccttgaaatatagctagtgtgactagaaagtattttattttaaatttacataggcacaagtggctagtggctactgtattgacattctgggtctaggactagaaccagtggtctgtaacaaaagtactttctctttactctattaaatctagaattagccgggcatggtcgctcatgcctgtggtcccagcactttgggaggccaaggcaggcagatcacttgaggtcgggcgtttgagaccagcctggtcaacatggcgaaaccctgtctctacaaaaaacataaaagttagccaggtgtggtggtgggcacctgtagtctcagctacttgggaggctgaggcacaagaatcacttgaacttgggaggtggaggttgcagtgagccaggattgtgccactgcactcaagcctgggtgacgagtgaaactgtctccaaaaaaaaaaaaaaaaa

SEQ ID NO: 1856 - protein, 105 aa, Homo sapien
MGDVEKGKKIFIMKCSQCHTVEKGGKHKTGPNLHGLFGRKTGQAPGYSYTAANKNKGIIWGEDTLMEYLENPKKYIPGTKMIFVGIKKKEERADLIAYLKKATNE

SEQ ID NO: 1857 - DNA, 1163 bp, Homo sapien
ccggcggcgcctcaggtcgcggggcgcctaggcctgggttgtcctttgcatctgcacgtgttcgcagtcgtttccgcgatgctgcctctgctgcgctgcgtgccccgtgtgctgggctcctccgtcgccggcctccgcgctgccgcgcccgcctcgcctttccggcagctcctgcagccggcaccccggctgtgcacccggcccttcgggctgctcagcgtgcgcgcaggttccgagcggcggccgggcctcctgcggcctcgcggaccctgcgcctgtggctgtggctgcggctcgctgcacaccgacggagacaaagcttttgttgatttcctgagtgatgaaattaaggaggaaagaaaaattcagaagcataaaaccctccctaagatgtctggaggttgggagctggaactgaatgggacagaagcgaaattagtgcggaaagttgccggggaaaaaatcacggtcactttcaacattaacaacagcatcccaccaacatttgatggtgaggaggaaccctcgcaagggcagaaggttgaagaacaggagcctgaactgacatcaactcccaatttcgtggttgaagttataaagaatgatgatggcaagaaggcccttgtgttggactgtcattatccagaggatgaggttggacaagaagacgaggctgagagtgacatcttctctatcagggaagttagctttcagtccactggcgagtctgaatggaaggatactaattatacactcaacacagattccttggactgggccttatatgaccacctaatggatttccttgccgaccgaggggtggacaacacttttgcagatgagctggtggagctcagcacagccctggagcaccaggagtacattacttttcttgaagacctcaagagttttgtcaagagccagtagagcagacagatgctgaaagccatagtttcatggcaggctttggccagtgaacaaatcctactctgaagctagacatgtgctttgaaatgattatcatcctaatatcatgggggaaaaaataccaaatttaaattatatgttttgtgttctcatttattatcatttttttctgtacaaatctattatttctagatttttgtataacatgatagacataaaattggtttatctcctcc

SEQ ID NO: 1858 - protein, 282 aa, Homo sapien
MLPLLRCVPRVLGSSVAGLRAAAPASPFRQLLQPAPRLCTRPFGLLSVRAGSERRPGLLRPRGPCACGCGCGSLHTDGDKAFVDFLSDEIKEERKIQKHKTLPKMSGGWELELNGTEAKLVRKVAGEKITVTFNINNSIPPTFDGEEEPSQGQKVEEQEPELTSTPNFVVEVIKNDDGKKALVLDCHYPEDEVGQEDEAESDIFSIREVSFQSTGESEWKDTNYTLNTDSLDWALYDHLMDFLADRGVDNTFADELVELSTALEHQEYITFLEDLKSFVKSQ

SEQ ID NO: 1859 - DNA, 2856 bp, Homo sapien
gtaaccgctactcccggacaccagaccaccgccttccgtacacaggggcccgcatcccaccctcccggacctaagagcctgggtcccctgtttccggaggtccgcttcccggcccccagattctggcatcccagccctcagtgtccaagacccaggcagcccgggtccccgcctcccggatccaggcgtccgggatctgcgccaccagaacctagcctcctgcagacctccgccatctgggggcactcaacctcctggagccaagggccccacgtcccacccagagaaactctcgtattcccagctcctagggccaaggaacccgggcgctccgaactcccagctttcggacatctggcacacggggcagagcagagaagctcagcgcccagcctggggaatttaaacactccagcttccaagagccaaggaacttcagtgctgtgaactcacaactctaaggagccctccaaagttccagtctccaggtgctgttactcaactcagtcctaggaacgtcgggtcctgggaaggagcccaagcgctcccagccagcttccaggcgctaagaaaccccggtgcttcccatcatggtggccgatcctcctcgagactccaaggggctcgcagcggcggagcccaccgccaacgggggcctggcgctggcctccatcgaggaccaaggcgcggcagcaggcggctactgcggttcccgggaccaggtgcgccgctgccttcgagccaacctgcttgtgctgctgacagtggtggccgtggtggccggcgtggcgctgggactgggggtgtcgggggccgggggtgcgctggcgttgggcccggagcgcttgagcgccttcgtcttcccgggcgagctgctgctgcgtctgctgcggatgatcatcttgccgctggtggtgtgcagcttgatcggcggcgccgccagcctggaccccggcgcgctcggccgtctgggcgcctgggcgctgctctttttcctggtcaccacgctgctggcgtcggcgctcggagtgggcttggcgctggctctgcagccgggcgccgcctccgccgccatcaacgcctccgtgggagccgcgggcagtgccgaaaatgcccccagcaaggaggtgctcgattcgttcctggatcttgcgagaaatatcttcccttccaacctggtgtcagcagcctttcgctcatactctaccacctatgaagagaggaatatcaccggaaccagggtgaaggtgcccgtggggcaggaggtggaggggatgaacatcctgggcttggtagtgtttgccatcgtctttggtgtggcgctgcggaagctggggcctgaaggggagctgcttatccgcttcttcaactccttcaatgaggccaccatggttctggtctcctggatcatgtggtacgcccctgtgggcatcatgttcctggtggctggcaagatcgtggagatggaggatgtgggtttactctttgcccgccttggcaagtacattctgtgctgcctgctgggtcacgccatccatgggctcctggtactgcccctcatctacttcctcttcacccgcaaaaacccctaccgcttcctgtggggcatcgtgacgccgctggccactgcctttgggacctcttccagttccgccacgctgccgctgatgatgaagtgcgtggaggagaataatggcgtggccaagcacatcagccgtttcatcctgcccatcggcgccaccgtcaacatggacggtgccgcgctcttccagtgcgtggccgcagtgttcattgcacagctcagccagcagtccttggacttcgtaaagatcatcaccatcctggtcacggccacagcgtccagcgtgggggcagcgggcatccctgctggaggtgtcctcactctggccatcatcctcgaagcagtcaacctcccggtcgaccatatctccttgatcctggctgtggactggctagtcgaccggtcctgtaccgtcctcaatgtagaaggtgacgctctgggggcaggactcctccaaaattatgtggaccgtacggagtcgagaagcacagagcctgagttgatacaagtgaagagtgagctgcccctggatccgctgccagtccccactgaggaaggaaaccccctcctcaaacactatcgggggcccgcaggggatgccacggtcgcctctgagaaggaatcagtcatgtaaaccccgggagggaccttccctgccctgctgggggtgctctttggacactggattatgaggaatggataaatggatgagctagggctctgggggtctgcctgcacactctggggagccaggggccccagcaccctccaggacaggagatctgggatgcctggctgctggagtacatgtgttcacaagggttactcctcaaaacccccagttctcactcatgtccccaactcaaggctagaaaacagcaagatggagaaataatgttctgctgcgtccccaccgtgacctgcctggcctcccctgtctcagggagcaggtcacaggtcaccatggggaattctagcccccactggggggatgttacaacaccatgctggttattttggcggctgtagttgtggggggatgtgtgtgtgcacgtgtgtgtgtgtgtgtgtgtgtgtgtgtgtgtgtgttctgtgacctcctgtccccatggtacgtcccaccctgtccccagatcccctattccctccacaataacagaaacactcccagggactctggggagaggctgaggacaaatacctgctgtcactccagaggacattttttttagcaataaaattgagtgtcaactatttaaaaaaaaaaaaaaaaa

SEQ ID NO: 1860 - protein, 541 aa, Homo sapien
MVADPPRDSKGLAAAEPTANGGLALASIEDQGAAAGGYCGSRDQVRRCLRANLLVLLTVVAVVAGVALGLGVSGAGGALALGPERLSAFVFPGELLLRLLRMIILPLVVCSLIGGAASLDPGALGRLGAWALLFFLVTTLLASALGVGLALALQPGAASAAINASVGAAGSAENAPSKEVLDSFLDLARNIFPSNLVSAAFRSYSTTYEERNITGTRVKVPVGQEVEGMNILGLVVFAIVFGVALRKLGPEGELLIRFFNSFNEATMVLVSWIMWYAPVGIMFLVAGKIVEMEDVGLLFARLGKYILCCLLGHAIHGLLVLPLIYFLFTRKNPYRFLWGIVTPLATAFGTSSSSATLPLMMKCVEENNGVAKHISRFILPIGATVNMDGAALFQCVAAVFIAQLSQQSLDFVKIITILVTATASSVGAAGIPAGGVLTLAIILEAVNLPVDHISLILAVDWLVDRSCTVLNVEGDALGAGLLQNYVDRTESRSTEPELIQVKSELPLDPLPVPTEEGNPLLKHYRGPAGDATVASEKESVM

SEQ ID NO: 1861 - DNA, 2264 bp, Homo sapien
ggcacgagggagcgcttgggagttaggttgtttgccggcgtagcggccagcgcctgagcccgccgttgatcttcgctgtggcatggcggacgaggggaagtcgtacagcgaacacgatgatgaacgcgttaatttccctcaaagaaagaagaaaggccggggtcccttccggtggaaatatggtgaaggaaaccgtaggtctggaagaggcggttctggtattcggtcttcccgccttgaggaagatgatggagatgtggcaatgagtgatgcccaggatggtccccgagtacgatacaacccctataccacccgacctaaccgtcggggtgatacttggcatgatcgagatcgcattcatgttactgtgcggagagacagagctcctccagagagaggaggggctggcaccagccaggatgggacctcaaagaactggttcaagattacaattccttatggcagaaagtatgacaaggcatggctcctgagcatgattcagagcaagtgcagtgtgcccttcacccctattgagtttcactatgagaatacacgggcccagttcttcgttgaagacgccagtactgcctctgcattgaaggctgtcaactataagattttggatcgggagaaccgaaggatatctatcatcatcaactcttctgctccaccccacactatactgaatgaactgaagccagaacaagtagaacagctaaagctgatcatgagcaaacgatacgatggctcccaacaagcccttgacctcaaaggcctccgttcagacccagatttggtggcccagaacattgacgttgtcctgaatcgcagaagctgtatggcagctaccctgaggatcattgaagagaacatccctgagctattgtccttgaacttgagcaacaacaggctgtacaggctggatgacatgtctagcattgttcagaaggcacccaacctgaagatcctaaacctttctggaaatgaattgaagtctgagcgggaattggacaagataaaggggctgaagctagaagagctctggctcgatggaaactccctgtgtgacaccttccgagaccagtccacctacatcagcgccattcgcgaacgatttcccaagttactacgcctggatggccatgagctacccccaccaattgcctttgatgttgaagcccccacgacgttaccgccctgcaagggaagctattttggaacagaaaacttgaagagtctggtcttgcacttcctgcaacagtactatgcaatttacgactctggagaccgacaagggctcctggatgcctaccatgatggggcctgctgttccctgagcattcctttcattcctcagaaccctgcccgaagcagcttagccgagtatttcaaggatagcagaaatgtgaagaagcttaaagaccctaccttgcggttccggctgctgaagcacacgcgtctcaacgttgttgccttcctcaatgagttgcccaaaacccagcacgacgtcaattccttcgtggtagacataagcgcccagacaagcacattgctgtgtttttctgtcaatggagtcttcaaggaagtggacggaaagtcccgggattctttgcgagccttcacccggacattcattgctgttcctgctagcaattcagggctatgtattgtaaatgatgagctatttgtgcggaatgccagttctgaagagatccaaagagccttcgctatgcctgcacccacgccttcctccagcccggtgcccaccctctctccagagcagcaggaaatgttgcaagcattctctacccagtctggcatgaacctcgagtggtcccagaagtgccttcaggacaacaactgggactacaccagatctgcccaggccttcactcatctcaaggccaagggcgagatcccagaagtggcattcatgaagtgatcgtagtcatgcctcagaagcagtcccccctgtaaatagtccttggatattaccgtctggttgtcgtctgtcatctcctcctgtctggcccgaggccgccccgtgactgtgaccgagggagggagggctgcctgatccctctcctcgcctgccttctggaagacttcagaagattgagcctcactggtgccaggaagccaaagcttactttgtagaactgacactaaactacccgaaggacttaggtgctttgtgtacttaaccccaggacctccttactttttaatataaagagtgatgttgtaaaaaaaaaaaaaaaaaa

SEQ ID NO: 1862 - protein, 619 aa, Homo sapien
MADEGKSYSEHDDERVNFPQRKKKGRGPFRWKYGEGNRRSGRGGSGIRSSRLEEDDGDVAMSDAQDGPRVRYNPYTTRPNRRGDTWHDRDRIHVTVRRDRAPPERGGAGTSQDGTSKNWFKITIPYGRKYDKAWLLSMIQSKCSVPFTPIEFHYENTRAQFFVEDASTASALKAVNYKILDRENRRISIIINSSAPPHTILNELKPEQVEQLKLIMSKRYDGSQQALDLKGLRSDPDLVAQNIDVVLNRRSCMAATLRIIEENIPELLSLNLSNNRLYRLDDMSSIVQKAPNLKILNLSGNELKSERELDKIKGLKLEELWLDGNSLCDTFRDQSTYISAIRERFPKLLRLDGHELPPPIAFDVEAPTTLPPCKGSYFGTENLKSLVLHFLQQYYAIYDSGDRQGLLDAYHDGACCSLSIPFIPQNPARSSLAEYFKDSRNVKKLKDPTLRFRLLKHTRLNVVAFLNELPKTQHDVNSFVVDISAQTSTLLCFSVNGVFKEVDGKSRDSLRAFTRTFIAVPASNSGLCIVNDELFVRNASSEEIQRAFAMPAPTPSSSPVPTLSPEQQEMLQAFSTQSGMNLEWSQKCLQDNNWDYTRSAQAFTHLKAKGEIPEVAFMK

SEQ ID NO: 1863 - DNA, 2820 bp, Homo sapien
gggatttttaaaaaatcaaaatacaaatccaactttttgagttttcgttgtcattgctcttatctttcctgagtcacttcccattttccaaactcagcaaccccagtttgcgagtctggtttcatgaacctttgtaaggtgtttggtgcggtcacrgtgtatacttgccgtgtagtatttgactcagcgcgatctgccttgagtcattttaccgcggccatttactactgccgttgagccctgtccacgccttgggagtgttgatatgttgagagttttctgtctggctgrggagggatcatttagtttttgcggacgtatgttgcactgaggatttagggagagagcaagatttctgttgaggaggttcagaagtataaggaatcgggagagtagataggagtgaagcatttggcagcgtaaagaagcttggcttagctttaatggattagggagagattgctatctagcattattacatgttattgttctctttgctattttatacacctagaacaacctttccctcggggttaacaaacatcttcaactctgttttctgtatggctcctgactcttacctttgttttaggaggcttccctcttcagaggaaactgggagaagccaatttccactgcttctttttcctgtgcctttttaacactcaaacccagaacacttaatcctctgcagctcgtgcaaaaattcagtctgtaatttaaaatgtgtgcacggtacactgctgaccatgggcatgtctattgtttgtatctgtaatgtgtatgtccatttcagtgttgtctgttttagtatgcaggtgatagactagagaacaagacctctgtctccgtagcatcctggagcagtctgaatgccagaatggataaccgttttgctacagcatttgtaattgcttgtgtgcttagcctcatttccaccatctacatggcagcctccattggcacagacttctggtatgaatatcgaagtccagttcaagaaaattccagtgatttgaataaaagcatctgggatgaattcattagtgatgaggcagatgaaaagacttataatgatgcactttttcgatacaatggcacagtgggattgtggagacggtgtatcaccatacccaaaaacatgcattggtatagcccaccagaaaggacagagtcatttgatgtggtcacaaaatgtgtgagtttcacactaactgagcagttcatggagaaatttgttgatcccggaaaccacaatagcgggattgatctccttaggacctatctttggcgttgccagttccttttaccttttgtgagtttaggtttgatgtgctttggggctttgatcggactttgtgcttgcatttgccgaagcttatatcccaccattgccacgggcattctccatctccttgcaggtctgtgtacactgggctcagtaagttgttatgttgctggaattgaactactccaccagaaactagagctccctgacaatgtatccggtgaatttggatggtccttctgcctggcttgtgtctctgctcccttacagttcatggcttctgctctcttcatctgggctgctcacaccaaccggaaagagtacaccttaatgaaggcatatcgtgtggcatgagcaagaaactgcctgctttacaattgccatttttatttttttaaaataatactgatattttccccacctctcaattgtttttaatttttatttgtggatataccattttattatgaaaatctattttatttatacacattcaccactaaatacacacttaataccactaaaatttatgtggtttactttaagcgatgccatctttcaaataaactaatctaggtctagacagaaagaaatggatagagacttgacacaaatttatgaaagaaaattgggagtaggaatgtgaccgaaaacaagttgtgctaatgtctgttagacttttcagtaaaactaaagtaactgtatctgttcaactaaaaactctatattagtttctttgggaaacctctcatcgtcaaaactttatgttcactttgctgttgtagatagccagtcaaccagcagtattagtgctgttttcaaagatttaagctctataaaattgggaaattatctaagatcattttccctaagcattgacacatagcttcatctgaggtgagatatggcagctgtttgtatctgcactgtgtctgtctacaaaaagtgaaaaatacagtgtttacttgaaattttaactttgtaactgcaagaattccagttcagccgggcgaggattagtattatttttaactctccgtaagattttcagtaccaccaaattgttttggattttttttctttcctcttcacataccagggttattaaaagtgtgctttctttttacattatattacagttacaaggtaaaattcctcaactgctatttatttattccagcccagtactataaagaacgtttcaccataatgaccctccagagctgggaaacctaccacaagatctaaagttctggctgtccattaacctccaactatggtctttatttcttgtggtaatatgatgtgcctttccttgcctaaatcccttcctggtgtgtatcaacattatttaatgtcttctaattcagtcatttttttataagtatgtctataaacattgaactttaaaaaacttatttatttattccactactgtagcaattgacagattaaaaaaatgtaacttcataatttcttaccataacctcaatgtcttttttaaaaaataaaattaaaaatgaaaagagaaa

SEQ ID NO: 1864 - protein, 253 aa, Homo sapien
MDNRFATAFVIACVLSLISTIYMAASIGTDFWYEYRSPVQENSSDLNKSIWDEFISDEADEKTYNDALFRYNGTVGLWRRCITIPKNMHWYSPPERTESFDVVTKCVSFTLTEQFMEKFVDPGNHNSGIDLLRTYLWRCQFLLPFVSLGLMCFGALIGLCACICRSLYPTIATGILHLLAGLCTLGSVSCYVAGIELLHQKLELPDNVSGEFGWSFCLACVSAPLQFMASALFIWAAHTNRKEYTLMKAYRVA

SEQ ID NO: 1865 - DNA, 1110 bp, Homo sapien
ctttccgctcggctgttttcctgcgcaggagccgcagggccgtaggcagccatggcgcccagccggaatggcatggtcttgaagccccacttccacaaggactggcagcggcgcgtggccacgtggttcaaccagccggcccgtaagatccgcagacgtaaggcccggcaagccaaggcgcgccgcatcgccccgcgccccgcgtcgggtcccatccggcccatcgtgcgctgccccacggttcggtaccacacgaaggtgcgcgccggccgcggcttcagcctggaggagctcagggtggccggcattcacaagaaggtggcccggaccatcggcatttctgtggatccgaggaggcggaacaagtccacggagtccctgcaggccaacgtgcagcggctgaaggagtaccgctccaaactcatcctcttccccaggaagccctcggcccccaagaagggagacagttctgctgaagaactgaaactggccacccagctgaccggaccggtcatgcccgtccggaacgtctataagaaggagaaagctcgagtcatcactgaggaagagaagaatttcaaagccttcgctagtctccgtatggcccgtgccaacgcccggctcttcggcatacgggcaaaaagagccaaggaagccgcagaacaggatgttgaaaagaaaaaataaagccctcctggggacttggaatcagtcggcagtcatgctgggtctccacgtggtgtgtttcgtgggaacaactgggcctgggatggggcttcactgctgtgacttcctcctgccaggggatttggggctttcttgaaagacagtccaagccctggataatgctttactttctgtgttgaagcactgttggttgtttggttagtgactgatgtaaaacggttttcttgtggggaggttacagaggctgacttcagagtggacttgtgttttttctttttaaagaggcaaggttgggctggtgctcacagctgtaatcccagcactttgaggttggctgggagttcaagaccagcctggccaacatgtcagaactactaaaaataaagaaatcagccatgaaaaaaaaaaaaaaaaaaaaaaaaa

SEQ ID NO: 1866 - protein, 211 aa, Homo sapien [sequence omitted]

SEQ ID NO: 1867 - DNA, 2593 bp, Homo sapien
tggacttggatccgaggcagacgaggaagctgagaaaaccctggcgttgaccccgtggacctgggcgccccgggaaggtccagcgcttggtccaggcaggcggggatgtgcggtgaccaccctggtcctgaaaagtccagccccgaatctccctccctcctagacctggaggcctggaacagccagccgcccacggacgccagagccgggaaccctgacggcacttagctgctgacaaacaacctgctccgtggacgcctgaaacaccagtctttggggccagtgcctcagtttcaatccaggtaacctttaaatgaaacttgcctaaaatcttaggtcatacacagaagagactccaatcgacaagaagctggaaaagaatgatgttgtccttaaacaacctacagaatatcatctataacccggtaatcccgtatgttggcaccattcccgatcagctggatcctggaactttgattgtgatatgtgggcatgttcctagtgacgcagacagattccaggtggatctgcagaatggcagcagtgtgaaacctcgagccgatgtggcctttcatttcaatcctcgtttcaaaagggccggctgcattgtttgcaatactttgataaatgaaaaatggggacgggaagagatcacctatgacacgcctttcaaaagagaaaagtcttttgagatcgtgattatggtgctaaaggacaaattccaggtggctgtaaatggaaaacatactctgctctatggccacaggatcggcccagagaaaatagacactctgggcatttatggcaaagtgaatattcactcaattggttttagcttcagctcggacttacaaagtacccaagcatctagtctggaactgacagagataagtagagaaaatgttccaaagtctggcacgccccagcttcagactgtctctccctcctgggatttacagggtcatggctctgaaacattctgtagtgttctttggacacgagttttcctggagatcgctttctgcaggcctattggtctgactgtggcttcttttcagagcctgccattcgctgcaaggttgaacacccccatgggccctggacgaactgtcgtcgttaaaggagaagtgaatgcaaatgccaaaagctttaatgttgacctactagcaggaaaatcaaaggatattgctctacacttgaacccacgcctgaatattaaagcatttgtaagaaattcttttcttcaggagtcctggggagaagaagagagaaatattacctctttcccatttagtcctgggatgtactttgagatgataatttactgtgatgttagagaattcaaggttgcagtaaatggcgtacacagcctggagtacaaacacagatttaaagagctcagcagtattgacacgctggaaattaatggagacatccacttactggaagtaaggagctggtagcctacctacacagctgctacaaaaaccaaaatacagaatggcttctgtgatactggccttgctgaaacgcatctcactgtcattctattgtttatattgttaaaatgagcttgtgcaccattagatcctgctgggtgttctcagtccttgccatgaagtatggtggtgtctagcactgaatggggaaactgggggcagcaacacttatagccagttaaagccactctgccctctctcctactttggctgactcttcaagaatgccattcaacaagtatttatggagtacctactataatacagtagctaacatgtattgagcacagattttttttggtaaaactgtgaggagctaggatatatacttggtgaaacaaaccagtatgttccctgttctcttgagcttcgactcttctgtgctctattgctgcgcactgctttttctacaggcattacatcaactcctaaggggtcctctgggattagttaagcagctattaaatcacccgaagacactaatttacagaagacacaactccttccccagtgatcactgtcataaccagtgctctaccgtatcccatcactgaggactgatgttgactgacatcattttatcgtaataaacatgtggctctattagctgcaagctttaccaagtaattggcatgacatctgagcacagaaattaaggcaaaaaaccaaagcaaaacaaatacatggtgctgaaattaacttgatgccaagcccaaggcagctgatttctgtgtatttgaacttagggcaaatcagagtctacacagacgcctacagaaagtttcaggaagaggcaagatgcattcaatttgaaagatatttatgggcaacaaagtaaggtcaggattagacttcaggcattcataaggcaggcactatcagaaagtgtacgccaactaagggacccacaaagcaggcagaggtaatgcagaaatctgttttgttcccatgaaatcaccaatcaaggcctccgttcttctaaagattagtccatcatcattagcaactgagatcaaagcactcttccactttacgtgattaaaatcaaacctgtatcagcaaaaaaaaaaaaaaaaaaaaaaaaaaaaaaaaaa

SEQ ID NO: 1868 - protein, 359 aa, Homo sapien
MLSLNNLQNIIYNPVIPYVGTIPDQLDPGTLIVICGHVPSDADRFQVDLQNGSSVKPRADVAFHFNPRFKRAGCIVCNTLINEKWGREEITYDTPFKREKSFEIVIMVLKDKFQVAVNGKHTLLYGHRIGPEKIDTLGIYGKVNIHSIGFSFSSDLQSTQASSLELTEISRENVPKSGTPQLQTVSPSWDLQGHGSETFCSVLWTRVFLEIAFCRPIGLTVASFQSLPFAARLNTPMGPGRTVVVKGEVNANAKSFNVDLLAGKSKDIALHLNPRLNIKAFVRNSFLQESWGEEERNITSFPFSPGMYFEMIIYCDVREFKVAVNGVHSLEYKHRFKELSSIDTLEINGDIHLLEVRSW

SEQ ID NO: 1869 - DNA, 2593 bp, Homo sapien; identical to SEQ ID NO: 1867

SEQ ID NO: 1870 - protein, 359 aa, Homo sapien; identical to SEQ ID NO: 1868

SEQ ID NO: 1871 - DNA, 1656 bp, Homo sapien
ggcgggagcgcggcggcccggctcccgcagggccgcgccgaggcaggcgagcccccgcggcgcccaggcgcgggcccgggcccccgccgccgccgccgccgccgggcgcggcatttttattcaggcgacgcttaagggagcccggccgcgcccggtgcattgtgggagcggcccgcggcccgttttcgggaggaggcggagggcgcaaagcgagccggtggatccataaagaacccagccaacccgcagagggaggggaggggctgagctgtgaggagagcggggcccaagaaccatgtctacgcgggagtcctttaacccggaaagttacgaattggacaaaagcttccggctaaccagattcactgaactgaagggcacaggctgcaaagtgccccaagatgtcctgcaaaaattgctggaatctttacaggagaaccacttccaagaagatgagcagtttctgggagccgttatgccaaggcttggcattggaatggatacttgtgtcattcctttgaggcacggtgggctttccttggttcaaaccacagattacatttacccgatcgtagacgacccttacatgatgggcaggatagcgtgtgccaatgtcctcagtgacctctatgcaatgggggtcacggaatgtgacaatatgctgatgctccttggagtcagtaataaaatgaccgacagggaaagggataaagtgatgcctctgattatccaaggttttaaagacgcagctgaggaagcaggaacatctgtaacaggcggccaaacagtactaaacccctggattgtcctgggaggagtggctaccactgtctgccaacccaatgaatttatcatgccagacaatgcagtgccaggggacgtgctggtgctgacaaaacccctggggacacaggtggcagtggctgtgcaccagtggctggatatccctgagaaatggaataagattaaactagtggtcacccaagaagatgtagagctggcctaccaggaggcgatgatgaacatggcgaggctcaacaggacagctgcaggactcatgcacacgttcaatgcccacgccgccactgacatcacgggcttcgggattttgggccatgcgcagaacctggccaagcagcagaggaacgaggtgtcgtttgtaattcacaacctcccggtgctggccaagatggctgcggtgagcaaggcctgcggaaacatgttcggcctcatgcacgggacctgcccggagacttcaggcggccttctgatctgtttaccacgtgagcaagcagctcggttctgtgcagagataaagtcccccaaatatggtgaaggccaccaagcatggattattgggattgtagagaagggcaaccgcacagccagaatcatagacaaaccccggatcatcgaggtcgcaccacaagtggccactcaaaatgtgaatcccacacccggggccacctcttaatctagacagaaatagctgtttggttttgtttttaaatagatctatttcccttatcacttcaattaaagactataaacaacaaaaatctcattgtgtctacacatcggggtgaccttaggtcggtttgtaagtggatacaattaataaaataaaatccattgcctttttaaaaaaaaaaaaaa

SEQ ID NO: 1872 - protein, 383 aa, Homo sapien
MSTRESFNPESYELDKSFRLTRFTELKGTGCKVPQDVLQKLLESLQENHFQEDEQFLGAVMPRLGIGMDTCVIPLRHGGLSLVQTTDYIYPIVDDPYMMGRIACANVLSDLYAMGVTECDNMLMLLGVSNKMTDRERDKVMPLIIQGFKDAAEEAGTSVTGGQTVLNPWIVLGGVATTVCQPNEFIMPDNAVPGDVLVLTKPLGTQVAVAVHQWLDIPEKWNKIKLVVTQEDVELAYQEAMMNMARLNRTAAGLMHTFNTHAATDITGFGILGHAQNLAKQQRNEVSFVIHNLPVLAKMAAVSKACGNMFGLMHGTCPETSGGLLICLPREQAARFCAEIKSPKYGEGHQAWIIGIVEKGNRTARIIDKPRIIEVAHKWPLKT

SEQ ID NO: 1873 - DNA, 5759 bp, Homo sapien
ataccctgtggtgctagtgtaaaatcaaatataatctacctctttagcttttctgttatgtaattggaatgaaaaaatagtgcttttttttttttttcatttttgagattgagttaccatggagggaaagaacatgtgttttaccagtggaacgcattctttgtgttatctcttcgatttttaacattttatgtttccagtttataaactttgcctccagtttgatgaagaaaatttagctattagaaagtatttaaaatctcaaaagtatgacattttaaaatgttagcaggtttaaagataacttagtttttcaactcttaacccaaaattatacttgtatactataatttgtgttgaattacttggtattatttatcatcctagtaagatctattttatataatttgattcactttttatattgaattatgttaattgtttttgtaatacacctttcatatttcttcaaagaaaactagtgttgggttattgctaattttgcttcgtggtttggttatttacatataaaaattatattgttttaaaaattgcaaagtgatcatttattgacacatcagcaagaattaatgttgaaatgcaagttttttcccctatccttaactaagtgtgtagatatctttgttttgtttctttaatagatagcaaacaataaagatgcattgaggaagacatggaaccctaagtttacattgagaagtcactttgatggcatccgagcccttgctttccatcccattgagcctgttttgataacagcatcagaggatcacacattaaaaatgtggaatttacagaaaacagccccagccaaaaagtgagaatattctactttaacattatttgaatattttaagtaacattttcagcagaaaactacatattttatgatttctgttaaatttcccaaacatttcttctagttctttcttccatgtcatgtaatttattgtgtttttccatttatacaacctaatgctaggttagaaaactgatgcttaggaagatatggtattatcttttggtttcaccagggtttgtgaatactgattacagtctttatacataacagtatttttaaatggctgctatatttggggagccccttgtctatactgaaggtttggactgttcttgtaaacaggtatatgcatctttaaaataatcaaatgtccacctccaccttgccccattgtttactagatttagacttatgagatggagcagagaaaagcctcactgggatgggtggagggtcttggtcttgtcttttggccttgagactttaggtactttccatacccaccaatatgtctagactcagaggctaacatgactgctagtgctcaccttggccctttagttcctgtctaagcatggatagacatgagttagtataaaccctttaaaagtcacaaagctaaatctggttctacttgcttgggtccttatcggagctccactcctttgggtcacatgtcaaaaaaaaaaaaaaaaaggcgccgtccgctgcgctgggggctcggtctatgacgagcagcggggtctgccatgggtcgggggctgctcaggggcctgtggccgctgcacatcgtcctgtggacgcgtatcgccagcacgatcccaccgcacgttcagaagtcggttaataacgacatgatagtcactgacaacaacggtgcagtcaagtttccacaactgtgtaaattttgtgatgtgagattttccacctgtgacaaccagaaatcctgcatgagcaactgcagcatcacctccatctgtgagaagccacaggaagtctgtgtggctgtatggagaaagaatgacgagaacataacactagagacagtttgccatgaccccaagctcccctaccatgactttattctggaagatgctgcttctccaaagtgcattatgaaggaaaaaaaaaagcctggtgagactttcttcatgtgttcctgtagctctgatgagtgcaatgacaacatcatcttctcagaagaatataacaccagcaatcctgacttgttgctagtcatatttcaagtgacaggcatcagcctcctgccaccactgggagttgccatatctgtcatcatcatcttctactgctaccgcgttaaccggcagcagaagctgagttcaacctgggaaaccggcaagacgcggaagctcatggagttcagcgagcactgtgccatcatcctggaagatgaccgctctgacatcagctccacgtgtgccaacaacatcaaccacaacacagagctgctgcccattgagctggacaccctggtggggaaaggtcgctttgctgaggtctataaggccaagctgaagcagaacacttcagagcagtttgagacagtggcagtcaagatctttccctatgaggagtatgcctcttggaagacagagaaggacatcttctcagacatcaatctgaagcatgagaacatactccagttcctgacggctgaggagcggaagacggagttggggaaacaatactggctgatcaccgccttccacgccaagggcaacctacaggagtacctgacgcggcatgtcatcagctgggaggacctgcgcaagctgggcagctccctcgcccgggggattgctcacctccacagtgatcacactccatgtgggaggcccaagatgcccatcgtgcacagggacctcaacagctccaatatcctcgtgaagaacgacctaacctgctgcctgtgtgactttgggctttccctgcgtctggaccctactctgtctgtggatgacctggctaacagtgggcaggtgggaactgcaagatacatggctccagaagtcctagaatccaggatgaatttggagaatgctgagtccttcaagcagaccgatgtctactccatggctctggtgctctgggaaatgacatctcgctgtaatgcagtgggagaagtaaaagattatgagcctccatttggttccaaggtgcgggagcacccctgtgtcgaaagcatgaaggacaacgtgttgagagatcgagggcgaccagaaattcccagcttctggctcaaccaccagggcatccagatggtgtgtgagacgttgactgagtgctgggaccacgacccagaggcccgtctcacagcccagtgtgtggcagaacgcttcagtgagctggagcatctggacaggctctcggggaggagctgctcggaggagaagattcctgaagacggctccctaaacactaccaaatagctcttctggggcaggctgggccatgtccaaagaggctgcccctctcaccaaagaacagaggcagcaggaagctgcccctgaactgatgcttcctggaaaaccaagggggtcactcccctccctgtaagctgtggggataagcagaaacaacagcagcagggagtgggtgacatagagcattctatgccttttacattgtcataggataagctgtgttagcacttcctcaggaaatgagattgattttacaatagccaataacatttgcactttattaatgcctgtatataaatatgaatagctatgttttatatatatatatatatatctatatatgtctatagctctatatatatagccataccttgaaaagagacaaggaaaaacatcaaatattcccaggaaattggttttattggagaactccagaaccaagcagagaaggaagggacccatgacagcattagcatttgacaatcacacatgcagtggttctctgactgtaaaacagtgaactttgcatgaggaaagaggctccatgtctcacagccagctatgaccacattgcacttgcttttgcaaaataatcattccctgcctagcacttctcttctggccatggaactaagtacagtggcactgtttgaggaccagtgttcccggggttcctgtgtgcccttatttctcctggacttttcatttaagctccaagccccaaatctggggggctagtttagaaactctccctcaacctagtttagaaactctaccccatctttaataccttgaatgttttgaaccccactttttaccttcatgggttgcagaaaaatcagaacagatgtccccatccatgcgattgccccaccatctactaatgaaaaattgttctttttttcatctttcccctgcacttatgttactattctctgctcccagccttcatccttttctaaaaaggagcaaattctcactctaggctttatcgtgtttactttttcattacacttgacttgattttctagttttctatacaaacaccaatgggttccatctttctgggctcctgattgctcaagcacagtttggcctgatgaagaggatttcaactacacaatactatcattgtcaggactatgacctcaggcactctaaacatatgttttgtttggtcagcacagcgtttcaaaaagtgaagccactttataaatatttggagattttgcaggaaaatctggatccccaggtaaggatagcagatggttttcagttatctccagtccacgttcacaaaatgtgaaggtgtggagacacttacaaagctgcctcacttctcactgtaaacattagctctttccactgcctacctggaccccagtctaggaattaaatctgcacctaaccaaggtcccttgtaagaaatgtccattcaagcagtcattctctgggtatataatatgattttgactaccttatctggtgttaagatttgaagttggccttttattggactaaaggggaactcctttaagggtctcagttagcccaagtttcttttgcttatatgttaatagttttaccctctgcattggagagaggagtgctttactccaagaagctttcctcatggttaccgttctctccatcatgccagccttctcaacctttgcagaaattactagagaggatttgaatgtgggacacaaaggtcccatttgcagttagaaaatttgtgtccacaaggacaagaacaaagtatgagctttaaaactccataggaaacttgttaatcaacaaagaagtgttaatgctgcaagtaatctcttttttaaaactttttgaagctacttattttcagccaaataggaatattagagagggactggtagtgagaatatcagctctgtttggatggtggaaggtctcattttattgagatttttaagatacatgcaaaggtttggaaatagaacctctaggcaccctcctcagtgtgggtgggctgagagttaaagacagtgtggctgcagtagcatagaggcgcctagaaattccacttgcaccgtagggcatgctgataccatcccaatagctgttgcccattgacctctagtggtgagtttctagaatactggtccattcatgagatattcaagattcaagagtattctcacttctgggttatcagcataaactggaatgtagtgtcagaggatactgtggcttgttttgtttatgtttttttttcttattcaagaaaaaagaccaaggaataacattctgtagttcctaaaaatactgacttttttcactactatacataaagggaaagttttattcttttatggaacacttcagctgtactcatgtattaaaataggaatgtgaatgctatatactctttttatatcaaaagtctcaagcacttatttttattctatgcattgtttgtcttttacataaataaaatgtttattagattg

SEQ ID NO: 1874 - protein, 567 aa, Homo sapien
MGRGLLRGLWPLHIVLWTRIASTIPPHVQKSVNNDMIVTDNNGAVKFPQLCKFCDVRFSTCDNQKSCMSNCSITSICEKPQEVCVAVWRKNDENITLETVCHDPKLPYHDFILEDAASPKCIMKEKKKPGETFFMCSCSSDECNDNIIFSEEYNTSNPDLLLVIFQVTGISLLPPLGVAISVIIIFYCYRVNRQQKLSSTWETGKTRKLMEFSEHCAIILEDDRSDISSTCANNINHNTELLPIELDTLVGKGRFAEVYKAKLKQNTSEQFETVAVKIFPYEEYASWKTEKDIFSDINLKHENILQFLTAEERKTELGKQYWLITAFHAKGNLQEYLTRHVISWEDLRKLGSSLARGIAHLHSDHTPCGRPKMPIVHRDLNSSNILVKNDLTCCLCDFGLSLRLDPTLSVDDLANSGQVGTARYMAPEVLESRMNLENAESFKQTDVYSMALVLWEMTSRCNAVGEVKDYEPPFGSKVREHPCVESMKDNVLRDRGRPEIPSFWLNHQGIQMVCETLTECWDHDPEARLTAQCVAERFSELEHLDRLSGRSCSEEKIPEDGSLNTTK

SEQ ID NO: 1875 - DNA, 914 bp, Homo sapien
ccagccaacgagcggaaaatggcagacaatttttcgctccatgatgcgttatctgggtctggaaacccaaaccctcaaggatggcctggcgcatgggggaaccagcctgctggggcagggggctacccaggggcttcctatcctggggcctaccccgggcaggcacccccaggggcttatcctggacaggcacctccaggcgcctaccatggagcacctggagcttatcccggagcacctgcacctggagtctacccagggccacccagcggccctggggcctacccatcttctggacagccaagtgcccccggagcctaccctgccactggcccctatggcgcccctgctgggccactgattgtgccttataacctgcctttgcctgggggagtggtgcctcgcatgctgataacaattctgggcacggtgaagcccaatgcaaacagaattgctttagatttccaaagagggaatgatgttgccttccactttaacccacgcttcaatgagaacaacaggagagtcattgtttgcaatacaaagctggataataactggggaagggaagaaagacagtcggttttcccatttgaaagtgggaaaccattcaaaatacaagtactggttgaacctgaccacttcaaggttgcagtgaatgatgctcacttgttgcagtacaatcatcgggttaaaaaactcaatgaaatcagcaaactgggaatttctggtgacatagacctcaccagtgcttcatataccatgatataatctgaaaggggcagattaaaaaaaaaaaaaaagaatctaaaccttacatgtgtaaaggtttcatgttcactgtgagtgaaaatttttacattcatcaatatccctcttgtaagtcatctacttaataaatattacagtgaaag

SEQ ID NO: 1876 - protein, 250 aa, Homo sapien
MADNFSLHDALSGSGNPNPQGWPGAWGNQPAGAGGYPGASYPGAYPGQAPPGAYPGQAPPGAYHGAPGAYPGAPAPGVYPGPPSGPGAYPSSGQPSAPGAYPATGPYGAPAGPLIVPYNLPLPGGVVPRMLITILGTVKPNANRIALDFQRGNDVAFHFNPRFNENNRRVIVCNTKLDNNWGREERQSVFPFESGKPFKIQVLVEPDHFKVAVNDAHLLQYNHRVKKLNEISKLGISGDIDLTSASYTMI

SEQ ID NO: 1877 - DNA, 2709 bp, Homo sapien
gggaatagcagaataggagcaagccagcactagtcagctaactaagtgactcaaccaaggccttttttccttgttatctttgcagatacttcattttcttagcgtttctggagattacaacatcctgcggttccgtttctgggaactttactgatttatctcccccctcacacaaataagcattgattcctgcatttctgaagatctcaagatctggactactgttgaaaaaatttccagtgaggctcacttatgtctgtaaagatgggaaaaaaatacaagaacattgttctactaaaaggattagaggtcatcaatgattatcattttagaatggttaagtccttactgagcaacgatttaaaacttaatttaaaaatgagagaagagtatgacaaaattcagattgctgacttgatggaagaaaagttccgaggtgatgctggtttgggcaaactaataaaaattttcgaagatataccaacgcttgaagacctggctgaaactcttaaaaaagaaaagttaaaagtaaaaggaccagccctatcaagaaagaggaagaaggaagtgcatgctacttcacctgcaccctccacaagcagcactgtcaaaactgaaggagcagaggcaactcctggagctcagaaaagaaaaaaatcaaccaaagaaaaggctggacccaaagggagtaaggtgtccgaggaacagactcagcctccctctcctgcaggagccggcatgtccacagccatgggccgttccccatctcccaagacctcattgtcagctccacccaacagttcttcaactgagaacccgaaaacagtggccaaatgtcaggtaactcccagaagaaatgttctccaaaaacgcccagtgatagtgaaggtactgagtacaacaaagccatttgaatatgagaccccagaaatggagaaaaaaataatgtttcatgctacagtggctacacagacacagttcttccatgtgaaggttttaaacaccagcttgaaggagaaattcaatggaaagaaaatcatcatcatatcagattatttggaatatgatagtctcctagaggtcaatgaagaatctactgtatctgaagctggtcctaaccaaacgtttgaggttccaaataaaatcatcaacagagcaaaggaaactctgaagattgatattcttcacaaacaagcttcaggaaatattgtatatggggtatttatgctacataagaaaacagtaaatcagaagaccacaatctacgaaattcaggatgatagaggaaaaatggatgtagtggggacaggacaatgtcacaatatcccctgtgaagaaggagataagctccagcttttctgctttcgacttagaaaaaagaaccagatgtcaaaactgatttcagaaatgcatagttttatccagataaagaaaaaaacaaacccgagaaacaatgaccccaagagcatgaagctaccccaggaacagcgtcagcttccatatccttcagaggccagcacaaccttccctgagagccatcttcggactcctcagatgccaccaacaactccatccagcagtttcttcaccaagaaaagtgaagacacaatctccaaaatgaatgacttcatgaggatgcagatactgaaggaagggagtcattttccaggaccgttcatgaccagcataggcccagctgagagccatccccacactcctcagatgcctccatcaacaccaagcagcagtttcttaaccacgttgaaaccaagactgaagactgaacctgaagaagtttccatagaagacagtgcccagagtgacctcaaagaagtgatggtgctgaacgcaacagaatcatttgtatatgagcccaaagagcagaagaaaatgtttcatgccacagtggcaactgagaatgaagtcttccgagtgaaggtttttaatattgacctaaaggagaagttcaccccaaagaagatcattgccatagcaaattatgtttgccgcaatgggttcctggaggtatatcctttcacacttgtggctgatgtgaatgctgaccgaaacatggagatcccaaaaggattgattagaagtgccagcgtaactcctaaaatcaatcagctttgctcacaaactaaaggaagttttgtgaatggggtgtttgaggtacataagaaaaatgtaaggggtgaattcacttattatgaaatacaagataatacagggaagatggaagtggtggtgcatggacgactgaacacaatcaactgtgaggaaggagataaactgaaactcaccagctttgaattggcaccgaaaagtgggaataccggggagttgagatctgtaattcatagtcacatcaaggtcatcaagaccaggaaaaacaagaaagacatactcaatcctgattcaagtatggaaacttcaccagactttttcttctaaaatctggatgtcattgacgataatgtttatggagataaggtctaagtccctaaaaaaatgtacatatacctggttgaaatacaacactatacatacacaccaccatatatactagctgttaatcctatggaatgggggtattgggagtgcttttttaatttttcatagtttttttttaataaaatggcatattttgcatctacaacttctataataagaaaaaataaataaacattatcttttttgtgaaaaaaa

SEQ ID NO: 1878 - protein, 729 aa, Homo sapien
MGKKYKNIVLLKGLEVINDYHFRMVKSLLSNDLKLNLKMREEYDKIQIADLMEEKFRGDAGLGKLIKIFEDIPTLEDLAETLKKEKLKVKGPALSRKRKKEVHATSPAPSTSSTVKTEGAEATPGAQKRKKSTKEKAGPKGSKVSEEQTQPPSPAGAGMSTAMGRSPSPKTSLSAPPNSSSTENPKTVAKCQVTPRRNVLQKRPVIVKVLSTTKPFEYETPEMEKKIMFHATVATQTQFFHVKVLNTSLKEKFNGKKIIIISDYLEYDSLLEVNEESTVSEAGPNQTFEVPNKIINRAKETLKIDILHKQASGNIVYGVFMLHKKTVNQKTTIYEIQDDRGKMDVVGTGQCHNIPCEEGDKLQLFCFRLRKKNQMSKLISEMHSFIQIKKKTNPRNNDPKSMKLPQEQRQLPYPSEASTTFPESHLRTPQMPPTTPSSSFFTKKSEDTISKMNDFMRMQILKEGSHFPGPFMTSIGPAESHPHTPQMPPSTPSSSFLTTLKPRLKTEPEEVSIEDSAQSDLKEVMVLNATESFVYEPKEQKKMFHATVATENEVFRVKVFNIDLKEKFTPKKIIAIANYVCRNGFLEVYPFTLVADVNADRNMEIPKGLIRSASVTPKINQLCSQTKGSFVNGVFEVHKKNVRGEFTYYEIQDNTGKMEVVVHGRLNTINCEEGDKLKLTSFELAPKSGNTGELRSVIHSHIKVIKTRKNKKDILNPDSSMETSPDFFF

SEQ ID NO: 1879 - DNA, 4205 bp, Homo sapien
ctccctcgctccctccctgcgcgccgcctctcactcacagcctcccttccttctttctccctccgcctcccgagcaccagcgcgctctgagctgcccccagggtccctcccccgccgccagcagcccatttggagggaggaagtaagggaagaggagaggaaggggagccggaccgactacccagacagagccggtgaatgggtttgtggtgacccccgccccccaccccaccctcccttcccacccgacccccaacccccatccccagttcgagccgccgcccgaaaggccgggccgtcgtcttaggaggagtcgccgccgccgccacctccgccatggagctgatcaccattctcgagaagaccgtgtctcccgatcggctggagctggaagcggcgcagaagttcctggagcgtgcggccgtggagaacctgcccactttccttgtggaactgtccagagtgctggcaaatccaggaaacagtcaggttgccagagttgcagctggtctacaaatcaagaactctttgacatctaaagatccagatatcaaggcacaatatcagcagaggtggcttgctattgatgctaatgctcgacgagaagtcaagaactatgttttgcagacattgggtacagaaacttaccggcctagttctgcctcacagtgtgtggctggtattgcttgtgcagagatcccagtaaaccagtggccagaactcattcctcagctggtggccaatgtcacaaaccccaacagcacagagcacatgaaggagtcgacattggaagccatcggttatatttgccaagatatagacccagagcagctacaagataaatccaatgagattctgactgccataatccaggggatgaggaaagaagagcctagtaataatgtgaagctagctgctacgaatgcactcctgaactcattggagttcaccaaagcaaactttgataaagagtctgaaaggcactttattatgcaggtggtctgtgaagccacacagtgtccagatacgagggtacgagtggctgctttacagaatctggtgaagataatgtccttatattatcagtacatggagacatatatgggtcctgctctttttgcaatcacaatcgaagcaatgaaaagtgacattgatgaggtggctttacaagggatagaattctggtccaatgtctgtgatgaggaaatggatttggccattgaagcttcagaggcagcagaacaaggacggccccctgagcacaccagcaagttttatgcgaagggagcactacagtatctggttccaatcctcacacagacactaactaaacaggacgaaaatgatgatgacgatgactggaacccctgcaaagcagcaggggtgtgcctcatgcttctggccacctgctgtgaagatgacattgtcccacatgtcctccccttcattaaagaacacatcaagaacccagattggcggtaccgggatgcagcagtgatggcttttggttgtatcttggaaggaccagagcccagtcagctcaaaccactagttatacaggctatgcccaccctaatagaattaatgaaagaccccagtgtagttgttcgagatacagctgcatggactgtaggcagaatttgtgagctgcttcctgaagctgccatcaatgatgtctacttggctcccctgctacagtgtctgattgagggtctcagtgctgaacccagagtggcttcaaatgtgtgctgggctttctccagtctggctgaagctgcttatgaagctgcagacgttgctgatgatcaggaagaaccagctacttactgcttatcttcttcatttgaactcatagttcagaagctcctagagactacagacagacctgatggacaccagaacaacctgaggagttctgcatatgaatctctgatggaaattgtgaaaaacagtgccaaggattgttatcctgctgtccagaaaacgactttggtcatcatggaacgactgcaacaggttcttcagatggagtcacatatccagagcacatccgatagaatccagttcaatgaccttcagtctttactctgtgcaactcttcagaatgttcttcggaaagtgcaacatcaagatgctttgcagatctctgatgtggttatggcctccctgttaaggatgttccaaagcacagctgggtctgggggagtacaagaggatgccctgatggcagttagcacactggtggaagtgttgggtggtgaattcctcaagtacatggaggcctttaaacccttcctgggcattggattaaaaaattatgctgaataccaggtttgtttggcagctgtgggcttagtgggagacttgtgccgtgccctgcaatccaacatcatacctttctgtgacgaggtgatgcagctgcttctggaaaatttggggaatgagaacgtccacaggtctgtgaagccgcagattctgtcagtgtttggtgatattgcccttgctattggaggagagtttaaaaaatacttagaggttgtattgaatactcttcagcaggcctcccaagcccaggtggacaagtcagactatgacatggtggattatctgaatgagctaagggaaagctgcttggaagcctatactggaatcgtccagggattaaagggggatcaggagaacgtacacccggatgtgatgctggtacaacccagagtagaatttattctgtctttcattgaccacattgctggagatgaggatcacacagatggagtagtagcttgtgctgctggactaataggggacttatgtacagcatttgggaaggatgtactgaaattagtagaagctaggccaatgatccatgaattgttaactgaagggcggagatcgaagactaacaaagcaaaaacccttgctacatgggcaacaaaagaactgaggaaactgaagaaccaagcttgatctgttaccattgggatgataacctgaggacccccactggaaatctcccatcttttgaaaaacctggaagtgaggagtgtgcacggatgctgaatgtttgggaatgagaggatgagtgagtgaggcttgaaaacacaccacattgaaaatcctgccacagcagcagccgcagccgccaacagcagcgctgttagtgagctaagtaagcactgacttcgtagaaaaccataacatcggccatcttggaaaagagaaaaacaatggagttacttatttaaaaaaaaagaaagaaagttatctcttcccaggagaggctagaagtagcttttctgtcttttggccagtgccgagtggaatgcctggtttgggggaggaggagggactgggttcagctgtggtgctttgttgtaaaaggcagcctggcctttgctactgaggagaaagatggagcctgggtctcaagcccaccttcgctgtacctttgccacatggtactgtatgcttgccagctagaaggagggtcagggattttttacagtctgagaatgagtgtgtgtgagtgaggcggtatccacattctcaacttcaagtcattgcagtttctttttcccagaaaacaaggggttagatgttgcatttcataaaactaaccgaagttctgtctactgatgcagcacaagagatgtaaaaaaaaaaaaaaaaaaaaaaaaaaaaacacacacacagaggaaagacgctctttaggttttgttttgttttttttttttggttttgttttttgttttttttactctagggaaaacactgacgaatggtcagagctcctatcctgatcttttcatcaaggcgcctttcctaataatatggttcaactgtgaatgtagaagtgggggggaggggggagaaaaagaaaactctggcgttagaggatatagaaaaatataagtacaattgttacaaataacgcagacttcaaaaacaaaaaaatcacaacccaaacaaaccaaaatttaaatgatcagaattggcagcacaaagaaaacgccctctcctgacttgtattgtggcagtctgaacgcccccagaaaattgtgccaaagagtttagaaaaataaatatacaataaaagtaaacacatacacacaaaacagcaaacttcaggtaactattttggattgcaaacaggataaattaaatgttcaaacaatctgataaaataaccatttggaaactgaaaa

SEQ ID NO: 1880 - protein, 876 aa, Homo sapien
MELITILEKTVSPDRLELEAAQKFLERAAVENLPTFLVELSRVLANPGNSQVARVAAGLQIKNSLTSKDPDIKAQYQQRWLAIDANARREVKNYVLQTLGTETYRPSSASQCVAGIACAEIPVNQWPELIPQLVANVTNPNSTEHMKESTLEAIGYICQDIDPEQLQDKSNEILTAIIQGMRKEEPSNNVKLAATNALLNSLEFTKANFDKESERHFIMQVVCEATQCPDTRVRVAALQNLVKIMSLYYQYMETYMGPALFAITIEAMKSDIDEVALQGIEFWSNVCDEEMDLAIEASEAAEQGRPPEHTSKFYAKGALQYLVPILTQTLTKQDENDDDDDWNPCKAAGVCLMLLATCCEDDIVPHVLPFIKEHIKNPDWRYRDAAVMAFGCILEGPEPSQLKPLVIQAMPTLIELMKDPSVVVRDTAAWTVGRICELLPEAAINDVYLAPLLQCLIEGLSAEPRVASNVCWAFSSLAEAAYEAADVADDQEEPATYCLSSSFELIVQKLLETTDRPDGHQNNLRSSAYESLMEIVKNSAKDCYPAVQKTTLVIMERLQQVLQMESHIQSTSDRIQFNDLQSLLCATLQNVLRKVQHQDALQISDVVMASLLRMFQSTAGSGGVQEDALMAVSTLVEVLGGEFLKYMEAFKPFLGIGLKNYAEYQVCLAAVGLVGDLCRALQSNIIPFCDEVMQLLLENLGNENVHRSVKPQILSVFGDIALAIGGEFKKYLEVVLNTLQQASQAQVDKSDYDMVDYLNELRESCLEAYTGIVQGLKGDQENVHPDVMLVQPRVEFILSFIDHIAGDEDHTDGVVACAAGLIGDLCTAFGKDVLKLVEARPMIHELLTEGRRSKTNKAKTLATWATKELRKLKNQA

SEQ ID NO: 1881 - DNA, 4212 bp, Homo sapien
  Unsure 3879-3880: Unknown base
ctccctcgctccctccctgcgcgccgcctctcactcacagcctcccttccttctttctccctccgcctcccgagcaccagcgcgctctgagctgcccccagggtcccctcccccgccgccagcagcccatttggagggaggaagtaagggaagaggagaggaaggggagccggaccgactacccagacagagccggtgaatgggtttgtggtgacccccgccccccaccccaccctcccttcccacccgacccccaacccccatccccagttcgagccgccgcccgaaaggccgggccgtcgtcttaggaggagtcgccgccgccgccacctccgccatggagctgatcaccattctcgagaagaccgtgtctcccgatcggctggagctggaagcggcgcagaagttcctggagcgtgcggccgtggagaacctgcccactttccttgtggaactgtccagagtgctggcaaatccaggaaacagtcaggttgccagagttgcagctggtctacaaatcaagaactctttgacatctaaagatccagatatcaaggcacaatatcagcagaggtggcttgctattgatgctaatgctcgacgagaagtcaagaactatgttttgcagacattgggtacagaaacttaccggcctagttctgcctcacagtgtgtggctggtattgcttgtgcagagatcccagtaaaccagtggccagaactcattcctcagctggtggccaatgtcacaaaccccaacagcacagagcacatgaaggagtcgacattggaagccatcggttatatttgccaagatatagacccagagcagctacaagataaatccaatgagattctgactgccataatccaggggatgaggaaagaagagcctagtaataatgtgaagctagctgctacaaatgcactcctgaactcattggagttcaccaaagcaaactttgataaagagtctgaaaggcactttattatgcaggtggtctgtgaagccacacagtgtccagatacgagggtacgagtggctgctttacagaatctggtgaagataatgtccttatattatcagtacatggagacatatatgggtcctgctctttttgcaatcacaatcgaagcaatgaaaagtgacattgatgaggtggctttacaagggatagaattctggtccaatgtctgtgatgaggaaatggatttggccattgaagcttcagaggcagcagaacaaggacggccccctgagcacaccagcaagttttatgcgaagggagcactacagtatctggttccaatcctcacacagacactaactaaacaggacgaaaatgatgatgacgatgactggaacccctgcaaagcagcaggggtgtgcctcatgcttctggccacctgctgtgaagatgacattgtcccacatgtcctccccttcattaaagaacacatcaagaacccagattggcggtaccgggatgcagcagtgatggcttttggttgtatcttggaaggaccagagcccagtcagctcaaaccactagttatacaggctatgcccaccctaatagaattaatgaaagaccccagtgtagttgttcgagatacagctgcatggactgtaggcagaatttgtgagctgcttcctgaagctgccatcaatgatgtctacttggctcccctgctacagtgtctgattgagggtctcagtgctgaacccagagtggcttcaaatgtgtgctgggctttctccagtctggctgaagctgcttatgaagctgcagacgttgctgatgatcaggaagaaccagctacttactgcttatcttcttcatttgaactcatagttcagaagctcctagagactacagacagacctgatggacaccagaacaacctgaggagttctgcatatgaatctctgatggaaattgtgaaaaacagtgccaaggattgttaccctgctgtccagaaaacgactttggtcatcatggaacgactgcaacaggttcttcagatggagtcacatatccagagcacatccgatagaatccagttcaatgaccttcagtctttactctgtgcaactcttcagaatgttcttcggaaagtgcaacatcaagatgctttgcagatctctgatgtggttatggcctccctgttaaggatgttccaaagcacagctgggtctgggggagtacaagaggatgccctgatggcagttagcacactggtggaagtgttgggtggtgaattcctcaagtacatggaggcctttaaacccttcctgggcattggattaaaaaattatgctgaataccaggtttgtttggcagctgtgggcttagtgggagacttgtgccgtgccctgcaatccaacatcatacctttctgtgacgaggtgatgcagctgcttctggaaaatttggggaatgagaacgtccacaggtctgtgaagccgcagattctgtcagtgtttggtgatattgcccttgctattggaggagagtttaaaaaatacttagaggttgtattgaatactcttcagcaggcctcccaagcccaggtggacaagtcagactatgacatggtggattatctgaatgagctaagggaaagctgcttggaagcctatactggaatcgtccagggattaaagggggatcaggagaacgtacacccggatgtgatgctggtacaacccagagtagaatttattctgtctttcattgaccacattgctggagatgaggatcacacagatggagtagtagcttgtgctgctggactaataggggacttatgtacagcatttgggaaggatgtactgaaattagtagaagctaggccaatgatccatgaattgttaactgaagggcggagatcgaagactaacaaagcaaaaacccttgctacatgggcaacaaaagaactgaggaaactgaagaaccaagcttgatctgttaccattgggatgataacctgaggacccccactggaaatctcccatcttttgaaaaacctggaagtgaggagtgtgcacggatgctgaatgtttgggaatgagaggatgagtgagtgaggcttgaaaacacaccacattgaaaatcctgccacagcagcagccgcagccgccaacagcagcgctgttagtgagctaagtaagcactgacttcgtagaaaaccataacatcggccatcttggaaaagagaaaaacaatggagttacttatttaaaaaaaaagaaagaaagttatctcttcccaggagaggctagaagtagcttttctgtcttttggccagtgccgagtggaatgcctggtttcggggaggaggagggactgggttcagctgtggtgctttgttgtaaaaggcagcctggcctttgctactgaggagaaagatggagcctgggtctcaagcccaccttcgctgtacctttgccacatggtactgtatgcttgccagctagaaggagggtcagggttttttacagtctgagaatgagtgtgtgtgagtgaggcggtatccacattctcaacttcaagtcattgctgtttctttttcccagaaaacaaggggttagatgttgcatttcataaaactaaccgaagttctgtctactgatgcagcacaagagatgtaaaaaaaaaaaaaaaaaaaaaaaaaaaaaaacacacaaaaaaacacacacacagaggaaagacgctctttaggttttgttttgtttttttttttttggttttgttttttgtttttttttttactctagggaaaacactgacgaatggtcagagctcctatcctgatcttttcatcaaggcgcctttcctaataatatggttcaactgtgaatgtagaagtgggggnnaggggggagaaaaagaaaactctggcgttagaggatataaaaaaatataagtacaattgttacaaataacgcagacttcaaaaacaaaaaaatcacaacccaaacaaaccaaaatttaaatgatcagaattggcagcacaaagaaaacgccctctcctgacttgtattgtggcagtctgaacgcccccagaaaattgtgccaaagagtttagaaaaataaatatacaataaaagtaaacacatacacacaaaacagcaaacttcaggtaactattttggattgcaaacaggataattaaatgttcaaacaatctgataaaataaccatttgg

SEQ ID NO: 1882 - protein, 876 aa, Homo sapien; identical to SEQ ID NO: 1880
  Unsure 3879-3880: Unknown amino acid

SEQ ID NO: 1883 - DNA, 1577 bp, Homo sapien
ggcacgaggctgctgtttgtctacttcctcctgcttccccgccgccgccgccgccatcatgagggaaatcgtgcacttgcaggccgggcagtgcggcaaccaaatcggcgccaagttttgggaggtgatcagcgatgagcacggcatcgaccccacgggcacctaccacggggacagcgacctgcagctggaacgcatcaacgtgtactacaatgaggccaccggcggcaagtacgtgccccgcgccgtgctcgtggatctggagcccggcaccatggactccgtgcgctcggggcccttcgggcagatcttccggccggacaacttcgttttcggtcagagtggtgctgggaacaactgggccaaggggcactacacagaaggcgcggagctggtggactcggtgctggatgttgtgagaaaggaggctgagagctgtgactgcctgcagggtttccagctgacccactccctgggtggggggactgggtctgggatgggtaccctcctcatcagcaagatccgggaggagtacccagacaggatcatgaacacgtttagtgtggtgccttcgcccaaagtgtcagacacagtggtggagccctacaacgccaccctctcagtccaccagctcgtagaaaacacagacgagacctactgcattgataacgaagctctctacgacatttgcttcagaaccctaaagctgaccacgcccacctatggtgacctgaaccacctggtgtctgctaccatgagtggggtcaccacctgcctgcgcttcccaggccagctcaatgctgacctgcggaagctggctgtgaacatggtcccgtttccccggctgcacttcttcatgcccggctttgccccactgaccagccggggcagccagcagtaccgggcgctgaccgtgcccgagctcacccagcagatgtttgatgccaagaacatgatggctgcctgcgacccccgccatggccgctacctgacggttgccgccgtgttcaggggccgcatgtccatgaaggaggtggatgagcaaatgcttaatgtccaaaacaaaaacagcagctattttgttgagtggatccccaacaatgtgaaaacggctgtctgtgacatcccacctcgggggctaaaaatgtccgccaccttcattggcaacagcacggccatccaggagctgttcaagcgcatctccgagcagttcacggccatgttccggcgcaaggccttcctgcactggtacacgggcgagggcatggacgagatggagttcaccgaggccgagagcaacatgaatgacctggtgtccgagtaccagcagtaccaggatgccacagccgaggaggagggcgagttcgaggaggaggctgaggaggaggtggcctagagccttcagtcactggggaaagcagggaagcagtgtgaactctttattcactcccagcctgtcctgtggcctgtcccactgtgtgcacttgctgttttccctgtccacatccatgctgtacagacaccaccattaaagcattttcatagtgaaaaaaaaaaaaaaaaaaaaaaaaaaaaaa

SEQ ID NO: 1884 - protein, 445 aa, Homo sapien
MREIVHLQAGQCGNQIGAKFWEVISDEHGIDPTGTYHGDSDLQLERINVYYNEATGGKYVPRAVLVDLEPGTMDSVRSGPFGQIFRPDNFVFGQSGAGNNWAKGHYTEGAELVDSVLDVVRKEAESCDCLQGFQLTHSLGGGTGSGMGTLLISKIREEYPDRIMNTFSVVPSPKVSDTVVEPYNATLSVHQLVENTDETYCIDNEALYDICFRTLKLTTPTYGDLNHLVSATMSGVTTCLRFPGQLNADLRKLAVNMVPFPRLHFFMPGFAPLTSRGSQQYRALTVPELTQQMFDAKNMMAACDPRHGRYLTVAAVFRGRMSMKEVDEQMLNVQNKNSSYFVEWIPNNVKTAVCDIPPRGLKMSATFIGNSTAIQELFKRISEQFTAMFRRKAFLHWYTGEGMDEMEFTEAESNMNDLVSEYQQYQDATAEEEGEFEEEAEEEVA

SEQ ID NO: 1885 - DNA, 3189 bp, Homo sapien
tttccagccatggctgccattacctgaccagcgccacagccggtctctctgcaggcgccgggagaagtgaccagagcaatttctgcttttcacagggcgggtttctcaacggtgacttgtgggcagtgccttctgctgagcgagtcatggcccgaaggcagaactaactgtgcctgcagtcttcactctcaggatgcagccgaggtgggcccaaggggccacgatgtggcttggagtcctgctgacccttctgctctgttcaagccttgagggtcaagaaaactctttcacaatcaacagtgttgacatgaagagcctgccggactggacggtgcaaaatgggaagaacctgaccctgcagtgcttcgcggatgtcagcaccacctctcacgtcaagcctcagcaccagatgctgttctataaggatgacgtgctgttttacaacatctcctccatgaagagcacagagagttattttattcctgaagtccggatctatgactcagggacatataaatgtactgtgattgtgaacaacaaagagaaaaccactgcagagtaccaggtgttggtggaaggagtgcccagtcccagggtgacactggacaagaaagaggccatccaaggtgggatcgtgagggtcaactgttctgtcccagaggaaaaggccccaatacacttcacaattgaaaaacttgaactaaatgaaaaaatggtcaagctgaaaagagagaagaattctcgagaccagaattttgtgatactggaattccccgttgaggaacaggaccgcgttttatccttccgatgtcaagctaggatcatttctgggatccatatgcagacctcagaatctaccaagagtgaactggtcaccgtgacggaatccttctctacacccaagttccacatcagccccaccggaatgatcatggaaggagctcagctccacattaagtgcaccattcaagtgactcacctggcccaggagtttccagaaatcataattcagaaggacaaggcgattgtggcccacaacagacatggcaacaaggctgtgtactcagtcatggccatggtggagcacagtggcaactacacgtgcaaagtggagtccagccgcatatccaaggtcagcagcatcgtggtcaacataacagaactattttccaagcccgaactggaatcttccttcacacatctggaccaaggtgaaagactgaacctgtcctgctccatcccaggagcacctccagccaacttcaccatccagaaggaagatacgattgtgtcacagactcaagatttcaccaagatagcctcaaagtcggacagtgggacgtatatctgcactgcaggtattgacaaagtggtcaagaaaagcaacacagtccagatagtcgtatgtgaaatgctctcccagcccaggatttcttatgatgcccagtttgaggtcataaaaggacagaccatcgaagtccgttgcgaatcgatcagtggaactttgcctatttcttaccaacttttaaaaacaagtaaagttttggagaatagtaccaagaactcaaatgatcctgcggtattcaaagacaaccccactgaagacgtcgaataccagtgtgttgcagataattgccattcccacgccaaaatgttaagtgaggttctgagggtgaaggtgatagccccggtggatgaggtccagatttctatcctgtcaagtaaggtggtggagtctggagaggacattgtgctgcaatgtgctgtgaatgaaggatctggtcccatcacctataagttttacagagaaaaagagggcaaacccttctatcaaatgacctcaaatgccacccaggcattttggaccaagcagaaggctaacaaggaacaggagggagagtattactgcacagccttcaacagagccaaccacgcctccagtgtccccagaagcaaaatactgacagtcagagtcattcttgccccatggaagaaaggacttattgcagtggttatcatcggagtgatcattgctctcttgatcattgcggccaaatgttattttctgaggaaagccaaggccaagcagatgccagtggaaatgtccaggccagcagtaccacttctgaactccaacaacgagaaaatgtcagatcccaatatggaagctaacagtcattacggtcacaatgacgatgtcggaaaccatgcaatgaaaccaataaatgataataaagagcctctgaactcagacgtgcagtacacggaagttcaagtgtcctcagctgagtctcacaaagatctaggaaagaaggacacagagacagtgtacagtgaagtccggaaagctgtccctgatgccgtggaaagcagatactctagaacggaaggctcccttgatggaacttagacagcaaggccagatgcacatccctggaaggacatccatgttccgagaagaacagatgatccctgtatttcaagacctctgtgcacttatttatgaacctgccctgctcccacagaacacagcaattcctcaggctaagctgccggttcttaaatccatcctgctaagttaatgttgggtagaaagagatacagaggggctgttgaatttcccacatacactccttccaccaagttggaacatccttggaaattggaagagcacaagaggagatccagggcaaggccattgggatattctgaaacttgaatattttgttttgtgcagagataaagaccttttccatgcaccctcatacacagaaaccaattttcttttttatactcaatcatttctagcgcatggcctggttagaggctggttttttctcttttcctttggtccttcaaaggcttgtagttttgggtagtccttgttctttggaaatacacagtgctgaccagacagcctccccctgtcccctctatgacctcgccctccacaaatgggaaaaccagactacttgggagcaccgcctgtgaaataccaacctgaagacacggttcattcaggcaacgcacaaaacagaaaatgaaggtggaacaagcacagatgttcttcaactgtttttgtctacactctttctcttttcctctaccatgctgaaggctgaaagacaggaagatggtgccatcagcaaatattattcttaattgaaaacttgaaaaaaaaaaaaaaaa

SEQ ID NO: 1886 - protein, 738 aa, Homo sapien
MQPRWAQGATMWLGVLLTLLLCSSLEGQENSFTINSVDMKSLPDWTVQNGKNLTLQCFADVSTTSHVKPQHQMLFYKDDVLFYNISSMKSTESYFIPEVRIYDSGTYKCTVIVNNKEKTTAEYQVLVEGVPSPRVTLDKKEAIQGGIVRVNCSVPEEKAPIHFTIEKLELNEKMVKLKREKNSRDQNFVILEFPVEEQDRVLSFRCQARIISGIHMQTSESTKSELVTVTESFSTPKFHISPTGMIMEGAQLHIKCTIQVTHLAQEFPEIIIQKDKAIVAHNRHGNKAVYSVMAMVEHSGNYTCKVESSRISKVSSIVVNITELFSKPELESSFTHLDQGERLNLSCSIPGAPPANFTIQKEDTIVSQTQDFTKIASKSDSGTYICTAGIDKVVKKSNTVQIVVCEMLSQPRISYDAQFEVIKGQTIEVRCESISGTLPISYQLLKTSKVLENSTKNSNDPAVFKDNPTEDVEYQCVADNCHSHAKMLSEVLRVKVIAPVDEVQISILSSKVVESGEDIVLQCAVNEGSGPITYKFYREKEGKPFYQMTSNATQAFWTKQKANKEQEGEYYCTAFNRANHASSVPRSKILTVRVILAPWKKGLIAVVIIGVIIALLIIAAKCYFLRKAKAKQMPVEMSRPAVPLLNSNNEKMSDPNMEANSHYGHNDDVGNHAMKPINDNKEPLNSDVQYTEVQVSSAESHKDLGKKDTETVYSEVRKAVPDAVESRYSRTEGSLDGT

SEQ ID NO: 1887 - DNA, 2228 bp, Homo sapien
  Unsure 230-320, 1706-1820: Unknown base
atctcacgttagctagagacagaactggagctagcagtcagatctcttacaaagttgcctttcttcttctgtgggtaagtggggcacccttgggacgctgtgctgggcgtacatgggtgcttgatgaagttacttggtggactgatgtgattgatgtccaacatgtatgcagggacagaggctatggtccctacagagcaggcatggagagaaggagaaatacatacggnnnnnnnnnnnnnnnnnnnnnnnnnnnnnnnnnnnnnnnnnnnnnnnnnnnnnnnnnnnnnnnnnnnnnnnnnnnnnnnnnnnnnnnnnnnttgcttgctaaagaagtggtctcctgaggtcttaagacgttcctgacaatgtcttgagtgggtgggagagaggctgcagtcattgtgctgtggaatttcagaggtgagaaccacacctaaccaaaattactttccctgtttgcctcagtgacacagctgcaggaaccctggtgggtgttgtattaagtaaatttgacctttattctttgcagatctgtgaaatgttgtcttctgaggggccacgtgtatctgtagtgctgaggactccttgggcctctgaagtcacagagagaaccctgcagggtgggggaccagtgtgtgacagccctgctttgcattttctttgagaagtgctgtcattttgcatttctctccaccagggcaatcttcaatcttgagaggtgtgatcataacttgccttgtttcttgtcgctacagagaacggaaggctcccttgatggaacttagacagcaaggccagatgcacatccctggaaggacatccatgttccgagaagaacagatgatccctgtatttcaagacctctgtgcacttatttatgaacctgccctgctcccacagaacacagcaattcctcaggctaagctgccggttcttaaatccatcctgctaagttaatgttgggtagaaagagatacagaggggctgttgaatttcccacataccctccttccaccaagttggaacatccttggaaattggaagagcacaagaggagatccagggcaaggccattgggatattctgaaacttgaatattttgttttgtgcagagataaagaccttttccatgcaccctcatacacagaaaccaattttcttttttatactcaatcatttctagcgcatggcctggttagaggctggttttttctcttttcctttggtccttcaaaggcttgtagttttgggtagtccttgttctttggaaatacacagtgctgaccagacagcctccccctgtcccctctatgacctcgccctccacaaatgggaaaaccagactacttgggagcaccgcctgtgaaataccaacctgaagacaccgttcattcaggcaacgcacaaaacagaaaatgaaggtggaacaagcacagatgttcttcaactgtttttgtctacactctttctcttttcctctaccatgctgaaggctgaaagacaggaagatggtgccatcagcaaatattattcttaattgaaaacttgaaatgtgtatgtttcttactaatttttaaaaatgtattccttgccaggcctagacaaggatcgctcacgcctgtatatcccagcacttcaggtagagctgaggtgggcggtatcgacctgaggtcaggtagctttgagaccagcctgatgaaacnnnnnnnnnnnnnnnnnnnnnnnnnnnnnnnnnnnnnnnnnnnnnnnnnnnnnnnnnnnnnnnnnnnnnnnnnnnnnnnnnnnnnnnnnnnnnnnnnnnnnnnnnnnnnnnnnnntaggttgtagtgtagcggacctcgcgccactggcactcctagctctgagtgactagagtgagaatccatctcaaaaaaacaaataaacaaaattgcttgctaaagaagtggtctcctgaggtcttaagacattcctgacagtgtcttgagtgggtgggagagaggctgctgtcattgcgctgtggaatttcacagatgagaaccacgcctagccaaaatcacttttcctgtttgcctcagtgacacagctgcagggaccctcgtggatgttgtattaaataaatttgacctttgctctttgcagatctgtgaaatgttgtcttctgaggggccacatgcatctatagtgctgaggactccttgggcctctgaagtcacagagagaaccgagcaggtctatgtttttgt

SEQ ID NO: 1888 - protein, 114 aa, Homo sapien
  unsure 77-106: unknown amino acid
  Unsure 230-320, 1706-1820: Unknown amino acid
LTLARDRTGASSQISYKVAFLLLWVSGAPLGRCAGRTWVLDEVTWWTDVIDVQHVCRDRGYGPYRAGMERRRNTYGXXXXXXXXXXXXXXXXXXXXXXXXXXXXXXLLAKEVVS

SEQ ID NO: 1889 - DNA, 3189 bp, Homo sapien; identical to SEQ ID NO: 1885

SEQ ID NO: 1890 - protein, 738 aa, Homo sapien; identical to SEQ ID NO: 1886

SEQ ID NO: 1891 - DNA, 2443 bp, Homo sapien
ctccgccgtgctaactcctcgctagctctccctctcacacacgctcacacccggctcgagatggcggcggcggcggcggcggcgggggactcggactcctgggacgccgacgctttctccgtggaagacccagtgcggaaggtggggggcggcggcactgccggcggggaccgctggggaggcgaggacgaggacgaggacgtcaaggataactgggatgacgatgatgatgaaaaaaaagaggaagcagaagtaaaaccagaggtaaaaatttcagaaaagaaaaaaatagcagagaagataaaagagaaagaacggcaacagaagaaaaggcaagaagaaattaaaaagaggttagaagaacccgaagaacctaaagtgctaacaccagaagaacaattagcagataaactgcggctaaagaaattacaggaagagtcagacctcgaattagcaaaggaaacttttggtgttaataatgcagtttatggaatagatgctatgaacccatcttcaagagatgactttacagagtttggaaagttactaaaagataaaattacacaatatgaaaagtcactatattatgccagttttttggaagtcttagttcgagatgtgtgtatttcattggaaattgatgacttgaaaaaaattaccaattcactgactgtgctttgcagtgaaaaacagaagcaagaaaagcaaagcaaagccaaaaagaagaagaaaggtgtggttcctggagggggattaaaagccaccatgaaagatgatctggcagattatggtggttatgatggaggatatgtacaagactatgaagacttcatgtgacattttatcttttcttggtgtcatctttatgttgcccacaatcccttgaacatgtagcacaacttcctttcctttcagttctgccaaatgctacaatcagaagtgcagtatcttttgtgctggttaaaattgggaacctaagttgctactaaatcatagttcaaaacctaataatgttgtcgttgttgctatctgatttcatagcagcagtcactaaattggaaacaaaaggttgcaacgtgacaaaaaaaattgtgtagtatttaccagcaccattcagtaatacagccttaaccatacctccttgaactacttcataacttgtcaagaaaagcagtttgcagcaagggcatgtggtgtgcacctagtattaaaattgctttgtcttaaaattgaacatgaggatattaaaaatacattgtgaagaatactgcttatctcagagtgaagatactgcggctgaaaagcactagtttgatataaaattaaaatgaccaaaaccctccaactttgaagctaaagaaggtaaacctttccattattgcattacatgttgtggaatctctcgagtgcaaagactgtctagttatttatcaggctatttctactgatgaactgcttcaggtgggggagggaaacttatttttatttgcctgatttaagtgtctgagaaacaaatctttgttctcttaggctgcaatggaacaactttaccagggttttggcatttcctttcctttcctttataaaacatgctcagcaaactgcaccagttaactacagtttggtaaattgttatgttaacaattatgacatctgcaatgttttataaagcaactaatttaataaaatcactgttgtgaggacttaaattttgtgttacctcccaatatatactttttgagagtatagaacacagctcttgggagtacagttctctacgttctctactaaatcttaataaatgcttggacatagttacagctttaaaacatgagtgatttgccaggtccttatgttgtcaccatagagcaacaaaggtatagggctgccttcctcttatttatttggggacattattttgttatttagataccaaggcctaattaattaagtacctataagaactatttatttggagtaactgagcctgtaactcaggtttatggctgttaagtatagattggggaatctttattatgtcttctcctaagcagtttaaccaaatgtgtggttagtgtttttttattcccctaagacagaaagaacaaaaaatgttttaaatttctcttatataggaaataataggaacgtcaaagctctgtatacctactaagtggaaaacaagaccatcatctaagtgatttgagaaattaacaaaagtagtgactacacagcaataattacagtaaattaaataaagattcctttaaggcagacaagggctaagatttccttagcagtaataatgacatacactgaattgaaaatctattttattacagaaagatcagtttctaacaaatgaaaatgtatcacctgttccttaactgtgtaaataataattaaatttctttgaaactggaaaaaaaaaaaaaaaaaaaaa

SEQ ID NO: 1892 - protein, 258 aa, Homo sapien
MAAAAAAAGDSDSWDADAFSVEDPVRKVGGGGTAGGDRWGGEDEDEDVKDNWDDDDDEKKEEAEVKPEVKISEKKKIAEKIKEKERQQKKRQEEIKKRLEEPEEPKVLTPEEQLADKLRLKKLQEESDLELAKETFGVNNAVYGIDAMNPSSRDDFTEFGKLLKDKITQYEKSLYYASFLEVLVRDVCISLEIDDLKKITNSLTVLCSEKQKQEKQSKAKKKKKGVVPGGGLKATMKDDLADYGGYDGGYVQDYEDFM

SEQ ID NO: 1893 - DNA, 3455 bp, Homo sapien
ggtttccggagctgcggcggcgcagactgggagggggagccgggggttccgacgtcgcagccgagggaacaagccccaaccggatcctggacaggcaccccggcttggcgctgtctctccccctcggctcggagaggcccttcggcctgagggagcctcgccgcccgtccccggcacacgcgcagccccggcctctcggcctctgccggagaaacagttgggacccctgattttagcaggatggcccaatggaatcagctacagcagcttgacacacggtacctggagcagctccatcagctctacagtgacagcttcccaatggagctgcggcagtttctggccccttggattgagagtcaagattgggcatatgcggccagcaaagaatcacatgccactttggtgtttcataatctcctgggagagattgaccagcagtatagccgcttcctgcaagagtcgaatgttctctatcagcacaatctacgaagaatcaagcagtttcttcagagcaggtatcttgagaagccaatggagattgcccggattgtggcccggtgcctgtgggaagaatcacgccttctacagactgcagccactgcggcccagcaagggggccaggccaaccaccccacagcagccgtggtgacggagaagcagcagatgctggagcagcaccttcaggatgtccggaagagagtgcaggatctagaacagaaaatgaaagtggtagagaatctccaggatgactttgatttcaactataaaaccctcaagagtcaaggagacatgcaagatctgaatggaaacaaccagtcagtgaccaggcagaagatgcagcagctggaacagatgctcactgcgctggaccagatgcggagaagcatcgtgagtgagctggcggggcttttgtcagcgatggagtacgtgcagaaaactctcacggacgaggagctggctgactggaagaggcggcaacagattgcctgcattggaggcccgcccaacatctgcctagatcggctagaaaactggataacgtcattagcagaatctcaacttcagacccgtcaacaaattaagaaactggaggagttgcagcaaaaagtttcctacaaaggggaccccattgtacagcaccggccgatgctggaggagagaatcgtggagctgtttagaaacttaatgaaaagtgcctttgtggtggagcggcagccctgcatgcccatgcatcctgaccggcccctcgtcatcaagaccggcgtccagttcactactaaagtcaggttgctggtcaaattccctgagttgaattatcagcttaaaattaaagtgtgcattgacaaagactctggggacgttgcagctctcagaggatcccggaaatttaacattctgggcacaaacacaaaagtgatgaacatggaagaatccaacaacggcagcctctctgcagaattcaaacacttgaccctgagggagcagagatgtgggaatgggggccgagccaattgtgatgcttccctgattgtgactgaggagctgcacctgatcacctttgagaccgaggtgtatcaccaaggcctcaagattgacctagagacccactccttgccagttgtggtgatctccaacatctgtcagatgccaaatgcctgggcgtccatcctgtggtacaacatgctgaccaacaatcccaagaatgtaaacttttttaccaagcccccaattggaacctgggatcaagtggccgaggtcctgagctggcagttctcctccaccaccaagcgaggactgagcatcgagcagctgactacactggcagagaaactcttgggacctggtgtgaattattcagggtgtcagatcacatgggctaaattttgcaaagaaaacatggctggcaagggcttctccttctgggtctggctggacaatatcattgaccttgtgaaaaagtacatcctggccctttggaacgaagggtacatcatgggctttatcagtaaggagcgggagcgggccatcttgagcactaagcctccaggcaccttcctgctaagattcagtgaaagcagcaaagaaggaggcgtcactttcacttgggtggagaaggacatcagcggtaagacccagatccagtccgtggaaccatacacaaagcagcagctgaacaacatgtcatttgctgaaatcatcatgggctataagatcatggatgctaccaatatcctggtgtctccactggtctatctctatcctgacattcccaaggaggaggcattcggaaagtattgtcggccagagagccaggagcatcctgaagctgacccaggtagcgctgccccatacctgaagaccaagtttatctgtgtgacaccaacgacctgcagcaataccattgacctgccgatgtccccccgcactttagattcattgatgcagtttggaaataatggtgaaggtgctgaaccctcagcaggagggcagtttgagtccctcacctttgacatggagttgacctcggagtgcgctacctcccccatgtgaggagctgagaacggaagctgcagaaagatacgactgaggcgcctacctgcattctgccacccctcacacagccaaaccccagatcatctgaaactactaactttgtggttccagattttttttaatctcctacttctgctatctttgagcaatctgggcacttttaaaaatagagaaatgagtgaatgtgggtgatctgcttttatctaaatgcaaataaggatgtgttctctgagacccatgatcaggggatgtggcggggggtggctagagggagaaaaaggaaatgtcttgtgttgttttgttcccctgccctcctttctcagcagctttttgttattgttgttgttgttcttagacaagtgcctcctggtgcctgcggcatccttctgcctgtttctgtaagcaaatgccacaggccacctatagctacatactcctggcattgcactttttaaccttgctgacatccaaatagaagataggactatctaagccctaggtttctttttaaattaagaaataataacaattaaagggcaaaaaacactgtatcagcatagcctttctgtatttaagaaacttaagcagccgggcatggtggctcacgcctgtaatcccagcactttgggaggccgaggcggatcataaggtcaggagatcaagaccatcctggctaacacggtgaaaccccgtctctactaaaagtacaaaaaattagctgggtgtggtggtgggcgcctgtagtcccagctactcgggaggctgaggcaggagaatcgcttgaacctgagaggcggaggttgcagtgagccaaaattgcaccactgcacactgcactccatcctgggcgacagtctgagactctgtctcaaaaaaaaaaaaaaaaaaaaaaaaaaaaa

SEQ ID NO: 1894 - protein, 770 aa, Homo sapien
MAQWNQLQQLDTRYLEQLHQLYSDSFPMELRQFLAPWIESQDWAYAASKESHATLVFHNLLGEIDQQYSRFLQESNVLYQHNLRRIKQFLQSRYLEKPMEIARIVARCLWEESRLLQTAATAAQQGGQANHPTAAVVTEKQQMLEQHLQDVRKRVQDLEQKMKVVENLQDDFDFNYKTLKSQGDMQDLNGNNQSVTRQKMQQLEQMLTALDQMRRSIVSELAGLLSAMEYVQKTLTDEELADWKRRQQIACIGGPPNICLDRLENWITSLAESQLQTRQQIKKLEELQQKVSYKGDPIVQHRPMLEERIVELFRNLMKSAFVVERQPCMPMHPDRPLVIKTGVQFTTKVRLLVKFPELNYQLKIKVCIDKDSGDVAALRGSRKFNILGTNTKVMNMEESNNGSLSAEFKHLTLREQRCGNGGRANCDASLIVTEELHLITFETEVYHQGLKIDLETHSLPVVVISNICQMPNAWASILWYNMLTNNPKNVNFFTKPPIGTWDQVAEVLSWQFSSTTKRGLSIEQLTTLAEKLLGPGVNYSGCQITWAKFCKENMAGKGFSFWVWLDNIIDLVKKYILALWNEGYIMGFISKERERAILSTKPPGTFLLRFSESSKEGGVTFTWVEKDISGKTQIQSVEPYTKQQLNNMSFAEIIMGYKIMDATNILVSPLVYLYPDIPKEEAFGKYCRPESQEHPEADPGSAAPYLKTKFICVTPTTCSNTIDLPMSPRTLDSLMQFGNNGEGAEPSAGGQFESLTFDMELTSECATSPM

SEQ ID NO: 1895 - DNA, 3430 bp, Homo sapien
ggtttccggagctgcggcggcgcagactgggagggggagccgggggttccgacgtcgcagccgagggaacaagccccaaccggatcctggacaggcaccccggcttggcgctgtctctccccctcggctcggagaggcccttcggcctgagggagcctcgccgcccgtccccggcacacgcgcagccccggcctctcggcctctgccggagaaacaggatggcccaatggaatcagctacagcagcttgacacacggtacctggagcagctccatcagctctacagtgacagcttcccaatggagctgcggcagtttctggccccttggattgagagtcaagattgggcatatgcggccagcaaagaatcacatgccactttggtgtttcataatctcctgggagagattgaccagcagtatagccgcttcctgcaagagtcgaatgttctctatcagcacaatctacgaagaatcaagcagtttcttcagagcaggtatcttgagaagccaatggagattgcccggattgtggcccggtgcctgtgggaagaatcacgccttctacagactgcagccactgcggcccagcaagggggccaggccaaccaccccacagcagccgtggtgacggagaagcagcagatgctggagcagcaccttcaggatgtccggaagagagtgcaggatctagaacagaaaatgaaagtggtagagaatctccaggatgactttgatttcaactataaaaccctcaagagtcaaggagacatgcaagatctgaatggaaacaaccagtcagtgaccaggcagaagatgcagcagctggaacagatgctcactgcgctggaccagatgcggagaagcatcgtgagtgagctggcggggcttttgtcagcgatggagtacgtgcagaaaactctcacggacgaggagctggctgactggaagaggcggcaacagattgcctgcattggaggcccgcccaacatctgcctagatcggctagaaaactggataacgtcattagcagaatctcaacttcagacccgtcaacaaattaagaaactggaggagttgcagcaaaaagtttcctacaaaggggaccccattgtacagcaccggccgatgctggaggagagaatcgtggagctgtttagaaacttaatgaaaagtgcctttgtggtggagcggcagccctgcatgcccatgcatcctgaccggcccctcgtcatcaagaccggcgtccagttcactactaaagtcaggttgctggtcaaattccctgagttgaattatcagcttaaaattaaagtgtgcattgacaaagactctggggacgttgcagctctcagaggatcccggaaatttaacattctgggcacaaacacaaaagtgatgaacatggaagaatccaacaacggcagcctctctgcagaattcaaacacttgaccctgagggagcagagatgtgggaatgggggccgagccaattgtgatgcttccctgattgtgactgaggagctgcacctgatcacctttgagaccgaggtgtatcaccaaggcctcaagattgacctagagacccactccttgccagttgtggtgatctccaacatctgtcagatgccaaatgcctgggcgtccatcctgtggtacaacatgctgaccaacaatcccaagaatgtaaacttttttaccaagcccccaattggaacctgggatcaagtggccgaggtcctgagctggcagttctcctccaccaccaagcgaggactgagcatcgagcagctgactacactggcagagaaactcttgggacctggtgtgaattattcagggtgtcagatcacatgggctaaattttgcaaagaaaacatggctggcaagggcttctccttctgggtctggctggacaatatcattgaccttgtgaaaaagtacatcctggccctttggaacgaagggtacatcatgggctttatcagtaaggagcgggagcgggccatcttgagcactaagcctccaggcaccttcctgctaagattcagtgaaagcagcaaagaaggaggcgtcactttcacttgggtggagaaggacatcagcggtaagacccagatccagtccgtggaaccatacacaaagcagcagctgaacaacatgtcatttgctgaaatcatcatgggctataagatcatggatgctaccaatatcctggtgtctccactggtctatctctatcctgacattcccaaggaggaggcattcggaaagtattgtcggccagagagccaggagcatcctgaagctgacccaggcgctgccccatacctgaagaccaagtttatctgtgtgacaccaacgacctgcagcaataccattgacctgccgatgtccccccgcactttagattcattgatgcagtttggaaataatggtgaaggtgctgaaccctcagcaggagggcagtttgagtccctcacctttgacatggagttgacctcggagtgcgctacctcccccatgtgaggagctgagaacggaagctgcagaaagatacgactgaggcgcctacctgcattctgccacccctcacacagccaaaccccagatcatctgaaactactaactttgtggttccagattttttttaatctcctacttctgctatctttgagcaatctgggcacttttaaaaatagagaaatgagtgaatgtgggtgatctgcttttatctaaatgcaaataaggatgtgttctctgagacccatgatcaggggatgtggcggggggtggctagagggagaaaaaggaaatgtcttgtgttgttttgttcccctgccctcctttctcagcagctttttgttattgttgttgttgttcttagacaagtgcctcctggtgcctgcggcatccttctgcctgtttctgtaagcaaatgccacaggccacctatagctacatactcctggcattgcactttttaaccttgctgacatccaaatagaagataggactatctaagccctaggtttctttttaaattaagaaataataacaattaaagggcaaaaaacactgtatcagcatagcctttctgtatttaagaaacttaagcagccgggcatggtggctcacgcctgtaatcccagcactttgggaggccgaggcggatcataaggtcaggagatcaagaccatcctggctaacacggtgaaaccccgtctctactaaaagtacaaaaaattagctgggtgtggtggtgggcgcctgtagtcccagctactcgggaggctgaggcaggagaatcgcttgaacctgagaggcggaggttgcagtgagccaaaattgcaccactgcacactgcactccatcctgggcgacagtctgagactctgtctcaaaaaaaaaaaaaaaaaaaaaaaaaaaaa

SEQ ID NO: 1896 - protein, 769 aa, Homo sapien
MAQWNQLQQLDTRYLEQLHQLYSDSFPMELRQFLAPWIESQDWAYAASKESHATLVFHNLLGEIDQQYSRFLQESNVLYQHNLRRIKQFLQSRYLEKPMEIARIVARCLWEESRLLQTAATAAQQGGQANHPTAAVVTEKQQMLEQHLQDVRKRVQDLEQKMKVVENLQDDFDFNYKTLKSQGDMQDLNGNNQSVTRQKMQQLEQMLTALDQMRRSIVSELAGLLSAMEYVQKTLTDEELADWKRRQQIACIGGPPNICLDRLENWITSLAESQLQTRQQIKKLEELQQKVSYKGDPIVQHRPMLEERIVELFRNLMKSAFVVERQPCMPMHPDRPLVIKTGVQFTTKVRLLVKFPELNYQLKIKVCIDKDSGDVAALRGSRKFNILGTNTKVMNMEESNNGSLSAEFKHLTLREQRCGNGGRANCDASLIVTEELHLITFETEVYHQGLKIDLETHSLPVVVISNICQMPNAWASILWYNMLTNNPKNVNFFTKPPIGTWDQVAEVLSWQFSSTTKRGLSIEQLTTLAEKLLGPGVNYSGCQITWAKFCKENMAGKGFSFWVWLDNIIDLVKKYILALWNEGYIMGFISKERERAILSTKPPGTFLLRFSESSKEGGVTFTWVEKDISGKTQIQSVEPYTKQQLNNMSFAEIIMGYKIMDATNILVSPLVYLYPDIPKEEAFGKYCRPESQEHPEADPGAAPYLKTKFICVTPTTCSNTIDLPMSPRTLDSLMQFGNNGEGAEPSAGGQFESLTFDMELTSECATSPM

SEQ ID NO: 1897 - DNA, 1646 bp, Homo sapien
cactgcgaagcccagctgcgcgcgccttgggattgactgtccacgctcgcccggctcgtccgacgcgccctccgccagccgacagacacagccgcacgcactgccgtgttctccctgcggctcggacacatagtatgaccattaggtgtttcgtctcccacccattttctatggaaaaccaaggggatcgggccatgatagccactggcagctttgaagaacgggacacctttagagaagcttgatcttggaggcctcaccgtgagaccttacaaagccggattccggcagagttcctctatctcgtcttgttgctgattaaaggtgcccctgtctccagtttttctccatctcctgggacgtagcaggaaatcagcatcatggttgggttcaaggccacagatgtgccccctactgccactgtgaagtttcttggggctggcacagctgcctgcatcgcagatctcatcacctttcctctggatactgctaaagtccggttacagatccaaggagaaagtcaggggccagtgcgcgctacagccagcgcccagtaccgcggtgtgatgggcaccattctgaccatggtgcgtactgagggcccccgaagcctctacaatgggctggttgccggcctgcagcgccaaatgagctttgcctctgtccgcatcggcctgtatgattctgtcaaacagttctacaccaagggctctgagcatgccagcattgggagccgcctcctagcaggcagcaccacaggtgccctggctgtggctgtggcccagcccacggatgtggtaaaggtccgattccaagctcaggcccgggctggaggtggtcggagataccaaagcaccgtcaatgcctacaagaccattgcccgagaggaagggttccggggcctctggaaagggacctctcccaatgttgctcgtaatgccattgtcaactgtgctgagctggtgacctatgacctcatcaaggatgccctcctgaaagccaacctcatgacagatgacctcccttgccacttcacttctgcctttggggcaggcttctgcaccactgtcatcgcctcccctgtagacgtggtcaagacgagatacatgaactctgccctgggccagtacagtagcgctggccactgtgcccttaccatgctccagaaggaggggccccgagccttctacaaagggttcatgccctcctttctccgcttgggttcctggaacgtggtgatgttcgtcacctatgagcagctgaaacgagccctcatggctgcctgcacttcccgagaggctcccttctgagcctctcctgctgctgacctgatcacctctggctttgtctctagccgggccatgctttccttttcttccttctttctcttccctccttcccttctctccttccctctttccccacctcttccttccgctcctttacctaccaccttccctctttctacattctcatctactcattgtctcagtgctggtggagttgacatttgacagtgtgggaggcctcgtaccagccaggatcccaagcgtcccgtcccttggaaagttcagccagaatcttcgtcctgcccccgacagcccagcctagcccacttgtcatccataaagcaagctcaaccttgg

SEQ ID NO: 1898 - protein, 309 aa, Homo sapien
MVGFKATDVPPTATVKFLGAGTAACIADLITFPLDTAKVRLQIQGESQGPVRATASAQYRGVMGTILTMVRTEGPRSLYNGLVAGLQRQMSFASVRIGLYDSVKQFYTKGSEHASIGSRLLAGSTTGALAVAVAQPTDVVKVRFQAQARAGGGRRYQSTVNAYKTIAREEGFRGLWKGTSPNVARNAIVNCAELVTYDLIKDALLKANLMTDDLPCHFTSAFGAGFCTTVIASPVDVVKTRYMNSALGQYSSAGHCALTMLQKEGPRAFYKGFMPSFLRLGSWNVVMFVTYEQLKRALMAACTSREAPF

SEQ ID NO: 1899 - DNA, 4344 bp, Homo sapien
gcggcggggctccggctgcgctcgtggccgggccgggcggggaggccggtcccgcgggcgggggcaggggcggctccgcggcttctcccgccgccgccgccaaggggagtttccaggaagtggccatattggatccattcagccgcagccgcccgggcggagcgcgtcccgcagccggctggtccctgtcgctgcccctgcgctcgtcccagcccacccgcccggtgcggagctcgccatggcggccaccgacctggagcgcttctcgaatgcagagccagagccccggagcctctccctgggcggccatgtgggtttcgacagcctccccgaccagctggtcagcaagtcggtcactcagggcttcagcttcaacatcctctgtgtgggggagaccggcattggcaaatccacactgatgaacacactcttcaacacgaccttcgagactgaggaagccagtcaccatgaggcatgcgtgcgcctgcggccccagacctacgacctccaggagagcaacgtgcagctcaagctgaccattgtggatgccgtgggctttggggatcagatcaataaggatgagagttacaggcccatagttgactacatcgatgcgcagtttgaaaattatctgcaggaggagctgaagatccgccgctcgctcttcgactaccatgacacaaggatccacgtttgcctctacttcatcacgcccacagggcactccctgaagtctctagatctagtgaccatgaagaaactagacagcaaggtgaacattattcccatcatcgccaaggctgacaccatctccaagagcgagctccacaagttcaagatcaagatcatgggcgagttggtcagcaacggggtccagatctaccagttccccacggatgatgaggctgttgcagagattaacgcagtcatgaatgcacatctgccctttgccgtggtgggcagcaccgaggaggtgaaggtggggaacaagctggtccgagcacggcagtacccctggggagtggtgcaggtggagaatgagaatcactgcgacttcgtgaagctgcgggagatgttgatccgggtgaacatggaagacctccgcgagcagacccacagccggcactacgagctctaccggcgctgcaagttggaggagatgggctttcaggacagcgatggtgacagccagcccttcagcctacaagagacatacgaggccaagaggaaggagttcctaagtgagctgcagaggaaggaggaagagatgaggcagatgtttgtcaacaaagtgaaggagacagagctggagctgaaggagaaggaaagggagctccatgagaagtttgagcacctgaagcgggtccaccaggaggagaagcgcaaggtggaggaaaagcgccgggaactggaggaggagaccaacgccttcaatcgccggaaggctgcggtggaggccctgcagtcgcaggccttgcacgccacctcgcagcagcccctgaggaaggacaaggacaagaagaattaacgcacgcacagacttacatgtcaagagtggactttagactttcatgtgttaagttgcttgagttacaccttgtgacccttctcccataacatggtgtgaggacggactgggagccggtacagactccagtgtttacagccttgctttcctcccaccgaccctggccccaggctgccccgggcctggcgggccacccctctctatgcaaacacgtaaaagccatgaatgctggaatccaaaactgacgaggtttatttttttcagagccagtggctggtcttccatttacagtgtcactattccctgacggagctgttatgtgccgctctagcgaaggccccagccgggatgctaggcctaattgttcagcgtggagatggcaactcacgtggtgccctaggtgcagctgcgtggtctggtatacatgctgcaaaattcacccagttcccctcattttaatttttctaacctacagcttaattttaataactttaaaacacttctaaatatttattttgacaccagcgtcaagacaaataatatcctctcccattattttcataagtaacacagattccctgatttttaaaaactaaaaatacagctaaacctttcttatgtataaagtatgcctatcatatacagggagaggtgggtaataaacttcctgtaatgacagtgtttggcatttctttatggatggaattggaacatgaacaagaccatgtccagcgtttttactgtgaatgtaaatggaacagcagcccaaagctgttgtctgtgccccagaggtgctacctgtagacagggaccaactccatgtgtgtgtgttaagtgtttgactccaattaagactcccaagcgaatcctgcatattccaaatgtaaagagtactcagtgggaaaaaggttgttacctcaaagtcattgcttctttcctggctgggtcacagggtgaagagatgaaggtgtctgatgtatatagacaattagggaaaaatgagcggcaaaggagctttccccttcagctgcactctaaaggggaacattttaaggaagtactagcagctttgactcttctatgctcctgttggtttacaagccaccaagaatgtcagtgttgagaatacggcctggtaaaatgggagatgtaaaatgactaaatgaaaggaagggtagttttaatgttgaagcaccgtgctgggcactggagctacccagaggaatgcacaacgctcccctcaaggagctcacagtctagcctactccctggctggaagcctcaggaagacgtgctaatttattgtggaattggtagtttgcttttcatgcccctgtcttccttctcatgaccatttccccctttctgtctggcttgcattattgatttccaggaccaagtcctggcttcctcctgccttcctgagatgatgttctgctcagggagaagtggaggggtgagctatgtgtgtccaccgaggcacggccaggaagaggcagcctttacctgtgaggggctccatgctccagcagcagagcaggttctagtgacaattcaactttttatgctatgaccaggggtggatctaaattttatggggctgaaagcttgaattatttagaaagacttctttaagaaaaacaatgttaatataaaattaggtacagggtcttggaaggggccctgaagattaagcttccttagcgtcacaataagtccgtatctggttgcaattgaaaactgatgcttcagtgagggtatctaaaaaggtaaactggcatatccagggcaaatgtgggctgccaatggctcatctctagggtaattttatgtctgaaagtgtatgcagttgggtcagagcatgacctttaagatagcctctctcagctaacatatttatgaagatgaggcctggtgacccagcaggttcattggatacataagaaatgagaattcctggttcatgggccaacctaggactctggagtatgcagacttggccattcgtccattgtggcctgcgggtcgcaccccaggcatactgaaaggccatactcgtggctggctgcctgcgggcctaagccttcccaggatcttcaggacacttgacagacttgtgttttctggtctgagctgcctccacaggtccctccagcaagcctcactgcacctctcccctgctgtttgtgtttggaattttgtcttctttagctgagaccaaattaaaccttggtgcataaagtgagcttaaaacttgccactgtttagtaagttagcccccatagaatgtgaccctgtctgcagagtctcatttacccctctttttctcattgtcatttgttggctttattagggctgtcttacaggatcatgttggcatttactatcatgtctttatcataaaccatgtttgtttgaggtagaagaatcaccatataattcgttgcccaaattgggactattgagagagaaaggggatgctattaattacaccagatcaaaaggcataaaccagacctgtcccaggccgatgtggaaatatgttctttctagttgtgggtaccctgatctaggtggtttgtaattgtgcattactgactgcatatgtttgtgtatgtgtaaatgtgggctccctgttaagtggggctcatggatacgaggcctgaggaagtgtggcttgctagtctgttacgttaacatgcttttctaaaattgcttcacgtgttaattcatttactcctgcattcattgactgtttttgttcttttccattcactttgtacttatttttttcattaaattttgcatttattttg

SEQ ID NO: 1900 - protein, 508 aa, Homo sapien
RRGSGCARGRAGRGGRSRGRGQGRLRGFSRRRRQGEFPGSGHIGSIQPQPPGRSASRSRLVPVAAPALVPAHPPGAELAMAATDLERFSNAEPEPRSLSLGGHVGFDSLPDQLVSKSVTQGFSFNILCVGETGIGKSTLMNTLFNTTFETEEASHHEACVRLRPQTYDLQESNVQLKLTIVDAVGFGDQINKDESYRPIVDYIDAQFENYLQEELKIRRSLFDYHDTRIHVCLYFITPTGHSLKSLDLVTMKKLDSKVNIIPIIAKADTISKSELHKFKIKIMGELVSNGVQIYQFPTDDEAVAEINAVMNAHLPFAVVGSTEEVKVGNKLVRARQYPWGVVQVENENHCDFVKLREMLIRVNMEDLREQTHSRHYELYRRCKLEEMGFQDSDGDSQPFSLQETYEAKRKEFLSELQRKEEEMRQMFVNKVKETELELKEKERELHEKFEHLKRVHQEEKRKVEEKRRELEEETNAFNRRKAAVEALQSQALHATSQQPLRKDKDKKN

SEQ ID NO: 1901 - DNA, 3371 bp, Homo sapien
gcgggcgcatgcgcaagggggcgcgccgcctctgccccgcggcgagggtgtctatggagaggcggcggccgcggctgctgaggcggaggctgaggcagtggcgatggcgccctttcctgaagaagtggacgtcttcaccgccccacactggcggatgaagcagctggtggggctctactgcgacaagctttctaaaaccaatttttccaacaacaacgatttccgtgctcttctgcagtctttgtatgctactttcaaggagttcaaaatgcatgagcagattgaaaatgaatacattattggtttgcttcaacaacgcagccagaccatttataatgtacattctgacaataaactctccgagatgcttagcctctttgaaaagggactgaagaatgttaagaatgaatatgaacagttaaattatgcaaaacaactgaaagagagattggaggcttttacaagagattttcttcctcacatgaaagaggaagaggaggtttttcagcccatgttaatggaatattttacctatgaagagcttaaggatattaaaaagaaagtgattgcacaacactgctctcagaaggatactgcagaactccttagaggtcttagcctatggaatcatgctgaagagcgacagaagttttttaaatattccgtggatgaaaagtcagataaagaagcagaagtgtcagaacactccacaggtataacccatcttcctcctgaggtaatgctgtcaattttcagctatcttaatcctcaagagttatgtcgatgcagtcaagtaagcatgaaatggtctcagctgacaaaaacgggatcgctttggaaacatctttaccctgttcattgggccagaggtgactggtatagtggtcccgcaactgaacttgatactgaacctgatgatgaatgggtgaaaaataggaaagatgaaagtcgtgcttttcatgagtgggatgaagatgctgacattgatgaatctgaagagtctgcggaggaatcaattgctatcagcattgcacaaatggaaaaacgtttactccatggcttaattcataacgttctaccatatgttggtacttctgtaaaaaccttagtattagcatacagctctgcagtttccagcaaaatggttaggcagattttagagctttgtcctaacctggagcatctggatcttacccagactgacatttcagattctgcatttgacagttggtcttggcttggttgctgccagagtcttcggcatcttgatctgtctggttgtgagaaaatcacagatgtggccctagagaagatttccagagctcttggaattctgacatctcatcaaagtggctttttgaaaacatctacaagcaaaattacttcaactgcgtggaaaaataaagacattaccatgcagtccaccaagcagtatgcctgtttgcacgatttaactaacaagggcattggagaagaaatagataatgaacacccctggactaagcctgtttcttctgagaatttcacttctccttatgtgtggatgttagatgctgaagatttggctgatattgaagatactgtggaatggagacatagaaatgttgaaagtctttgtgtaatggaaacagcatccaactttagttgttccacctctggttgttttagtaaggacattgttggactaaggactagtgtctgttggcagcagcattgtgcttctccagcctttgcgtattgtggtcactcattttgttgtacaggaacagctttaagaactatgtcatcactcccagaatcttctgcaatgtgtagaaaagcagcaaggactagattgcctaggggaaaagacttaatttactttgggagtgaaaaatctgatcaagagactggacgtgtacttctgtttctcagtttatctggatgttatcagatcacagaccatggtctcagggttttgactctgggaggagggctgccttatttggagcaccttaatctctctggttgtcttactataactggtgcaggcctgcaggatttggtttcagcatgtccttctctgaatgatgaatacttttactactgtgacaacattaacggtcctcatgctgataccgccagtggatgccagaatttgcagtgtggttttcgagcctgctgccgctctggcgaatgacccttgacttctgatctttgtctacttcatttagctgagcaggctttctttcatgcactttactcatagcacatttcttgtgttaaccatccctttttgagcgtgacttgttttggccccatttcttacaacttcagaaatcttaatttaccagtgaattgtaatgttgtttctcttgcaaattatacttttggtttagaaagggattaggtcttttcaaaagggtgagaacagtcttacatttttcttttaaatgaaatgctttaaagaatgttggtaatgccatgtcatttaaagtatttcatagataattttgagttttaaagtccatggaggtgattggttctctttacacattaacactgtaccaagctttgcagatcttttccgacacacatgtctgaagacttattttcaaagacagcacatttttggaaactaatctcttttccgtaatatttcctttatttcaatgattctcagaaggccaattcaaacaaacccacatttaaggttctttaggattatagaataaattggcttctgagtgttagctcagtgagctaggaaagcaccaatcgatatttgtttcctttagggatactttgttctcaccactgtccctatgtcatcaaatttgggagagattttttaaaataccacaatcatttgaagaaatgtataaataaaatctactttgaggactttaccaagtaatactgttgtgttgtgatttttattataaatctcaatccaggtttactttagtatagaataggactacatactttgtctttggacctcccatgaacttattaccctgacaaatagttttagacagatactgaattttattgagctgaattttctttttgaaatgagttattcagtagtcaaaatttgaatccgtaagtatatctactttgctttgttaaaacatcatgagagtggaggcctgccacccagaaaggcacatactagtgccttttagtacaattttatgtcatgtagaagaaaatggcaatgttcctcctattgatacagatacaggcatatgtcatcttattgcgttttgctttattgcactttgcaaataatgcattttttacaaatggaaggtttatggcaactctgcgttgagccagtctattggtgccatgtttccaataaaacttctcctttcatgtctcgt

SEQ ID NO: 1902 - protein, 691 aa, Homo sapien
MAPFPEEVDVFTAPHWRMKQLVGLYCDKLSKTNFSNNNDFRALLQSLYATFKEFKMHEQIENEYIIGLLQQRSQTIYNVHSDNKLSEMLSLFEKGLKNVKNEYEQLNYAKQLKERLEAFTRDFLPHMKEEEEVFQPMLMEYFTYEELKDIKKKVIAQHCSQKDTAELLRGLSLWNHAEERQKFFKYSVDEKSDKEAEVSEHSTGITHLPPEVMLSIFSYLNPQELCRCSQVSMKWSQLTKTGSLWKHLYPVHWARGDWYSGPATELDTEPDDEWVKNRKDESRAFHEWDEDADIDESEESAEESIAISIAQMEKRLLHGLIHNVLPYVGTSVKTLVLAYSSAVSSKMVRQILELCPNLEHLDLTQTDISDSAFDSWSWLGCCQSLRHLDLSGCEKITDVALEKISRALGILTSHQSGFLKTSTSKITSTAWKNKDITMQSTKQYACLHDLTNKGIGEEIDNEHPWTKPVSSENFTSPYVWMLDAEDLADIEDTVEWRHRNVESLCVMETASNFSCSTSGCFSKDIVGLRTSVCWQQHCASPAFAYCGHSFCCTGTALRTMSSLPESSAMCRKAARTRLPRGKDLIYFGSEKSDQETGRVLLFLSLSGCYQITDHGLRVLTLGGGLPYLEHLNLSGCLTITGAGLQDLVSACPSLNDEYFYYCDNINGPHADTASGCQNLQCGFRACCRSGE

SEQ ID NO: 1903 - DNA, 1962 bp, Homo sapien
agtgcgcatccggacgtaggaggtggaggttgtggaattcgccgttcgaaagcagggactaaaagccccacttcgtcttacgttccgaaaggaaggcgtctgttgagcctttctctcagtcgtgagggaggcgtcgacggcgtgcggaagtcctgagttgaggcttgcgggatcctttccggagaaagcgcaggctaaagccgcaggtgaagatgtccaactacgtgaacgacatgtggccgggctcgccgcaggagaaggattcgccctcgacctcgcggtcgggcgggtccagccggctgtcgtcgcggtctaggagccgctctttttccagaagctctcggtcccattcccgcgtctcgagccggttttcgtccaggagtcggaggagcaagtccaggtcccgttcccgaaggcgccaccagcggaagtacaggcgctactcgcggtcatactcgcggagccggtcgcgatcccgcagccgccgttaccgagagaggcgctacgggttcaccaggagatactaccggtctccttcgcggtaccggtcccggtcccgtagcaggtcgcgctctcggggaaggtcgtactgcggaagggcgtacgcgatcgcgcggggacagcgctactacggctttggtcgcacagtgtacccggaggagcacagcagatggagggacagatccaggacgaggtcgcggagcagaaccccctttcgcttaagtgaaaaagatcgaatggagctgttagaaatagcaaaaaccaatgcagcgaaagctctaggaacaaccaacattgacttgccagctagtctcagaactgttccttcagccaaagaaacaagccgtggaataggtgtatcaagtaatggtgcaaagcctgaagtaagtattctaggtttgtcggaacaaaactttcagaaagccaactgtcaaatctgattagccacttatatcttagactatactttttgggaagtctagagatgtatataatgtgctaaattcaaagtagcaaatctgaagataggcaatgtcaaacccatgaaaatgggagattaatgagctttatttggccgtgcatggtgcctcatgcctgtaatgaggcagatggcttgagtccaggagttcaagactagcctgggcaatgtggcaaaaccgcgtgtttacaaaaaatacaaaaattagccaggcatggtggtgcatgcctgtagtcccagctgtttgggaggctgaggcaggaggatctttgagcctaggatgctaaggttgcagtgagccaagatggcaccattgcactctagcctgggcagcagagcgagaccctgtctcaaaaaatacatttatttttttcattttcagttaacagtgtactcttataacaccgttattagctggtactttggtgatttctattactagtttttctaagctatttacagagtgtttgtagctttcatttgcagcattatgttcccacaaattctgtactcagcatatacagtatagtttatctgctctatttctgtcttatagaaatcatgaatgtggtctgcagacattgatgaagaaaatctgttggtaattgatacatgggctaaagcatcagaggtttaatttgaagtttatgttcacacactgaaaacttagtttttttgttggtagatccatgtgcatgctagaatttgggacaggcactatttgcataaagtattaaagtcaatttttaaactaagcaaaggtacacgttgtaacggtggggcatctgtgaaaaagatgtccctttcataatatatgcaatatattccagatgttttgagagattacagaagaggaggcctgcttcacttgcagataagtttattataattctccagaaatgtgcaggatgtgcattagcaaattgcactgtacttttcactccagcctgggtgacagagcaagactcccgtctcgggggctt

SEQ ID NO: 1904 - protein, 242 aa, Homo sapien
MSNYVNDMWPGSPQEKDSPSTSRSGGSSRLSSRSRSRSFSRSSRSHSRVSSRFSSRSRRSKSRSRSRRRHQRKYRRYSRSYSRSRSRSRSRRYRERRYGFTRRYYRSPSRYRSRSRSRSRSRGRSYCGRAYAIARGQRYYGFGRTVYPEEHSRWRDRSRTRSRSRTPFRLSEKDRMELLEIAKTNAAKALGTTNIDLPASLRTVPSAKETSRGIGVSSNGAKPEVSILGLSEQNFQKANCQI

SEQ ID NO: 1905 - DNA, 1431 bp, Homo sapien
ggacgtaggaggtggaggttgtggaattcgccgttcgaaagcagggactaaaagccccacttcgtcttacgttccgaaaggaaggcgtctgttgagcctttctctcagtcgtgagggaggcgtcgacggcgtgcggaagtcctgagttgaggcttgcgggatcctttccggagaaagcgcaggctaaagccgcaggtgaagatgtccaactacgtgaacgacatgtggccgggctcgccgcaggagaaggattcgccctcgacctcgcggtcgggcgggtccagccggctgtcgtcgcggtctaggagccgctctttttccagaagctctcggtcccattcccgcgtctcgagccggttttcgtccaggagtcggaggagcaagtccaggtcccgttcccgaaggcgccaccagcggaagtacaggcgctactcgcggtcatactcgcggagccggtcgcgatcccgcagccgccgttaccgagagaggcgctacgggttcaccaggagatactaccggtctccttcgcggtaccggtcccggtcccgtagcaggtcgcgctctcggggaaggtcgtactgcggaagggcgtacgcgatcgcgcggggacagcgctactacggctttggtcgcacagtgtacccggaggagcacagcagatggagggacagatccaggacgaggtcgcggagcagaaccccctttcgcttaagtgaaaaagatcgaatggagctgttagaaatagcaaaaaccaatgcagcgaaagctctaggaacaaccaacattgacttgccagctagtctcagaactgttccttcagccaaagaaacaagccgtggaataggtgtatcaagtaatggtgcaaagcctgaactgtcggaaaaggtaacagaagatggaactcgaaatcccaatggaaaacctacccagcaaagaagcatagcttttagctctaataattctgtagcaaagccaatacaaaaatcagctaaagctgccacagaagaggcatcttcaagatcaccaaaaatagatcagaaaaaaagtccatatggactgtggatacctatctaaaagaagaaaactgatggctaagtttgcatgaaaactgcactttattgcaagttagtgtttctagcattatcccatccctttgagccattcaggggtacttgtgcatttaaaaaccaacacaaaaagatgtaaatacttaacactcaaatattaacattttaggtttctcttgcagatatgagagatagcacagatggaccaaaggttatgcacaggtgggagtcttttgtatatagttgtaaatattgtcttggttatgtaaaaatgaaattttttagacacagtaattgaactgtattcctgttttgtatatttaataaatttcttgttttcattcttaaaaaaaaaaaaaaaaaa

SEQ ID NO: 1906 - protein, 290 aa, Homo sapien
MSNYVNDMWPGSPQEKDSPSTSRSGGSSRLSSRSRSRSFSRSSRSHSRVSSRFSSRSRRSKSRSRSRRRHQRKYRRYSRSYSRSRSRSRSRRYRERRYGFTRRYYRSPSRYRSRSRSRSRSRGRSYCGRAYAIARGQRYYGFGRTVYPEEHSRWRDRSRTRSRSRTPFRLSEKDRMELLEIAKTNAAKALGTTNIDLPASLRTVPSAKETSRGIGVSSNGAKPELSEKVTEDGTRNPNGKPTQQRSIAFSSNNSVAKPIQKSAKAATEEASSRSPKIDQKKSPYGLWIPI

SEQ ID NO: 1907 - DNA, 3111 bp, Homo sapien
gcgagttgtgtgagccgccagtatggccgggctatggcggcgagcactggctacgtgcgactgtggggagcggcgcggtgctgggtgctgcggcggccgatgctggccgccgccggggggcgggttcccactgcagcaggagcgtggttgctccgaggccagcggacctgcgacgcctctcctccttgggcactgtggggccgaggcccggcaattgggggccaatggcgggggttttgggaagcgagcagccgcggcggaggcgcattctcggggggcgaggacgcctccgagggcggcgcggaggaaggagccggcggcgcggggggcagcgcgggcgccggggaaggcccggtcataacggcgctcacgcccatgacgatccccgatgtgtttccgcacctgccgctcatcgccatcacccgcaacccggtgttcccgcgctttatcaagattatcgaggttaaaaataagaagttggttgagctgctgagaaggaaagttcgtctcgcccagccttatgtcggcgtctttctaaagagagatgacagcaatgagtcggatgtggtcgagagcctggatgaaatctaccacacggggacgtttgcccagatccatgagatgcaggaccttggggacaagctgcgcatgatcgtcatgggacacagaagagtccatatcagcagacagctggaggtggagcccgaggagccggaggcggagaacaagcacaagccccgcaggaagtcaaagcggggcaagaaggaggcggaggacgagctgagcgccaggcacccggcggagctggcgatggagcccacccctgagctcccggctgaggtgctcatggtggaggtagagaacgttgtccacgaggacttccaggtcacggaggaggtgaaagccctgactgcagagatcgtgaagaccatccgggacatcattgccttgaaccctctctacagggagtcagtgctgcagatgatgcaggctggccagcgggtggtggacaaccccatctacctgagcgacatgggcgccgcgctcaccggggccgagtcccatgagctgcaggacgtcctggaagagaccaatattcctaagcggctgtacaaggccctctccctgctgaagaaggaatttgaactgagcaagctgcagcagcgcctggggcgggaggtggaggagaagatcaagcagacccaccgtaagtacctgctgcaggagcagctaaagatcatcaagaaggagctgggcctggagaaggacgacaaggatgccatcgaggagaagttccgggagcgcctgaaggagctcgtggtccccaagcacgtcatggatgttgtggacgaggagctgagcaagctgggcctgctggacaaccactcctcggagttcaatgtcacccgcaactacctagactggctcacgtccatcccttggggcaagtacagcaacgagaacctggacctggcgcgggcacaggcagtgctggaggaagaccactacggcatggaggacgtcaagaaacgcatcctggagttcattgccgttagccagctccgcggctccacccagggcaagatcctctgcttctatggcccccctggcgtgggtaagaccagcattgctcgctccatcgcccgcgccctgaaccgagagtacttccgcttcagcgtcgggggcatgactgacgtggctgagatcaagggccacaggcggacctacgtgggcgccatgcccgggaagatcatccagtgtttgaagaagaccaagacggagaaccccctgatcctcatcgacgaggtggacaagatcggccgaggctaccagggggacccgtcgtcggcactgctggagctgctggacccagagcagaatgccaacttcctggaccactacctggacgtgcccgtggacttgtccaaggtgctgttcatctgcacggccaacgtcacggacaccatccccgagccgctgcgagaccgtatggagatgatcaacgtgtcgggctacgtggcccaggagaagctggccattgcggagcgctacctggtgccccaggctcgcgccctgtgtggcttggatgagagcaaggccaagctgtcatcggacgtgctgacgctgctcatcaagcagtactgccgcgagagcggtgtccgcaacctgcagaagcaagtggagaaggtgttacggaaatcggcctacaagattgtcagcggcgaggccgagtccgtggaggtgacgcccgagaacctgcaggacttcgtggggaagcccgtgttcaccgtggagcgcatgtatgacgtgacaccgcccggcgtggtcatggggctggcctggaccgcaatgggaggctccacgctgtttgtggagacatccctgagacggccacaggacaaggatgccaagggtgacaaggatggcagcctggaggtgacaggccagctgggggaggtgatgaaggagagcgcccgcatagcctacaccttcgccagagccttcctcatgcagcacgcccccgccaatgactacctggtgacctcacacatccacctgcatgtgcccgagggcgccacccccaaggacggcccaagcgcaggctgcaccatcgtcacggccctgctgtccctggccatgggcaggcctgtccggcagaatctggccatgactggcgaagtctccctcacgggcaagatcctgcctgttggtggcatcaaggagaagaccattgcggccaagcgcgcaggggtgacgtgcatcgtcctgccagccgagaacaagaaggacttctacgacctggcagccttcatcaccgagggcctggaggtgcacttcgtggaacactaccgggagatcttcgacatcgccttcccggacgagcaggcagaggcgctggccgtggaacggtgacggccaccccgggactgcaggcggcggatgtcaggccctgtctgggccagaactgagcgctgtggggagcgcgcccggacctggcagtggagccaccgagcgagcagctcggtccagtgacccagatcccagggacctcagtcggcttaatcagagtgtggcatagaagctatttaatgattaaagtcatttgcagta

SEQ ID NO: 1908 - protein, 959 aa, Homo sapien
MAASTGYVRLWGAARCWVLRRPMLAAAGGRVPTAAGAWLLRGQRTCDASPPWALWGRGPAIGGQWRGFWEASSRGGGAFSGGEDASEGGAEEGAGGAGGSAGAGEGPVITALTPMTIPDVFPHLPLIAITRNPVFPRFIKIIEVKNKKLVELLRRKVRLAQPYVGVFLKRDDSNESDVVESLDEIYHTGTFAQIHEMQDLGDKLRMIVMGHRRVHISRQLEVEPEEPEAENKHKPRRKSKRGKKEAEDELSARHPAELAMEPTPELPAEVLMVEVENVVHEDFQVTEEVKALTAEIVKTIRDIIALNPLYRESVLQMMQAGQRVVDNPIYLSDMGAALTGAESHELQDVLEETNIPKRLYKALSLLKKEFELSKLQQRLGREVEEKIKQTHRKYLLQEQLKIIKKELGLEKDDKDAIEEKFRERLKELVVPKHVMDVVDEELSKLGLLDNHSSEFNVTRNYLDWLTSIPWGKYSNENLDLARAQAVLEEDHYGMEDVKKRILEFIAVSQLRGSTQGKILCFYGPPGVGKTSIARSIARALNREYFRFSVGGMTDVAEIKGHRRTYVGAMPGKIIQCLKKTKTENPLILIDEVDKIGRGYQGDPSSALLELLDPEQNANFLDHYLDVPVDLSKVLFICTANVTDTIPEPLRDRMEMINVSGYVAQEKLAIAERYLVPQARALCGLDESKAKLSSDVLTLLIKQYCRESGVRNLQKQVEKVLRKSAYKIVSGEAESVEVTPENLQDFVGKPVFTVERMYDVTPPGVVMGLAWTAMGGSTLFVETSLRRPQDKDAKGDKDGSLEVTGQLGEVMKESARIAYTFARAFLMQHAPANDYLVTSHIHLHVPEGATPKDGPSAGCTIVTALLSLAMGRPVRQNLAMTGEVSLTGKILPVGGIKEKTIAAKRAGVTCIVLPAENKKDFYDLAAFITEGLEVHFVEHYREIFDIAFPDEQAEALAVER

SEQ ID NO: 1909 - DNA, 2932 bp, Homo sapien
agagaggagccgactcggcagggactgggggaccgggccgagagtgcgagcgagcgagggagggagtgagggagcgtgcgagccagaaggggaaaggcggccactcgtgcctgagcgaccgcagaggggagtgggagcagtggggtaaaggagcggggggcgggaataagaaaggccgagagaaggcggacagaggctagtggtggtggtggtggtagggggagaaggaggagctggaggagggcaggggctgagggagtgagtgaagcggacgcgcgagggaggggagggaagggaagggaagggaagggggggtcacgcgggggcgcgcgcgcgcaccgggagcgcgctcggaggcgagtggaactggatcgggtttgctgccagcggcgtgagcttcggccgccattttacaacagctccactcgcgccggacacagggagcagcgagcacgcgtttcccgcaacccgataccatcggacaggatttctccgcctcagcccaacggggagatctctggaaacatggctacagaacatgttaatggaaatggtactgaagagcccatggatactacttctgcagttatccattcagaaaattttcagacattgcttgatgctggtttaccacagaaagttgctgaaaaactagatgaaatttacgttgcagggctagttgcacatagtgatttagatgaaagagctattgaagctttaaaagaattcaatgaagacggtgcattggcagttcttcaacagtttaaagacagtgatctctctcatgttcagaacaaaagtgcctttttatgtggagtcatgaagacttacaggcagagagaaaaacaagggaccaaagtagcagattctagtaaaggaccagatgaggcaaaaattaaggcactcttggaaagaacaggctacacacttgatgtgaccactggacagaggaagtatggaggaccacctccagattccgtttattcaggtcagcagccttctgttggcactgagatatttgtgggaaagatcccaagagatctatttgaggatgaacttgttccattatttgagaaagctggacctatatgggatcttcgtctaatgatggatccactcactggtctcaatagaggttatgcgtttgtcactttttgtacaaaagaagcagctcaggaggctgttaaactgtataataatcatgaaattcgttctggaaaacatattggtgtctgcatctcagttgccaacaataggctttttgtgggctctattcctaagagtaaaaccaaggaacagattcttgaagaatttagcaaagtaacagagggtcttacagacgtcattttataccaccaaccggatgacaagaaaaaaaacaggagcttttgctttcttgaatatgaagatcacaaaacagctgcccaggcaaggcgtaggttaatgagtggtaaagtcaaggtctgggggaatgttggaactgttgaatgggctgatcctatagaagatcctgatcctgaggttatggcaaaggtaaaagtgctgtttgtacgcaaccttgccaatactgtaacagaagagattttagaaaaggcatttagtcagtttgggaaactggaacgagtgaagaagttaaaagattatgcgttcattcattttgatgagcgagatggtgctgtcaaggctatggaagaaatgaatggcaaagacttggagggagaaaatattgaaattgtttttgccaagccaccagatcagaaaaggaaagaaagaaaagctcagaggcaagcagcaaaaaatcaaatgtatgacgattactactattatggtccacctcatatgccccctccaacaagaggtcgagggcgtggaggtagaggtggttatggatatcctccagattattatggatatgaagattattatgattattatggttatgattaccataactatcgtggtggatatgaagatccatactatggttatgaagattttcaagttggagctagaggaaggggtggtagaggagcaaggggtgctgctccatccagaggtcgtggggctgctcctccccgcggtagagccggttattcacagagaggaggtcctggatcagcaagaggcgttcgaggtgcgagaggaggtgcccaacaacaaagaggccgcggggtacgtggtgcgaggggtggccgcggtggaaatgtaggaggaaagcgcaaagctgatgggtacaaccagccagattccaagcggcgccagaccaataatcagaactggggctcccaacccattgctcagcaaccgctccaaggtggtgatcattctggtaactatggttacaaatctgaaaaccaggagttttatcaggatacttttgggcaacagtggaagtagaaacagtagggcctctgtaaaattggagactgataggttgatcagaaactcaccctaaatctgaacgggtgccgctataatttgtgacatctggcaagatttccctttatgtatatattttaacaatccgcttggacacgaacaaagccacacttctaactgcttctggcgaactgattttatttttaatttttttcaataaagatattcttagatactgaaagaaatagttaatgagtttgcatttgtgcttgagaaaatttggctcaagtccatttggctgtagtgtcaacgatgtttccagtagtgtttagatttggtgtcttcaaaggtagttgattaaaaccaagtgtgtctttaatatcttgtatcagaataactttgtatgttaccaacttaaattgctagaataaggtaaattgatacacaactgctatttttaatttagaactttgacctaatttgggttttcaaaaccattttggctacttgtattctttatgctgttgtttatttcaataaaaaattcacacct

SEQ ID NO: 1910 - protein, 623 aa, Homo sapien
MATEHVNGNGTEEPMDTTSAVIHSENFQTLLDAGLPQKVAEKLDEIYVAGLVAHSDLDERAIEALKEFNEDGALAVLQQFKDSDLSHVQNKSAFLCGVMKTYRQREKQGTKVADSSKGPDEAKIKALLERTGYTLDVTTGQRKYGGPPPDSVYSGQQPSVGTEIFVGKIPRDLFEDELVPLFEKAGPIWDLRLMMDPLTGLNRGYAFVTFCTKEAAQEAVKLYNNHEIRSGKHIGVCISVANNRLFVGSIPKSKTKEQILEEFSKVTEGLTDVILYHQPDDKKKNRSFCFLEYEDHKTAAQARRRLMSGKVKVWGNVGTVEWADPIEDPDPEVMAKVKVLFVRNLANTVTEEILEKAFSQFGKLERVKKLKDYAFIHFDERDGAVKAMEEMNGKDLEGENIEIVFAKPPDQKRKERKAQRQAAKNQMYDDYYYYGPPHMPPPTRGRGRGGRGGYGYPPDYYGYEDYYDYYGYDYHNYRGGYEDPYYGYEDFQVGARGRGGRGARGAAPSRGRGAAPPRGRAGYSQRGGPGSARGVRGARGGAQQQRGRGVRGARGGRGGNVGGKRKADGYNQPDSKRRQTNNQNWGSQPIAQQPLQGGDHSGNYGYKSENQEFYQDTFGQQWK

SEQ ID NO: 1911 - DNA, 721 bp, Homo sapien
gccaaaaggaaaattatgctggggcaaagtttagtgatccaccttctcctagtgttcttccaaagcctcctagtcactggatgggaagcactgttgaaaattccaaccaaaacagggagctgatggcagtacacttaaaaacgctcctcaaagttcaaacttagatttcagatttcagtatgtgtgtaaaacataatttttcccatatccctggactcttgagaaaattggtacagaaatggaaatttgccttgttgcaacatacaattgcaaaagatgagtttaaaaaattacatacaaacagcttgtattatattttatattttgtaaatactgtataccatgtattatgtgtatattgttcatacttgagaggtatattatagttttgttatgaaagtatgtattttgccctgcccacattgcaggtgttttgtatatatacaatggataaattttaagtgtgtgctaaggcacatggaagaccgattttatttgcacaaggtactgagatttttttcaagaaacagctgtcaaatctcaaggtgaagaactaaatgtgaacagtttactaatgcactactgaagttaaatctgtggccaatcaatgtaagcattggggttggttctctaaattgatttgaatctgaaatactgacaactcctattcccattttgctaaactcaattctggtttggatatatccattccagcttaatg

SEQ ID NO: 1912 - protein, 68 aa, Homo sapien
MCVKHNFSHIPGLLRKLVQKWKFALLQHTIAKDEFKKLHTNSLYYILYFVNTVYHVLCVYCSYLRGIL

SEQ ID NO: 1913 - DNA, 3150 bp, Homo sapien
caaaacctccaccaccggcagcatcctgaatcttaacctggatcgaagcaaagctgagatggatttgaaggagctgagcgagtcggtccagcaacagtccacccctgttcctctcatctctcccaagcgccagattcgtagcaggttccagctgaatcttgacaagaccatagagagttgcaaagcacaattaggcataaatgaaatctcggaagatgtctatacggccgtagagcacagcgattcggaggattctgagaagtcagatagtagcgatagtgagtatatcagtgatgatgagcagaagtctaagaacgagccagaagacacagaggacaaagaaggttgtcagatggacaaagagccatctgctgttaaaaaaaagcccaagcctacaaacccagtggagattaaagaggagctgaaaagcacgtcaccagccagcgagaaggcagaccctggagcagtcaaggacaaggccagccctgagcctgagaaggacttttccgaaaaggcaaaaccttcacctcaccccataaaggataaactgaagggaaaagatgagacggattccccaacagtccatttgggcctggactctgattcagagagcgaacttgtcatagatttaggagaagaccattctgggcgggagggtcgaaaaaataagaaggaacccaaagaaccatctcccaaacaggatgttgtaggtaaaacaccaccatccacgacggtgggcagccattctcccccggaaacaccggtgctcacccgctcttccgcccaaacttccgcggctggcgccacagccaccaccagcacgtcctccacggtcaccgtcacggccccggcccccgccgccacaggaagcccagtgaaaaagcagaggccgcttttaccgaaggagactgccccggccgtgcagcgggtcgtgtggaactcatcaagtgtccagcagaaggagatcacacagagcccatccacgtccaccatcaccctggtgaccagcacacagtcatcgcccctggtcaccagctcggggtccatgagcacccttgtgtcctcagtcaacgctgacctgcccatcgccactgcctcagctgatgtcgccgctgatattgccaagtacactagcaaaatgatggatgcaataaaaggaacaatgacagaaatatacaacgatctttctaaaaacactactggaagcacaatagctgagattcgcaggctgaggatcgagatagagaagctccagtggctgcaccagcaagagctctccgaaatgaaacacaacttagagctgaccatggcggagatgcggcagagcctggagcaggagcgggaccggctcatcgccgaggtgaagaagcagctggagttggagaagcagcaggcggtggatgagaccaagaagaagcagtggtgcgccaactgcaagaaggaggccatcttttactgctgttggaacaccagctactgtgactacccctgccagcaagcccactggcctgagcacatgaagtcctgcacccagtcagctactgctcctcagcaggaagcggatgctgaggtgaacacagaaacactaaataagtcctcccaggggagctcctcgagcacacaatcagcaccttcagaaacggccagcgcctccaaagagaaggagacgtcagctgagaaaagcaaggagagtggctcgacccttgacctttctggctccagagagacgccctcctccattctcttaggctccaaccaaggctctgaccattcccggagtaataaatccagttggagcagcagtgatgagaagaggggatcgacacgttccgatcacaacaccagtaccagcacgaagagcctcctcccgaaagagtctcggctggacaccttctgggactagcagtgaatcgggacacaaaccacccaccccattgggagaaaaacccagacgccaggaaaagaagaaacaacaaaggcaggagaacagccactttcagacttgaaaatgacaaaaccctcagttgagcctgagcccccggcgcgggggctgctacactacaggacacccagcatcggctttgactgcagactgttcacccacacgagccctgtgcttttggtgtaataaatgtacaatttgtggatgtcattgaatctagaggactttcccctttttatatttgtattaactttaacttattaaaaaaaaaaaaagaaaaagaaaaacgatttaaaaaaaaaaaaaaaagcaaccaaccccaacaacaaaaaagaatgttttggtattggagaagggatggtcagttagcctgtctgtcacacgacggaatggatactgggcccggggaccactttcatactcacgtcctcatccttggatacccaggggagggcgaaccgttttcgctcgtgtgtctgtacgcagcatgttgggatcgggagtttcggcacagactatcccatcaagccgttggctcctttcagctactacgttaccacgttcctaaaacgcaagctctccggaccagacggacacagggagaagctagtttctttcatgtgattgaaatgatgactctactcctaaaagggaaaaaacaatatccttgtttacagaagagaaacaaacaagccccactcagctcagtcacaggagagaacacagaaagtcttaggatcatgaactctgaaaaaaagagaaaccttatctttgctttgtggttcctttaaacacactcacacacacttggtcagagatgctgtgcttcttggaagcaaggactcaaaggcaaggtgcacgcagaggacgtttgagtctgggatgaagcatgtacgtattatttatatgatggaatttcacgtttttatgtaagcatgaaacacaggcagtatgagagaaagcaaggcccgtcatgctgtccgtacactacgtatgcttgtagagccattttgtatgttgtgtaaaacaaaaagcattgatgaaaaagcaaaaggtgatgtatgtatatgagaaaattaattgtacgatatcattccagtacgttttgttgtacattttagtcttgtttactttctcttcattgttaagaggatgcgaactgtacagtttccagctagttacccatattagagaagaaataagagagt

SEQ ID NO: 1914 - protein, 614 aa, Homo sapien
MDLKELSESVQQQSTPVPLISPKRQIRSRFQLNLDKTIESCKAQLGINEISEDVYTAVEHSDSEDSEKSDSSDSEYISDDEQKSKNEPEDTEDKEGCQMDKEPSAVKKKPKPTNPVEIKEELKSTSPASEKADPGAVKDKASPEPEKDFSEKAKPSPHPIKDKLKGKDETDSPTVHLGLDSDSESELVIDLGEDHSGREGRKNKKEPKEPSPKQDVVGKTPPSTTVGSHSPPETPVLTRSSAQTSAAGATATTSTSSTVTVTAPAPAATGSPVKKQRPLLPKETAPAVQRVVWNSSSVQQKEITQSPSTSTITLVTSTQSSPLVTSSGSMSTLVSSVNADLPIATASADVAADIAKYTSKMMDAIKGTMTEIYNDLSKNTTGSTIAEIRRLRIEIEKLQWLHQQELSEMKHNLELTMAEMRQSLEQERDRLIAEVKKQLELEKQQAVDETKKKQWCANCKKEAIFYCCWNTSYCDYPCQQAHWPEHMKSCTQSATAPQQEADAEVNTETLNKSSQGSSSSTQSAPSETASASKEKETSAEKSKESGSTLDLSGSRETPSSILLGSNQGSDHSRSNKSSWSSSDEKRGSTRSDHNTSTSTKSLLPKESRLDTFWD

SEQ ID NO: 1915 - DNA, 7530 bp, Homo sapien
tggtcttgaactcctgaccttgtgatccgctcgcctcagcctcccaaagtgctgggattacaggcatgagccaccgtgcctgtcctagaaccactggtaactcttaactggttctaagaacggaagcatctgggctggatggaatttagcatcaagcagagtcccctttctgttcagagtgttgtaaagtgcataaagatgaagcaggcaccagaaatcctcggcagtgccaacgggaagactccgagctgcgaggtgaaccgcgagtgttctgtgttcctcagcaaagcccagctctccagtagcctgcaggagggggtcatgcagaagtttaacggccacgacgccctgccctttattccagccgacaagctgaaagatcttacttcccgggtgtttaatggagaacccggcgcacacgatgccaaactgcgttttgagtcccaggaaatgaaagggattgggacaccccctaacactacccctatcaaaaatggctctccagaaattaagctgaaaatcaccaaaacatacatgaatgggaagcctctctttgaatcttccatttgtggtgacagtgctgctgatgtgtctcagtcagaagaaaatggacaaaaaccagaaaacaaggcgagaaggaacaggaagaggagcataaaatatgactccttgctggagcagggccttgtcgaagcagctcttgtgtctaagatctcaagtccttcagataaaaagattccagctaagaaagagtcttgtccaaacactggaagagacaaagaccacctgttgaaatacaacgttggtgatttggtgtggtccaaagtgtcgggttacccttggtggccttgcatggtttctgcagatccactccttcacagctataccaaacttaaaggtcagaaaaagagtgcacgccagtatcacgtacagttctttggtgacgccccagaaagagcttggatatttgagaagagcctcgtagcttttgaaggagaaggacagtttgaaaaattatgccaggaaagtgccaagcaggcacccacgaaagctgagaaaattaagctattgaaaccaatttcagggaaattgagggcccagtgggaaatgggcattgttcaagcagaagaagctgcaagcatgtcagtggaggagcggaaagccaagttcacctttctctatgtgggggaccagcttcatctcaaccctcaagtagccaaggaggctggcattgctgcagagtctttgggagaaatggcagaatcctcaggagtcagtgaagaagctgctgaaaaccccaagtctgtgagagaagagtgcattcccatgaagagaaggcggagggccaaactgtgtagctctgcagagaccctggagagtcaccccgacatagggaagagtactcctcaaaagacggcagaggctgaccccagaagaggagtagggtctcctcctgggaggaagaagaccacagtctccatgccacgaagcaggaagggagatgcagcatcccagtttttggtcttctgtcaaaaacacagggatgaggtggtagctgagcacccagatgcttcaggtgaggagattgaagagctgctcaggtcacagtggagtctgctgagtgagaagcagagagcacgctacaacaccaagtttgccctggtggcccctgtccaggctgaagaagactctggtaatgtaaatgggaaaaaaagaaaccacacaaagaggatacaggaccctacagaagatgctgaagctgaggacacacccaggaaaagactcaggacggacaagcacagtcttcggaagagagacacaatcactgacaaaacggccagaacaagctcttacaaggccatggaggcagcctcctcgctcaagagccaggcagcaacgaaaaatctgtctgatgcatgtaaaccactgaagaagcgaaatcgggcttccacggcagcatcttcagctcttgggtttagcaaaagttcatctccttctgcatccttaactgagaatgaggtctcggacagcccgggagacgagccctcggagtccccatacgaaagtgcagacgaaacacaaactgaagtatctgtctcatccaaaaagtctgagcgaggagtgactgccaaaaaggagtatgtgtgccagctgtgtgagaagccgggcagcctcctgctctgtgaaggaccctgctgcggagctttccacctcgcctgccttgggctttcccggaggccagaagggaggttcacctgcagcgagtgtgcctcagggattcactcatgtttcgtgtgtaaagagagcaagacagatgttaagcgctgtgtggtaactcagtgtggaaaattttaccatgaggcttgtgtgaaaaaataccctctgactgtatttgagagccgaggtttccgctgccccctccacagctgtgtgagctgccatgcttccaacccttcaaacccaaggccgtcaaaaggtaaaatgatgcggtgtgtccgctgccccgttgcctatcacagcggggatgcttgtctggcagcaggatgctcagtgatcgcctccaacagcatcatctgcactgcccacttcactgctcggaaggggaagcgacaccacgcccacgtcaacgtgagctggtgcttcgtgtgctccaaaggggggagccttctgtgctgtgagtcctgcccagcggccttccaccctgactgcctgaacatcgagatgcctgacggcagctggttctgcaatgactgcagggctgggaagaagctgcacttccaggatatcatttgggtgaaacttgggaactacagatggtggccggcagaagtttgccatcccaaaaatgttcccccaaatattcagaaaatgaagcacgagattggagaattccctgtgtttttctttgggtctaaagattattactggacgcatcaggcgcgagtgttcccgtacatggagggggaccggggcagccgctaccagggggtcagagggatcggaagagtcttcaaaaacgcactgcaagaagctgaagctcgttttcgtgaaattaagcttcagagggaagcccgagaaacacaggagagcgagcgcaagcccccaccatacaagcacatcaaggtgaataagccttacgggaaagtccagatctacacagcggatatttcagaaatccctaagtgcaactgcaagcccacagatgagaatccttgtggctttgattcggagtgtctgaacaggatgctgatgtttgagtgccacccgcaggtgtgtcccgcgggcgagttctgccagaaccagtgcttcaccaagcgccagtacccagagaccaagatcatcaagacagatggcaaagggtggggcctggtcgccaagagggacatcagaaagggagaatttgttaacgagtacgttggggagctgatcgacgaggaggagtgcatggcgagaatcaagcacgcacacgagaacgacatcacccacttctacatgctcactatagacaaggaccgtataatagacgctggccccaaaggaaactactctcgatttatgaatcacagctgccagcccaactgtgagaccctcaagtggacagtgaatggggacactcgtgtgggcctgtttgccgtctgtgacattcctgcagggacggagctgacttttaactacaacctcgattgtctgggcaatgaaaaaacggtctgccggtgtggagcctccaattgcagtggattcctcggggatagaccaaagacctcgacgaccctttcatcagaggaaaagggcaaaaagaccaagaagaaaacgaggcggcgcagagcaaaaggggaagggaagaggcagtcagaggacgagtgcttccgctgcggtgatggcgggcagctggtgctgtgtgaccgcaagttctgcaccaaggcctaccacctgtcctgcctgggccttggcaagcggcccttcgggaagtgggaatgtccttggcatcattgtgacgtgtgtggcaaaccttcgacttcattttgccacctctgccccaattcgttctgtaaggagcaccaggacgggacagccttcagctgcaccccggacgggcggtcctactgctgtgagcatgacttaggggcggcatcggtcagaagcaccaagactgagaagccccccccagagccagggaagccgaaggggaagaggcggcggcggaggggctggcggagagtcacagagggcaaatagcgccaggcggccgcttggccggatccaggggcggtgcagggcggccggccctgcctgcgggagagggcgagcatgaactggcccggaggacccagctcgagccgccaggacacagacgtacaggcctcctcgggagggagcgcctccccaccactgagccatcctcagcagcgtccgctgcgtctgcactgatgaccgtctgagcccagctcagcgttcctggacaaacagcctcactcctcagcgttaccgccacacttgaatttctccgaatgtcaaggttccctcccactctatttttttaggttaaagttaattggcatatggaatgttttaatctcctctgaaatgtgtagcgtaggcttttcccaagggtcgctagaaactcgtcttcgcgttgccccctttctggctctcagcgccgtcgccactcgggagaggctgggtgaggcccgtgtgaggactgaccctggattcctcgaaactgccattgtgatcattactctgctctttggaaatggctgtatcatttttttgtactaatgtgaattgttcctcagaaacgcttcttttccatcctagtgagaagctggccctgcaggtggtggcagcaatggtgttgtaagatttcctcccgtagttttttctcctcatggatttgaatgaaatgccaataacacgtccactttcaacgtgtagtttacgcggagcactttcgaggcctggccgggttgggcctacttctcacctgggcctatcttctgaactcgctaggttcttatcaacatttgggggataactttgtatatttttttcatttggcttttctttaccagtttctgatttttattctcaatatatttttgctaaacctatttcacaaatcaccaccgactgaagtgtgtgtttactgatgcggccctgagctccatggcgaaaggagtgactttgcagggcgtgagaccgcagtctgcttagagcacaggaagtgacaacttagggagccccgtagggcgctgcaggccccggggaccccagcacgtgggtctaaagagagacggagtctagctctcctgccacccagagtggcttccatctcagcactctgtgggtctggtgatggaagatgcagtctctgctgatcacatgtgccctctgccagggcacctactgagaggtgcggtcctgggggtggaggcctgcctggcaggtgtgcgtgcctcgtacgtgtgttatgggcactggtctaggccaggtatgacacccactctcctgtgagatttcactttagtttttaaaaggtccagttctacagagtgagacctatctatctgagtactacatatgttttaagacttggttctttttttgagggatccttgaccctgggaagtctggagcaccctgagaagggggcaccatgtgtgcctttgcccacgtgtcctgaggggctgcttgtctgggagggagggagagaacattcagcagcaggtgcttttttatggccttttcttaaaataacctaagggggacacatccatcttgcagagaagtttacagaactccccttgaaaactgctgctgaggctcctgttaaattttctgtggcatcttttatgccttggtaaaaactgcagtgtctttggacctgagagtggctactccgtggttttgtgacctgtaagcgtggggttcaggggtgtgtggccctgcagggtcccacgcctccctgagcactgactggaagtttcactggctggtggctgtcccttctcccatcagggtccccagcaaagttaactacacagaggacccaggggaaacgagctgtgtagccactgacttgctcgcgcggccgtggcctctgaggggcactcgccggttaagacagggtgggagtagtgctttccagttcagactctaacttctcccaaagtgtcctaagaaaatactggatcggctcatagatttatgctccttatgatgccctaacttggaaggttgttctagggacaggccgggcagtgtccccacacacaccttagagtcgaaggccccagggccccgctgtcacttgcccaaaagatcccttccggcaggtaagggactaccaatgcttacgtcaaaacagcagaatcggctttgcagtgcactttggggagcagatattaacttatttttgtgttggacagtagtgaaatcttgtgatttttaatcgctttgataatacttccaaattttatgatttttctgaaggaaataatgcaaacattttaaatatgtttctccccctttccaaaaactgttaaactaatgagcaagtaacactaactttgaatgtctctacaatacccgttgataactcagtggagccaggctttggggtagcggccctgagcttgcagggtttctcgccactggggctgaccacgcccccagctgtgaccgtgggtgtggctggctctcggccctgcccagctttgttctgaggacgtggtgacttcctgaacatcagcttcaatcctccatcattaatgtgaagcaaaacacaaaaaccgccccaatccctcaggattccttggcatccgaaaccagcatctgcacctaaacccatacccacccgtgtgcgcccacagggggatgtgtccgaatgggcagcttaaaatgtggtcacctgtgggggaaactcttcaggcacctgaagtgagaacccagctgtccgtcctcaggccggcctttcttccggcgacacccgtccatggctggctgggtccccttcgcagtgtttgtctgtcttgacatctaaaccccggcgtgtgcagtgcccatcttccaggactaccttattttccagaattaaacctgttttataattcaagttaatgcaaatgactgtcagttgccaaatatcttgatcctgtgagtgtagttgatgactgtttgttagtcagtagagtaaaatgctgtgtccacggggtgtcacagcctcaccataccctgttgaggtgtgaaatgccccgtcagaaattaaatacaaacttaaatgtgcctattggtgtctaaacttcatacaatgtaaggtcagattccttttaggaatactgggtgctgtcaccaggtttgatagttagacttaaaaacttgaaattcactttttggggggagggatatactgaaatagagagttgagacttgccagttgggggaaaatagcatttaaaatggaaagctgtgtttggaaaattgtgtatgagtatttttgtattaaaaacattttaaaggcttttttcttaa

SEQ ID NO: 1916 - protein, 1365 aa, Homo sapien
MEFSIKQSPLSVQSVVKCIKMKQAPEILGSANGKTPSCEVNRECSVFLSKAQLSSSLQEGVMQKFNGHDALPFIPADKLKDLTSRVFNGEPGAHDAKLRFESQEMKGIGTPPNTTPIKNGSPEIKLKITKTYMNGKPLFESSICGDSAADVSQSEENGQKPENKARRNRKRSIKYDSLLEQGLVEAALVSKISSPSDKKIPAKKESCPNTGRDKDHLLKYNVGDLVWSKVSGYPWWPCMVSADPLLHSYTKLKGQKKSARQYHVQFFGDAPERAWIFEKSLVAFEGEGQFEKLCQESAKQAPTKAEKIKLLKPISGKLRAQWEMGIVQAEEAASMSVEERKAKFTFLYVGDQLHLNPQVAKEAGIAAESLGEMAESSGVSEEAAENPKSVREECIPMKRRRRAKLCSSAETLESHPDIGKSTPQKTAEADPRRGVGSPPGRKKTTVSMPRSRKGDAASQFLVFCQKHRDEVVAEHPDASGEEIEELLRSQWSLLSEKQRARYNTKFALVAPVQAEEDSGNVNGKKRNHTKRIQDPTEDAEAEDTPRKRLRTDKHSLRKRDTITDKTARTSSYKAMEAASSLKSQAATKNLSDACKPLKKRNRASTAASSALGFSKSSSPSASLTENEVSDSPGDEPSESPYESADETQTEVSVSSKKSERGVTAKKEYVCQLCEKPGSLLLCEGPCCGAFHLACLGLSRRPEGRFTCSECASGIHSCFVCKESKTDVKRCVVTQCGKFYHEACVKKYPLTVFESRGFRCPLHSCVSCHASNPSNPRPSKGKMMRCVRCPVAYHSGDACLAAGCSVIASNSIICTAHFTARKGKRHHAHVNVSWCFVCSKGGSLLCCESCPAAFHPDCLNIEMPDGSWFCNDCRAGKKLHFQDIIWVKLGNYRWWPAEVCHPKNVPPNIQKMKHEIGEFPVFFFGSKDYYWTHQARVFPYMEGDRGSRYQGVRGIGRVFKNALQEAEARFREIKLQREARETQESERKPPPYKHIKVNKPYGKVQIYTADISEIPKCNCKPTDENPCGFDSECLNRMLMFECHPQVCPAGEFCQNQCFTKRQYPETKIIKTDGKGWGLVAKRDIRKGEFVNEYVGELIDEEECMARIKHAHENDITHFYMLTIDKDRIIDAGPKGNYSRFMNHSCQPNCETLKWTVNGDTRVGLFAVCDIPAGTELTFNYNLDCLGNEKTVCRCGASNCSGFLGDRPKTSTTLSSEEKGKKTKKKTRRRRAKGEGKRQSEDECFRCGDGGQLVLCDRKFCTKAYHLSCLGLGKRPFGKWECPWHHCDVCGKPSTSFCHLCPNSFCKEHQDGTAFSCTPDGRSYCCEHDLGAASVRSTKTEKPPPEPGKPKGKRRRRRGWRRVTEGK

SEQ ID NO: 1917 - DNA, 3619 bp, Homo sapien
gagtagcattgtggttatatgtaagactttatgtttagagatttgtgctaaacttcttatggatgaaatgatatgtctgggatttgcttcagaataatctggcagggggacgtggaaccaggtatggatagagccacgctggccccaggttgatgtttttgggggccaagtagcgaggacatggggttcattgtacagtttgtctgcttttgtttatgttcagatttttccatgatagaaagttaagccagaaggacaaaggaattcagaagattcatctttagaacttcacttatttgaggggtaatttttaagcagtaaaaagatcaagggtttatgatttgaaactttacaaaccaaaattattttacagcaacgaaaaatctgtctgatgcatgtaaaccactgaagaagcgaaatcgggcttccacggcagcatcttcagctcttgggtttagcaaaagttcatctccttctgcatccttaactgagaatgaggtctcggacagcccgggagacgagccctcggagtccccatacgaaagtgcagacgaaacacaaactgaagtatctgtctcatccaaaaagtctgagcgaggagtgactgccaaaaaggagtatgtgtgccagctgtgtgagaagccgggcagcctcctgctctgtgaaggaccctgctgcggagctttccacctcgcctgccttgggctttcccggaggccagaagggaggttcacctgcagcgagtgtgcctcagggattcactcatgtttcgtgtgtaaagagagcaagacagatgttaagcgctgtgtggtaactcagtgtggaaaattttaccatgaggcttgtgtgaaaaaataccctctgactgtatttgagagccgaggtttccgctgccccctccacagctgtgtgagctgccatgcttccaacccttcaaacccaaggccgtcaaaaggtaaaatgatgcggtgtgtccgctgccccgttgcctatcacagcggggatgcttgtctggcagcaggatgctcagtgatcgcctccaacagcatcatctgcactgcccacttcactgctcggaaggggaagcgacaccacgcccacgtcaacgtgagctggtgcttcgtgtgctccaaaggggggagccttctgtgctgtgagtcctgcccagcggccttccaccctgactgcctgaacatcgagatgcctgacggcagctggttctgcaatgactgcagggctgggaagaagttgcacttccaggatatcatttgggtgaaacttgggaactacagatggtggccggcagaagtttgccatcccaaaaatgttcccccaaatattcagaaaatgaagcacgagattggagaattccctgtgtttttctttgggtctaaagattattactggacgcatcaggcgcgagtgttcccgtacatggagggggaccggggcagccgctaccagggggtcagagggatcggaagagtcttcaaaaacgcactgcaagaagctgaagctcgttttcgtgaaattaagcttcagagggaagcccgagaaacacaggagagcgagcgcaagcccccaccatacaagcacatcaaggtgaataagccttacgggaaagtccagatctacacagcggatatttcagaaatccctaagtgcaactgcaagcccacagatgagaatccttgtggctttgattcggagtgtctgaacaggatgctgatgtttgagtgccacccgcaggtgtgtcccgcgggcgagttctgccagaaccagtgcttcaccaagcgccagtacccagagaccaagatcatcaagacagatggcaaagggtggggcctggtcgccaagagggacatcagaaagggagaatttgttaacgagtacgttggggagctgatcgacgaggaggagtgcatggcgagaatcaagcacgcacacgagaacgacatcacccacttctacatgctcactatagacaaggaccgtataatagacgctggccccaaaggaaactactctcgatttatgaatcacagctgccagcccaactgtgagaccctcaagtggacagtgaatggggacactcgtgtgggcctgtttgccgtctgtgacattcctgcagggacggagctgacttttaactacaacctcgattgcctgggcaatgaaaaaacggtctgccggtgtggagcctccaattgcagtggattcctcggggatagaccaaagacctcgacgaccctttcatcagaggaaaagggcaaaaagaccaagaagaaaacgaggcggcgcagagcaaaaggggaagggaagaggcagtcagaggacgagtgcttccgctgcggtgatggcgggcagctggtgctgtgtgaccgcaagttctgcaccaaggcctaccacctgtcctgcctgggccttggcaagcggcccttcgggaagtgggaatgtccttggcatcattgtgacgtgtgtggcaaaccttcgacttcattttgccacctctgccccaattcgttctgtaaggagcaccaggacgggacagccttcagctgcaccccggacgggcggtcctactgctgtgagcatgacttaggggcggcatcggtcagaagcaccaagactgagaagccccccccagagccagggaagccgaaggggaagaggcggcggcggaggggctggcggagagtcacagagggcaaatagcgccaggcggccgcttggccggatccaggggcggtgcagggcggccggccctgcctgcgggagagggcgagcatgaactggcccggaggacccagctcgagccgccaggacacagacgtacaggcctcctcgggagggagcgcctccccaccactgagccatcctcagcagcgtccgctgcgtctgcactgatgaccgtctgagcccagctcagcgttcctggacaaacagcctcactcctcagcgttaccgccacacttgaatttctccgaatgtcaaggttccctcccactctatttttttaggttaaagttaattggcatatggaatgttttaatctcctctgaaatgtgtagcgtaggcttttcccaagggtcgctagaaactcgtcttcgcgttgccccctttctggctctcagcgccgtcgccactcgggagaggctgggtgaggcccgtgtgaggactgaccctggattcctcgaaactgccattgtgatcattactctgctctttggaaatggctgtatcatttttttgtactaatgtgaattgttcctcagaaacgcttcttttccatcctagtgagaagctggccctgcaggtggtggcagcaatggtgttgtaagatttcctcccgtagttttttctcctcatggatttgaatgaaatgccaataacacgtccactttcaacgtgtagtttacgcggagcactttcgaggcctggccgggttgggcctacttctcacctgggcctatcttctgaactcgctaggttcttatcaacatttgggggataactttgtatatttttttcatttggcttttctttaccagtttctgatttttattctcaatatatttttgctaaacctatttcacaaatcaaaaaaaaaaaaaaaaaa

SEQ ID NO: 1918 - protein, 584 aa, Homo sapien
MMRCVRCPVAYHSGDACLAAGCSVIASNSIICTAHFTARKGKRHHAHVNVSWCFVCSKGGSLLCCESCPAAFHPDCLNIEMPDGSWFCNDCRAGKKLHFQDIIWVKLGNYRWWPAEVCHPKNVPPNIQKMKHEIGEFPVFFFGSKDYYWTHQARVFPYMEGDRGSRYQGVRGIGRVFKNALQEAEARFREIKLQREARETQESERKPPPYKHIKVNKPYGKVQIYTADISEIPKCNCKPTDENPCGFDSECLNRMLMFECHPQVCPAGEFCQNQCFTKRQYPETKIIKTDGKGWGLVAKRDIRKGEFVNEYVGELIDEEECMARIKHAHENDITHFYMLTIDKDRIIDAGPKGNYSRFMNHSCQPNCETLKWTVNGDTRVGLFAVCDIPAGTELTFNYNLDCLGNEKTVCRCGASNCSGFLGDRPKTSTTLSSEEKGKKTKKKTRRRRAKGEGKRQSEDECFRCGDGGQLVLCDRKFCTKAYHLSCLGLGKRPFGKWECPWHHCDVCGKPSTSFCHLCPNSFCKEHQDGTAFSCTPDGRSYCCEHDLGAASVRSTKTEKPPPEPGKPKGKRRRRRGWRRVTEGK

SEQ ID NO: 1919 - DNA, 6754 bp, Homo sapien; identical to SEQ ID NO: 1661

SEQ ID NO: 1920 - protein, 1412 aa, Homo sapien; identical to SEQ ID NO: 1662

SEQ ID NO: 1921 - DNA, 7994 bp, Homo sapien
ctccacagcgacggcggcggctgcggcttagtcggtggcggccggcggcggctgcgggctgagcggcgagtttccgatttaaagctgagctgcgaggaaaatggcggcgggaggatcaaaatacttgctggatggtggactcagagaccaataaaaataaactgcttgaacatcctttgactggttagccagttgctgatgtatattcaagatgagtggattaggagaaaacttggatccactggccagtgattcacgaaaacgcaaattgccatgtgatactccaggacaaggtcttacctgcagtggtgaaaaacggagacgggagcaggaaagtaaatatattgaagaattggctgagctgatatctgccaatcttagtgatattgacaatttcaatgtcaaaccagataaatgtgcgattttaaaggaaacagtaagacagatacgtcaaataaaagagcaaggaaaaactatttccaatgatgatgatgttcaaaaagccgatgtatcttctacagggcagggagttattgataaagactccttaggaccgcttttacttcaggcattggatggtttcctatttgtggtgaatcgagacggaaacattgtatttgtatcagaaaatgtcacacaatacctgcaatataagcaagaggacctggttaacacaagtgtttacaatatcttacatgaagaagacagaaaggattttcttaagaatttaccaaaatctacagttaatggagtttcctggacaaatgagacccaaagacaaaaaagccatacatttaattgccgtatgttgatgaaaacaccacatgatattctggaagacataaacgccagtcctgaaatgcgccagagatatgaaacaatgcagtgctttgccctgtctcagccacgagctatgatggaggaaggggaagatttgcaatcttgtatgatctgtgtggcacgccgcattactacaggagaaagaacatttccatcaaaccctgagagctttattaccagacatgatctttcaggaaaggttgtcaatatagatacaaattcactgagatcctccatgaggcctggctttgaagatataatccgaaggtgtattcagagattttttagtctaaatgatgggcagtcatggtcccagaaacgtcactatcaagaagcttatcttaatggccatgccagaaaccccagtatatcgattctcgttggctgatggaactatagtgactgcacagacaaaaagcaaactcttccgaaatcctgtaacaaatgatcgacatggctttgtctcaacccacttccttcagagagaacagaatggatatagaccaaacccaaatcctgttggacaagggattagaccacctatggctggatgcaacagttcggtaggcggcatgagtatgtcgccaaaccaaggcttacagatgccgagcagcagggcctatggcttggcagaccctagcaccacagggcagatgagtggagctaggtatgggggttccagtaacatagcttcattgacccctgggccaggcatgcaatcaccatcttcctaccagaacaacaactatgggctcaacatgagtagccccccacatgggagtcctggtcttgccccaaaccagcagaatatcatgatttctcctcgtaatcgtgggagtccaaagatagcctcacatcagttttctcctgttgcaggtgtgcactctcccatggcatcttctggcaatactgggaaccacagcttttccagcagctctctcagtgccctgcaagccatcagtgaaggtgtggggacttcccttttatctactctgtcatcaccaggccccaaattggataactctcccaatatgaatattacccaaccaagtaaagtaagcaatcaggattccaagagtcctctgggcttttattgcgaccaaaatccagtggagagttcaatgtgtcagtcaaatagcagagatcacctcagtgacaaagaaagtaaggagagcagtgttgagggggcagagaatcaaaggggtcctttggaaagcaaaggtcataaaaaattactgcagttacttacctgttcttctgatgaccggggtcattcctccttgaccaactcccccctagattcaagttgtaaagaatcttctgttagtgtcaccagcccctctggagtctcctcctctacatctggaggagtatcctctacatccaatatgcatgggtcactgttacaagagaagcaccggattttgcacaagttgctgcagaatgggaattcaccagctgaggtagccaagattactgcagaagccactgggaaagacaccagcagtataacttcttgtggggacggaaatgttgtcaagcaggagcagctaagtcctaagaagaaggagaataatgcacttcttagatacctgctggacagggatgatcctagtgatgcactctctaaagaactacagccccaagtggaaggagtggataataaaatgagtcagtgcaccagctccaccattcctagctcaagtcaagagaaagaccctaaaattaagacagagacaagtgaagagggatctggagacttggataatctagatgctattcttggtgatctgactagttctgacttttacaataattccatatcctcaaatggtagtcatctggggactaagcaacaggtgtttcaaggaactaattctctgggtttgaaaagttcacagtctgtgcagtctattcgtcctccatataaccgagcagtgtctctggatagccctgtttctgttggctcaagtcctccagtaaaaaatatcagtgctttccccatgttaccaaagcaacccatgttgggtgggaatccaagaatgatggatagtcaggaaaattatggctcaagtatgggtgggccaaaccgaaatgtgactgtgactcagactccttcctcaggagactggggcttaccaaactcaaaggccggcagaatggaacctatgaattcaaactccatgggaagaccaggaggagattataatacttctttacccagacctgcactgggtggctctattcccacattgcctcttcggtctaatagcataccaggtgcgagaccagtattgcaacagcagcagcagatgcttcaaatgaggcctggtgaaatccccatgggaatgggggctaatccctatggccaagcagcagcatctaaccaactgggttcctggcccgatggcatgttgtccatggaacaagtttctcatggcactcaaaataggcctcttcttaggaattccctggatgatcttgttgggccaccttccaacctggaaggccagagtgacgaaagagcattattggaccagctgcacactcttctcagcaacacagatgccacaggcctggaagaaattgacagagctttgggcattcctgaacttgtcaatcagggacaggcattagagcccaaacaggatgctttccaaggccaagaagcagcagtaatgatggatcagaaggcaggattatatggacagacatacccagcacaggggcctccaatgcaaggaggctttcatcttcagggacaatcaccatcttttaactctatgatgaatcagatgaaccagcaaggcaattttcctctccaaggaatgcacccacgagccaacatcatgagaccccggacaaacacccccaagcaacttagaatgcagcttcagcagaggctgcagggccagcagtttttgaatcagagccgacaggcacttgaattgaaaatggaaaaccctactgctggtggtgctgcggtgatgaggcctatgatgcagccccaggtgagctcccagcagggttttcttaatgctcaaatggtcgcccaacgcagcagagagctgctaagtcatcacttccgacaacagagggtggctatgatgatgcagcagcagcaacagcagcagcagcagcagcagcagcagcagcagcaacagcaacagcaacagcagcaacagcagcaaacccaggccttcagcccacctcctaatgtgactgcttcccccagcatggatgggcttttggcaggacccacaatgccacaagctcctccgcaacagtttccatatcaaccaaattatggaatgggacaacaaccagatccagcctttggtcgagtgtctagtcctcccaatgcaatgatgtcgtcaagaatgggtccctcccagaatcccatgatgcaacacccgcaggctgcatccatctatcagtcctcagaaatgaagggctggccatcaggaaatttggccaggaacagctccttttcccagcagcagtttgcccaccaggggaatcctgcagtgtatagtatggtgcacatgaatggcagcagtggtcacatgggacagatgaacatgaaccccatgcccatgtctggcatgcctatgggtcctgatcagaaatactgctgacatctctgcaccaggacctcttaaggaaaccactgtacaaatgacactgcactaggattattgggaaggaatcattgttccaggcatccatcttggaagaaaggaccagctttgagctccatcaagggtattttaagtgatgtcatttgagcaggactggattttaagccgaagggcaatatctacgtgtttttcccccctccttctgctgtgtatcatggtgttcaaaacagaaatgttttttggcattccacctcctagggatataattctggagacatggagtgttactgatcataaaacttttgtgtcacttttttctgccttgctagccaaaatctcttaaatacacgtaggtgggccagagaacattggaagaatcaagagagattagaatatctggtttctctagttgcagtattggacaaagagcatagtcccagccttcaggtgtagtagttctgtgttgaccctttgtccagtggaattggtgattctgaattgtcctttactaatggtgttgagttgctctgtccctattatttgccctaggctttctcctaatgaaggttttcatttgccattcatgtcctgtaatacttcacctccaggaactgtcatggatgtccaaatggctttgcagaaaggaaatgagatgacagtatttaatcgcagcagtagcaaacttttcacatgctaatgtgcagctgagtgcactttatttaaaaagaatggataaatgcaatattcttgaggtcttgagggaatagtgaaacacattcctggtttttgcctacacttacgtgttagacaagaactatgatttttttttttaaagtactggtgtcaccctttgcctatatggtagagcaataatgctttttaaaaataaacttctgaaaacccaaggccaggtactgcattctgaatcagaatctcgcagtgtttctgtgaatagatttttttgtaaatatgacctttaagatattgtattatgtaaaatatgtatatacctttttttgtaggtcacaacaactcatttttacagagtttgtgaagctaaatatttaacattgttgatttcagtaagctgtgtggtgaggctaccagtggaagagacatcccttgacttttgtggcctgggggaggggtagtgctccacagcttttccttccccaccccccagccttagatgcctcgctcttttcaatctcttaatctaaatgctttttaaagagattatttgtttagatgtaggcattttaattttttaaaaattcctctaccagaactaagcactttgttaatttggggggaaagaatagatatggggaaataaacttaaaaaaaaatcaggaatttaaaaaaacgagcaatttgaagagaatcttttggattttaagcagtccgaaataatagcaattcatgggctgtgtgtgtgtgtgtatgtgtgtgtgtgtgtgtgtgtatgtttaattatgttaccttttcatcccctttaggagcgttttcagattttggttgctaagacctgaatcccatattgagatctcgagtagaatccttggtgtggtttctggtgtctgctcagctgtcccctcattctactaatgtgatgctttcattatgtccctgtggattagaatagtgtcagttatttcttaagtaactcagtacccagaacagccagttttactgtgattcagagccacagtctaactgagcaccttttaaacccctccctcttctgccccctaccacttttctgctgttgcctctctttgacacctgttttagtcagttgggaggaagggaaaaatcaagtttaattccctttatctgggttaattcatttggttcaaatagttgacggaattgggtttctgaatgtctgtgaatttcagaggtctctgctagccttggtatcattttctagcaataactgagagccagttaattttaagaatttcacacatttagccaatctttctagatgtctctgaaggtaagatcatttaatatctttgatatgcttacgagtaagtgaatcctgattatttccagacccaccaccagagtggatcttattttcaaagcagtatagacaattatgagtttgccctctttcccctaccaagttcaaaatatatctaagaaagattgtaaatccgaaaacttccattgtagtggcctgtgcttttcagatagtatactctcctgtttggagacagaggaagaaccaggtcagtctgtctctttttcagctcaattgtatctgacccttctttaagttatgtgtgtggggagaaatagaatggtgctcttatctttcttgactttaaaaaaattattaaaaacaaaaaaaaaataaatttttttgcaatcctttcctcagacctggctccaggctaactggaaggcagcactctcttttttatatagtagaaaaatgaagtttattataagtttttatattttctacttgttcatttggtgcaaactcaagatttcttttaataggtgcagtctttgagataatttgtttttacctgtattgccctttatcttttttaggtaattctttgtactcctgctgtctacctctcctcacaccccagcaccccccattttttcaaaccttggtatctgttgggtgaacagtataatcttttcatctgcttttagaatgtgggatatttccagtacctactttttttttttttttttgctgaatccaaagatatataaataaaatatatatattttataaagatcagaatgatataaaggagatacatgtttcttcctttaaaaaataaacggaagttacattgttaatgttcatattatgatgccacttttctaaactgcatctggattgaaaggtgtaaatatcaataacagtgctacttagttatcagtatttaatatctgaggtgagttgggggtatctatattaggggtagggtattacagaagataattggcttgatgtcctagaagttctttgatccagaggtgggtgcagctgaaagtaaacagaatggattgccagttacatgtatgcctgcccagttccctttttatttgcagaagctgtgagttttgttcacaattaggttcctaggagcaaaacctcaaggattgatttattgttttcaactccaaggcacactgttaataaacgagcagggtgttttctctcttcctttctaatatatggagtttcgaagaataaaatatgagagcaatatttaaattctcaggaattgacttatactcttgagaatgaattcagtttcaatcaagtttacattatgttgcttaaaaaaatagaaattattctttatcttgcaaagaattgaaaccacatgaaatgacttatgggggatggtgagctgtgactgctttgctgaccattttggatgtcattgtaaataaaggtttctatttaaaattggagcctaaagagttttttttttttgaatccctgtggggttaagggtacaggaaggt

SEQ ID NO: 1922 - protein, 1421 aa, Homo sapien
MSGLGENLDPLASDSRKRKLPCDTPGQGLTCSGEKRRREQESKYIEELAELISANLSDIDNFNVKPDKCAILKETVRQIRQIKEQGKTISNDDDVQKADVSSTGQGVIDKDSLGPLLLQALDGFLFVVNRDGNIVFVSENVTQYLQYKQEDLVNTSVYNILHEEDRKDFLKNLPKSTVNGVSWTNETQRQKSHTFNCRMLMKTPHDILEDINASPEMRQRYETMQCFALSQPRAMMEEGEDLQSCMICVARRITTGERTFPSNPESFITRHDLSGKVVNIDTNSLRSSMRPGFEDIIRRCIQRFFSLNDGQSWSQKRHYQEAYLNGHARNPSISILVGDGTIVTAQTKSKLFRNPVTNDRHGFVSTHFLQREQNGYRPNPNPVGQGIRPPMAGCNSSVGGMSMSPNQGLQMPSSRAYGLADPSTTGQMSGARYGGSSNIASLTPGPGMQSPSSYQNNNYGLNMSSPPHGSPGLAPNQQNIMISPRNRGSPKIASHQFSPVAGVHSPMASSGNTGNHSFSSSSLSALQAISEGVGTSLLSTLSSPGPKLDNSPNMNITQPSKVSNQDSKSPLGFYCDQNPVESSMCQSNSRDHLSDKESKESSVEGAENQRGPLESKGHKKLLQLLTCSSDDRGHSSLTNSPLDSSCKESSVSVTSPSGVSSSTSGGVSSTSNMHGSLLQEKHRILHKLLQNGNSPAEVAKITAEATGKDTSSITSCGDGNVVKQEQLSPKKKENNALLRYLLDRDDPSDALSKELQPQVEGVDNKMSQCTSSTIPSSSQEKDPKIKTETSEEGSGDLDNLDAILGDLTSSDFYNNSISSNGSHLGTKQQVFQGTNSLGLKSSQSVQSIRPPYNRAVSLDSPVSVGSSPPVKNISAFPMLPKQPMLGGNPRMMDSQENYGSSMGGPNRNVTVTQTPSSGDWGLPNSKAGRMEPMNSNSMGRPGGDYNTSLPRPALGGSIPTLPLRSNSIPGARPVLQQQQQMLQMRPGEIPMGMGANPYGQAAASNQLGSWPDGMLSMEQVSHGTQNRPLLRNSLDDLVGPPSNLEGQSDERALLDQLHTLLSNTDATGLEEIDRALGIPELVNQGQALEPKQDAFQGQEAAVMMDQKAGLYGQTYPAQGPPMQGGFHLQGQSPSFNSMMNQMNQQGNFPLQGMHPRANIMRPRTNTPKQLRMQLQQRLQGQQFLNQSRQALELKMENPTAGGAAVMRPMMQPQVSSQQGFLNAQMVAQRSRELLSHHFRQQRVAMMMQQQQQQQQQQQQQQQQQQQQQQQQQQTQAFSPPPNVTASPSMDGLLAGPTMPQAPPQQFPYQPNYGMGQQPDPAFGRVSSPPNAMMSSRMGPSQNPMMQHPQAASIYQSSEMKGWPSGNLARNSSFSQQQFAHQGNPAVYSMVHMNGSSGHMGQMNMNPMPMSGMPMGPDQKYC

SEQ ID NO: 1923 - DNA, 6754 bp, Homo sapien; identical to SEQ ID NO: 1661

SEQ ID NO: 1924 - protein, 1412 aa, Homo sapien; identical to SEQ ID NO: 1662

SEQ ID NO: 1925 - DNA, 965 bp, Homo sapien
cagcttgtcctctatgacttacccagaaggcaacgcttctctttctggtcaaaatggctggtaagcaggccgtttcagcatcaggcaagtggctggatggtattcgaaaatggtattacaatgctgcaggattcaataaactggggttaatgcgagatgatacaatatacgaggatgaagatgtaaaagaagccataagaagacttcctgagaacctttataatgacaggatgtttcgcattaagagggcactggacctgaacttgaagcatcagatcttgcctaaagagcagtggaccaaatatgaagaggaaaatttctaccttgaaccgtatctgaaagaggttattcgggaaagaaaagaaagagaagaatgggcaaagaagtaatcatgtagttgaagtctgtggatgcagctgttatgaagatggttaaacttgaaacaaacaattttaagaattatttggtctgaagatgttttactttaaataaatgtctattgtaatggctggagtttttgaattccaaaccttatactgaataactactgaatccctttactgttaaatttttttccaaactttcaagatatatttagttgtgtttaactgctacttggagctcagaagccactttatcagttttcctcactggttggatagcctatcagtttatggaaggatataacttccgtaagttacatccttatggaagctactgaataaaagaagggggtatgcaccccctagtttgccaagattgagaaatagcctcttcactggtatgcaaacagatttgattttgcatcctatcatttaaaaagaaattatgtctgcaccccaacataggcatacttaagtaatatacatactcctgtgctaacatgtatactagaaaacaaaaagatgttagaaaaataaaagtataaagacaaatcaaaaaaaaaaaaaaaaaaaaaaaaaaaa

SEQ ID NO: 1926 - protein, 111 aa, Homo sapien
MAGKQAVSASGKWLDGIRKWYYNAAGFNKLGLMRDDTIYEDEDVKEAIRRLPENLYNDRMFRIKRALDLNLKHQILPKEQWTKYEEENFYLEPYLKEVIRERKEREEWAKK

SEQ ID NO: 1927 - DNA, 3409 bp, Homo sapien
gtcatctggccagcccccgcccctcctcccggcgtcagcccgccagaggccgcgcggggcccgggcttcggccgatcagcccgggaggccccgccgcgcccccttggcccgcgcgcccgtggtcacagtggaagaggcgcccgcgctgcgctgcccggaggagccgtcgcgcgcccgcttcctgttcggctggttcctgccagctcgaggacaaaacacgcgtgcgcgcggcgggcgagcgcgctcgccgcctcagtcgccagcgccgggcgcagtccgcctttttccggagcagactggccgcggtgctagtcggtagcagcggccgccgcagcggctccgcactggcgaaccgagggcagaaaaaggcggggttgacggctttttggtaggagtgggctggaccggacgccagagacaaaggctcccaaggcaagagggactgtggccctgcgtcggctctgctcggaactgctgaccccaggaatttacgccccttcgtttttctcttctgattcttctcttctcccaagcccgcgtcccctcacgcgtggcctctctccttgccgggagggccgcgatggaggtcccgcccaggctttcccatgtgccgccgccattgttcccctccgctcccgctactttagcctcccgcagcctctcccattggcggccgcggccgccgcggcagctagccccgctcctcccttcgctcgctcccagctccgcccggcagggggcgcgccgggcccagcgccacgtcaccgcccagcagccctcccgattggcgggcggggcggctataaagggagggcgcaggcggcgcccggatctcttccgccgccattttaaatccagctccatacaacgctccgccgccgctgctgccgcgacccggactgcgcgccagcacccccctgccgacagctccgtcactatggaggatatgaacgagtacagcaatatagaggaattcgcagagggatccaagatcaacgcgagcaagaatcagcaggatgacggtaaaatgtttattggaggcttgagctgggatacaagcaaaaaagatctgacagagtacttgtctcgatttggggaagttgtagactgcacaattaaaacagatccagtcactgggagatcaagaggatttggatttgtgcttttcaaagatgctgctagtgttgataaggttttggaactgaaagaacacaaactggatggcaaattgatagatcccaaaagggccaaagctttaaaagggaaagaacctcccaaaaaggtttttgtgggtggattgagcccggatacttctgaagaacaaattaaagaatattttggagcctttggagagattgaaaatattgaacttcccatggatacaaaaacaaatgaaagaagaggattttgttttatcacatatactgatgaagagccagtaaaaaaattgttagaaagcagataccatcaaattggttctgggaagtgtgaaatcaaagttgcacaacccaaagaggtatataggcagcaacagcaacaacaaaaaggtggaagaggtgctgcagctggtggacgaggtggtacgaggggtcgtggccgaggtcagggccaaaactggaaccaaggatttaataactattatgatcaaggatatggaaattacaatagtgcctatggtggtgatcaaaactatagtggctatggcggatatgattatactgggtataactatgggaactatggatatggacagggatatgcagactacagtggccaacagagcacttatggcaaggcatctcgagggggtggcaatcaccaaaacaattaccagccatactaaaggagaacattggagaaaacaggaggagatgttaaagtaacccatcttgcaggacgacattgaagattggtcttctgttgatctaagatgattattttgtaaaagactttctagtgtacaagacaccattgtgtccaactgtatatagctgccaattagttttctttgtttttactttgtcctttgctatctgtgttatgactcaatgtggatttgtttatacacattttatttgtatcatttcatgttaaacctcaaataaatgcttccttatgtgattgcttttctgcgtcaggtactacatagctctgtaaaaaatgtaatttaaaataagcaataattaaggcacagttgattttgtagagtattggtccatacagagaaactgtggtcctttataaatagccagccagcgtcaccctcttctccaatttgtaggtgtattttatgctcttaaggcttcatcttctccctgtaactgagatttctaccacacctttgaacaatgttctttcccttctggttatctgaagactgtcctgaaaggaagacataagtgttgtgattagtagaagctttgtaatcataacacaatgagtaattcttgtataaaagttcagatacaaaaggagcactgtaaaactggtaggagctatggtttaagagcattggaagtagttacaactcaaggattttggtagaaaggtatgagtttggtcgaaaaattaaaatagtggcaaaataagatttagttgtgttttctcagagccgccacaagattgaacaaaatgttttctgtttgggcatcctgaggaagttgtattagctgttaatgctctgtgagtttagagaaaagtcttgatagtaaatctagtttttgacacagtgcatgaactaagtagttaaatatttacatattcagaaaggaatagtggaaaaggtatcttggttatgacaaagtcattacaaatgtgactaagtcattacaaatgtgactgagtcattacagtggaccctctgggtgcattgaaaagaatccgttttatatccaggtttcagaggacctggaataataataagctttggattttgcattcagtgtagttggattttgggaccttggcctcagtgttatttactgggattggcatacgtgttcacaggcagagtagttgatctcacacaacgggtgatctcacaaaactggtaagtttcttatgctcatgagccctccctttttttttttaatttggtgcctgcaactttcttaacaatgattctacttcctgggctatcacattataatgctcttggcctcttttttgctgctgttttgctattcttaaacttaggccaagtaccaatgttggctgttagaagggattctgttcattcaacatgcaactttagggaatggaagtaagttcatttttaagttgtgtggtcagtaggtgcggtgtctagggtagtgaatcctgtaagttcaaatttatgattaggtgacgagttgacattgagattgtccttttcccctgatcaaaaaaatgaataaagcctttttaaacg

SEQ ID NO: 1928 - protein, 420 aa, Homo sapien
MEVPPRLSHVPPPLFPSAPATLASRSLSHWRPRPPRQLAPLLPSLAPSSARQGARRAQRHVTAQQPSRLAGGAAIKGGRRRRPDLFRRHFKSSSIQRSAAAAAATRTARQHPPADSSVTMEDMNEYSNIEEFAEGSKINASKNQQDDGKMFIGGLSWDTSKKDLTEYLSRFGEVVDCTIKTDPVTGRSRGFGFVLFKDAASVDKVLELKEHKLDGKLIDPKRAKALKGKEPPKKVFVGGLSPDTSEEQIKEYFGAFGEIENIELPMDTKTNERRGFCFITYTDEEPVKKLLESRYHQIGSGKCEIKVAQPKEVYRQQQQQQKGGRGAAAGGRGGTRGRGRGQGQNWNQGFNNYYDQGYGNYNSAYGGDQNYSGYGGYDYTGYNYGNYGYGQGYADYSGQQSTYGKASRGGGNHQNNYQPY

SEQ ID NO: 1929 - DNA, 5185 bp, Homo sapien
gtccttgcttcttttttcattgatgtaaatttttttaacttaatatgaaaactctccaagtcttgatcatcagccaggattttgccacagcaatttcattctcttatcggagcttgtatgtgtcaaagtatacttcagagtgcaaacattaagcaagtaatatattttacctacagatacttatgaagacattctttcgctatcgtgagtaaaagtatataaagctgtttctaactgaaaatgcttgaaataagcctgtaatagaaatattttttcattttttaaaaaagggcggaattcccagactgtcttcgccttcttgcacttcgcgggagaagttgttggcgcgaatggatcctgagcctcgataacagattcctcaaccggcccacccgccagccagccagcgccttcatcctggggctgcgatggacattcggaaattctttggagtaataccaagtggaaagaaacttgtaagtgaaacagtaaagaagaatgagaaaacaaagtctgatgaagaaactttaaaagcaaagaaaggaataaaggaaatcaaggtaaatagctcccgtaaagaggatgacttcaaacaaaagcaaccaagcaagaaaaagaggatcatctatgattcagattcagagtcagaggagacgttgcaggtaaaaaatgccaaaaagccaccagaaaaactgccagtatcttctaaacctggtaaaatttcacggcaggatcctgttacatacatttcagaaacagatgaagaagatgactttatgtgtaagaaggcggcctctaaatcaaaagagaatggaagatctacaaatagtcatcttggaacatcaaacatgaaaaagaatgaagaaaacactaagaccaagaataagcctttatcaccaataaaacttacacccacatcagtacttgattattttggaactggaagtgtccaaagatctaataagaagatggtggcaagcaaaagaaaagagctttcacaaaatacagatgagtctggattaaatgatgaagccatcgccaagcaattacagcttgatgaagatgcggagctggagaggcagttgcatgaagatgaagagtttgccagaacattagccatgttggatgaagaacccaagaccaaaaaggctcgaaaggacacagaagcgggagaaacgttttcatctgtccaagccaatttaagtaaagcagaaaaacataaatatcctcataaagtaaaaacagcacaagtttcagatgaaagaaagagctacagtcctaggaagcaaagtaaatatgaaagttcaaaagaatctcagcaacattccaagtcatcagctgacaaaataggagaagtctcttctcccaaggccagttctaagctggcaattatgaaaagaaaagaagagagctcttataaagaaatagagcctgtggcctcaaaaagaaaagaaaatgccattaaattgaaaggagagacaaaaactcctaagaaaaccaaaagttctccagctaaaaaagagtctgtaagtcctgaagattctgaaaagaaacgcactaattatcaagcttatcgaagctacttaaatcgagaaggtcccaaggctctgggctccaaagaaataccaaagggagctgaaaattgcttggaaggccttatatttgtaatcacaggcgtgctggagtctattgaacgagatgaggccaagtctctaattgaacgttatgggggaaaagtaacaggaaatgtcagcaagaaaacaaattatcttgtcatgggtcgtgatagtggacagtccaagagtgataaggccgcagccttggggacaaaaattattgatgaagatggcctgttgaatctgattcggactatgccaggcaagaaatccaagtatgaaatagcagttgaaactgagatgaagaaagagtccaaactggagagaacaccccaaaaaaatgtccaaggaaaaagaaaaattagtccatctaaaaaggaatcagaatctaaaaagagcaggccgacttccaaaagggacagtttggcaaagacaataaaaaaggaaacagatgtgttttggaaaagcctggatttcaaggagcaggtggctgaggagacaagtggtgacagcaaggctaggaatttggctgatgacagcagtgaaaacaaagtggaaaatttgctctgggtggataaatataagccaacctcgctcaagaccataattggacagcaaggtgaccagagctgtgccaacaaactcctacgctggctccgaaactggcaaaagagttcttccgaagataaaaaacacgcagcaaagtttggtaaattttccggcaaagatgatggctctagttttaaagcagcgttgctgtcaggccctcctggtgttggcaaaaccaccacagcttccctggtgtgtcaggagttgggatacagctacgtggaactgaatgcaagtgacacccggagtaagagcagtttgaaggcgattgttgctgagtcactgaacaataccagcatcaaaggcttttattcaaatggagcagcctcttcagtaagcacgaaacatgctctcatcatggatgaagtagatggcatggcaggcaatgaggataggggaggaattcaggaattaattggcctgataaaacatactaaaattcccattatttgtatgtgcaatgatagaaatcatcccaagattcgctctctggttcattattgttttgatcttcgttttcaaagacctcgggttgaacagattaagggtgctatgatgtctattgcatttaaagaaggtttaaagattccccctccagctatgaatgaaataattttgggagccaatcaagatatcagacaggttttacataatctgagtatgtggtgtgcacgaagtaaagcattaacctatgaccaggccaaagctgattctcacagagccaaaaaggatatcaaaatgggcccatttgatgttgcccggaaagtgtttgcagctggagaggagactgctcacatgtcacttgtggacaagtcagatctcttttttcatgattattcaatagcacccctcttcgtccaggaaaattacatacacgtgaagcctgtagcagcagggggtgacatgaaaaagcacctgatgcttttaagcagagcagcagacagcatatgcgatggtgacctagtggacagccagatccggagtaagcaaaactggagtcttctgcctgcgcaggccatttatgccagtgttcttcctggagagttgatgagggggtacatgacccagtttcccaccttcccaagctggctggggaagcactcgtctacaggcaaacatgatcgtattgttcaggacctggccttgcatatgagtctcagaacttactccagcaaaaggactgtaaacatggattatctgtcgcttctaagggatgcacttgtacagcccttgacctcacaaggagtagacggagtacaggatgttgttgcacttatggacacatattatttgatgaaagaagactttgagaatatcatggaaatcagcagctggggtggcaaacctagtcccttttcaaagctggatcccaaggtgaaagcagccttcacaagagcttacaataaggaagcccaccttactccatactcacttcaagctataaaggcatctagacacagcacaagcccatccctggattcggaatacaatgaagaattaaatgaagatgactctcaatctgatgagaaagaccaagatgctatagaaactgatgccatgatcaagaaaaagacaaaatcttcaaagccttcaaaaccagaaaaagataaggagcccagaaaaggaaaaggaaaaagttcgaagaaatgaaaccatttttcactagcgacagccactttttactctccctcctgaccagtccagctggtctagagaaagccttgttttttcccagagcaaccatgttttagcataatgggatgacctggtgtcccattataaataaagggtggtatggctagaagggtatgagcagtaggcttatgtacacctcttatagaggttgataggactgcttgggtcctccactgtcctctgtcaatctagttagacgtgcttctgaatgactgtagaattggaactagaaactacacctgggctttggagtcagattttagttaacaataatgagcctggagcagtagtactaaggcgtcttttgtaggcttaagaatttatcctaatggcctttataggaccaatgctgattttttttaaaggcagttcctattatgtggtgaaattttgtaaataaatgattatacaaaacagtcaccacctagaactgggtattctttgtacattgtcagatatctttcaaagtataaattaggaataaaaatgttccacatgatatgtgtacaaattctttttaagattgtcatcttgtacagcaaaatattatgttggtatattacttccttattaatttgcaaatgattggattaaaaaagctcactgtattccttactaacctgttgtgtgaaacataacattggcagtcgaggagtcagaactcggattcccagcctcactccctctgtgtgtgttgaccacgtctctgctgtgaataggatttcatgcagtggtctgttatggggctttgcagcgtggggggctgcagaagattctcagacattcttatccttctggagtctcaacccatcaggttcagaccagtaggaaccaggctgggtcaggctcttaatttcactacggtgggggacaaaatgaacactggcttttgttcactttgcccctgagagatctagtcctgtcctgtgatggcttccacaaaccctgttggaagtttgggttattcctataactgtatgtgttgagtggccgtgacgtatggacctagcctggaatttagatgtctagctattttttaatcttgttggtaaatgctcagaggtctgtgctacctctgtgaggtatatactaaaatgaatgtaaaataaggatcgtattccctgctttaaggaactggtagtcttgtttgggtgatgagacaaagttcttgagacatttaaactgtatttaccagtgtgaaaaatgtcatttatggagattaattcattatggaaataaaacattgcctaagcccttgcctgctg

SEQ ID NO: 1930 - protein, 1148 aa, Homo sapien
MDIRKFFGVIPSGKKLVSETVKKNEKTKSDEETLKAKKGIKEIKVNSSRKEDDFKQKQPSKKKRIIYDSDSESEETLQVKNAKKPPEKLPVSSKPGKISRQDPVTYISETDEEDDFMCKKAASKSKENGRSTNSHLGTSNMKKNEENTKTKNKPLSPIKLTPTSVLDYFGTGSVQRSNKKMVASKRKELSQNTDESGLNDEAIAKQLQLDEDAELERQLHEDEEFARTLAMLDEEPKTKKARKDTEAGETFSSVQANLSKAEKHKYPHKVKTAQVSDERKSYSPRKQSKYESSKESQQHSKSSADKIGEVSSPKASSKLAIMKRKEESSYKEIEPVASKRKENAIKLKGETKTPKKTKSSPAKKESVSPEDSEKKRTNYQAYRSYLNREGPKALGSKEIPKGAENCLEGLIFVITGVLESIERDEAKSLIERYGGKVTGNVSKKTNYLVMGRDSGQSKSDKAAALGTKIIDEDGLLNLIRTMPGKKSKYEIAVETEMKKESKLERTPQKNVQGKRKISPSKKESESKKSRPTSKRDSLAKTIKKETDVFWKSLDFKEQVAEETSGDSKARNLADDSSENKVENLLWVDKYKPTSLKTIIGQQGDQSCANKLLRWLRNWQKSSSEDKKHAAKFGKFSGKDDGSSFKAALLSGPPGVGKTTTASLVCQELGYSYVELNASDTRSKSSLKAIVAESLNNTSIKGFYSNGAASSVSTKHALIMDEVDGMAGNEDRGGIQELIGLIKHTKIPIICMCNDRNHPKIRSLVHYCFDLRFQRPRVEQIKGAMMSIAFKEGLKIPPPAMNEIILGANQDIRQVLHNLSMWCARSKALTYDQAKADSHRAKKDIKMGPFDVARKVFAAGEETAHMSLVDKSDLFFHDYSIAPLFVQENYIHVKPVAAGGDMKKHLMLLSRAADSICDGDLVDSQIRSKQNWSLLPAQAIYASVLPGELMRGYMTQFPTFPSWLGKHSSTGKHDRIVQDLALHMSLRTYSSKRTVNMDYLSLLRDALVQPLTSQGVDGVQDVVALMDTYYLMKEDFENIMEISSWGGKPSPFSKLDPKVKAAFTRAYNKEAHLTPYSLQAIKASRHSTSPSLDSEYNEELNEDDSQSDEKDQDAIETDAMIKKKTKSSKPSKPEKDKEPRKGKGKSSKK

SEQ ID NO: 1931 - DNA, 5717 bp, Homo sapien
attaagctttagcgtaacagattcttttcaatcaagtactggaatcagttgtccaggtggagtaatacagaaaagctaaggtctagaaaccaggggaccattttagatacaaagcagaattgcggaattgccagattataacttgaggtttgttcgggggattttttttaaccatctaaaataaatgtatataagatggactgagtcttctaaagagattctaaaactatattcttacttaagtctgaacaggaattaagaataactcaaagtgaatttgatcgtcaagcagagattaccagacttctgctagagggaatcagcagtacacatgcccatcaccttcgctgtctgaatgactttgtagaagcccagatgacttactatgcacagtgttaccagtatatgttggacctccagaaacaactgggaagttttccatccaattatcttagtaacaacaatcagacttctgtgacacctgtaccatcagttttaccaaatgcgattggttcttctgccatggcttcaacaagtggcctagtaatcacctctccttccaacctcagtgaccttaaggagtgtagtggcagcagaaaggccagggttctctatgattatgatgcagcaaacagtactgaattatcacttctggcagatgaggtgatcactgtgttcagtgttgttggaatggattcagactggctaatgggggaaaggggaaaccagaagggcaaggtgccaattacctacttagaactgctcaattaagtaggtggactatggaaaggttgcccatcatgactttgtatttatatacaattaactctaaataaagcaggttaagtatcttccatgttaatgtgttaagagactgaaaataccagccatcagaaactggcctttctgccaataaagttgcatggtaaatatttcattacagaatttatgttagagctttcatgccaagaatgttttcttacaaaattctctttttattgaggtttcactaataagcagcttctacttttgagcctcaacttaaagcagaactgttttctactggatttttcattaacagcaagctttttcttttatgtaaaataaatctattgtgaattgatatcagcgactcatttattaggtataaataatagccaaagaataaaattaaaatttattttaaactttcggtcttaaaaagagctgtaggatataaacctcttttgtgaaaagtagaattttctgaatgctttcatagacaaaaacgcatttaaactatgtttacctggttttccaacagaaatcaaatgattttaatattatgttttgatgggttattttcagagttgtttggttttttaaacactactgaatggtttcttttaaatttaagaacaactagttcttgaaaagcaataccgtatttctctgataaatttgtagttaaggttctagaaaatctaggacaaatttacttcattaaacataaagtttttaagattattcagttggcacaatttaatgcataattgggattggatccatttactgtactgtggtacagtaaagagaatgtgttcttattgaacagcagatttgtatacaaatacggaataatgcaactacattataaattgtatacgaacaaaataaattgggtcactctgagcttactattaaaacattgaaaatttattaatgaacacaggctatcttgatgaggatctctgcttatgaaacacatactaatgaaattattagtgacacattggaagctagaaaattgctgttggggccattgctataaatcattgtttccatgttaagacttctgttctaattcattcattcaacaaacatttgttgagggccagatactgtgctggtcaactggggatactgtcctgaacaatatgcacacagttcttgcccctgcagagcttaaagaccattaaaggatacagaaaattaagcaattatcctatagtaggattcgtggtgtgatggggaaaatacaaggtactgtatttgggagtcatgtaactccagttttgggagtgagagagggtctggggaagaactgttccagataaaaagatgtgtaaccaagatagcatagcacattctgacaactaaagcaatttactctaacttaagcatgaagtacaaaagtatagttcatttattgagggaatgttaagctattaaaatgatactttttggtacttttaaaaaaatgaatacttaaacaccgttttaaaattttgtgttaagagctcctaataagaacttggtaaacatgttgacaatttaactcacagtctaaactttaaaagtagtagttacccttttatttctgtgccatgagacaaattcttctgcagttttatagttgtacaagatgttttgactcactctcaattgccatattcttaaagaaaccctgaaaagctgctcaagctggtcagttttctgtaaaaccaagtaaatgaaattttctctcccctcagaaaggaagttctacagcctagagtaccatctattgtgttttataagtccagatttaggctttgaaagatcataccaaaacttcagatcgacttaaacagcaactatgaattaggtttatgggaaatgtagtaatacaggggaaagaatatcggtaatggagtgaaatggtcctgggttcaaatccagtcttcctcacatattgtgctctttaagcttcaaatgagatgtataactgccttttccttaccagtaaaatgaggacaataattatgacaccatagggtggttgtgaggattagcaaatgttatcttgtatttcaggtgcctttcagggaaaggcttggcacatagtaaacacatcctgtaaatatcagtttccccttgttagcccctgtagcatcctgacctaccaagtctataggccttgcatatcactgtgcaccagagatacctcttttacatctgggctctgttttctctctatcaatcctatcctccaccctctttaaatcagaccccaggtttaaccttcccacagtcagtataaatcatttttcagaactttcagctttccatcaagtgaaagttgattttagttacccagtaatgtacagaaaccttcaataatgttaagcttcaaaggcttctggtacgtttgtctaccacagaaccaccacaatatatatgcttgttcttaggtttattgctttttattttaatggggtttggttgtttgggttttattttggttttggcttattttaaagtcaagtttagtttttactcaggtaaaggcctgaagtttcttgggcgtggaagaaaaagcttgggaagcctattaattcatggtgcagttcagaattgtttaaataagctctgtgccactgagcttaatctgaaagtatagtgacatgtgaaggatgcacatatgaatgaaaaactaaaataattgtaggctcttctataaatgaaaaaaaaagtgattggattgtgtctacctttttcctcaaagtaatctaacctaaacggtcatggtgttaaaactttttatggtgctaatcagaaaaattgatgttgcaagaaatgaggtctcaaaaatgggaatgtgcctcctcactctgcgtcacatgggaaataaatcctgaggccaggatcaccagtggggtagagtcatcttcatagtctcctgttatcctccccctgaacaaagaacaaagtgagactgggaagctagtgttggggaaacatttctgggataaactgtggagtggagaagacaatggagggcaaggcaaaaacccacagacttgtttacccatagaggccccactcacctccatgctgacagaattccagaaaaattccttccctatctcccaaacacctgaaattctgaaatattgccctactatttagcactttaagcttcagtgaggtgctgtaatggagagatagcttcatagtttagcctatagccaactttgcctcaagacctccagataagatgaagtggcttttacctcatgtgagtctcaaacgctggagagagagttccacaaccacccctgccctttctcccatattacgctcattagaaagtctactcagggctgggtgccgtggctcatgcctgtaatcccagcactttggaggctgaggcgggtggatcatctgaggtcaggagttcgagaccagcctggccaacatggggaaaccctgtctctactgaaaatataaaaattagccgggcatggtggcgtgcacctgtaattccagctactcgggaggctgaggcaggagaatcacttgaaccccagaggcagaggctacagtgagccaagattgcaccactgcactccaacctgggtgatagaataagactcttgtctcaaggaaagaaaaaatgtctactcagtagagcagtgattggcaaagtgtgagaccccagaccggcaatattggcatctcctggagacttgtttaaaatgctgattactattttcaagaactttctaccttcatttttacttatttttttgttttcaagggctcatggaatcagtcttccatgtgacagctttttaaatattttaagacaaaaactgagtcttctaatcttaattgtgttctagcagtagtcattgtaattatagttatttttataatttatttgtttagtgtatatctgtcactctagaatgtaggctccctgagataaaaactataattcttttgatggcagttacattcccaactcttagcacaagatctaggacatagtatgaactcaataaatttttgttgaatgaaagaaaaatgcaaatttataagccttttcagagacctactgaatcaaactctgagagtggagcccagcaatctgttgtaaaagctgtttgagtaatactgttgcactctaagcttgagaaccactgcaatagaactaagagaacattcatttcaccttcaggcctattctctgacatcacttgaaaaatcctctctgccttctgtaacccttaaccaacaacagtgccctgtccatgtaggggaaacttctgggctgtattacaagtgggtaggaaggtataaggatatcatagtgggaagtattgcttagaatgccagtacttgtttgctgtggaaggtttctaggaatggattgcttagtctaaagtaagcactaccaccatccacgttttcactcaacacagtgccttttaattggtgactaacatcaaaacaccttgacaaaccgttaaaacagtatcagaaaccatgtgtacatccctgtgcctcttagattgctaagttctgctctcattcttacttcaaaggacactttttaaagaattgttaatgcttttttataatacaagtcatagccctgttggcaaaaagaaaaaagattcagtgagaaagaaaaatcactgataattccatcatccagggagaaccactgttatttaagtatatggccttccagacctttctgtgcatttatagatatttttaatgggatcaaagtgtacatactgttttgtaactttttttcactcaacaataccatgactgtcttgctgtgtcaagtatatttctacatctcttaatggctgcatgatattccatcatatgtgccacattttattaaactactgttcaatttttaggtttccaactttcattaataaagtgctttaaag

SEQ ID NO: 1932 - DNA, 2314 bp, Homo sapien
atgggccccaaaaaatcttggcgaagtcacttttttccactgcctgaggtttggctgttgctcctgttatcccaagctctaagcccttcccatggtccccagacccaggcaggggtaggtctcgtctggagtgtcccgctgccaagtgccctgagaagccagtcctgccttggtgctccactgagggacgcttcggagttaaccaccgtgcacttgttcccgacgcggggctggggcgcgcgcagggcattgtgggtgcatagttcagccagcgcgtcgtcggctgctagccgccgtcgcctgcgcgctcaggcctctgggattagtagttttagcctcgtggatggcggggcgcctcgcgaagatggtggcgcgcgtggcgtgtggctcccgtcgtctggccaagtctcagcgcagcgcaccggccggcgtctcgttggcctggagcccacacccaccgggtccctgaccccgcgccccccgcgcccggttcccggcatgcctcgcgcccgtaagggcaacacgctccggaagggtggtcagcgccgtggaggaggtgcccggagcagtgcccaagctgactcgggttccagtgacgatgaggcagccagtgaggcccgcagcaccgccagtgaatgccccagccttctcagcaccactgcagaggacagccttgggggggatgtcgtggatgagcagggccagcaggaagaccttgaggaaaagctgaaggagtatgtggactgtctcacagacaagagtgccaagacccggcagggtgctcttgagagcctgcgcctggccctagcgtcccgcctactccccgacttcttgctggagcgccgcctcacgctagccgatgccctggaaaagtgcctcaagaaagggaagggcgaggaacaagccctggctgctgctgtgctaggcctgctctgcgtgcagctgggccctggacctaagggtgaggagctgtttcacagcctgcagcctctgctggtctctgtgctcagtgacagcacagctagccctgctgcccggctccactgtgcttctgcccttggcctgggctgctacgtggctgccgctgacatccaggacctggtctcttgccttgcctgcttagaaagtgttttcagccggttctatggcttggggggcagctccacaagtcctgtggttcctgccagcctgcacggcctgctctctgctgccctgcaggcctgggcattgctgctcaccatctgccctagcacccaaatcagccacatccttgacaggcagctgccccggctgccccagctcttgtccagtgaaagtgtgaacctgcggatcgctgccggtgaaaccattgcactgctctttgagcttgcccgggaccttgaggaggagtttgtttacgaggacatggaggccctctgcagtgtcctgcgcactctggccactgacagtaacaagtaccgtgccaaggctgatcgtcggcgccagcgctctactttccgcgccgtgctgcactccgtggagggcggtgaatgcgaagaagagatagtgcgcttcggctttgaggtgctctacatggacagctgggctcggcaccggatctacgctgccttcaaggaagtgctgggttcgggcatgcaccaccacctccagaacaatgagctactccgtgacatctttggcctgggccctgtgctgttgctggatgccactgccctgaaggcctgcaaggttccacgctttgagaagcacctgtacaatgctgctgccttcaaagcccggaccaaggctcgaagccgtgtgcgggacaagcgggcagacatcctgtgaagcaggacctgctgaagaggagactttctatgcccttggtccgtatttttaacagaagacagtgcaacaactggtctccaccagtatttgtcactttattttttttaatgacaaaaccaaaaacagacatggggtgggtagctgggggcccggacacttgggaccctgacccctttgtccctgcactcagccctgtggccccttcctgtcctgtctcaggccaggctaaatatgtgccttcctcagggctgtggggcaggcactagggggcctttcccttcctttcctttctcaggccttgctcccccaggatgacccactcttaggggggtggtggcatctggacaaatgccaccacagcaggtggggtggcaaagctacctggaatggatttgtgtgctgatttttaaggattattacagataattaaacagaacggtcagccttcaaaaaaaaaaaaaaaaaaaaattcctgcggccgcaaggc

SEQ ID NO: 1933 - protein, 608 aa, Homo sapien
MGPKKSWRSHFFPLPEVWLLLLLSQALSPSHGPQTQAGVGLVWSVPLPSALRSQSCLGAPLRDASELTTVHLFPTRGWGARRALWVHSSASASSAASRRRLRAQASGISSFSLVDGGAPREDGGARGVWLPSSGQVSAQRTGRRLVGLEPTPTGSLTPRPPRPVPGMPRARKGNTLRKGGQRRGGGARSSAQADSGSSDDEAASEARSTASECPSLLSTTAEDSLGGDVVDEQGQQEDLEEKLKEYVDCLTDKSAKTRQGALESLRLALASRLLPDFLLERRLTLADALEKCLKKGKGEEQALAAAVLGLLCVQLGPGPKGEELFHSLQPLLVSVLSDSTASPAARLHCASALGLGCYVAAADIQDLVSCLACLESVFSRFYGLGGSSTSPVVPASLHGLLSAALQAWALLLTICPSTQISHILDRQLPRLPQLLSSESVNLRIAAGETIALLFELARDLEEEFVYEDMEALCSVLRTLATDSNKYRAKADRRRQRSTFRAVLHSVEGGECEEEIVRFGFEVLYMDSWARHRIYAAFKEVLGSGMHHHLQNNELLRDIFGLGPVLLLDATALKACKVPRFEKHLYNAAAFKARTKARSRVRDKRADIL

SEQ ID NO: 1934 - DNA, 2857 bp, Homo sapien
ggcgacgggtttggtaagtaggaaagtttcggttgaggagtaagagctgccgcgggagcagtaacccgcgcgggggaggccgacgtcggtcggagagggggtacgagagctgctggtggtgttgtcgtggccggagcggcccgcgcctgggctgccggcacttcgcggcagtcagagcaccataacatggtgtgggaagtgaagacaaatcagatgcctaatgcagtacagaaactcctgttggtgatggacaagagagcctcaggaatgaatgactcattggagttgctgcagtgtaatgagaatttgccatcttcacctggatataactcctgtgatgaacacatggagcttgatgaccttcctgaacttcaggcagttcaaagtgatcctacccaatctggcatgtaccagctgagttcagatgtttcacatcaagaatacccaagatcatcttggaaccaaaatacctcagacataccagaaactacttaccgtgaaaatgaggtggactggctaacagaattggcaaatatcgcgaccagtccacaaagtccactgatgcagtgctcattttacaatagatcatctcctgtacacatcatagccactagcaaaagtttacattcctatgcacgccctccaccagtgtcctcttcttcgaagagtgaaccagccttccctcatcaccattggaaggaggaaacaccagtaagacatgaaagggcaaatagtgagtcagaatctggcattttctgcatgtcctccctgtcagatgatgatgatttgggatggtgcaattcctggccttcaactgtctggcactgttttttgaaaggcacacgactgtgctttcataagggaagcaataaggaatggcaagatgttgaagattttgctagagctgaaggctgtgataatgaggaagatcttcaaatgggcattcacaagggctatggttctgatggtctaaagttgttatcacatgaagaaagtgtatcatttggcgagtctgtactgaagttgacttttgatcctggtacagtagaagatggtttacttaccgtagagtgtaagctggaccaccctttctatgttaaaaataaaggttggtcatcattttatccaagcttgactgtggtacagcatggcattccatgttgtgaagttcatattggcgatgtatgtctacctcctggacaccccgatgccattaattttgatgattcaggtgtttttgatacatttaaaagctatgacttcacacctatggattcttctgcagtttatgtgttaagtagtatggctcgccagcgtcgtgcatctttgtcttgtggaggacctggtggtcaagactttgcaagatctggattcagtaaaaactgtggctcacctggatcatcacagctctcttccaattctttgtatgctaaagctgtcaaaaaccacagctcagggactgtgagtgccacttctcctaataagtgcaaaagaccaatgaatgccttcatgctttttgccaaaaaatacagagttgaatatactcagatgtatccagggaaagataacagagccataagtgtgatccttggtgacaggtggaagaaaatgaagaatgaagagagaagaatgtacacattagaagcaaaggctttggctgaagaacagaaacgtttaaatcctgactgttggaagaggaaaagaaccaattcaggctcacaacaacattaaaccaggatgcttatgttcttaagtctatatttgcatatacattgactcttgatggaaagacttaagaagatcaaggtctcaccatttgtcctcaattcgtgtgaccataagatactgatagcattgagtcttgaaatgatttaataatatgagtgaggatttgctttctccattagagcattaagctaaaactatcaacattttaaaccaaattgccttatttttcttccaaacttcatatatgtctatcaggtaataataggcttgaaaattgatatcctgtggtgctaaagtacagtagaaagagaggagaagtgtatacatgttttattttaaattgtacgaaaggggaatttaaaaaatatgtaactgctgtttatacattggctccttactgcttattaatctgtattgtacacatgatgaaatgaagcagaagctgggagtcggcctttcctctagtaaccaccacatggctcagcatctgtgccaaacataggcgctcctagtctggtcagtgccaagaggctaccagaacatggggcaggtggctggtgttggtgtcccagcctaagagccacctgctgcagttaccatggcatgctgagttgatgcaccaggtggcagcagccatccgttattatttccaatggagacctagcccaggccaaggtaaagttagttaatagcattgggatatagtcactgtaatggtgctattaacaaacagtcaacaccattgtattttttaacttcgtgttctgtatctcctcagccatgtatcttaaatatattttgtcatcataatctttctttatggtgggggcagactttgcacttactgcagtgcaacacttgcactttaattttcctccaactgtctaaaattagagcaaatacattggcaatacagctgcttttgctctgagctacaatcatggcttttcatgttacttaccaagtggtgtttctggttaggaatcacagctgtaaaattgatttcagttcatcacacttcttcatgatgttgcccctaaattttgcacactatattcttgtatattatttcaaataaatggaaaaaaaagttgcttatctctgaaaaaaaaaaaaaaaaaaaaaaaaa

SEQ ID NO: 1935 - protein, 514 aa, Homo sapien
MVWEVKTNQMPNAVQKLLLVMDKRASGMNDSLELLQCNENLPSSPGYNSCDEHMELDDLPELQAVQSDPTQSGMYQLSSDVSHQEYPRSSWNQNTSDIPETTYRENEVDWLTELANIATSPQSPLMQCSFYNRSSPVHIIATSKSLHSYARPPPVSSSSKSEPAFPHHHWKEETPVRHERANSESESGIFCMSSLSDDDDLGWCNSWPSTVWHCFLKGTRLCFHKGSNKEWQDVEDFARAEGCDNEEDLQMGIHKGYGSDGLKLLSHEESVSFGESVLKLTFDPGTVEDGLLTVECKLDHPFYVKNKGWSSFYPSLTVVQHGIPCCEVHIGDVCLPPGHPDAINFDDSGVFDTFKSYDFTPMDSSAVYVLSSMARQRRASLSCGGPGGQDFARSGFSKNCGSPGSSQLSSNSLYAKAVKNHSSGTVSATSPNKCKRPMNAFMLFAKKYRVEYTQMYPGKDNRAISVILGDRWKKMKNEERRMYTLEAKALAEEQKRLNPDCWKRKRTNSGSQQH

SEQ ID NO: 1936 - DNA, 879 bp, Homo sapien
ggcacgaggatgacctggaagtgatgcctaaagctgtggaccgcgtgggctcgcctccctgggactaggtttcagcggccgctgcgatgaccaaaataaaggcagatcccgacgggcccgaggctcaggcggaggcgtgttccggggagcgcacctaccaggagctgctggtcaaccagaaccccatcgcgcagcccctggcttctcgccgcctcacgcggaagctctacaaatgcatcaagaaagcggtgaagcagaagcagattcggcgcggggtgaaagaggttcagaaatttgtcaacaaaggagaaaaagggatcatggttttggcaggagacacactgcccattgaggtatactgccatctcccagtcatgtgtgaggaccgaaatttgccctatgtctatatcccctctaagacggacctgggtgcagccgcaggctccaagcgccccacctgtgtgataatggtcaagccccatgaggagtaccaggaggcttacgatgagtgcctggaggaggtgcagtccctgcccctacccctatgaggggctccggtagcacctgggcacctgccgctggaagctattgggctggcagcaggacgactggctgtcctcctgcccacccacactgacggcatcttcccagttccccaaggcacgccttcttcccaggcagctctaacagccctttcatgaaggtaatgctagtcttctgtccatcagtgccatttcctgtagaactaaaggctgttccaagaatgtggggtggggaaagtaaatgctaagactaaaaaaaaaaaaaaaaaaaaaaaaaaaaaaaaaaaaaaaaaaaaaaaaaaaaaaaaaaaaaaaaaaaaaaaaaaaaaaaaaaaaa

SEQ ID NO: 1937 - protein, 153 aa, Homo sapien
MTKIKADPDGPEAQAEACSGERTYQELLVNQNPIAQPLASRRLTRKLYKCIKKAVKQKQIRRGVKEVQKFVNKGEKGIMVLAGDTLPIEVYCHLPVMCEDRNLPYVYIPSKTDLGAAAGSKRPTCVIMVKPHEEYQEAYDECLEEVQSLPLPL

SEQ ID NO: 1938 - DNA, 6836 bp, Homo sapien
ctctgaggggcttagaaattaacaggttgtttatataattggccttaaatgaggtgagagtgaagagactagagccatctctggaaaacatcattatcccattccccgggaagctaccctctggaactcaagatttgaccatatctgttttgaggattcattatgaacaaagaagtctcccaggtgtgaagtttttcaacatgagtggcctcggggacagttcatccgaccctgctaacccagactcacataagaggaaaggatcgccatgtgacacactggcatcaagcacggaaaagaggcgcagggagcaagaaaataaatatttagaagaactagctgagttactgtctgccaacattagtgacattgacagcttgagtgtaaaaccagacaaatgcaagattttgaagaaaacagtcgatcagatacagctaatgaagagaatggaacaagagaaatcaacaactgatgacgatgtacagaaatcagacatctcatcaagtagtcaaggagtgatagaaaaggaatccttgggacctcttcttttggaggctttggatggatttttctttgttgtgaactgtgaagggagaattgtatttgtgtcagagaatgtaaccagctacttaggttacaatcaggaggaattaatgaataccagcgtctacagcatactgcacgtgggggatcatgcagaatttgtgaagaatctgctaccaaaatcactagtaaatggagttccttggcctcaagaggcaacacgacgaaatagccatacctttaactgcaggatgctaattcaccctccagatgagccagggaccgagaaccaagaagcttgccagcgttatgaagtaatgcagtgtttcactgtgtcacagccaaaatcaattcaagaggatggagaagatttccagtcatgtctgatttgtattgcacggcgattacctcggcctccagctattacgggtgtagaatcctttatgaccaagcaagatactacaggtaaaatcatctctattgatactagttccctgagagctgctggcagaactggttgggaagatttagtgaggaagtgcatttatgcttttttccaacctcagggcagagaaccatcttatgccagacagctgttccaagaagtgatgactcgtggcactgcctccagcccctcctatagattcatattgaatgatgggacaatgcttagcgcccacaccaagtgtaaactttgctaccctcaaagtccagacatgcaacctttcatcatgggaattcatatcatcgacagggagcacagtgggctttctcctcaagatgacactaattctggaatgtcaattccccgagtaaatccctcggtcaatcctagtatctctccagctcatggtgtggctcgttcatccacattgccaccatccaacagcaacatggtatccaccagaataaaccgccagcagagctcagaccttcatagcagcagtcatagtaattctagcaacagccaaggaagtttcggatgctcacccggaagtcagattgtagccaatgttgccttaaaccaaggacaggccagttcacagagcagtaatccctctttaaacctcaataattctcctatggaaggtacaggaatatccctagcacagttcatgtctccaaggagacaggttacttctggattggcaacaaggcccaggatgccaaacaattcctttcctcctaatatttcgacattaagctctcccgttggcatgacaagtagtgcctgtaataataataaccgatcttattcaaacatcccagtaacatctttacagggtatgaatgaaggacccaataactccgttggcttctctgccagttctccagtcctcaggcagatgagctcacagaattcacctagcagattaaatatacaaccagcaaaagctgagtccaaagataacaaagagattgcctcaattttaaatgaaatgattcaatctgacaacagctctagtgatggcaaacctctggattcagggcttctgcataacaatgacagactttcagatggagacagtaaatactctcaaaccagtcacaaactagtgcagcttttgacaacaactgccgaacagcagttacggcatgctgatatagacacaagctgcaaagatgtcctgtcttgcacaggcacttccaactctgcctctgctaactcttcaggaggttcttgtccctcttctcatagctcattgacagaacggcataaaattctacaccggctcttacaggagggtagcccctcagatatcaccactttgtctgtcgagcctgataaaaaggacagtgcatctacttctgtgtcagtgactggacaggtacaaggaaactccagtataaaactagaactggatgcttcaaaaaaaaaagaatcaaaagaccatcagctcctacgctatcttttagataaagatgagaaagatttaagatcaactccaaacctgagcctggatgatgtaaaggtgaaagtggaaaagaaagaacagatggatccatgtaatacaaacccaaccccaatgaccaaacccactcctgaggaaataaaactggaggcccagagccagtttacagctgaccttgaccagtttgatcagttactgcccacgctggagaaggcagcacagttgccaggcttatgtgagacagacaggatggatggtgcggtcaccagtgtaaccatcaaatcggagatcctgccagcttcacttcagtccgccactgccagacccacttccaggctaaatagattacctgagctggaattggaagcaattgataaccaatttggacaaccaggaacaggcgatcagattccatggacaaataatacagtgacagctataaatcagagtaaatcagaagaccagtgtattagctcacaattagatgagcttctctgtccacccacaacagtagaagggagaaatgatgagaaggctcttcttgaacagctggtatccttccttagtggcaaagatgaaactgagctagctgaactagacagagctctgggaattgacaaacttgttcaggggggtggattagatgtattatcagagagatttccaccacaacaagcaacgccacctttgatcatggaagaaagacccaacctttattcccagccttactcttctccttctcctactgccaatctccctagccctttccaaggcatggtcaggcaaaaaccttcactggggacgatgcctgttcaagtaacacctccccgaggtgctttttcacctggcatgggcatgcagcccaggcaaactctaaacagacctccggctgcacctaaccagcttcgacttcaactacagcagcgattacagggacaacagcagttgatacaccaaaatcggcaagctatcttaaaccagtttgcagcaactgctcctgttggcatcaatatgagatcaggcatgcaacagcaaattacacctcagccacccctgaatgctcaaatgttggcacaacgtcagcgggaactgtacagtcaacagcaccgacagaggcagctaatacagcagcaaagagccatgcttatgaggcagcaaagctttgggaacaacctccctccctcatctggactaccagttcaaatggggaacccccgtcttcctcagggtgctccacagcaattcccctatccaccaaactatggtacaaatccaggaaccccacctgcttctaccagcccgttttcacaactagcagcaaatcctgaagcatccttggccaaccgcaacagcatggtgagcagaggcatgacaggaaacataggaggacagtttggcactggaatcaatcctcagatgcagcagaatgtcttccagtatccaggagcaggaatggttccccaaggtgaggccaactttgctccatctctaagccctgggagctccatggtgccgatgccaatccctcctcctcagagttctctgctccagcaaactccacctgcctccgggtatcagtcaccagacatgaaggcctggcagcaaggagcgataggaaacaacaatgtgttcagtcaagctgtccagaaccagcccacgcctgcacagccaggagtatacaacaacatgagcatcaccgtttccatggcaggtggaaatacgaatgttcagaacatgaacccaatgatggcccagatgcagatgagctctttgcagatgccaggaatgaacactgtgtgccctgagcagataaatgatcccgcactgagacacacaggcctctactgcaaccagctctcatccactgaccttctcaaaacagaagcagatggaacccagcaggtgcaacaggttcaggtgtttgctgacgtccagtgtacagtgaatctggtaggcggggacccttacctgaaccagcctggtccactgggaactcaaaagcccacgtcaggaccacagaccccccaggcccagcagaagagcctccttcagcagctactgactgaataaccacttttaaaggaatgtgaaatttaaataatagacatacagagatatacaaatatattatatatttttctgagatttttgatatctcaatctgcagccattcttcaggtcgtagcatttggagcaaaaaaaaaaaaaaaaaaaaaaaaaaaggagtttgcttttgtcgggagattgaaagatgtttttgtttctttctttgtaaaggccttggatattgaaaaaataccaaggcagaacagttggacaatctatttcttgagccaaatttaattattcttatttttgtaatcagtcattggcttcttatctggatgaaggcttttggaggagaaccaaaacgacaagttccaagaagaagatgaagctccgcctccgccgcttagtcccaaccctgcccaggaagaagggcccgtggggctttgcctgtgcccgtccaccaaaggctgtcatgtgtctcgaaatcagcagccctccccatcccaatcccaggcagcttgtgtgtacaatcagcttctctagcaactctgtatctgttggcttcaagagaatattttgcctccacatatgtaccccttctcctttttttaaagatggatttaaaccaagatgcctccaggaaagaggacgaaatgagtatattcacagaggaatccaaaaaatacagtttgggggaaaatgcaataatttttgatgagatgggtgaaggacaagaagtgagttgtgtcaattattgtagatacaattttctgattaaatctggaaaaataaaaggcagcctgttttttctgcttttattgtattaacagctgaggtagctaaagttatttaaaataaaattaaatttatgatccaagtagcttatttttccctttaaatctcattgtaaatatatttgatttcttgtagaaattgatttccttctgtttaattttatgcttttattatactcttgatttttctaaatttgtgtgtgaaatataacattgattgaattgcagttacatttggttagtaatatttcattattttaataactgtgatgtcatgtatggatttactttggggttcaaatcaaaatgtcactgccagaaagagctgttccagctgatctagagcatactgccctagagtgtccctgggatcatctgaacagaagtgcacaggctacttgtacagagaaaaaattaatactcaaaggaaatcttcattttttagattgactttgggaatttgaattttcatcagtgcaaatataaatttctctatcctgctctgaggctaattggtaccatattttccctttgtgtcttgtgactctgccacatcccatctcatcctggcctctgagtcaagaacccagtgaactgactttctagttctagaagttccgctgcaaggccaggaaagcttgagaaaggtattgtggaagaagcaaaggtagacccccatcactcacctttgtctgcatccctgggcctgtgaatgatgacagcacctgacattctgcaccagctacctctgcctccatggcagagaaaaggccataagaacagtggaagaggagcatggactcagacttcaaggaagaagccatttccccaggtccttccttctgcatctcaccacccctagttacaaataactccattgaacagcatctattcagaaactatgccgaataaaaagattggtggaagggctcatgtggttagcaactatgaaacagaaataggacactcagttacaaacattatctcctttagtttttcagaaaatgcatccctgatttcattcatttccagcttgaaagccagccatattactctagtccctaccaaactgctctagaaggtcatttccattttgtttgtgatatttagacgcgcagacttcaggaagttcacctttaacttcagcattccagatgaagtttcctgactcagtgcttttgcataaggaactagaaaaaaaaagtaaggaaaattggagatgctaacatcctcccccatcccaactgcaccttaaaatatgcatgtcaccttcaaggttttataattgcactgtttgttttatgtatgtacagattaaaattattgctacatttgaggaaaataaaattgcttgcttctatgtaattcctgtcattccacaggaaattcacttttccagctactgaatagaatttgtttaacaacctcatgggttgcctcttcatttacagggaagaaatgaaatgtacatctgcagaaattgccaaagcccaaattaacgagtattataaaaggataataaagcatccctgaagcc

SEQ ID NO: 1939 - protein, 1507 aa, Homo sapien
  unsure 12: unknown amino acid
LRGLEINRLFIXLALNEVRVKRLEPSLENIIIPFPGKLPSGTQDLTISVLRIHYEQRSLPGVKFFNMSGLGDSSSDPANPDSHKRKGSPCDTLASSTEKRRREQENKYLEELAELLSANISDIDSLSVKPDKCKILKKTVDQIQLMKRMEQEKSTTDDDVQKSDISSSSQGVIEKESLGPLLLEALDGFFFVVNCEGRIVFVSENVTSYLGYNQEELMNTSVYSILHVGDHAEFVKNLLPKSLVNGVPWPQEATRRNSHTFNCRMLIHPPDEPGTENQEACQRYEVMQCFTVSQPKSIQEDGEDFQSCLICIARRLPRPPAITGVESFMTKQDTTGKIISIDTSSLRAAGRTGWEDLVRKCIYAFFQPQGREPSYARQLFQEVMTRGTASSPSYRFILNDGTMLSAHTKCKLCYPQSPDMQPFIMGIHIIDREHSGLSPQDDTNSGMSIPRVNPSVNPSISPAHGVARSSTLPPSNSNMVSTRINRQQSSDLHSSSHSNSSNSQGSFGCSPGSQIVANVALNQGQASSQSSNPSLNLNNSPMEGTGISLAQFMSPRRQVTSGLATRPRMPNNSFPPNISTLSSPVGMTSSACNNNNRSYSNIPVTSLQGMNEGPNNSVGFSASSPVLRQMSSQNSPSRLNIQPAKAESKDNKEIASILNEMIQSDNSSSDGKPLDSGLLHNNDRLSDGDSKYSQTSHKLVQLLTTTAEQQLRHADIDTSCKDVLSCTGTSNSASANSSGGSCPSSHSSLTERHKILHRLLQEGSPSDITTLSVEPDKKDSASTSVSVTGQVQGNSSIKLELDASKKKESKDHQLLRYLLDKDEKDLRSTPNLSLDDVKVKVEKKEQMDPCNTNPTPMTKPTPEEIKLEAQSQFTADLDQFDQLLPTLEKAAQLPGLCETDRMDGAVTSVTIKSEILPASLQSATARPTSRLNRLPELELEAIDNQFGQPGTGDQIPWTNNTVTAINQSKSEDQCISSQLDELLCPPTTVEGRNDEKALLEQLVSFLSGKDETELAELDRALGIDKLVQGGGLDVLSERFPPQQATPPLIMEERPNLYSQPYSSPSPTANLPSPFQGMVRQKPSLGTMPVQVTPPRGAFSPGMGMQPRQTLNRPPAAPNQLRLQLQQRLQGQQQLIHQNRQAILNQFAATAPVGINMRSGMQQQITPQPPLNAQMLAQRQRELYSQQHRQRQLIQQQRAMLMRQQSFGNNLPPSSGLPVQMGNPRLPQGAPQQFPYPPNYGTNPGTPPASTSPFSQLAANPEASLANRNSMVSRGMTGNIGGQFGTGINPQMQQNVFQYPGAGMVPQGEANFAPSLSPGSSMVPMPIPPPQSSLLQQTPPASGYQSPDMKAWQQGAIGNNNVFSQAVQNQPTPAQPGVYNNMSITVSMAGGNTNVQNMNPMMAQMQMSSLQMPGMNTVCPEQINDPALRHTGLYCNQLSSTDLLKTEADGTQQVQQVQVFADVQCTVNLVGGDPYLNQPGPLGTQKPTSGPQTPQAQQKSLLQQLLTE

SEQ ID NO: 1940 - DNA, 2422 bp, Homo sapien
gtcagcctcccttccaccgccatattgggccactaaaaaaagggggctcgtcttttcggggtgtttttctccccctcccctgtccccgcttgctcacggctctgcgactccgacgccggcaaggtttggagagcggctgggttcgcgggacccgcgggcttgcacccgcccagactcggacgggctttgccaccctctccgcttgcctggtcccctctcctctccgccctcccgctcgccagtccatttgatcagcggagactcggcggccgggccggggcttccccgcagcccctgcgcgctcctagagctcgggccgtggctcgtcggggtctgtgtcttttggctccgagggcagtcgctgggcttccgagaggggttcgggccgcgtaggggcgctttgttttgttcggttttgtttttttgagagtgcgagagaggcggtcgtgcagacccgggagaaagatgtcaaacgtgcgagtgtctaacgggagccctagcctggagcggatggacgccaggcaggcggagcaccccaagccctcggcctgcaggaacctcttcggcccggtggaccacgaagagttaacccgggacttggagaagcactgcagagacatggaagaggcgagccagcgcaagtggaatttcgattttcagaatcacaaacccctagagggcaagtacgagtggcaagaggtggagaagggcagcttgcccgagttctactacagacccccgcggccccccaaaggtgcctgcaaggtgccggcgcaggagagccaggatgtcagcgggagccgcccggcggcgcctttaattggggctccggctaactctgaggacacgcatttggtggacccaaagactgatccgtcggacagccagacggggttagcggagcaatgcgcaggaataaggaagcgacctgcaaccgacgattcttctactcaaaacaaaagagccaacagaacagaagaaaatgtttcagacggttccccaaatgccggttctgtggagcagacgcccaagaagcctggcctcagaagacgtcaaacgtaaacagctcgaattaagaatatgtttccttgtttatcagatacatcactgcttgatgaagcaaggaagatatacatgaaaattttaaaaatacatatcgctgacttcatggaatggacatcctgtataagcactgaaaaacaacaacacaataacactaaaattttaggcactcttaaatgatctgcctctaaaagcgttggatgtagcattatgcaattaggtttttccttatttgcttcattgtactacctgtgtatatagtttttaccttttatgtagcacataaactttggggaagggagggcagggtggggctgaggaactgacgtggagcggggtatgaagagcttgctttgatttacagcaagtagataaatatttgacttgcatgaagagaagcaattttggggaagggtttgaattgttttctttaaagatgtaatgtccctttcagagacagctgatacttcatttaaaaaaatcacaaaaatttgaacactggctaaagataattgctatttatttttacaagaagtttattctcatttgggagatctggtgatctcccaagctatctaaagtttgttagatagctgcatgtggcttttttaaaaaagcaacagaaacctatcctcactgccctccccagtctctcttaaagttggaatttaccagttaattactcagcagaatggtgatcactccaggtagtttggggcaaaaatccgaggtgcttgggagttttgaatgttaagaattgaccatctgcttttattaaatttgttgacaaaattttctcattttcttttcacttcgggctgtgtaaacacagtcaaaataattctaaatccctcgatatttttaaagatctgtaagtaacttcacattaaaaaatgaaatattttttaatttaaagcttactctgtccatttatccacaggaaagtgttatttttaaaggaaggttcatgtagagaaaagcacacttgtaggataagtgaaatggatactacatctttaaacagtatttcattgcctgtgtatggaaaaaccatttgaagtgtacctgtgtacataactctgtaaaaacactgaaaaattatactaacttatttatgttaaaagattttttttaatctagacaatatacaagccaaagtggcatgttttgtgcatttgtaaatgctgtgttgggtagaataggttttcccctcttttgttaaataatatggctatgcttaaaaggttgcatactgagccaagtataattttttgtaatgtgtgaaaaagatgccaattattgttacacattaagtaatcaataaagaaaacttccatagctaaaaaaaaaaaaaaaaaaa

SEQ ID NO: 1941 - protein, 198 aa, Homo sapien
MSNVRVSNGSPSLERMDARQAEHPKPSACRNLFGPVDHEELTRDLEKHCRDMEEASQRKWNFDFQNHKPLEGKYEWQEVEKGSLPEFYYRPPRPPKGACKVPAQESQDVSGSRPAAPLIGAPANSEDTHLVDPKTDPSDSQTGLAEQCAGIRKRPATDDSSTQNKRANRTEENVSDGSPNAGSVEQTPKKPGLRRRQT

SEQ ID NO: 1942 - DNA, 1916 bp, Homo sapien
ggcacgagggccggagtcgtcttcgggacgcgcctgctcttcgcctttcgctgcagtccgtcgatttctttctccaggaagaaaaatggcatccgttgcagttgatccacaaccgagtgtggtgactcgggtggtcaacctgcccttggtgagctccacgtatgacctcatgtcctcagcctatctcagtacaaaggaccagtatccctacctgaagtctgtgtgtgagatggcagagaacggtgtgaagaccatcacctccgtggccatgaccagtgctctgcccatcatccagaagctagagccgcaaattgcagttgccaatacctatgcctgtaaggggctagacaggattgaggagagactgcctattctgaatcagccatcaactcagattgttgccaatgccaaaggcgctgtgactggggcaaaagatgctgtgacgactactgtgactggggccaaggattctgtggccagcacgatcacaggggtgatggacaagaccaaaggggcagtgactggcagtgtggagaagaccaagtctgtggtcagtggcagcattaacacagtcttggggagtcggatgatgcagctcgtgagcagtggcgtagaaaatgcactcaccaaatcagagctgttggtagaacagtacctccctctcactgaggaagaactagaaaaagaagcaaaaaaagttgaaggatttgatctggttcagaagccaagttattatgttagactgggatccctgtctaccaagcttcactcccgtgcctaccagcaggctctcagcagggttaaagaagctaagcaaaaaagccaacagaccatttctcagctccattctactgttcacctgattgaatttgccaggaagaatgtgtatagtgccaatcagaaaattcaggatgctcaggataagctctacctctcatgggtagagtggaaaaggagcattggatatgatgatactgatgagtcccactgtgctgagcacattgagtcacgtactcttgcaattgcccgcaacctgactcagcagctccagaccacgtgccacaccctcctgtccaacatccaaggtgtaccacagaacatccaagatcaagccaagcacatgggggtgatggcaggcgacatctactcagtgttccgcaatgctgcctcctttaaagaagtgtctgacagcctcctcacttctagcaaggggcagctgcagaaaatgaaggaatctttagatgacgtgatggattatcttgttaacaacacgcccctcaactggctggtaggtcccttttatcctcagctgactgagtctcagaatgctcaggaccaaggtgcagagatggacaagagcagccaggagacccagcgatctgagcataaaactcattaaacctgcccctatcactagtgcatgctgtggccagacagatgacaccttttgttatgttgaaattaacttgctaggcaaccctaaattgggaagcaagtagctagtataaaggccctcaattgtagttgtttccagctgaattaagagctttaaagtttctggcattagcagatgatttctgttcacctggtaagaaaagaatgataggcttgtcagagcctatagccagaactcagaaaaaattcaaatgcacttatgttctcattctatggccattgtgttgcctctgttactgtttgtattgaataaaaacatcttcatgtgggctggggtagaaactggtgtctgctctggtgtgatctgaaaaggcgtcttcactgctttatctcatgatgcttgcttgtaaaacttgattttagtttttcatttctcaaataggaatactacctttgaattcaataaaattcactgcaggataaataaaaaaaaaaaaaaaaaaaaaaaaaaaaaaaaaaaa

SEQ ID NO: 1943 - protein, 437 aa, Homo sapien
MASVAVDPQPSVVTRVVNLPLVSSTYDLMSSAYLSTKDQYPYLKSVCEMAENGVKTITSVAMTSALPIIQKLEPQIAVANTYACKGLDRIEERLPILNQPSTQIVANAKGAVTGAKDAVTTTVTGAKDSVASTITGVMDKTKGAVTGSVEKTKSVVSGSINTVLGSRMMQLVSSGVENALTKSELLVEQYLPLTEEELEKEAKKVEGFDLVQKPSYYVRLGSLSTKLHSRAYQQALSRVKEAKQKSQQTISQLHSTVHLIEFARKNVYSANQKIQDAQDKLYLSWVEWKRSIGYDDTDESHCAEHIESRTLAIARNLTQQLQTTCHTLLSNIQGVPQNIQDQAKHMGVMAGDIYSVFRNAASFKEVSDSLLTSSKGQLQKMKESLDDVMDYLVNNTPLNWLVGPFYPQLTESQNAQDQGAEMDKSSQETQRSEHKTH

SEQ ID NO: 1944 - DNA, 1641 bp, Homo sapien
tcagcgggaggggctggaccccgcgttcctcctccctgccggtccccatccttaaagcgagagtctggacgccccgcctgtgggagagagcgccgggatccggacggggagcaaccggggcaggccgtgccggctgaggaggtcctgaggctacagagctgccgcggctggcacacgagcgcctcggcactaaccgagtgttcgcgggggctgtgaggggagggccccgggcgccattgctggcggtgggagcgccgcccggtctcagcccgccctcggctgctctcctcctccggctgggaggggccgtagctcggggccgtcgccagccccggcccgggctcgagaatcaagggcctcggccgccgtcccgcagctcagtccatcgcccttgccgggcagcccgggcagagaccatgtttgacaagacgcggctgccgtacgtggccctcgatgtgctctgcgtgttgctggcttccatgcctatggctgttctaaaattgggccaaatatatccatttcagagaggctttttctgtaaagacaacagcatcaactatccgtaccatgacagtaccgtcacatccactgtcctcatcctagtgggggttggcttgcccatttcctctattattcttggagaaaccctgtctgtttactgtaaccttttgcactcaaattcctttatcaggaataactacatagccactatttacaaagccattggaacctttttatttggtgcagctgctagtcagtccctgactgacattgccaagtattcaataggcagactgcggcctcacttcttggatgtttgtgatccagattggtcaaaaatcaactgcagcgatggttacattgaatactacatatgtcgagggaatgcagaaagagttaaggaaggcaggttgtccttctattcaggccactcttcgttttccatgtactgcatgctgtttgtggcactttatcttcaagccaggatgaagggagactgggcaagactcttacgccccacactgcaatttggtcttgttgccgtatccatttatgtgggcctttctcgagtttctgattataaacaccactggagcgatgtgttgactggactcattcagggagctctggttgcaatattagttgctgtatatgtatcggatttcttcaaagaaagaacttcttttaaagaaagaaaagaggaggactctcatacaactctgcatgaaacaccaacaactgggaatcactatccgagcaatcaccagccttgaaaggcagcagggtgcccaggtgaagctggcctgttttctaaaggaaaatgattgccacaaggcaagaggatgcatctttcttcctggtgtacaagcctttaaagacttctgctgctgctatgcctcttggatgcacactttgtgtgtacatagttacctttaactcagtggttatctaatagctctaaactcattaaaaaaactccaagccttccaccaaaacagtgccccacctgtatacatttttattaaaaaaatgtaatgcttatgtataaacatgtatgtaatatgctttctatgaatgatgtttgatttaaatataatacatattaaaatgtatgggagaaccaaaaaaaaaaaaaaaaaa

SEQ ID NO: 1945 - protein, 285 aa, Homo sapien
MFDKTRLPYVALDVLCVLLASMPMAVLKLGQIYPFQRGFFCKDNSINYPYHDSTVTSTVLILVGVGLPISSIILGETLSVYCNLLHSNSFIRNNYIATIYKAIGTFLFGAAASQSLTDIAKYSIGRLRPHFLDVCDPDWSKINCSDGYIEYYICRGNAERVKEGRLSFYSGHSSFSMYCMLFVALYLQARMKGDWARLLRPTLQFGLVAVSIYVGLSRVSDYKHHWSDVLTGLIQGALVAILVAVYVSDFFKERTSFKERKEEDSHTTLHETPTTGNHYPSNHQP

SEQ ID NO: 1946 - DNA, 2765 bp, Homo sapien
ggcacgagggaaagggagtgttcgggtttcgctggggcctcgcggctccagagcccagcatggcttcctcgcgagcctcttccacgcaggcaaccaaaactaaagcacccgacgacttagttgctccggtcgtgaagaaaccacacatctattatggaagtttggaagagaaggagagggagcgtctggccaaaggagagtctgggattttggggaaagacggacttaaagcagggatcgaagctggaaatattaatataacctctggagaagtgtttgaaattgaagagcatatcagcgagcgacaggcagaagtattggctgagtttgagagaaggaagcgagcccggcagatcaatgtttccacagatgactcagaggtcaaagcttgccttagagccttgggggaacccatcacactttttggagagggtcctgctgaaagaagagaaaggttaagaaatatcctctcagttgtcggtactgatgccttgaaaaagaccaaaaaggatgatgagaagtctaaaaagtccaaagaagagtatcagcaaacctggtatcatgaaggaccaaatagcttgaaggtggcaagactatggattgctaattattcgttgcccagggcaatgaaacgcttggaagaggcccgactccataaggagattcctgagacaacaaggacctcccagatgcaagagctgcacaagtctctccggtctttgaataatttttgcagtcagattggggatgatcggcctatctcctactgtcactttagtcccaattccaagatgctggccacagcttgttggagtgggctttgcaagctctggtctgttcctgattgcaacctccttcacactcttcgagggcataacacaaatgtaggagcaattgtattccatcccaaatccactgtctccttggacccaaaagatgtcaacctggcctcttgtgcggctgatggctctgtgaagctttggagtctcgacagtgatgaaccagtggcagatattgaaggccatacagtgcgtgtggcgcgggtaatgtggcatccttcaggacgtttcctgggcaccacctgctatgaccgttcatggcgcttatgggatttggaggctcaagaggagatcctgcatcaggaaggccatagcatgggtgtgtatgacattgccttccatcaagatggctctttggctggcactgggggactggatgcatttggtcgagtttgggacctacgcacaggacgttgtatcatgttcttagaaggccacctgaaagaaatctatggaataaatttctcccccaatggctatcacattgcaaccggcagtggtgacaacacctgcaaagtgtgggacctccgacagcggcgttgcgtctacaccatccctgctcatcagaacttagtgactggtgtcaagtttgagcctatccatgggaacttcttgcttactggtgcctatgataacacagccaagatctggacgcacccaggctggtccccgctgaagactctggctggccacgaaggcaaagtgatgggcctagatatttcttccgatgggcagctcatagccacttgctcatatgacaggaccttcaagctgtggatggctgaatagatgacaatgggaaaaggacttgaacctcaagctctctctaaggagctgttttcctcaaacgagaagaattgaagtgtttagttctatcatgttttctgccaattaccatgcatagaccctcagtagaattggatttccatgtcagcccccactccaggaaggcagcccaatccctaggtgatggggaacccctctcacggttgaaaatttattacctttttacgccctgccacgaactgtgtagacattgtttttattaatcttttgtttggccgggcgtggtggctcacgcctgtaatcctagcactttgggaggccgaggtgggtagatcgcttgagctcaggagttcaagacgagcctgggcaacatggcaaatgccgtctctgcaaaaaaatactaaaattagctggtcgcggtggcttctgcctgtgattccggctacttgggaggctgaggtgggagggattgcttaagcctgggaggcagaggttgcagtgagccgagattgcgccattgcactctagcctgtgtgacagagcaagaccctgtctcaaaaaaaaaaaaaatttgttcgaatgccttatagccttcctcacagcacccaggattgtgactgactctgcatttttaattcttgaaacttggctttccataacatggtacatgcttcaggactacatatgacccagagagcaaggtggctgaactatagtctggaagccctcaggtaaagaggcacatctcaccactcattggttaaacaatgcatcatagcgagcacttttcctttccctggagaatgggatgtgaagcagtagaccgcagccacgccgatggttatacagtgaagaagacttcacctcttcctattgagtttgcttggaatgctgacagcatcaggcaactctgaactgaacatttgctttgtcagaaaatatctttttttttactttgaagtttggcaaccttcatgttaccccaaagcaaaaccattgtgtcaggagtcaaacaaatgtttagaaagcaaacatgacgtctctattgtacaacctcctttctcttggctgtttaaaggatgtacttcgtgtattaaagggtactttatgttgaagtaaaaaaaaaaaaaaaaaaaaaaa

SEQ ID NO: 1947 - protein, 522 aa, Homo sapien
MASSRASSTQATKTKAPDDLVAPVVKKPHIYYGSLEEKERERLAKGESGILGKDGLKAGIEAGNINITSGEVFEIEEHISERQAEVLAEFERRKRARQINVSTDDSEVKACLRALGEPITLFGEGPAERRERLRNILSVVGTDALKKTKKDDEKSKKSKEEYQQTWYHEGPNSLKVARLWIANYSLPRAMKRLEEARLHKEIPETTRTSQMQELHKSLRSLNNFCSQIGDDRPISYCHFSPNSKMLATACWSGLCKLWSVPDCNLLHTLRGHNTNVGAIVFHPKSTVSLDPKDVNLASCAADGSVKLWSLDSDEPVADIEGHTVRVARVMWHPSGRFLGTTCYDRSWRLWDLEAQEEILHQEGHSMGVYDIAFHQDGSLAGTGGLDAFGRVWDLRTGRCIMFLEGHLKEIYGINFSPNGYHIATGSGDNTCKVWDLRQRRCVYTIPAHQNLVTGVKFEPIHGNFLLTGAYDNTAKIWTHPGWSPLKTLAGHEGKVMGLDISSDGQLIATCSYDRTFKLWMAE

SEQ ID NO: 1948 - DNA, 914 bp, Homo sapien
aattagccaggcagtggtggtgggcgcctgtagtcccagctacttgggaggctgaggcaggagaatggtgtgaacccgggagatggcgctgcagatgagctgagatgcactccagcctgggcgacaggctcaaaaaagaaaaaaaaaagaacaccgatcatgtgcttcttggatctggtgactgttctctccctgttttcctttctttttgggtgtttgaggagcatggcttagcttgagacacacacagacactgtgtacttcagtgaagggcttaatatacagtttccaaacctgacgactcttcttcttgtaatggctgcccttttcctacctgaggccgtcttagagaaaggggccagtctcctctaatgctcagatttcccatagttggcttttgctgtgtctcctgcctcaggcagtgtcatttctgggagcaggtggttgtagtccaggcccctccccagcagggtctgcccaggctccttcgagcccctttccccgcctcctctcagcctgtccggatgacagtgttcgcctcctgtttagactgtacactcttcaggggtaggggtgccgtcagttcttcaatcagctggcacacacttgtatagtgaaatgtttacatgtgggaaaactccgccttagacaaactaccaaagtacaatcgtgtctctctctagccggaatgctacagagagaaatggaaccttagatttgcaacaaaagtctgtaaactggtctgtttgccaaagtgaacactggatgactaaggagctgaagaaggcccccagaagcggatttgtggtgggttattttattttgcctgtggccaatcttctgtgaaatacaatgtgctgttggtgcaacagatgattcaataaatgtctacagcagaaaaaaaaaaaaaaggg

SEQ ID NO: 1949 - protein, 80 aa, Homo sapien
MLRFPIVGFCCVSCLRQCHFWEQVVVVQAPPQQGLPRLLRAPFPASSQPVRMTVFASCLDCTLFRGRGAVSSSISWHTLV

SEQ ID NO: 1950 - DNA, 2194 bp, Homo sapien
cctcgtgccgagcgacccgggcaagcgacccgggcgcggcgcggggaggctgaagggacgctcgggtaggcaagcgtttgcctcagcatggagggcggggcctcggcagccacccccacagcactgccttactacgtggccttctcccagctgctgggcctgaccttggtggccatgaccggcgcgtggctcgggctgtaccgaggcggcattgcctgggagagcgacctgcagttcaacgcgcaccccctctgcatggtcataggcctgatcttcctgcagggaaatgccctgctggtttaccgtgtcttcaggaacgaagctaaacgcaccaccaaggtcctgcacgggctgctgcacatctttgcgctcgtcatcgccctggttggcttggtggcggtgttcgactaccacaggaagaagggctacgctgacctgtacagcctacacagctggtgcgggatccttgtctttgtcctgtactttgtgcagtggctggtgggcttcagcttcttcctgttccccggagcttcattctccctgcggagccgctaccgcccacagcacatcttctttggtgctaccatcttcctcctttccgtgggcaccgccctgctgggcctgaaggaggcactgctgttcaacctcgggggcaagtatagcgcatttgagcccgagggtgtcctggccaacgtgctgggcctgctgctggcctgcttcggtggggcggtgctctacatcttgacccgggccgactggaagcggccttcccaggcggaagagcaggccctctccatggacttcaagacgctgacggagggagatagccccggctcccagtgatgcgcccggccggccctgggggttcgcggggtgtcttcttgcctgcccctgctgaggcgtcttcaggactgcaggctccggagagtggctctggcagcaggcgggcgcgtgggtgcagctgcatctgtttgagtgctgctttctggggtcaggtctccgcctcctctgcttctcctttctccgctgctatagaccagttcattgtgtgtggctcccgtgtctctgttgcccccttcagtgcagaaggctttgggtaggacttcgggtgttcggtcctggtcgcagagcacagatctttaaagaagcgagagaggaggccccaccctcctggcagcagatgcctggggcaaggccaggggaaactgggggggcctcagggacaggcctggaaaggccacgatggctgctgaattcaaacaaggagtccctccagcctgaataacacgtggcacaaatgggcccggcctttggcagaggagcaagtgatatgatgtgtaaagtatgttggtggtgaaagcaaggttccccaggagaggggagggactggcccctgggaagctctgagatgaggctgtggcccagctgtagtcctgaccttcctcttctttaaccctttagccctaggatggctttggtgggagaggggatagaagcccatgacttcagacagactttctcttggcagatgcaggcgggcctcctcccaggctgctccagacatgggggttggggatggggggcaccttgcagccccttcctgctggggctccctccttgtagcaccccccttgcggctcagctctggtttcctctcccaggctcacccaggctctgctcaggctgggaggcagagggcacaaaccttataattttttaaatgaaaaaccgctgctgctggctgtggctagagccccctggggctgctggagctgctgcctctgttctggaggacgagccttctccttatctgctgcccatctttccaggaagtcaggatggagtcagaacaactacagtcatcccccgtggtgtctgcacatcactccagccccataaagagtgtcatgttagctgagtcaccatttggcttcggcctggaaatagtgtgattagaacactgatcgtgtgcgaggccaggagatcaagaccatcctgactaacaaacacagtgaaaccccgtctctactaaaaatacaaaaaaattagccaggcgtggtggtgggcgcctgtagtcccagctacttgggaggctgaggcaggagaatggtgtgaacccgggagatggcgcttgcagtgagctgagattgcactccagcctgggcgacaggctcaaaaaaaaaaaaaaaaaaaa

SEQ ID NO: 1951 - protein, 251 aa, Homo sapien
MEGGAAAATPTALPYYVAFSQLLGLTLVAMTGAWLGLYRGGIAWESDLQFNAHPLCMVIGLIFLQGNALLVYRVFRNEAKRTTKVLHGLLHIFALVIALVGLVAVFDYHRKKGYADLYSLHSWCGILVFVLYFVQWLVGFSFFLFPGASFSLRSRYRPQHIFFGATIFLLPVGTALLGLKEALLFNLGGKYSAFEPEGVLANVLGLLLACFGGAVLYILTRADWKRPSQAEEQALSMDFKTLRQGDSPGSQ

SEQ ID NO: 1952 - DNA, 10211 bp, Homo sapien; identical to SEQ ID NO: 1681

SEQ ID NO: 1953 - protein, 3113 aa, Homo sapien
MSWALEEWKEGLPTRALQKIQELEGQLDKLKKEKQQRQFQLDSLEAAPQKQTQKVENEKTEGTNLKRENQRLMEICESLEKTKQKISHELQVKESQVNFQEGQLNSGKKQIEKLEQELKRCKSELERSQQAAQSADVSLNPCNTPQKIFTTPLTPSQYYSGSKYEDLKEKYNKEVEERKRLEAEVKALQAKKASQTLPQATMNHRDIARHQASSSVFSWQQEKTPSHLSSNSQRTPIRRDFSASYFSGEQEVTPSRSTLQIGKRDANSSFFDNSSSPHLLDQLKAQNQELRNKINELELRLQGHEKEMKGQVNKFQELQLQLEKAKVELIEKEKVLNKCRDELVRTTAQYDQASTKYTALEQKLKKLTEDLSCQRQNAESARCSLEQKIKEKEKEFQEELSRQQRSFQTLDQECIQMKARLTQELQQAKNMHNVLQAELDKLTSVKQQLENNLEEFKQKLCRAEQAFQASQIKENELRRSMEEMKKENNLLKSHSEQKAREVCHLEAELKNIKQCLNQSQNFAEEMKAKNTSQETMLRDLQEKINQQENSLTLEKLKLAVADLEKQRDCSQDLLKKREHHIEQLNDKLSKTEKESKALLSALELKKKEYELKEEKTLFSCWKSENEKLLTQMESEKENLQSKINHLETCLKTQQIKSHEYNERVRTLEMDRENLSVEIRNLHNVLDSKSVEVETQKLAYMELQQKAEFSDQKHQKEIENMCLKTSQLTGQVEDLEHKLQLLSNEIMDKDRCYQDLHAEYESLRDLLKSKDASLVTNEDHQRSLLAFDQQPAMHHSFANIIGEQGSMPSERSECRLEADQSPKNSAILQNRVDSLEFSLESQKQMNSDLQKQCEELVQIKGEIEENLMKAEQMHQSFVAETSQRISKLQEDTSAHQNVVAETLSALENKEKELQLLNDKVETEQAEIQELKKSNHLLEDSLKELQLLSETLSLEKKEMSSIISLNKREIEELTQENGTLKEINASLNQEKMNLIQKSESFANYIDEREKSISELSDQYKQEKLILLQRCEETGNAYEDLSQKYKAAQEKNSKLECLLNECTSLCENRKNELEQLKEAFAKEHQEFLTKLAFAEERNQNLMLELETVQQALRSEMTDNQNNSKSEAGGLKQEIMTLKEEQNKMQKEVNDLLQENEQLMKVMKTKHECQNLESEPIRNSVKERESERNQCNFKPQMDLEVKEISLDSYNAQLVQLEAMLRNKELKLQESEKEKECLQHELQTIRGDLETSNLQDMQSQEISGLKDCEIDAEEKYISGPHELSTSQNDNAHLQCSLQTTMNKLNELEKICEILQAEKYELVTELNDSRSECITATRKMAEEVGKLLNEVKILNDDSGLLHGELVEDIPGGEFGEQPNEQHPVSLAPLDESNSYEHLTLSDKEVQMHFAELQEKFLSLQSEHKILHDQHCQMSSKMSELQTYVDSLKAENLVLSTNLRNFQGDLVKEMQLGLEEGLVPSLSSSCVPDSSSLSSLGDSSFYRALLEQTGDMSLLSNLEGAVSANQCSVDEVFCSSLQEENLTRKETPSAPAKGVEELESLCEVYRQSLEKLEEKMESQGIMKNKEIQELEQLLSSERQELDCLRKQYLSENEQWQQKLTSVTLEMESKLAAEKKQTEQLSLELEVARLQLQGLDLSSRSLLGIDTEDAIQGRNESCDISKEHTSETTERTPKHDVHQICDKDAQQDLNLDIEKITETGALKPTGECSGEQSPDTNYEPPGEDKTQGSSECISELSFSGPNALVPMDFLGNQEDIHNLQLRVKETSNENLRLLHVIEDRDRKVESLLNEMKELDSKLHLQEVQLMTKIEACIELEKIVGELKKENSDLSEKLEYFSCDHQELLQRVETSEGLNSDLEMHADKSSREDIGDNVAKVNDSWKERFLDVENELSRIRSEKASIEHEALYLEADLEVVQTEKLCLEKDNENKQKVIVCLEEELSVVTSERNQLRGELDTMSKKTTALDQLSEKMKEKTQELESHQSECLHCIQVAEAEVKEKTELLQTLSSDVSELLKDKTHLQEKLQSLEKDSQALSLTKCELENQIAQLNKEKELLVKESESLQARLSESDYEKLNVSKALEAALVEKGEFALRLSSTQEEVHQLRRGIEKLRVRIEADEKKQLHIAEKLKERERENDSLKDKVENLERELQMSEENQELVILDAENSKAEVETLKTQIEEMARSLKVFELDLVTLRSEKENLTKQIQEKQGQLSELDKLLSSFKSLLEEKEQAEIQIKEESKTAVEMLQNQLKELNEAVAALCGDQEIMKATEQSLDPPIEEEHQLRNSIEKLRARLEADEKKQLCVLQQLKESEHHADLLKGRVENLERELEIARTNQEHAALEAENSKGEVETLKAKIEGMTQSLRGLELDVVTIRSEKENLTNELQKEQERISELEIINSSFENILQEKEQEKVQMKEKSSTAMEMLQTQLKELNERVAALHNDQEACKAKEQNLSSQVECLELEKAQLLQGLDEAKNNYIVLQSSVNGLIQEVEDGKQKLEKKDEEISRLKNQIQDQEQLVSKLSQVEGEHQLWKEQNLELRNLTVELEQKIQVLQSKNASLQDTLEVLQSSYKNLENELELTKMDKMSFVEKVNKMTAKETELQREMHEMAQKTAELQEELSGEKNRLAGELQLLLEEIKSSKDQLKELTLENSELKKSLDCMHKDQVEKEGKVREEIAEYQLRLHEAEKKHQALLLDTNKQYEVEIQTYREKLTSKEECLSSQKLEIDLLKSSKEELNNSLKATTQILEELKKTKMDNLKYVNQLKKENERAQGKMKLLIKSCKQLEEEKEILQKELSQLQAAQEKQKTGTVMDTKVDELTTEIKELKETLEEKTKEADEYLDKYCSLLISHEKLEKAKEMLETQVAHLCSQQSKQDSRGSPLLGPVVPGPSPIPSVTEKRLSSGQNKASGKRQRSSGIWENGGGPTPATPESFSKKSKKAVMSGIHPAEDTEGTEFEPEGLPEVVKKGFADIPTGKTSPYILRRTTMATRTSPRLAAQKLALSPLSLGKENLAESSKPTAGGSRSQKVKVAQRSPVDSGTILREPTTKSVPVNNLPERSPTDSPREGLRVKRGRLVPSPKAGLESKGSENCKVQ

SEQ ID NO: 1954 - DNA, 1526 bp, Homo sapien
gcatctgcgcaggcgcccggctcctaagtctacccaggaactgaccctgctctctcctttccctgttagacatgggcactccacagaaggatgttattatcaagtcagatgcaccggacactttgttattggagaaacatgcagattatatcgcatcctatggctcaaagaaagatgattatgaatactgtatgtctgagtatttgagaatgagtggcatctattggggtctgacagtaatggatctcatgggacaacttcatcgcatgaatagagaagagattctggcatttattaagtcttgccaacatgaatgtggtggaataagtgctagtatcggacatgatcctcatcttttatacactcttagtgctgtccagattcttacgctgtatgacagtattaatgttattgacgtaaataaagttgtggaatatgttaaaggtctacagaaagaagatggttcttttgctggagatatttggggagaaattgacacaagattctctttttgtgcggtggcaactttggctttgttggggaagcttgatgctattaatgtggaaaaggcaatcgaatttgttttatcctgtatgaactttgacggtggatttggttgcagaccaggttctgaatcccatgctgggcagatctattgttgcacaggatttctggctattacaagtcagttgcatcaagtaaattctgatttacttggctggtggctttgtgaacgacaattaccctcaggcgggctcaatggaaggccggagaagttaccagatgtatgctactcatggtgggtcctggcttccctaaagataattggaagacttcattggattgatagagagaaactgcgtaatttcattttagcatgtcaagatgaagaaacggggggatttgcagacaggccaggagatatggtggatccttttcataccttatttggaattgctggattgtcacttttgggagaagaacagattaaacctgttaatcctgtcttttgcatgcctgaagaagtgcttcagagagtgaatgttcagcctgagctagtgagctagattcattgaattgaaagttgcatagtatagttttgccattttaacatttctgtatttgaagtgcttatcgaatctaaaagtgactactgttaatattttgtatattgtgttaaattaattttaataaattatataattatacatattgtaaaataaagaccggtattttattttctgctttttattctgaagtcctgttattctgactacagttctttgtgtatacttctgtgtctgttatgttcaataactgagctaacataaaataactctaggtttctacttgatttttcccccatgtatacctttcatctgttctatagcaagttgatgtaaattggtttgtcaacaagaatgttaactgatgaaagtggatagaacccatacatgaattaaatgatgcacaaaataaatggctgttgaaatttgaaaaaaaaaaaaaaaaaaaaaaaaaaaaaa

SEQ ID NO: 1955 - protein, 331 aa, Homo sapien
MGTPQKDVIIKSDAPDTLLLEKHADYIASYGSKKDDYEYCMSEYLRMSGIYWGLTVMDLMGQLHRMNREEILAFIKSCQHECGGISASIGHDPHLLYTLSAVQILTLYDSINVIDVNKVVEYVKGLQKEDGSFAGDIWGEIDTRFSFCAVATLALLGKLDAINVEKAIEFVLSCMNFDGGFGCRPGSESHAGQIYCCTGFLAITSQLHQVNSDLLGWWLCERQLPSGGLNGRPEKLPDVCYSWWVLASLKIIGRLHWIDREKLRNFILACQDEETGGFADRPGDMVDPFHTLFGIAGLSLLGEEQIKPVNPVFCMPEEVLQRVNVQPELVS

SEQ ID NO: 1956 - DNA, 4205 bp, Homo sapien
gggtgattcagcgcccggcgaggcggaagcggccgcaagaggaggaggggagagcccgtccgcgcctgggctcccggggtggcacgagcccgcggccggagtgcgaggcggaggcgaggaggccgcggggacgggaggcgaggccggccgggcccccgaagccatggagaacgcgcacaccaagacggtggaggaggtgctgggccacttcggcgtcaacgagagtacggggctgagcctggaacaggtcaagaagcttaaggagagatggggctccaacgagttaccggctgaagaaggaaaaaccttgctggaacttgtgattgagcagtttgaagacttgctagttaggattttattactggcagcatgtatatcttttgttttggcttggtttgaagaaggtgaagaaacaattacagcctttgtagaaccttttgtaattttactcatattagtagccaatgcaattgtgggtgtatggcaggaaagaaatgctgaaaatgccatcgaagcccttaaggaatatgagcctgaaatgggcaaagtgtatcgacaggacagaaagagtgtgcagcggattaaagctaaagacatagttcctggtgatattgtagaaattgctgttggtgacaaagttcctgctgatataaggttaacttccatcaaatctaccacactaagagttgaccagtcaattctcacaggtgaatctgtctctgtcatcaagcacactgatcccgtccctgacccacgagctgtcaaccaagataaaaagaacatgctgttttctggtacaaacattgctgctgggaaagctatgggagtggtggtagcaactggagttaacaccgaaattggcaagatccgggatgaaatggtggcaacagaacaggagagaacaccccttcagcaaaaactagatgaatttggggaacagctttccaaagtcatctcccttatttgcattgcagtctggatcataaatattgggcacttcaatgacccggttcatggagggtcctggatcagaggtgctatttactactttaaaattgcagtggccctggctgtagcagccattcctgaaggtctgcctgcagtcatcaccacctgcctggctcttggaactcgcagaatggcaaagaaaaatgccattgttcgaagcctcccgtctgtggaaacccttggttgtacttctgttatctgctcagacaagactggtacacttacaacaaaccagatgtcagtctgcaggatgttcattctggacagagtggaaggtgatacttgttcccttaatgagtttaccataactggatcaacttatgcacctattggagaagtgcataaagatgataaaccagtgaattgtcaccagtatgatggtctggtagaattagcaacaatttgtgctctttgtaatgactctgctttggattacaatgaggcaaagggtgtgtatgaaaaagttggagaagctacagagactgctctcacttgcctagtagagaagatgaatgtatttgataccgaattgaagggtctttctaaaatagaacgtgcaaatgcctgcaactcagtcattaaacagctgatgaaaaaggaattcactctagagttttcacgtgacagaaagtcaatgtcggtttactgtacaccaaataaaccaagcaggacatcaatgagcaagatgtttgtgaagggtgctcctgaaggtgtcattgacaggtgcacccacattcgagttggaagtactaaggttcctatgacctctggagtcaaacagaagatcatgtctgtcattcgagagtggggtagtggcagcgacacactgcgatgcctggccctggccactcatgacaacccactgagaagagaagaaatgcaccttgaggactctgccaactttattaaatatgagaccaatctgaccttcgttggctgcgtgggcatgctggatcctccgagaatcgaggtggcctcctccgtgaagctgtgccggcaagcaggcatccgggtcatcatgatcactggggacaacaagggcactgctgtggccatctgtcgccgcatcggcatcttcgggcaggatgaggacgtgacgtcaaaagctttcacaggccgggagtttgatgaactcaacccctccgcccagcgagacgcctgcctgaacgcccgctgttttgctcgagttgaaccctcccacaagtctaaaatcgtagaatttcttcagtcttttgatgagattacagctatgactggcgatggcgtgaacgatgctcctgctctgaagaaagccgagattggcattgctatgggctctggcactgcggtggctaaaaccgcctctgagatggtcctggcggatgacaacttctccaccattgtggctgccgttgaggaggggcgggcaatctacaacaacatgaaacagttcatccgctacctcatctcgtccaacgtcggggaagttgtctgtattttcctgacagcagcccttggatttcccgaggctttgattcctgttcagctgctctgggtcaatctggtgacagatggcctgcctgccactgcactggggttcaaccctcctgatctggacatcatgaataaacctccccggaacccaaaggaaccattgatcagcgggtggctctttttccgttacttggctattggctgttacgtcggcgctgctaccgtgggtgctgctgcatggtggttcattgctgctgacggtggtccaagagtgtccttctaccagctgagtcatttcctacagtgtaaagaggacaacccggactttgaaggcgtggattgtgcaatctttgaatccccatacccgatgacaatggcgctctctgttctagtaactatagaaatgtgtaacgccctcaacagcttgtccgaaaaccagtccttgctgaggatgcccccctgggagaacatctggctcgtgggctccatctgcctgtccatgtcactccacttcctgatcctctatgtcgaacccttgccactcatcttccagatcacaccgctgaacgtgacccagtggctgatggtgctgaaaatctccttgcccgtgattctcatggatgagacgctcaagtttgtggcccgcaactacctggaacctggtaaagagtgtgtgcagcctgccaccaaatcctgctcgttctcggcatgcaccgatgggatttcctggccgtttgtgctgctcataatgcccctggtgatctgggtctatagcacagacactaactttagcgatatgttctggtcttgactgacagttttccataaagaagatgtttaacttaatcaattaatttttttattgtttaaagcaactgtctatttctgctgaattttcacatgaacatactggctggtgatggaggtttcatactctagattttgttttgctttttctgactccagtggggcaagattttccttttttatacacataattaaagtgtccattgacatgtacagagaactaacactattttatgcaaatatttttttgtagatgaaaaagcatgtacagtgttctgtttaatactcatccttgtataaaaaaaatagttgagccagcagacattgtcagcaaattaattggcagcagattttaggaaatgaatgtgtgtggttttttttctaaaactaaatagcatgtattgtgtcttttgcatgatgatccggatttaatttgatatcacagtctaatttttattcataagccaatttttctgcactgagcagagtcttgctacctcagtcagtattgttttggtttgctacttccctcacccactttggcctccgttcaccccaccccaccccacctctccccaccttacccccgccccgcttggcttcttctttaggattgtgatggttcgttctgtttacatcagttttaacgagaggtatgcctgtactcgcttgtgcagaaaacattgttccagattcaatcgactgggtttatgtcccttcacatagtttttaaggttatttatttaaatgtctaatgtattttattgtaacagacattgttttgccaacattgcctatttcagtggcacgtcatctagttttaaaaaaataaaacattttaaatggacagagaaaaaaaaaaaaaaaaaaaaaaaaaaaaaaaaaaaaaaaaaaaaaaaaaaaaaaaaaaaaaaaaa

SEQ ID NO: 1957 - protein, 1042 aa, Homo sapien
MENAHTKTVEEVLGHFGVNESTGLSLEQVKKLKERWGSNELPAEEGKTLLELVIEQFEDLLVRILLLAACISFVLAWFEEGEETITAFVEPFVILLILVANAIVGVWQERNAENAIEALKEYEPEMGKVYRQDRKSVQRIKAKDIVPGDIVEIAVGDKVPADIRLTSIKSTTLRVDQSILTGESVSVIKHTDPVPDPRAVNQDKKNMLFSGTNIAAGKAMGVVVATGVNTEIGKIRDEMVATEQERTPLQQKLDEFGEQLSKVISLICIAVWIINIGHFNDPVHGGSWIRGAIYYFKIAVALAVAAIPEGLPAVITTCLALGTRRMAKKNAIVRSLPSVETLGCTSVICSDKTGTLTTNQMSVCRMFILDRVEGDTCSLNEFTITGSTYAPIGEVHKDDKPVNCHQYDGLVELATICALCNDSALDYNEAKGVYEKVGEATETALTCLVEKMNVFDTELKGLSKIERANACNSVIKQLMKKEFTLEFSRDRKSMSVYCTPNKPSRTSMSKMFVKGAPEGVIDRCTHIRVGSTKVPMTSGVKQKIMSVIREWGSGSDTLRCLALATHDNPLRREEMHLEDSANFIKYETNLTFVGCVGMLDPPRIEVASSVKLCRQAGIRVIMITGDNKGTAVAICRRIGIFGQDEDVTSKAFTGREFDELNPSAQRDACLNARCFARVEPSHKSKIVEFLQSFDEITAMTGDGVNDAPALKKAEIGIAMGSGTAVAKTASEMVLADDNFSTIVAAVEEGRAIYNNMKQFIRYLISSNVGEVVCIFLTAALGFPEALIPVQLLWVNLVTDGLPATALGFNPPDLDIMNKPPRNPKEPLISGWLFFRYLAIGCYVGAATVGAAAWWFIAADGGPRVSFYQLSHFLQCKEDNPDFEGVDCAIFESPYPMTMALSVLVTIEMCNALNSLSENQSLLRMPPWENIWLVGSICLSMSLHFLILYVEPLPLIFQITPLNVTQWLMVLKISLPVILMDETLKFVARNYLEPGKECVQPATKSCSFSACTDGISWPFVLLIMPLVIWVYSTDTNFSDMFWS

SEQ ID NO: 1958 - DNA, 2084 bp, Mus musculus
aaccgcatctgcagcgagcaactgagaagccaagactgagccggcggccgcggcgcagcgaacgagcagtgaccgtgctcctacccagctctgcttcacagcgcccacctgtctccgcccctcggcccctcgcccggctttgcctaaccgccacgatgatgttctcgggcttcaacgcagactacgaggcgtcatcctcccgctgcagcagcgcgtccccggccggggatagcctctcttactaccactcacccgcagactccttctccagcatgggctcgcctgtcaacgcgcaggacttctgcacggacctggccgtctccagtgccaacttcattcccacggtcactgccatctcgaccagtccggacctgcagtggctggtgcagcccgccctcgtctcctctgtggccccatcgcagaccagagcccctcaccctttcggagtccccgccccctccgctggggcttactccagggctggcgttgtgaagaccatgacaggaggccgagcgcagagcattggcaggaggggcaaggtggaacagttatctccagaagaagaagagaaaaggagaatccgaagggaaaggaataagatggctgcagccaaatgccgcaaccggaggagggagctgactgatacactccaagcggagacagaccaactagaagatgagaagtctgctttgcagaccgagattgccaacctgctgaaggagaaggaaaaactagagttcatcctggcagctcaccgacctgcctgcaagatccctgatgacctgggcttcccagaagagatgtctgtggcttcccttgatctgactgggggcctgccagaggttgccaccccggagtctgaggaggccttcaccctgcctctcctcaatgaccctgagcccaagccctcagtggaacctgtcaagagcatcagcagcatggagctgaagaccgagccctttgatgacttcctgttcccagcatcatccaggcccagtggctctgagacagcccgctccgtgccagacatggacctatctgggtccttctatgcagcagactgggagcctctgcacagtggctccctggggatggggcccatggccacagagctggagcccctgtgcactccggtggtcacctgtactcccagctgcactgcttacacgtcttccttcgtcttcacctaccccgaggctgactccttccccagctgtgcagctgcccaccgcaagggcagcagcagcaatgagccttcctctgactcgctcagctcacccacgctgctggccctgtgagggggcagggaaggggaggcagccggcacccacaagtgccactgcccgagctggtgcattacagagaggagaaacacatcttccctagagggttcctgtagacctagggaggaccttatctgtgcgtgaaacacaccaggctgtgggcctcaaggacttgaaagcatccatgtgtggactcaagtccttacctcttccggagatgtagcaaaacgcatggagtgtgtattgttcccagtgacacttcagagagctggtagttagtagcatgttgagccaggcctgggtctgtgtctcttttctctttctccttagtcttctcatagcattaactaatctattgggttcattattggaattaacctggtgctggatattttcaaattgtatctagtgcagctgattttaacaataactactgtgttcctggcaatagtgtgttctgattagaaatgaccaatattatactaagaaaagatacgactttattttctggtagatagaaataaatagctatatccatgtactgtagtttttcttcaacatcaatgttcattgtaatgttactgatcatgcattgttgaggtggtctgaatgttctgacattaacagttttccatgaaaacgttttattgtgtttttaatttatttattaagatggattctcagatatttatatttttattttatttttttctaccttgaggtcttttgacatgtggaaagtgaatttgaatgaaaaatttaagcattgtttgcttattgttccaagacattgtcaataaa

SEQ ID NO: 1959 - protein, 380 aa, Mus musculus
MMFSGFNADYEASSSRCSSASPAGDSLSYYHSPADSFSSMGSPVNAQDFCTDLAVSSANFIPTVTAISTSPDLQWLVQPALVSSVAPSQTRAPHPFGVPAPSAGAYSRAGVVKTMTGGRAQSIGRRGKVEQLSPEEEEKRRIRRERNKMAAAKCRNRRRELTDTLQAETDQLEDEKSALQTEIANLLKEKEKLEFILAAHRPACKIPDDLGFPEEMSVASLDLTGGLPEVATPESEEAFTLPLLNDPEPKPSVEPVKSISSMELKTEPFDDFLFPASSRPSGSETARSVPDMDLSGSFYAADWEPLHSGSLGMGPMATELEPLCTPVVTCTPSCTAYTSSFVFTYPEADSFPSCAAAHRKGSSSNEPSSDSLSSPTLLAL

SEQ ID NO: 1960 - DNA, 1679 bp, Homo sapien
gtttgttggctgcggcagcaggtagcaaagtgacgccgagggcctgagtgctccagtagccaccgcatctggagaaccagcggttaccatggaggggatcagtatatacacttcagataactacaccgaggaaatgggctcaggggactatgactccatgaaggaaccctgtttccgtgaagaaaatgctaatttcaataaaatcttcctgcccaccatctactccatcatcttcttaactggcattgtgggcaatggattggtcatcctggtcatgggttaccagaagaaactgagaagcatgacggacaagtacaggctgcacctgtcagtggccgacctcctctttgtcatcacgcttcccttctgggcagttgatgccgtggcaaactggtactttgggaacttcctatgcaaggcagtccatgtcatctacacagtcaacctctacagcagtgtcctcatcctggccttcatcagtctggaccgctacctggccatcgtccacgccaccaacagtcagaggccaaggaagctgttggctgaaaaggtggtctatgttggcgtctggatccctgccctcctgctgactattcccgacttcatctttgccaacgtcagtgaggcagatgacagatatatctgtgaccgcttctaccccaatgacttgtgggtggttgtgttccagtttcagcacatcatggttggccttatcctgcctggtattgtcatcctgtcctgctattgcattatcatctccaagctgtcacactccaagggccaccagaagcgcaaggccctcaagaccacagtcatcctcatcctggctttcttcgcctgttggctgccttactacattgggatcagcatcgactccttcatcctcctggaaatcatcaagcaagggtgtgagtttgagaacactgtgcacaagtggatttccatcaccgaggccctagctttcttccactgttgtctgaaccccatcctctatgctttccttggagccaaatttaaaacctctgcccagcacgcactcacctctgtgagcagagggtccagcctcaagatcctctccaaaggaaagcgaggtggacattcatctgtttccactgagtctgagtcttcaagttttcactccagctaacacagatgtaaaagacttttttttatacgataaataacttttttttaagttacacatttttcagatataaaagactgaccaatattgtacagtttttattgcttgttggatttttgtcttgtgtttctttagtttttgtgaagtttaattgacttatttatataaattttttttgtttcatattgatgtgtgtctaggcaggacctgtggccaagttcttagttgctgtatgtctcgtggtaggactgtagaaaagggaactgaacattccagagcgtgtagtgaatcacgtaaagctagaaatgatccccagctgtttatgcatagataatctctccattcccgtggaacgtttttcctgttcttaagacgtgattttgctgtagaagatggcacttataaccaaagcccaaagtggtatagaaatgctggtttttcagttttcaggagtgggttgatttcagcacctacagtgtacagtcttgtattaagttgttaataaaagtacatgttaaacttacttagtgttatg

SEQ ID NO: 1961 - protein, 352 aa, Homo sapien
MEGISIYTSDNYTEEMGSGDYDSMKEPCFREENANFNKIFLPTIYSIIFLTGIVGNGLVILVMGYQKKLRSMTDKYRLHLSVADLLFVITLPFWAVDAVANWYFGNFLCKAVHVIYTVNLYSSVLILAFISLDRYLAIVHATNSQRPRKLLAEKVVYVGVWIPALLLTIPDFIFANVSEADDRYICDRFYPNDLWVVVFQFQHIMVGLILPGIVILSCYCIIISKLSHSKGHQKRKALKTTVILILAFFACWLPYYIGISIDSFILLEIIKQGCEFENTVHKWISITEALAFFHCCLNPILYAFLGAKFKTSAQHALTSVSRGSSLKILSKGKRGGHSSVSTESESSSFHSS

SEQ ID NO: 1962 - DNA, 1410 bp, Homo sapien
gagctagctttgcaatatggcggccgaggcggacggaccgcttaaacggctgctcgtgccgattcttttacctgagaaatgctacgaccaacttttcgttcagtgggacttgcttcacgtcccctgcctcaagattctcctcagcaaaggcctggggctgggcattgtggctggctcacttctagtaaagctgccccaggtgtttaaaatccggggagccaagagtgctgaagggttgagtctccagtctgtaatgctggagctagtggcattgactgggaccatggtctacagcatcactaacaacttcccattcagctcttggggtgaagccttattcctgatgctccagacgatcaccatctgcttcctggtcatgcactacagaggacagactgtgaaaggtgtcgctttcctcgcttgctacggcctggtcctgctggtgcttctctcacctctgacgcccttgactgtagtcaccctgctccaggcctccaatgtgcctgctgtggtggtggggaggcttctccaggcagccaccaactaccacaacgggtacacaggccagctctcagccatcacagtcttcctgctgtttgggggctccctggcccgaatcttcacttccattcaggaaaccggagatcccctgatggctgggacctttgtggtctcctctctctgcaacggcctcatcgccgcccagctgctcttctactggaatgcaaagcctccccacaagcagaaaaaggcgcagtagagccagctactggagtcattccgtttccactcattcacccaacctcagggttctccccatctgagccagcctgctggtgtgacttactcatcctccattcctctgcacttgcagactttctgagccagggttttcttttagtggaaacaaatggttgatggatccagatccttagaaaaggagaggatgggggtagagtctcccaagccaaaattttgacatttgagtgctttcgtaagccctgtacatgtactattaattcagtcattcagccaagcctcctcctctagcagcaatttccagctgtttaacactatcctgggcaaatgttttaccctgtcctccagcctccctgcttcccttctggccctggaagactgagtctggacggcagagtggagggactgggaggctgtggctgcctccctccctcagcccggctgggactgtctcccggaccccagtgctggggtgggggaagggggacggagaatgactcaggcagggccccagggtggggtgaggaggttcctgctctggcaggtctaggcggaagggagtggagatggggctggttgctgctgcagtgaggggaacagatgggacaataaagactggagactcagttgaataatgcaaaaaaaaaaaaa

SEQ ID NO: 1963 - protein, 247 aa, Homo sapien
MAAEADGPLKRLLVPILLPEKCYDQLFVQWDLLHVPCLKILLSKGLGLGIVAGSLLVKLPQVFKIRGAKSAEGLSLQSVMLELVALTGTMVYSITNNFPFSSWGEALFLMLQTITICFLVMHYRGQTVKGVAFLACYGLVLLVLLSPLTPLTVVTLLQASNVPAVVVGRLLQAATNYHNGYTGQLSAITVFLLFGGSLARIFTSIQETGDPLMAGTFVVSSLCNGLIAAQLLFYWNAKPPHKQKKAQ

SEQ ID NO: 1964 - DNA, 1758 bp, Homo sapien
cgcccctttagggtgctcgccggctgtcgggtgtgggggtatgccaggccccggaggactcggcttccccgctaacccgacccgccgcaccccacccaggccaggtcagagcagcccaccatgggatggggagggggtggaggctgcaccccccgcccacccatccaccagcagccgccggagcgccgcgtggtcatcgttgtctttctcggcctcctgctggacctcctggccttcacgctgctgctgcccctgctgcccgggctgttggagagccacggccgtgcccacgaccccctctatggctcctggcagggcggggtggactggtttgccaccgccatcgggatgccagtggagaagaggtacaacagtgtcctgttcggaggtctcattggctcggcattctctgtcctgcagtttctgtgtgcgccactcactggggccacctctgactgcttggggaggcgcccggtgatgctgctgtgcctgatgggtgtggccacctcatatgcagtctgggccacctctcggagctttgcggccttcctggcctccaggctgattgggggcatcagcaaagggaacgtcagcctctccacggccatcgttgctgacctgggctcgcctctggcccgcagtcaaggcatggcggtcattggggtggccttctcactgggcttcaccctgggccctatgctcggagcctccctgcccctggaaatggcaccctggtttgccctgctcttcgcagcctccgacctgctgttcatcttctgcttcctgccagagacgctgcccctggagaaacgggcgccctctatcgccctggggttccgtgatgcggctgatctgctcagccccctggccctgctgcgcttctcggctgtcgctcgtggccaggacccaccctctggagacaggctcagcagcctgcgccgcctgggcctagtctacttcctctacctcttcctgttctcgggcctggagtacacgctgagcttcctcacacaccagcgcttccagttcagtagcctacagcaggggaagatgtttttcctcatcggcctcaccatggccaccatccagggtgcctatgcccggcggatccaccctggcggggaagttgctgccgtgaagcgggccctcctgctgctggtgcccgccttcctcctcatcggctggggacgttctctgcccgtgctgggcctggggctgctgctctactcctttgccgccgccgttgtggtgccctgcctgtcctccgtggtcgctggctatggctcaccagggcagaagggcacggtcatgggtacactgcgcagcctaggtgctctggccagggccgcggggcccctggtggccgcttcagtgtactggctggccggggcccaggcctgcttcaccacgtggtccgggctctttttgctccccttcttcctcctgcagaagctgagttacccggcacagacgctcaaggctgagtagctgagccactgtgcccaggctgtgggcaccaggcagagtgggagcctaggtcaggcccctgcccactgcctgacccccaccccccgccagtccagggagaccctgtgggtgggggccggcccctaagcaggaagctcaggcagctcctccagacttacttactccttcagtgactccgagctgcagcactccaaggctgtcagggcttctgtttgttttttaaactatgcaccaggtttctgatgatgaaataaagcacctgtttgtttt

SEQ ID NO: 1965 - protein, 455 aa, Homo sapien
MGWGGGGGCTPRPPIHQQPPERRVVIVVFLGLLLDLLAFTLLLPLLPGLLESHGRAHDPLYGSWQGGVDWFATAIGMPVEKRYNSVLFGGLIGSAFSVLQFLCAPLTGATSDCLGRRPVMLLCLMGVATSYAVWATSRSFAAFLASRLIGGISKGNVSLSTAIVADLGSPLARSQGMAVIGVAFSLGFTLGPMLGASLPLEMAPWFALLFAASDLLFIFCFLPETLPLEKRAPSIALGFRDAADLLSPLALLRFSAVARGQDPPSGDRLSSLRRLGLVYFLYLFLFSGLEYTLSFLTHQRFQFSSLQQGKMFFLIGLTMATIQGAYARRIHPGGEVAAVKRALLLLVPAFLLIGWGRSLPVLGLGLLLYSFAAAVVVPCLSSVVAGYGSPGQKGTVMGTLRSLGALARAAGPLVAASVYWLAGAQACFTTWSGLFLLPFFLLQKLSYPAQTLKAE

SEQ ID NO: 1966 - DNA, 1641 bp, Homo sapien
ggcacgaggccagtgatggattcaagcctcgtgaacgaagcggtggggagcaggcacaggactgggatgctctgccacccaagcggccccgactaggggcaggaaacaagatcggaggccgtaggcttattgtggtgctggaaggggccagtctggagacagtcaaggtagggaagacatatgagctactcaactgtgacaagcacaagtctatattgttgaagaatggacgggaccctggggaagcgcggccagatatcacccaccagagtttgctgatgctgatggatagtcccctgaaccgagctggcttgctacaggtttatatccatacacagaagaatgttctgattgaagtgaatccccagacccgaattcccagaacctttgaccgcttttgtggcctcatggttcaacttttacacaagctcagtgttcgagcagctgatggcccccagaagcttttgaaggtaattaagaatccagtatcagatcactttccagttggatgtatgaaagttggcacttctttttccatcccggttgtcagtgatgtgcgtgagctggtgcccagcagtgatcctattgtttttgtggtaggggcctttgcccatggcaaggtcagtgtggagtatacagagaagatggtgtccatcagtaactaccccctttctgctgccctcacctgtgcaaaacttaccacagcctttgaggaagtatggggggtcatttgacagtagtagaacctgttctgaaaccagaaactgttgatgtcacatcctttgaccctggtctgagctgactgctggaagatgatctttctgcactgagactgtggagtttggggaagccaaggctgtacatttgctatttgtttatcctatgaatactgttcttgcaaacctggttgttttggggttcctaaagtatccagtggtgtaaaactgtttgttccccgggacttcagggacagataggaggttacagagtttgcagtttggttccatgctttgaaggcaggctttagctcccagattcccatgtgctaaaggagagaaccctgatgatggagaagaactgtgaaagagagcagtcaggaatgctagtggtgaaaaactgaacaaacagaagtgattttatctaatacagttccaaggtagaaaaagtggagcaggcagggccttgcacccctctccacccccccatggggggggtggtggtagcggcacatacacaatcatagtaaattggcagaagaaaaacacaatagattcctggctagatggggagagataaggcaatgtgcatgggggaatcagaggggagatgtgagcccctctgctcctcccacaagagtttcccctttgggccgggcacggtggctcacgcctgtaatcccagcactttgggaggcggaggcgggtggatcacttgcggtcaggagttcgagaccagcctggccaacgtggtgaaatcccgtttctactgaaaatacaaaaattagctgggcatggtggcgtgcctgtattcccaaagtgctgggattacaggcatcactggcccaggcagagccaattctgtataataaatctgtctctctctgaaaaaaaaaaaaaaaaaaaaaaaaaaaaaaaaaaaaaa

SEQ ID NO: 1967 - protein, 151 aa, Homo sapien
MLMDSPLNRAGLLQVYIHTQKNVLIEVNPQTRIPRTFDRFCGLMVQLLHKLSVRAADGPQKLLKVIKNPVSDHFPVGCMKVGTSFSIPVVSDVRELVPSSDPIVFVVGAFAHGKVSVEYTEKMVSISNYPLSAALTCAKLTTAFEEVWGVI

SEQ ID NO: 1968 - DNA, 3552 bp, Homo sapien
tgagccggccgcacgcggaggatcctaaggagcagctctgttgcgacataggccgagcagcgaggcccagctccctgaaacaacagtaacctacccctgtgggtcatcatcatgccctccgacctggccaagaagaaggcagccaaaaagaaggaggctgccaaagctcgacagcggcccagaaaaggacatgaagaaaatggagatgttgtcacagaaccacaggtggcagagaagaatgaggccaatggcagagagaccacagaagtagatttgctgaccaaggagctagaggactttgagatgaagaaagctgctgctcgagctgtcactggcgtcctggcctctcaccccaacagtactgatgttcacatcatcaacctctcacttacctttcatggtcaagagctgctcagtgacaccaaactggaattaaactcaggccgtcgttatggcctcattggtttaaatggaattggaaagtccatgctgctctctgctattgggaagcgtgaagtgcccatccctgagcacatcgacatctaccatctgactcgagagatgccccctagtgacaagacacccttgcattgtgtgatggaagtcgacacagagcgggccatgctggagaaagaggcagagcggctggctcatgaggatgcggagtgtgagaagctcatggagctctacgagcgcctggaggagctggatgccgacaaggcagagatgagggcctcgcggatcttgcatggactgggtttcacacctgccatgcagcgcaagaagctaaaagacttcagtgggggctggaggatgagggttgcccttgccagagccctctttattcggcccttcatgctgctcctggatgagcctaccaaccacctggacctagatgcttgcgtgtggttggaagaagaactaaaaacttttaagcgcatcttggtcctcgtctcccattcccaggattttctgaatggtgtctgtaccaatatcattcacatgcacaacaagaaactgaagtattatacgggtaattatgatcagtacgtgaagacgcggctagagctggaggagaaccagatgaagaggtttcactgggagcaagatcagattgcacacatgaagaactacattgcgaggtttggtcatggcagtgccaagctggcccggcaggcccagagcaaggagaagacgctacagaaaatgatggcatcaggactgacagagagggtcgtgagcgataagacactgtcattttatttcccaccatgtggcaagatccctccacctgtcattatggtgcaaaatgtgagcttcaagtatacaaaagatgggccttgcatctacaataatctagaatttggaattgaccttgacacacgagtggctctggtagggcccaatggagcagggaagtcaactcttctgaagctgctaactggagagctactacccacagatggcatgatccgaaaacactctcatgtcaagatagggcgttaccatcagcatttacaagagcagctggacttagatctctcacctttggagtacatgatgaagtgctacccagagatcaaggagaaggaagaaatgaggaagatcattgggcgatacggtctcactgggaaacaacaggtgagcccaatccggaacttgtcagacgggcagaagtgccgagtgtgtctggcctggctggcctggcagaacccccacatgctcttcctggatgaacccaccaatcacctggatatcgagaccatcgacgccctggcagatgccatcaatgagtttgagggtggtatgatgctggtcagccatgacttcagactcattcagcaggttgcacaggaaatttgggtctgtgagaagcagacaatcaccaagtggcctggagacatcctggcttacaaggagcacctcaagtccaagctggtggatgaggagccccagctcaccaagaggacccacaacgtgtgagccctctacctgggttcgggtcaggagctccatctgggaactaacagctgctaacctgaccagccgctcaggacaggaccctggggctacactcctgcattgctgcaatactgctcccccagcctctcccctgcccctcaacctgccttagctgcactctcttacctacagctggacagtacctgtctgtttcctgtcctccttccagttacatctgtccatgtctggactcggctggccgttccctccagccccttgctggttatcttactctgagtgtgatgcagtcagaggcacctgcgggttagcccaggggcccaagccctggatttggcctgcggaggagcttaggatcctcgttttctgggttttggtgatgttggaggagtaccccccagcccaccgccccgattcctttttgcttctggtttggagctccggaccaggaccttcgtcctggtcagtttttaaataattatttagcagtgtaacttttagacctgcgtgacatctacaaagcgcccaataaagaaagaggaagccacggtccctaccttccttctcgggtctctggggccttctcctccctgcagtgccaacatgcactgcccacagcaggagctggatccagcgtcagtgtgtcgatgggaactgaagactagtccataggagctggaagaactttgtccctttacttctgatttgaaattgtaccttttctcaggcctgtgattcacagactttaacatgaatcagaatcacctggagggctcatgcaatcagattgccagatctcgcctcagcgtttctggttcaataggttttgggggagaccaagaacgttaacatttctagcaagtttccaggtgatgctgttgttgctggtctagagactattttgagaaccactgtccaggagcgtggttttctgattgtgatctgaggttctgccccaactgcacagcagttgggctgcttgttaaaaatgcaggccaggtgcggtggctcacacctgtaatcccagcgctttgggaggctgaggcaggtggatcacttgagctcaggagttcaagaccagcttgggaaacatggcaaaacccgtctttatgtgcctggaatcccacctgctcaggtggctagggtggatggatcgcttgagcccaggaggtggaggttgcagtgagctgagattgcaccactgcattccagcctggatgacagagcaaaaccctgtctcaaaaaaatgcagactggccaggcacagtggctcacacctgtaatccgactgtaagctcatcaccttgggaggccactgtaggaggatcaattgagcctagaagttcaagaccagcctgggcaaagtagggagaccccttctctacaaatagtaataaaatgaaccgggcatagtagcatgtgcctgcggtcccagctgctctgataagaggaggctcacttgagcccaggaggttgaggctgcagtgagcagagcgtgccgctacactccagcctgatgacagaccgagacactgtctcaaaaaaataaaaaaattcagattgctgaaaaaa

SEQ ID NO: 1969 - protein, 623 aa, Homo sapien
MPSDLAKKKAAKKKEAAKARQRPRKGHEENGDVVTEPQVAEKNEANGRETTEVDLLTKELEDFEMKKAAARAVTGVLASHPNSTDVHIINLSLTFHGQELLSDTKLELNSGRRYGLIGLNGIGKSMLLSAIGKREVPIPEHIDIYHLTREMPPSDKTPLHCVMEVDTERAMLEKEAERLAHEDAECEKLMELYERLEELDADKAEMRASRILHGLGFTPAMQRKKLKDFSGGWRMRVALARALFIRPFMLLLDEPTNHLDLDACVWLEEELKTFKRILVLVSHSQDFLNGVCTNIIHMHNKKLKYYTGNYDQYVKTRLELEENQMKRFHWEQDQIAHMKNYIARFGHGSAKLARQAQSKEKTLQKMMASGLTERVVSDKTLSFYFPPCGKIPPPVIMVQNVSFKYTKDGPCIYNNLEFGIDLDTRVALVGPNGAGKSTLLKLLTGELLPTDGMIRKHSHVKIGRYHQHLQEQLDLDLSPLEYMMKCYPEIKEKEEMRKIIGRYGLTGKQQVSPIRNLSDGQKCRVCLAWLAWQNPHMLFLDEPTNHLDIETIDALADAINEFEGGMMLVSHDFRLIQQVAQEIWVCEKQTITKWPGDILAYKEHLKSKLVDEEPQLTKRTHNV

SEQ ID NO: 1970 - DNA, 1558 bp, Homo sapien
cttggtagtctgttagtgggagatccttgttgccgtcccttcgcctccttcaccgccgcagaccccttcaagttctagtcatgcgtgagtgcatctccatccacgttggccaggctggtgtccagattggcaatgcctgctgggagctctactgcctggaacacggcatccagcccgatggccagatgccaagtgacaagaccattgggggaggagatgattccttcaacaccttcttcagtgaaacgggtgctggcaagcatgtgccccgggcagtgtttgtagacttggaacccacagtcattgatgaagttcgcactggcacctaccgccagctcttccaccctgagcagctcatcacaggcaaggaagatgctgccaataactatgcccgagggcactacaccattggcaaggagatcattgacctcgtgttggaccgaattcgcaagctggctgaccagtgcaccggtcttcagggcttcttggttttccacagctttggtgggggaactggttctgggttcacctcgctgctcatggaacgtctctcagttgattatggcaagaagtccaagctggagttctctatttacccggcgccccaggtttccacagctgtagttgagccctacaactccatcctcaccacccacaccaccctggagcactctgattgtgccttcatggtagacaatgaggccatctatgacatctgtcgtagaaacctcgatatcgagcgcccaacctacactaaccttaaccgccttattagccagattgtgtcctccatcactgcttccctgagatttgatggagccctgaatgttgacctgacagaattccagaccaacctggtgccctacccccgcatccacttccctctggccacatatgcccctgtcatctctgctgagaaagcctaccatgaacagcttactgtagcagagatcaccaatgcttgctttgagccagccaaccagatggtgaaatgtgaccctcgccatggtaaatacatggcttgctgcctgttataccgtggtgacgtggttcccaaagatgtcaatgctgccattgccaccatcaaaaccaagcgtaccatccagtttgtggattggtgccccactggcttcaaggttggcattaattaccagcctcccactgtggtgcctggcggagacctggccaaggtacagagagctgtgtgcatgctgagcaataccacagctgttgctgaggcctgggctcgcctggaccacaagtttgacctgatgtatgccaagcgtgcctttgttcactggtacgtgggtgaggggatggaggaaggcgagttttcagaggcccgtgaggacatggctgcccttgagaaggattatgaggaggttggagcagatagtgctgacggagaggatgagggtgaagagtattaacctgtgtgctgtacttttacactcctttgtcttggaactgtcttatttttgttctgtaaatgtctattgccgtaaattgttaataaaattgatgtttccattttaaaaaaaaaaaaaaaaaaaaaaaa

SEQ ID NO: 1971 - protein, 449 aa, Homo sapien
MRECISIHVGQAGVQIGNACWELYCLEHGIQPDGQMPSDKTIGGGDDSFNTFFSETGAGKHVPRAVFVDLEPTVIDEVRTGTYRQLFHPEQLITGKEDAANNYARGHYTIGKEIIDLVLDRIRKLADQCTGLQGFLVFHSFGGGTGSGFTSLLMERLSVDYGKKSKLEFSIYPAPQVSTAVVEPYNSILTTHTTLEHSDCAFMVDNEAIYDICRRNLDIERPTYTNLNRLISQIVSSITASLRFDGALNVDLTEFQTNLVPYPRIHFPLATYAPVISAEKAYHEQLTVAEITNACFEPANQMVKCDPRHGKYMACCLLYRGDVVPKDVNAAIATIKTKRTIQFVDWCPTGFKVGINYQPPTVVPGGDLAKVQRAVCMLSNTTAVAEAWARLDHKFDLMYAKRAFVHWYVGEGMEEGEFSEAREDMAALEKDYEEVGADSADGEDEGEEY

SEQ ID NO: 1972 - DNA, 3246 bp, Homo sapien
  Unsure 2530: Unknown base
agtgtggttttagtttttcctaagaagtggcgtggtttggggctttatatccgggaggagcatatgtacgcaaatcctggggcgtttgcaaacccggatccggggcgtctggccccatgcccggccgggcgtttgagggctactgccacgcagcgtttctggagcctgccggctggtgccctggtggcctttatctctgtccccctttgtcctctttatctcaggctctccaggaggccggggggcccactccgcctatcgctcccctcggctacgctgccactccaatgccccgcaggtcgcgagctgctgttctttcgaaggcgccggagaaccaggggcgtcccgcgccacctctgactcggagcagcgccgagcactgacgctcccgcccttgggcaaggacgccagtgcgcccgcgcgcgtccctctgcgcggcagcccgtcgcgggccctcaaggggaagcccaggccaggatggccccgggtcgcgcggtggccgggctcctgttgctggcggccgccggcctcggaggagtggcggaggggccagggctagccttcagcgaggatgtgctgagcgtgttcggcgcgaatctgagcctgtcggcggcgcagctccagcacttgctggagcagatgggagccgcctcccgcgtgggcgtcccggagcctggccagctgcacttcaaccagtgtttaactgctgaagagatcttttcccttcatggcttttcaaatgctacccaaataaccagctccaaattctctgtcatctgtccagcagtcttacagcaattgaactttcacccatgtgaggatcggcccaagcacaaaacaagaccaagtcattcagaagtttggggatatggattcctgtcagtgacgattattaatctggcatctctcctcggattgattttgactccactgataaagaaatcttatttcccaaagattttgaccttttttgtggggctggctattgggactcttttttcaaatgcaattttccaacttattccagaggcatttggatttgatcccaaagtcgacagttatgttgagaaggcagttgctgtgtttggtggattttacctacttttcttttttgaaagaatgctaaagatgttattaaagacatatggtcagaatggtcatacccactttggaaatgataactttggtcctcaagaaaaaactcatcaacctaaagcattacctgccatcaatggtgtgacatgctatgcaaatcctgctgtcacagaagctaatggacatatccattttgataatgtcagtgtggtatctctacaggatggaaaaaaagagccaagttcatgtacctgtttgaaggggcccaaactgtcagaaatagggacgattgcctggatgataacgctctgcgatgccctccacaatttcatcgatggcctggcgattggggcttcctgcaccttgtctctccttcagggactcagtacttccatagcaatcctatgtgaggagtttccccacgagttaggagactttgtgatcctactcaatgcagggatgagcactcgacaagccttgctattcaacttcctttctgcatgttcctgctatgttgggctagcttttggcattttggtgggcaacaatttcgctccaaatattatatttgcacttgctggaggcatgttcctctatatttctctggcagatatgtttccagagatgaatgatatgctgagagaaaaggtaactggaagaaaaaccgatttcaccttcttcatgattcagaatgctggaatgttaactggattcacagccattctactcattaccttgtatgcaggagaaatcgaattggagtaatagaaaatggaagatggtgttgttaataaaggcatttaatagataaaaacatctccaaaaaggattttgaagctgatcctatttagttaaaaagataattttgctttcaactgtaggtccagaaaactaattattggcatcagtctgtgaaatagtccattatttgttgttaaaaatgcttcaaaaggttttcagtgtcagtctgagatgcctggtatataggagcctttgggaaatacttatttttcagtattccatgcatattagatatcaccatgaagcaagagacatgcattctataatcatgtagacactcagactcaggggaaaatacaagttatatcctgaaagcctttaaaactctatggtaggatcaaagattcaaatggtttcagagaggttttatttcaattaatttgttctagtgctttcaagagcaagtacatcaaaatgtagaaggtaaaatgtatgcaacactaatataaattattccaagtctttaaggagccaaagaaaaaaaagatttctcacagctttttgttctgttttgtatttcaattaggaacttgcagtattattttgaaaaccattctaaaataataggagttaggaaataaataaagttttgctagccctgctaagttcaggcttagaggcttatcgctaagtntaaacttcaccagattccacgaaaagctggatagctttttttctgacttatgttgtggttgcacccctcacaaatggcagaacagtatgtaaagctggtaacacctcggtttcagtgcaccatgtgtttgctttgtgaaggtgaagaatatgttggtttagagaaagaaattggatgtaattttatgcaatttacttttaaagacaaacataactatttagcagagaatattttaataaatgcaaaacaacagctggactgctgtacatcaaggacagattaactggaaaacatatgttccttatgtgtgattgagagccattcagaaaagacttcctttgtgttcagcctatacttttccatatggtataccttgaaaaaaattagcacaccatggttatttttctaccttttataaaagacagagcctgtttactcatttagaagatagagaaaattggtctaaaattgaacatcctagattcacactcccaagtcacttaaggtgatttgatggtgaggaaaatgattgacaaagcccaacaatgatctcaggaattacattttccaacagaccaaaaaatgttttcatgtagcagcaatgcagatttggtgaatatttaatatatattttagtatgtatttcactttatgactgacaattaaaaaatattgtttggccaaatagtaaacacccttttgaaaccatgaaaaaa

SEQ ID NO: 1973 - protein, 460 aa, Homo sapien
  Unsure 2530: Unknown amino acid
MAPGRAVAGLLLLAAAGLGGVAEGPGLAFSEDVLSVFGANLSLSAAQLQHLLEQMGAASRVGVPEPGQLHFNQCLTAEEIFSLHGFSNATQITSSKFSVICPAVLQQLNFHPCEDRPKHKTRPSHSEVWGYGFLSVTIINLASLLGLILTPLIKKSYFPKILTFFVGLAIGTLFSNAIFQLIPEAFGFDPKVDSYVEKAVAVFGGFYLLFFFERMLKMLLKTYGQNGHTHFGNDNFGPQEKTHQPKALPAINGVTCYANPAVTEANGHIHFDNVSVVSLQDGKKEPSSCTCLKGPKLSEIGTIAWMITLCDALHNFIDGLAIGASCTLSLLQGLSTSIAILCEEFPHELGDFVILLNAGMSTRQALLFNFLSACSCYVGLAFGILVGNNFAPNIIFALAGGMFLYISLADMFPEMNDMLREKVTGRKTDFTFFMIQNAGMLTGFTAILLITLYAGEIELE

SEQ ID NO: 1974 - DNA, 3089 bp, Homo sapien
gggggccctccgcaggttcagtcctcgcgtcggccgccccgcgctcagtcgcgcgcaccttctctcgcggccgggggaccgcagcgcggggctagcccggagacccggccaccggcctggggcgccttcacgccgtctcggagcggataatgcggtgagcaggcaccacgccggcagactcggctggatctgcgcacagcggcagggattgcgtgcgcccgcgggaggcccggggcagcggctgggatcctcagcggcggccggtttgtcctggttgtggtcaagactggatgatgtaactggctctctaggaagcctcacttggccgtaacctcaggaaggttctctttgaccccatctcatttcgaagccacttctgaagccacttgagaaaaatgatgtgacagttcctatcaaaaaggattcagaaacatataccatctgtgaagaaagtggccctttctcccgcttgcaaaatagacattctcaaattccaaaatgccagccaagaccccaatttacctgaaagcagccaataacaagaaaggaaagaaatttaaactgagggacattctgtctcctgatatgatcagtcccccgcttggagactttcgccacaccatccacattggcaaagagggccagcacgatgtctttggagatatttcctttcttcaagggaactacgagcttttacctggaaaccaggagaaagcacacctgggccagttccctgggcataatgagttcttccgggccaacagcacctcggactctgtgttcacagaaacgccctccccggtgctcaaaaatgccatctccctcccgaccattggaggatcccaagctctcatgttgcccttattgtcaccagtgacatttaattccaaacaggagtccttcgggccagcaaagctgcccaggcttagctgcgagcccgtcatggaggaaaaagctcaggagaaaagcagtctgttggagaatgggacagtccaccagggagacacctcgtggggctccagcggttctgcatctcagtccagccaaggcagagacagccactcctccagcctgtccgaacagtaccccgactggccagccgaggacatgtttgaccatcccaccccatgcgagctcatcaagggaaagactaagtcagaggagtccctctctgaccttacaggttccctcctctccctgcagcttgatcttgggccctcacttttggatgaggtgctgaatgtaatggataaaaataagtaacaagatgccaacttttttcctttggggtaaaaggtacaaaaacaaactaaccacagttgaagagaagggcttccggagctgtatttgcagttttgtgttgggttttctaaaataatattcttacaaagtatttttttacctgttatgccctgtttgcaaaaacaatttagaaaaaaacaacaaagcaaaacctatcttggcaaaaaaaggaagtgagtcagagcccattttcaggaggcattggtgatgttcggctcacatattgtttgcagacacacaagaaatctggcttggccaggattggcactagctatgaagggctgagcgagtcacattaaggaacttcacggaactttatagcactccgacattttctgagcaagaggaagtcaaaatttatttaacacctaagcctttttgtagactcttttctatatattgcttaggctcaccatagtgaattctccagtgttaaaacttttctgttttcacatttgaactttatgggttttggggattttcttgtagttcttatatatccctatatattatatctatattgcaaaattttgactgtcagctacatgttggtaagacacaggcaaagtattactgtaactaagttatttttaaagttaaaatatatttttacgtgcctttggctttttattgcagagtctacattttatagattctacatcagatgttgtcacttatttccattgggattccattgtaagctgtgtatgtgcgtgtttggaaaagtgtattcatacttagtttttttttcttcatctgttatcatacttttaacagcaaccaataacggattgtaaagtgtaaaggcacaggttactcatgatgcttctgcagagactgtgggctacaccacatatgttatttggaaatataggtattttagtacagtacatacttgcattacataggtacttcaagcaacacaataaaaagtaaatgataaagtgaacttgcttgtttatagtaataaacaagaccataagagaataagtatagctagagaaattgcttctctgaaatgtacatgagcccttaaggtaagagatgatttccatctactctcattttgattacttccttatggtttgagaggctagaaactgagcctctctacttttggaaaaatgaacatgtgaggtcagatttttttttttttttaagtcagcactgatgccaccctctcagtggtcatttctgagcatcttcctgacttgaacaccttctacagcaaactcttgcaagtccagtttcatccctgtaaggcaaatgtcttttcacgcagaaagtgccatatagacgagataaaggcagctaaaacgagggcagtagagagcacttacccgaccccaaggtgccagagatgccctgaggatggtggttaaggaaacaggagcaggaaatgtacacacagattcctgtccctttgccaactactccttccccatcaaagaaaaacacttgcacacagtaactaccagctccttctctcaaacttgtatttctcctggaaatgtatctcagaaatgacctcctctcccaaccacttcaacgattctttctttgggtttggggttcttgcagttctatcatctaaaataacctttggactgcaggtaaaatgcaattaggacaactaaccaagtagacgaaacaagttcccctaggcaggggtgtccaatattttagcttccctggaccgcattggaagaattttcttgggccacatgtaaaacacactaacactaaccatagttgatgagcttaaaaaaataaaaatagaaaattgc

SEQ ID NO: 1975 - protein, 225 aa, Homo sapien [sequence omitted]

SEQ ID NO: 1976 - DNA, 3981 bp, Homo sapien
cgggctgagagggacctggggagctgcggcctggccggggcggcgcactcaggtggcctcgcttccctgcgggtcaccgcccgccactcgcacagctaggtcggcctgttgggatcgggagaggtgggcgcacgagttttagtgcgggagtccggggtgcgggcggagtcctattgtccccgtgcacccgggcggcagcacctccgggtccctctttaaaccgagcgtccggcgacctttctttgtgcttagggagtcgaaagcggcatcttctccgagagaagtcgcctactggggggtggcgctggggaggtaacaatgggcgcccattgtcctccgagggtccaacggtgacccccccccgcgcgcgcgcccggccaccggttggccccgggccagggcacaggtaccgcggctgggagggtcggccccgctgcccgcgccctccgccccgccccagtgagtccccgcgccgccggccccgccccgcgccgccccgccctccgcaggttcagtcctcgcgtccggccgccccgcgctcagtcgcgcgcaccttctctcgcggccgggggaccgcagcgcggggctagcccggagacccggccaccggcctggggcgccttcacgccgtctcggagcggataatgcggtgagcaggcaccacgccggcagactcggctggatctgcgcacagcggcagggattgcgtgcgcccgcgggaggcccggggcagcggctgggatcctcagcggcggccggtttgtcctggttgtggtcaagactggatgatgtaactggctctctaggaagcctcacttggccgtaacctcaggaaggttctctttgaccccatctcatttcgaagccacttctgaagccacttgagaaaaatgatgtgacagttcctatcaaaaaggattcagaaacatataccatctgtgaagaaagtggccctttctcccgcttgcaaaatagacattctcaaattccaaaatgccagccaagaccccaatttacctgaaagcagccaataacaagaaaggaaagaaatttaaactgagggacattctgtctcctgatatgatcagtcccccgcttggagactttcgccacaccatccacattggcaaagagggccagcacgatgtctttggagatatttcctttcttcaagggaactacgagcttttacctggaaaccaggagaaagcacacctgggccagttccctgggcataatgagttcttccgggccaacagcacctcggactctgtgttcacagaaacgccctccccggtgctcaaaaatgccatctccctcccgaccattggaggatcccaagctctcatgttgcccttattgtcaccagtgacatttaattccaaacaggagtccttcgggccagcaaagctgcccaggcttagctgcgagcccgtcatggaggaaaaagctcaggagaaaagcagtctgttggagaatgggacagtccaccagggagacacctcgtggggctccagcggttctgcatctcagtccagccaaggcagagacagccactcctccagcctgtccgaacagtaccccgactggccagccgaggacatgtttgaccatcccaccccatgcgagctcatcaagggaaagactaagtcagaggagtccctctctgaccttacaggttccctcctctccctgcagcttgatcttgggccctcacttttggatgaggtgctgaatgtaatggataaaaataagtaacaagatgccaacttttttcctttggggtaaaaggtacaaaaacaaactaaccacagttgaagagaagggcttccggagctgtatttgcagttttgtgttgggttttctaaaataatattcttacaaagtatttttttacctgttatgccctgtttgcaaaaacaatttagaaaaaaacaacaaagcaaaacctatcttggcaaaaaaaggaagtgagtcagagcccattttcaggaggcattggtgatgttcggctcacatattgtttgcagacacacaagaaatctggcttggccaggattggcactagctatgaagggctgagcgagtcacattaaggaacttcacggaactttatagcactccgacattttctgagcaagaggaagtcaaaatttatttaacacctaagcctttttgtagactcttttctatatattgcttaggctcaccatagcgaattctccagtgttaaaacttttctgttttcacatttgaactttatgggttttggggattttcttgtagttcttatatatccctatatattatatctatattgcaaaattttgactgtcagctacatgttggtaagacacaggcaaagtattactgtaactaagttatttttaaagttaaaatatatttttacgtgcctttggctttttattgcagagtctacattttatagattctacatcagatgttgtcacttatttccattgggattccattgtaagctgtgtatgtgcgtgtttggaaaagtgtattcatacttagtttttttttcttcatctgttatcatacttttaacagcaaccaataacggattgtaaagtgtaaaggcacaggttactcatgatgcttctgcagagactgtgggctacaccacatatgttatttggaaatataggtattttagtacagtacatacttgcattacataggtacttcaagcaacacaataaaaagtaaatgataaagtgaacttgcttgtttatagtaataaacaagaccataagagaataagtatagctagagaaattgcttctctgaaatgtacatgagcccttaaggtaagagatgatttccatctactctcattttgattacttccttatggtttgagaggctagaaactgagcctctctacttttggaaaaatgaacatgtgaggtcagatttttttttttttttttaagtcagcactgatgccaccctctcagtggtcatttctgagcatcttcctgacttgaacaccttctacagcaaactcttgcaagtccagtttcatccctgtaaggcaaatgtcttttcacgcagaaagtgccatatagacgagataaaggcagctaaaacgagggcagtagagagcacttacccgaccccaaggtgccagagatgccctgaggatggtggttaaggaaacaggagcaggaaatgtacacacagattcctgtccctttgccaactactccttccccatcaaagaaaaacacttgcacacagtaactaccagctccttctctcaaacttgtatttctcctggaaatgtatctcagaaatgacctcctctcccaaccacttcaacgattctttctttgggtttggggttcttgcagttctatcatctaaaataacctttggactgcaggtaaaatgcaattaggacaactaaccaagtagacgaaacaagttcccctaggcaggggtgtccaatattttagcttccctggaccgcattggaagaattttcttgggccacatgtaaaacacactaacactaaccatagttgatgagcttaaaaaaataaaaatagaaaattgcaaaaaaaaaaaaaaaaaaaaatctcagactgttttaagaaagtttaaaaatttgtgttggacttcatgcgggccacaggttggacaagcttgccctagggcattgtgtgctttccgtaacttctcagttgtatttcgttatccatgactctccagtgttttttctgttggaccacacccgtcacagttcacagttccaaagagaaatttcccagcctattctaaatcttgttaatgacgaagagtccaatgtatctcattatttgtagccaattttagactcttttcaatacctcccccccattttaattagtattgatcatattcagtctttcattttactcttcatctgtagcgtgacctcaaggtaaagatgaaactatttcatgaaaaggg

SEQ ID NO: 1977 - protein, 254 aa, Homo sapien
MPAKTPIYLKAANNKKGKKFKLRDILSPDMISPPLGDFRHTIHIGKEGQHDVFGDISFLQGNYELLPGNQEKAHLGQFPGHNEFFRANSTSDSVFTETPSPVLKNAISLPTIGGSQALMLPLLSPVTFNSKQESFGPAKLPRLSCEPVMEEKAQEKSSLLENGTVHQGDTSWGSSGSASQSSQGRDSHSSSLSEQYPDWPAEDMFDHPTPCELIKGKTKSEESLSDLTGSLLSLQLDLGPSLLDEVLNVMDKNK

SEQ ID NO: 1978 - DNA, 1378 bp, Homo sapien
agcgtcggactaccgttggtttccgcaacttcctggattatcctcgccaaggactttgcaatatatttttccgccttttctggaaggatttcgctgcttcccgaagtcttggacgagcgctctagctctgtgggaaggttttgggctctctggctcggattttgcaatttctccctggggactgccgtggagccgcatccactgtggattataattgcaacatgacgctggaagagctcgtggcgtgcgacaacgcggcgcagaagatgcagacggtgaccgccgcggtggaggagcttttggtggccgctcagcgccaggatcgcctcacagtgggggtgtacgagtcggccaagttgatgaatgtggacccagacagcgtggtcctctgcctcttggccattgacgaggaggaggaggatgacatcgccctgcaaatccacttcacgctcatccagtccttctgctgtgacaacgacatcaacatcgtgcgggtgtcgggcatgcagcgcctggcgcagctcctgggagagccggccgagacccagggcaccaccgaggcccgagacctgcattgtctcctggtcacgaaccctcacacggacgcctggaagagccacggcttggtggaggtggccagctactgcgaagaaagccggggcaacaaccagtgggtcccctacatctctcttcaggaacgctgaggcccttcccagcagcagaatctgttgagttgctgccacaaacaaaaaatacaataaatatttgaaccccctcccccccagcacaacccccccaaaacaacccaacccacgaggaccatcgggggcagagtcgttggagactgaagaggaagaggaggaggagaaggggagtgagcggtccgcccccagggacgctctccaggagctggcggccgccgatcagatggagaaggggggacccaggccagcaggagacaggacccccgaagctgaggccttgggatggagcagaagccggagtggcggggcacgctgccgccttccccatcacggagggtccagactgtccactcgggggtggagtgagactgactgcaagccccaccctccttgagactggagctggcgtctgcatacgagagacttggttgaacttggttggtccttgtctgcaccctcgacaagaccacactttgggacttgggagctggggctgaagttgctctgtacccatgaactcccagtttgcgaattatagagacaatctattttgttacttgcacttgttattcgaaccactgagagcgagatgggaagcatagatatctatatttttatttctactatgagggccttgtaataaatttctaaagcctctgaaaaaaaaaaaaaaa

SEQ ID NO: 1979 - protein, 160 aa, Homo sapien
MTLEELVACDNAAQKMQTVTAAVEELLVAAQRQDRLTVGVYESAKLMNVDPDSVVLCLLAIDEEEEDDIALQIHFTLIQSFCCDNDINIVRVSGMQRLAQLLGEPAETQGTTEARDLHCLLVTNPHTDAWKSHGLVEVASYCEESRGNNQWVPYISLQER

SEQ ID NO: 1980 - DNA, 817 bp, Homo sapien
cggacgcgtggggaaggatttcgctgcttcccgaaggtcttggacgagcgctctagctctgtgggaaggttttgggctctctggctcggattttgcaatttctccctggggactgccgtggagccgcatccactgtggattataattgcaacatgacgctggaagagctcgtggcgtgcgacaacgcggcgcagaagatgcagacggtgaccgccgcggtggaggagcttttggtggccgctcagcgccaggatcgcctcacagtgggggtgtacgagtcggccaagttgatgaatgtggacccagacagcgtggtcctctgcctcttggccattgacgaggaggaggaggatgacatcgccctgcaaatccacttcacgctcatccagtccttctgctgtgacaacgacatcaacatcgtgcgggtgtcgggcatgcagcgcctggcgcagctcctgggagagccggccgagacccagggcaccaccgaggcccgagacctgcattgtctcctggtcacgaaccctcacacggacgcctggaagagccacggcttggtggaggtggccagctactgcgaagaaagccggggcaacaaccagtgggtcccctacatctctcttcaggaacgctgaggcccttcccagcagcagaatctgttgagttgctgccacaaacaaaaaatacaataaatatttgaaccccctcccccccagcacaacccccccaaaacaacccaacccacgaggaccatcgggggcagagtcgttggagactgaagaggaagaggaggaggagaaggggagtgagcggccgc

SEQ ID NO: 1981 - protein, 114 aa, Homo sapien
MNVDPDSVVLCLLAIDEEEEDDIALQIHFTLIQSFCCDNDINIVRVSGMQRLAQLLGEPAETQGTTEARDLHCLLVTNPHTDAWKSHGLVEVASYCEESRGNNQWVPYISLQER

SEQ ID NO: 1982 - DNA, 1286 bp, Homo sapien
gctctttccaacgctgtaaaaaaggacagaggctgttccctatggcagaaggcaaccacagaaaaaagccacttaaggtgttggaatccctgggcaaagatttcctcactggtgttttggataacttggtggaacaaaatgtactgaactggaaggaagaggaaaaaaagaaatattacgatgctaaaactgaagacaaagttcgggtcatggcagactctatgcaagagaagcaacgtatggcaggacaaatgcttcttcaaaccttttttaacatagaccaaatatcccccaataaaaaagctcatccgaatatggaggctggaccacctgagtcaggagaatctacagatgccctcaagctttgtcctcatgaagaattcctgagactatgtaaagaaagagctgaagagatctatccaataaaggagagaaacaaccgcacacgcctggctctcatcatatgcaatacagagtttgaccatctgcctccgaggaatggagctgactttgacatcacagggatgaaggagctacttgagggtctggactatagtgtagatgtagaagagaatctgacagccagggatatggagtcagcgctgagggcatttgctaccagaccagagcacaagtcctctgacagcacattcttggtactcatgtctcatggcatcctggagggaatctgcggaactgtgcatgatgagaaaaaaccagatgtgctgctttatgacaccatcttccagatattcaacaaccgcaactgcctcagtctgaaggacaaacccaaggtcatcattgtccaggcctgcagaggtgcaaaccgtggggaactgtgggtcagagactctccagcatccttggaagtggcctcttcacagtcatctgagaacctggaggaagatgctgtttacaagacccacgtggagaaggacttcattgctttctgctcttcaacgccacacaacgtgtcctggagagacagcacaatgggctctatcttcatcacacaactcatcacatgcttccagaaatattcttggtgctgccacctagaggaagtatttcggaaggtacagcaatcatttgaaactccaagggccaaagctcaaatgcccaccatagaacgactgtccatgacaagatatttctacctctttcctggcaattgaaaatggaagccacaagcagcccagccctccttaatcaacttcaaggagcaccttcattagtacagcttgcatatttaacattttgtatttcaataaaagtgaagacaaacg

SEQ ID NO: 1983 - protein, 377 aa, Homo sapien
MAEGNHRKKPLKVLESLGKDFLTGVLDNLVEQNVLNWKEEEKKKYYDAKTEDKVRVMADSMQEKQRMAGQMLLQTFFNIDQISPNKKAHPNMEAGPPESGESTDALKLCPHEEFLRLCKERAEEIYPIKERNNRTRLALIICNTEFDHLPPRNGADFDITGMKELLEGLDYSVDVEENLTARDMESALRAFATRPEHKSSDSTFLVLMSHGILEGICGTVHDEKKPDVLLYDTIFQIFNNRNCLSLKDKPKVIIVQACRGANRGELWVRDSPASLEVASSQSSENLEEDAVYKTHVEKDFIAFCSSTPHNVSWRDSTMGSIFITQLITCFQKYSWCCHLEEVFRKVQQSFETPRAKAQMPTIERLSMTRYFYLFPGN

SEQ ID NO: 1984 - DNA, 853 bp, Homo sapien
gcctgctgctctggcccctggtcctgtcctgttctccagcatggtgtgtctgaggctccctggaggctcctgcatggcagttctgacagtgacactgatggtgctgagctccccactggctttggctggggacaccagaccacgtttcttggagtactctacgtctgagtgtcatttcttcaatgggacggagcgggtgcggtacctggacagatacttccataaccaggaggagaacgtgcgcttcgacagcgacgtgggggagttccgggcggtgacggagctggggcggcctgctgcggagcactggaacagccagaaggacctcctggagcagaagcggggccgggtggacaactactgcagacacaactacggggttgtggagagcttcacagtgcagcggcgagtccatcctaaggtgactgtgtatccttcaaagacccagcccctgcagcaccataacctcctggtctgttctgtgagtggtttctatccaggcagcattgaagtcaggtggttccggaatggccaggaagagaagactggggtggtgtccacaggcctgatccacaatggagactggaccttccagaccctggtgatgctggaaacagttcctcggagtggagaggtttacacctgccaagtggagcacccaagcgtgacaagccctctcacagtggaatggagagcacggtctgaatctgcacagagcaagatgctgagtggagtcgggggctttgtgctgggcctgctcttccttggggccgggctgttcatctacttcaggaatcagaaaggacactctggacttcagccaagaggattcctgagctgaagtgcagatgac

SEQ ID NO: 1985 - protein, 266 aa, Homo sapien [sequence omitted]

SEQ ID NO: 1986 - DNA, 7163 bp, Homo sapien
tgaccctgaggcattgccgtcgcgcggtgcacagctaagacgtcgcgcttgcgcaggcgctcggcgcagaggcctgcgggaagccaagatggcgcataggggttctccaggctgcagttggcgccttatcagtatctaagcggagtgttttggaaggagttaaggggctgtggcaaacgccctctccgccgtcatggcccggcatcggaatgttcgaggctataactacgatgaagattttgaagatgatgatctctacggccagtctgtagaggatgattattgtatttcgccgtcaacagctgctcagtttatttattcacggcgtgacaaaccttccgttgagcctgtggaagaatatgattatgaagatctgaaagaatcttccaattctgtttcaaaccatcagctcagtggatttgatcaagctcgtctttattcatgccttgatcacatgagagaggtacttggagatgctgtgccagatgaaatattaattgaagcagttctgaagaacaagtttgatgtgcagaaggctttgtcaggggttctggaacaagatagagtgcagagtttgaaggacaagaatgaggcaacagtatctacaggaaagatagcaaaaggaaaaccagtagattcccagacatcgcgaagtgaatctgaaattgtgccaaaagttgctaaaatgactgtatctggaaagaagcaaactatgggatttgaagtgcctggagtatcttctgaagaaaatggtcatagtttccacacacctcaaaaaggaccgcccattgaagatgccattgcttcttccgatgttcttgagactgcttctaaatctgctaatccaccccacacgattcaagcatcagaagagcagagttcaaccccagcaccggtgaaaaagtctggcaagctgaggcagcaaatagatgtgaaggcggaactggagaagcggcaaggagggaagcagctactcaacttagtggtcattggtcatgttgatgctgggaaaagtactctgatgggccatatgctttatcttctgggtaatataaacaaaagaactatgcataagtatgaacaggagtctaaaaaggctggcaaagcttcgtttgcatatgcatgggtcttggatgaaactggcgaagaaagggaaaggggagtaaccatggatgttggtatgacaaagtttgaaaccacaaccaaagttattacattaatggatgctccaggccataaggacttcattccaaatatgattacaggagcagcccaggcggatgtagctgttttagttgtagatgccagcaggggagagtttgaagctggatttgagactggaggacaaacacgagagcatggactcttggtccgttctctgggagtgacgcagcttgcagttgcagttaataaaatggatcaggttaattggcaacaagaaaggtttcaagagattactggaaaacttgggcactttcttaagcaagcaggttttaaggagagtgatgtaggttttattcctacaagtggtctcagtggtgaaaatctaatcacaagatctcagtcaagtgaactcacaaaatggtataaaggactatgtttattagaacaaattgattcctttaagcctccccagcgatctattgacaaaccttttagattatgtgtgtccgatgttttcaaagatcaaggatctggattttgcataactggtaaaatagaagctggttatatccaaactggtgaccgactactggcaatgcctcctaatgaaacttgtaccgtgaaaggaatcactctgcatgatgaacctgtcgactgggcggcagcaggcgatcatgttagtcttactttggttgggatggatatcatcaaaatcaatgttggctgcatattttgtggccccaaagtacccattaaagcttgcactcgtttcagagcccgaatcctcatctttaatattgaaattcctatcactaaaggatttcctgtgctgttacactaccaaactgtcagtgaacccgccgttattaaacgattgattagtgtcttaaacaaaagcacgggtgaagtcacaaagaaaaagcctaagtttttgactaaaggccagaatgcattggtagagctacagacacaaagaccaatagctcttgagctatataaagactttaaagagctggggaggttcatgctacgttacggtggttctacaatagctgctggtgttgtcactgagataaaagaatgatgggtcagaatttctaccacgtttctggatacagtgaaatagctaacctctgtttcaagaatgcagttattaagtcaaaggaacaatgtgcaattgatatgtttttagatgagagagaaaaattaaagctaaaattagctgcaaagaagtattaataatcacctctgcaaaaattctaagttgccaactggcaaagaaagtctaatgttaaaaacaactttgcctttgaaacgttaataaatggatttactttgctaagatttatggcaagtgtcaaaaatagtatctgaagatactgaatcatcatgaaatgaactctacttctggccaaagcacaatgtatttgcagttttctcttttgattcaattatactgcacatgttttaaggaaaagtaacttaattgggtttttcaggcagttgatatttgacctaagcttttttttttttttttttttccagttaatgctaagaaaagatttggggaaggttataataaaagtattttgtggtgaccataagaatgtccctccccaaaacaagtaaacttgtgaaagtttaatttggaattagtggaagctgttcctttgaaagccaagatattatttaagttgtaaagccagctaataaaatgccttagtttgagcataatacaaactgtgttttgttctttagacatttatgagattctctgccactaacagtaaatatgatttaggggttttgtgggatctttttcacctaagagtttcctagctctgtcacatgaattcttttttatcctaatggcagatccaatttcatctcattcatttttttaaccataacttgcttttcccattctcacttttagaattatacctatgatggccctttctttatcttgcttaccttatagattataagtcccctgtgagtaagtaagagtcatgtttttctttaaagtttcaacaacaaaccccaaggtttatttatttaacaacaggtattcgttgaggtgccttctgggtgcaaggagctttagagtagattttgacctcagctgaacctggaactctgatctgatagactgtttatgataagcttttttttttattagcagcgtgatttgtatatcgatggcttaacatatacaacagcatttcttctccctgcaccttttcgtgaacctgacattttgaacataagcaataacatctgtatggtaaagtaggcagattatacatgtgttgcttagtgaatgattaccaagtgaacacacttggtatattgctttaccaaaatacatgtgtagttgtcacttcagattcactgagttaagaaagttttatttaaatattaatattaatcaagaatttaacagatatatgtgacagaaatctaacttcaagtgactgaagcagaaagaaaaatttttgaatgacataactgagaaaattagaggtagctctagctttgattccatttagatcgagcagctcacacaatgttagcaaggactcatctccactctgccttccctggtgctggttttgctctcaaactctatatagaactctcggccgggcgcggtggctcacacctgtaatcaaaacactttgggaggctgagtcgggaggatagcgtgagcccaggagtttgagaccagctaaggcaatatagtgagaccatgtctctacagaaaaaatttaaaaacagatcagctgggtgtggtgccacatgcctgtagtcccagcttctcaggaggctggggtgggaagatcacttgagcccaggaggtcgaggctgcagtgagccatgatcacatcactgcagtccagcctgggtgacagagcaagacctgtcaccctgccacccataaaaaacctcttctgtaatgccaggttcttgacaagatgtgataattccacacttacatcctcagatctcccatccagggcaaggacagactaaaagagcatatcttctccagaagtcctagaaacatctcatcattgactatgattgaattttatttattaatacttccctaggatatcctgtgtttgagtgtgaagttaatatcacacaaagcatgtagctaacagttgtgtgagggttggaaattcagggtgctgttaggaaggggaaatggattggggtttaaggtagggggagtaaaaacaagaaaccatccactctgtatattatataagactgtgatcgaattaagaattttagtttacagtttagcataaacaaatagtagtagaaatgaatgcatttattcattccttccttctccaatagtgtttaagtacaatctttttatttgcattttattgatgattgattgtggttgaaaggagtggtgatattatttcgaggatccactgtgtaagaagactgttggcagtggaaggctcgagttgattaagtgacaaagaggtaaagcagacatgcccaagcttggttatgctctgatttcctaccctgttactttcatccataatttatagtacatccattttgtgtcattttgcttcaggtatttcttgtcctgactgtcttcttttttatgattttactgtttcttcacactaatggctttgtcctctgactttgactctttgtgagattcttctgagcagttaacctctaggataatgtggcttgaacacattacagaactatgttttgacttgttagtattattcacacattcatgacaattgagcctctctactgtgagaaatgttttagaggccagtttctaggcatagctgtttttctcccatgagtatgcaaatcaatagttttaaccattgttaaaatgcaatcatagtgacttcagaaaatttggaaaatacagaaaatatagggaagaataaaattaacccacagttctgtcacctaaaggtaactgctgccaatgttttcatgtatttcttttctgtctctccaatgcatttttttacatagttgtgagcgttagccaagttattttcatgttgttatgtaatcaatatttttcaatagaagtattagaggttttttttattgatataaaaataacaattacagatcctgatatatagaagttattcaaaattatacagttttcaaaaaatcaagacaagtaggcccaatacaaactactgaatcatcttctaatttccctctaaaatatttatagaaatatgtaagtagaaaaacattcatcctttcctcgtctaattatgatcctgccatattccaggcacaagagaaagctctggggcttgagtcttaatagggctgatagtccaaccaggggacagggtatcataaagagataattcaaaactttaagattggagggtaggtgatggtagaaaattctgcggcaaacatttgttgatgctcatcatttgttgatgtcatcaaagatcaccagggcataattataatcaaaattagttttattgatgcttgctgcagcaagagagactgcacaccactggggtctatgggtgcttctcagtgggaaggtgtaaggaggggcttgctaagaatttgagcacatgtagctaattttaaggagggctcaagtgagcaagggtttcttctggattgagtgctgtcagaaagtggattgagtgctgtcagaaagtgggagtgattttgcaactgggtatcttaatttttatgttgtgggtgggaggaaaggaaagaagcaacagtcacccatgttagccacaagaagaggttggctgtttatggtttgcacagtgactttgtttttatctgtgctcaggcatgattacagtatctcattttatccggattacagtgacctcatctgatgttagagatttgagaattgttaaatgttcagcaggagaacgccaccgcctagtgtgaatgctaggtcagaagctgctttttcacactgaaaccatttaagtatgtacaaataagttaatagtgtaaatgtaggtgtaaaatacaatgcaaaacaaaataatgaagtaagtgaattaaattattgcaccaaatatggggatatgaaatagggaaagaaaagcattaagttacttatagtccataaagggactacattattttgttactctgataatcccataaaacaaagttttaagaatgtttacagtaaccatgaatggaattagtgaaactattcatatcaatgcaaaaaaaaaaaaaaaaaaaagcaaagaaactaagtctgtacagcaaaagatggtaaggaaacaagaaaattaaatgaagacaaaggttgtgattattacagtaaatgaaaataggtttttatctttaaaatgtagactcaaactgcaaagctaatgatatgctatctgcaaaatattcctattttgtaaataaataaaaccatagatttaaagaagaaagggcacagatgtactggggagacaaaaataactgatccgttgggtgtataccatgtgccaagcaattttcatatactcatttaacatgacatatctataattatatgaggcagatattattaacctcagtctatagatgagaagactaaagctcagagggattgctaaaaactagtaaataaattatggaaccatgatttgaatttagatttaagtctgactgaggcatgttcaaagacactacactgcctctccagaaatcaggagtagcaatattaacactggacaaagaatttaaagcaagtaaaaaaaaattaagagaatttcatattaataacaagtataatgcacaataaaactgtaccaaatgacataaaaatgcataatgaaatttattagaaattaaaaattaaagggcatagttacaattattgaggaattctcatagctctgccttatagatcatgtaaacaaacaaggtcatagaggacttaaatagcaaagcagaaaaaaaaaaaaaaaaaa

SEQ ID NO: 1987 - protein, 684 aa, Homo sapien
MARHRNVRGYNYDEDFEDDDLYGQSVEDDYCISPSTAAQFIYSRRDKPSVEPVEEYDYEDLKESSNSVSNHQLSGFDQARLYSCLDHMREVLGDAVPDEILIEAVLKNKFDVQKALSGVLEQDRVQSLKDKNEATVSTGKIAKGKPVDSQTSRSESEIVPKVAKMTVSGKKQTMGFEVPGVSSEENGHSFHTPQKGPPIEDAIASSDVLETASKSANPPHTIQASEEQSSTPAPVKKSGKLRQQIDVKAELEKRQGGKQLLNLVVIGHVDAGKSTLMGHMLYLLGNINKRTMHKYEQESKKAGKASFAYAWVLDETGEERERGVTMDVGMTKFETTTKVITLMDAPGHKDFIPNMITGAAQADVAVLVVDASRGEFEAGFETGGQTREHGLLVRSLGVTQLAVAVNKMDQVNWQQERFQEITGKLGHFLKQAGFKESDVGFIPTSGLSGENLITRSQSSELTKWYKGLCLLEQIDSFKPPQRSIDKPFRLCVSDVFKDQGSGFCITGKIEAGYIQTGDRLLAMPPNETCTVKGITLHDEPVDWAAAGDHVSLTLVGMDIIKINVGCIFCGPKVPIKACTRFRARILIFNIEIPITKGFPVLLHYQTVSEPAVIKRLISVLNKSTGEVTKKKPKFLTKGQNALVELQTQRPIALELYKDFKELGRFMLRYGGSTIAAGVVTEIKE

SEQ ID NO: 1988 - DNA, 2132 bp, Homo sapien
gccatgtgccgcaccctggccgccttccccaccacctgcctggagagagccaaagagttcaagacacgtctggggatctttcttcacaaatcagagctgggctgcgatactgggagtactggcaagttcgagtggggcagtaaacacagcaaagagaatagaaacttctcagaagatgtgctggggtggagagagtcgttcgacctgctgctgagcagtaaaaatggagtggctgccttccacgctttcctgaagacagagttcagtgaggagaacctggagttctggctggcctgtgaggagttcaagaagatccgatcagctaccaagctggcctccagggcacaccagatctttgaggagttcatttgcagtgaggcccctaaagaggtcaacattgaccatgagacccgcgagctgacgaggatgaacctgcagactgccacagccacatgctttgatgcggctcaggggaagacacgtaccctgatggagaaggactcctacccacgcttcctgaagtcgcctgcttaccgggacctggctgcccaagcctcagccgcctctgccactctgtccagctgcagcctggacgagccctcacacacctgagtctccacggcagtgaggaagccagccgggaagagaggttgagtcacccatccccgaggtggctgcccctgtgtgggaggcaggttctgcaaagcaagtgcaagaggacaaaaaaaaaaaaaaaaaaaaaaatgcgctccagcagcctgtttgggaagcagcagtctctccttcaaatactgtgggactcatgctggagaggagccgcccacttccaggacctgtgaataagggctaatgatgagggttggtggggctctctgtggggcaaaaaggtggtatgggggttagcactggctctcgttctcaccggagaaggaagtgttctagtgtggtttaggaaacatgtggataaagggaaccatgaaaatgagaggaggaaagacatccagatcagctgttttgcctgttgctcagttgactctgattgcatcctgttttcctaattcccagactgttctgggcacggaagggaccctggatgtggagtcttcccctttggccctcctcactggcctctgggctagcccagagtcccttagcttgtacctcgtaacactcctgtgtgtctgtccagccttgcagtcatgtcaaggccagcaagctgatgtgactcttgccccatgcgagatatttatacctcaaacactggcctgtgagccctttccaagtcagtggagagccctgaaaggaggctcacttgaatccagctcagtgctctgggtggccccctgcaggtggcccctgaccctgcgttgcagcagggtccacctgtgagcaggcccgccctggggcctcttcctggatgtgccctctctgagttctgtgctgtctcttggaggcagggcccaggagaacaaagtgtggaggcctcggggagtggcttttccagctctcatgccccgcagtgtggaacaaggcagaaaaggatcctaggaaataagtctcttggcggtccctgagagtcctgctgaaatccagccagtgttttttgtggtatgagaacaggcaaaaagagatgccccgagatagaaggggagccttgtgtttctttcctgcagacgtgagatgaacactggagtgggcagaggtggcccaggaccatggcacccttagagtgcagaagctggggggagaggctgcttcgaagggcaggactggggataatcagaacctgcctgtcacctcagggcatcactgaacaaacatttcctgatgggaactcctgcggcagagcccaggctggggaagtgaactacccagggcagcccctttgtggcccaggataatcaacactgttctctctgtaccatgagctcctccaggagattatttaagtgtattgtatcattggttttctgtgattgtcataacattgtttttgttattgttggtgctgttgttatttattattgtaatttcagtttgcctctactggagaatctcagcaggggtttcagcctgactgtctccctttctctaccagactctacctctgaatgtgctgggaacctcttgga

SEQ ID NO: 1989 - protein, 202 aa, Homo sapien
MCRTLAAFPTTCLERAKEFKTRLGIFLHKSELGCDTGSTGKFEWGSKHSKENRNFSEDVLGWRESFDLLLSSKNGVAAFHAFLKTEFSEENLEFWLACEEFKKIRSATKLASRAHQIFEEFICSEAPKEVNIDHETRELTRMNLQTATATCFDAAQGKTRTLMEKDSYPRFLKSPAYRDLAAQASAASATLSSCSLDEPSHT

SEQ ID NO: 1990 - DNA, 3201 bp, Homo sapien
ggatccgcgcggcacacgtgcgacggccgtgatgaagttcgcttaccggttttcaaatttgctgggtacggtgtaccggcgtgggaacctaaattttacctgcaatggaaattcagttatcagtcccgtgggcaatagagtcactgtatttgaccttaaaaacaacaaatctgacacgctgcccctggccactcggtacaacgtcaagtgcgtggggctgtccccggatggccgcctcgctatcatcgtcgatgaagggggcgatgcgctgctggtcagcctggtctgcaggtctgtgctgcaccacttccacttcaagggctctgtgcacagtgtgtccttctcccctgatggcaggaagtttgttgtcacaaagggtaacattgcccagatgtatcatgcccctgggaagaagcgggagttcaacgccttcgttctggacaagacctattttgggccctacgatgagaccacctgcatcgactggacggatgactccaggtgctttgtggttgggagcaaagacatgtccacctgggtgttcggagccgagcgctgggacaacctcatctactatgcactggggggacataaggatgccatcgtggcctgcttctttgaatccaacagcctggacctgtactcactcagccaggacggagtgctgtgcatgtggcagtgtgacacgccccccgagggcttgcggctgaagccccctgcgggctggaaagcagacctgttgcagcgggaggaggaagaggaggaggaggaggaccaggagggcgacagagagaccaccatccggggaaaagccactccggccgaggaggagaagacaggaaaagtgaagtactcacggctggccaagtacttcttcaataaagaaggggattttaacaacctgacagctgcagcatttcataagaagtctcacctcttggtcactggctttgcttctggaatcttccatcttcatgagctgccagagtttaacctcatccactccctgagcatctcagatcagagcatcgcctcagtggccatcaatagctcgggggactggattgcttttggctgttcaggcctgggccagctgctggtgtgggagtggcagagtgagtcctacgtgctcaagcagcagggccacttcaacagcatggtggccctggcctactcgcccgacggacagtacatcgtgactggcggggacgacggcaaggtcaaggtgtggaataccctcagcggcttctgcttcgtcacttttacggagcactccagcggggtgaccggtgtgacctttactgccaccggctacgttgtggtgacctcatccatggacgggaccgtgcgagcctttgaccttcacaggtaccgaaacttccgcaccttcacctctccacgccccacccagttctcctgtgtggcggtggatgcgagcggtgagatcgtctctgcaggggcgcaggactcctttgagattttcgtgtggtccatgcagacaggcaggctccttgatgttttgtctggacacgaagggcccatcagtggtctgtgttttaacccaatgaagtccgtcctggccagtgcctcctgggacaagacggtgcgcctatgggacatgtttgacagctggaggaccaaggagacgctggccctgacctctgatgctctggctgtgacttttcgccctgatggtgcggagctggctgtggccacactgaactcacagatcaccttctgggaccctgagaacgcggtgcagacgggctccattgagggcaggcatgacctcaagactggcaggaaggagctggacaagattacagccaagcacgcggccaaggggaaggccttcaccgccctgtgctactctgcagacggccacagcatcctggcgggaggcatgtccaagttcgtgtgcatctaccacgtccgtgagcagattctcatgaagaggttcgagatctcttgcaacctgtctctggacgccatggaggaatttttgaaccgaagaaaaatgacagagtttggcaacctggcactaattgatcaggatgctgggcaggaggatggagtcgcgataccactgccaggcgtcaggaaaggtgacatgagttctcggcacttcaaacctgagatcagggtgacctcactccgcttctctcccactgggcgctgctgggcgggcaccaccacggagggactcctcatctactccctggacacccgcgtgctctttgacccgtttgagctggacaccagcgtcacccccgggagggtgcgcgaggcactgcgccagcaggacttcaccagggccatcctcatggccctccggctcaacgagagcaaactggtgcaggaggccctggaggcggtgcccaggggcgagattgaagtggtcacctcctcccttcctgaactgtatgtggagaaagtgctggagtttttagcttcctcctttgaagtgtctcgccacctggaattctacctcctctggactcacaaactgctcatgttgcacggacagaagctgaagtccagagccgggacgctgctgcctgtcattcagttcctccagaagagcatccagcggcacctggacgacctgtcgaaactctgtagctggaaccactataacatgcagtacgcactagcagtttccaagcagcggggcacaaaacgctccctagacccgctgggaagtgaggaggaggcagaagcatctgaagatgacagcctgcatctgcttggaggaggaggcagagactcagaagaagagatgctggcctagagccagccggttgcagcgttggattgtgccggctaagacctgccagggagatgggacccttgtgccacctgggccagcaaagaggaggggtccagagaacagctgaaatactgtcactagtggtagtgacttgcttttcctgtgcacacatgtagcccatcaggacagcgagccgacgggtcacgccaggggccggcacgcactggcacctggccccaggagcgggcccgtgtgaacggtgatgaatgttgaaaatgcgtctcagagaggtattcacatgaactttgtatgagacttatttatatttttaacataaaggtttgataaagaacttagggattaaaaaaaagatggagttttctaacgtgaggatgaagtctacacttcagattaaaaagggttatgttgta

SEQ ID NO: 1991 - protein, 919 aa, Homo sapien
MKFAYRFSNLLGTVYRRGNLNFTCNGNSVISPVGNRVTVFDLKNNKSDTLPLATRYNVKCVGLSPDGRLAIIVDEGGDALLVSLVCRSVLHHFHFKGSVHSVSFSPDGRKFVVTKGNIAQMYHAPGKKREFNAFVLDKTYFGPYDETTCIDWTDDSRCFVVGSKDMSTWVFGAERWDNLIYYALGGHKDAIVACFFESNSLDLYSLSQDGVLCMWQCDTPPEGLRLKPPAGWKADLLQREEEEEEEEDQEGDRETTIRGKATPAEEEKTGKVKYSRLAKYFFNKEGDFNNLTAAAFHKKSHLLVTGFASGIFHLHELPEFNLIHSLSISDQSIASVAINSSGDWIAFGCSGLGQLLVWEWQSESYVLKQQGHFNSMVALAYSPDGQYIVTGGDDGKVKVWNTLSGFCFVTFTEHSSGVTGVTFTATGYVVVTSSMDGTVRAFDLHRYRNFRTFTSPRPTQFSCVAVDASGEIVSAGAQDSFEIFVWSMQTGRLLDVLSGHEGPISGLCFNPMKSVLASASWDKTVRLWDMFDSWRTKETLALTSDALAVTFRPDGAELAVATLNSQITFWDPENAVQTGSIEGRHDLKTGRKELDKITAKHAAKGKAFTALCYSADGHSILAGGMSKFVCIYHVREQILMKRFEISCNLSLDAMEEFLNRRKMTEFGNLALIDQDAGQEDGVAIPLPGVRKGDMSSRHFKPEIRVTSLRFSPTGRCWAGTTTEGLLIYSLDTRVLFDPFELDTSVTPGRVREALRQQDFTRAILMALRLNESKLVQEALEAVPRGEIEVVTSSLPELYVEKVLEFLASSFEVSRHLEFYLLWTHKLLMLHGQKLKSRAGTLLPVIQFLQKSIQRHLDDLSKLCSWNHYNMQYALAVSKQRGTKRSLDPLGSEEEAEASEDDSLHLLGGGGRDSEEEMLA

SEQ ID NO: 1992 - DNA, 2240 bp, Homo sapien
ccccgcgggctgcagcgagccaggcatgctcactggcgcaggcccggcccgcagcccgagcaggaagcgccggcgtaggcggccccctgcgctgccagctggagccgggcggagccagcgccccggcgcagggtggctctgccagtccccgcgcgcctgggcggccgcacacgtgtccaggcgtcacgtccgcgcgcgcccccggggcttgcgtcagcggctgttccagaagcgggtgggccagggctctgcgcaccgctggggttcggggcccgggacgccgccgggaggagggcaccgcgcggggtccgacgcggaggcgtgctcggaacgccgggggctgcggagtgcatcagcgcggtccagccctccgcctgccgggcgccgagcgtctccgccgcccggacctgggctgggcgccgtggcgttgcctcggagctcgctgcccgcggggcgcgcaccgccttgacccgggcggccccgcggcaggcaggcgcccgcagttccatggttggttcggagcgcgatgagccgcccgtcctccaccggccccagcgctaataaaccctgcagcaagcagccgccgccgcagccccagcacactccgtccccggctgcgcccccggccgccgccaccatctcggctgcgggccccggctcgtccgcggtgcccgccgcggcggcggtgatctcgggccccggcggcggcggcggggccggcccggtgtccccgcagcaccacgagctgacctcgctcttcgagtgtccggtctgctttgactatgtcctgcctcctattctgcagtgccaggccgggcacctggtgtgtaaccaatgccgccagaagttgagctgctgcccgacgtgcaggggcgccctgacgcccagcatcaggaacctggctatggagaaggtggcctcggcagtcctgtttccctgtaagtatgccaccacgggctgttccctgaccctgcaccatacggagaaaccagaacatgaagacatatgtgaataccgcccctactcctgcccatgtcctggtgcttcctgcaagtggcaggggtccctggaagctgtgatgtcccatctcatgcacgcccacaagagcattaccacccttcaggaagaagacatcgtctttctagctacagacattaacttgccaggggctgtcgactgggtgatgatgcagtcatgttttggccatcacttcatgctggtgctggagaaacaagagaagtacgaaggccaccagcagttttttgccatcgtcctgctcattggcacccgcaagcaagccgagaactttgcctacagactggagttgaatgggaaccggcggagattgacctgggaggccacgccccgctcgattcatgacggtgtggctgcggccatcatgaacagcgactgccttgttttcgacacagccatagcacatctttttgcagataatgggaaccttggaatcaatgttactatttctacatgttgtccatgatgtgacttccgtaaaccttcaaaattatttgggcatactgctctatgtttaataaaggtttttatagatgttttattccatatgtcttcacaagtcaggacccacaattacccgtgttttgtttgaacagcagtgtcccatctggcttcgacccaacaaagttcattaacctgggatgaatggggttggcctgttggtgatttggatgctgttctgtgatctaaaacaactcttattgaattgtatttactccctaaacaacacttgacaggctgttgcacagggcttctatagatcagtgtgttaggaatgggaggccccttcctgcctgccttcccatattggtcccttgacattgacaaaagcacagtgactgtcagcagattcctttacttttgtttgtgggaggtaggaattgttttaatgcattttaaacagtgtttctgaaattggatggctggctaatagacactgaatcacccggagtgcttatcttaaaattgcagatttagggagcctgccaatttaacagtctcatcagtgatctttcaacagtaatgtttgagaattactgggttaaattgtggaaagggtccagattttaaaggtgctttaaggttgccctctgccgatactgtttgtctttctactgtttcatcccctaacttcccccaaccctcaaattaaaactagaactatagatccacatgaacgcacgcctgagatttggccactcacc

SEQ ID NO: 1993 - protein, 324 aa, Homo sapien
MSRPSSTGPSANKPCSKQPPPQPQHTPSPAAPPAAATISAAGPGSSAVPAAAAVISGPGGGGGAGPVSPQHHELTSLFECPVCFDYVLPPILQCQAGHLVCNQCRQKLSCCPTCRGALTPSIRNLAMEKVASAVLFPCKYATTGCSLTLHHTEKPEHEDICEYRPYSCPCPGASCKWQGSLEAVMSHLMHAHKSITTLQEEDIVFLATDINLPGAVDWVMMQSCFGHHFMLVLEKQEKYEGHQQFFAIVLLIGTRKQAENFAYRLELNGNRRRLTWEATPRSIHDGVAAAIMNSDCLVFDTAIAHLFADNGNLGINVTISTCCP

SEQ ID NO: 1994 - DNA, 3517 bp, Homo sapien
tgctgctgtcctggagggaaatggagcaggctgtggagctctgtgggcgggtaggagactcatttgggtttcggaacttaccaagggggtgagattttgtgctcccacttttcactttctcatcaaacactgggtcgatctctgtcaaaaatcaggtgttcctcaccatgctttgagcttaactggaccagctgaaaagaggccaagagagtagccagtgaagggagcccctctgtggccagatgcaagagctgcatgaatggacagagatggtccaggtttaaataagaagcaagggttaggttcccttggggaaaagccaagaccatttcctgttaggaagggcattggatggatgatcaacactccctcttgtcgaaggtttttgactaattttgttgggatgctaaatccataggaaataaaaggtctaggcagaaagtctcagggcagcgtaaatcagatgtcaccaaaaaaagttaattatgaaggcaaaggaaatacatgtgacttaatgaacctcacacaaactgaaggttgaagtcaggctccggggctttttcctggacttatcctctgttttcccctgtgtacttgggcaaggatcttcacctgtgtcttagtatcgatttttatgaatcagtactgatggagtatatgtgtgtttaatggtgaatattaaccatagaagggctgagtgctcctccccatcttgggactcataatctgtgaaataaaacagtctgggcctccctgcccgggtagcatcaggatagacagatgaagagaagagaaagtaatgtgtcttgggcatcttctgtatgccaggcaccatgccagaggctttaagtacttcatcttacttgactcctcagatggccctgttagaagcctattttatgcaaaaggaaactgtagctgggggtaagtaacttgccaaggggtcacacagctagaaagcggtggaccctagatgcaggcgcagggcattcagaccccacagtccacattcctttgagccagtccattgagggtcctcagggaatgtggcgggtcccctggtctcgctcccccgcagatcttgcatctcagcatgcgcctaccacatcagttgacattagcacagcttttccattaggagaacgaagtgaaactcctggtagaacggatgatggctctgcagaccgacattgtggacttacagaggagccccatgggccggaagcaggggggaacgctggacgacctagaggagcaagcaagggagctgtacaggagactaagggaaaaacctcgagaccagcgaactgagggtgacagtcaggaaatggtacggctgctgcttcaggcaattcagagcttcgagaagaaagtgcgagtgatctatacgcagctcagtaaaactgtggtttgcaagcagaaggcgctggaactgttgcccaaggtggaagaggtggtgagcttaatgaatgaggatgagaagactgttgtccggctgcaggagaagcggcagaaggagctctggaatctcctgaagattgcttgtagcaaggtccgtggtcctgtcagtggaagcccggatagcatgaatgcctctcgacttagccagcctgggcagctgatgtctcagccctccacggcctccaacagcttacctgagccagccaagaagagtgaagaactggtggctgaagcacataacctctgcaccctgctagaaaatgccatacaggacactgtgagggaacaagaccagagtttcacggccctagactggagctggttacagacggaagaagaagagcacagctgcctggagcaggcctcatgatgtggggggactcgaccccctgacatggggcagcccatagcaggccttgtgcggtggggggactcgaccccctgacatggggctgcctggagcaggccgcgtgacgtggggctgcctggccgcggctctcacatggtggttcctgctgcactgatggcccaggggtctctggtatccagatggagctctcgcttcctcagcagctgtgactttcacccaggacccaggacgcagccctccgtgggcactgccggcgccttgtctgcacactggaggtcctccattacagaggcccagcgcacatcgctggccccacaaacgttcaggggtacagccatggcagctccttcctctgccgtgagaaaagtgcttggagtacggtttgccacacacgtgactggacagtgtccaattcaaatctttcagggcagagtccgagcagcgcttggtgacagcctgtcctctcctgctctccaaaggccctgctccctgtcctctctcactttacagcttgtgtttcttctggattcagcttctcctaaacagacagtttaattatagttgcggcctggccccatcctcacttcctctttttatttcactgctgctaaaattgtgtttttacctactactttggtggttgtcctcttttcggcaaagttggagcgagtgccaagctctccatctgtggtcctttctgccaagagcgactcatagtaaccaggatgggagagcagctgccttattctgaatcccaaaaattacttgggggtgattgtcacagaggagggacagaaagggtatctgctgaccaccagcctgcctacccatgcccatgtctccattcctgctcaagcgtgtgtgctgggccggggagtccctgtctctcacagcatctagcagtattattaaatggattcattttaaaaatagctcctatattttgtaacatgtctcaaacactcatactgggttccacaatccactgttagaatacctatggttagggcttctgaactaaaataatggaaaattttaacaatttgtatagtgcctggatcattactagtgccataaccctgcttcttcaacatttcacagaacttctcttttatataaaggcaagagcacaaaatgagttcagatgatcacaaacaggtgagttttgttggagaagaaagttggagtaggagactttcacaagtggtttccatggagatagaatgaagcattctgtggtcaagtaagtttagggagctattcatgtttcacttgctttgtggagattcacactatgcactgggaaagtatctgaaaagtcttataataaagaaacaggcttaactttgtgtaagaacactgtttatcaatgtcatttggctatagaaacattttctcctgctgattgtgtgtgtgaaacatgtattaacattccaatgaactagcatttaataaagcacaattttggaaaccctggtaaatgacagtgggaaataacacccgaaaggcaaggacgggcagattggggagggaaaggatgttgggctaagggctgtgagcttatgttacaggcaactgagccactgaagaattttgacgaagaaaatgccaaccaaagcagtcattttaaaagtttatggctgttcagttacaggacaagttgtgaaaagaaagaaaaaaaaatgg

SEQ ID NO: 1995 - protein, 220 aa, Homo sapien
MMALQTDIVDLQRSPMGRKQGGTLDDLEEQARELYRRLREKPRDQRTEGDSQEMVRLLLQAIQSFEKKVRVIYTQLSKTVVCKQKALELLPKVEEVVSLMNEDEKTVVRLQEKRQKELWNLLKIACSKVRGPVSGSPDSMNASRLSQPGQLMSQPSTASNSLPEPAKKSEELVAEAHNLCTLLENAIQDTVREQDQSFTALDWSWLQTEEEEHSCLEQAS

SEQ ID NO: 1996 - DNA, 2145 bp, Homo sapien; identical to SEQ ID NO: 1499

SEQ ID NO: 1997 - protein, 403 aa, Homo sapien; identical to SEQ ID NO: 1500

SEQ ID NO: 1998 - DNA, 4246 bp, Homo sapien
  Unsure 3300: Unknown base
atcttttttcatcttctagctgtagctcgggctgcttgtcggcttggctccccctcccccctttgctctctgcctcgtctttccccaggacttcgctattttgcttttttaaaaaaaggcaagaaagaactaaactcccccctccctctcctccagtcgggctgcacctctgccttgcactttgcacagaggtagagagcgcgcgagggagagagaggaaagaaaaaaaataataaagagagccaagcagaagaggaggcgagaagcatgaagtgttaactcccccgtgccaaggcccgcgccgcccggacagacgcccgccgcgccttccagccccgagcggacgccgcgcgccgccctgcctgcagcccgggccggcgacggcgagcccttccttatgcaaagcgcgccagcagcgcgaaggcgggacgccgcgcaccgggccgggctcctccagcttcgccgccgcagccaccaccgccgccaccgcagctcgcggaggatcttcccgagcctgaagccgccggctcggcgcgcaaggaggcgagcgcaaggaggggccggggcgagcgagggagcacattggcgtgagcaggggggagggagggcgggcgcggggggcgcgggcagggcgggggggtgtgtgtgtgagcgcgcttggaggtttcgggccagccaccgccgcgcaagctagaagcgccccagcccggcaagctggctcacccgctggccacccagcacagcccgctggcccctctcctgcagcccatctggcggagcggcggcggcggcggcggcggcaggagaatggcatcagaactggcaatgagcaactccgacctgcccaccagtcccctggccatggaatatgttaatgacttcgatctgatgaagtttgaagtgaaaaaggaaccggtggagaccgaccgcatcatcagccagtgcggccgtctcatcgccgggggctcgctgtcctccacccccatgagcacgccgtgcagctcggtgcccccttcccccagcttctcggcgcccagcccgggctcgggcagcgagcagaaggcgcacctggaagactactactggatgaccggctacccgcagcagctgaaccccgaggcgctgggcttcagccccgaggacgcggtcgaggcgctcatcagcaacagccaccagctccagggcggcttcgatggctacgcgcgcggggcgcagcagctggccgcggcggccggggccggtgccggcgcctccttgggcggcagcggcgaggagatgggccccgcggccgccgtggtgtccgccgtgatcgccgcggccgccgcgcagagcggcgcgggcccgcactaccaccaccaccaccaccacgccgccggccaccaccaccacccgacggccggcgcgcccggcgccgcgggcagcgcggccgcctcggccggtggcgctgggggcgcgggcggcggtggcccggccagcgctgggggcggcggcggcggcggcggcggcggaggcggcgggggcgcggcgggggcggggggcgccctgcacccgcaccacgccgccggcggcctgcacttcgacgaccgcttctccgacgagcagctggtgaccatgtctgtgcgcgagctgaaccggcagctgcgcggggtcagcaaggaggaggtgatccggctgaagcagaagaggcggaccctgaaaaaccgcggctatgcccagtcctgccgcttcaagagggtgcagcagagacacgtcctggagtcggagaagaaccagctgctgcagcaagtcgaccacctcaagcaggagatctccaggctggtgcgcgagagggacgcgtacaaggagaaatacgagaagttggtgagcagcggcttccgagaaaacggctcgagcagcgacaacccgtcctctcccgagtttttcatgtgagtctgacacgcgattccagctagccaccctgataagtgctccgcgggggtccggctcgggtgtgggcttgctagttctagagccatgctcgccaccacctcaccacccccacccccaccgagtttggcccccttggccccctacacacacacaaacccgcacgcacacaccacacacacacacacacacacacacacacaccccacaccctgctcgagtttgtggtggtggtggctgttttaaactggggagggaatgggtgtctggctcatggattgccaatctgaaattctccataacttgctagcttgttttttttttttttttttacacccccccgccccaccccccggacttgcacaatgttcaatgatctcagcagagttcttcatgtgaaacgttgatcacctttgaagcctgcatcattcacatattttttcttcttcttccccttcagttcatgaactggtgttcattttctgtgtgtgtgtgtgttttattttgtttggatttttttttttaattttacttttagagcttgctgtgcttgcccacctcttttccaacctccaccctcactccttctcaacccatctcttccgagatgaaagaaaaaaaaaagcaaagtttttttttcttctcctgagttcttcagtgagattgagcttgcaaaggaaaaaaaaatgtgaaatgttatagacttgcagcgtgccgagttccatcgggttttttttttagcattgttatgctaaaatagagaaaaaaatcctcatgaaccttccacaatcaagcctgcatcaaccttctgggtgtgacttgtgagttttggccttgtgatgccaaatctgagagtttagtctgccattaaaaaaactcattctcatctcatgcattattatgcttgctactttgtcttagcaacaatgaactataactgtttcaaagactttatggaaaagagacattatattaataaaaaaaaaagcctgcatgctggacatatatggtataattattttttcctttttttttccttttggcttggaaatggacgttcgaagacttatagcatggcattcatacttttgttttattgcctcatgacttttttgagtttagaacaaaacagtgcaaccgtagagccttcttcccatgaaattttgcatctgctccaaaactgctttgagttactcagaacttcaacctcccaatgcactgaaggcattccttgtcaaagataccagaatgggttacacatttaacctggcaaacattgaagaactcttaatgttttctttttaataagaatgacgcccactttggggactaaaattgtgctattgccgagaagcagtctaaaatttatttttnaaaaagagaaactgccccattatttttggtttgttttatttttattttatattttttggcttttggtcattgtcaaatgtggaatgctctgggtttctagtatataatttaattctagtgtttataatctgttagcccagttaaaatgtatgctacagataaaggaatgttatagataaatttgaaagagttaggtctgtttagctgtagattttttaaacgattgatgcactaaattgtttactattgtgatgttaaggggggtagagtttgcaaggggactgtttaaaaaaagtagcttatacagcatgtgcttgcaacttaaatataagttgggtatgtgtagtctttgctataccactgactgtattgaaaaccaaagtattaagaggggaaacgcccctgtttatatctgtaggggtattttacattcaaaaatgtatgtttttttttcttttcaaaattaaagtatttgggactgaattgcactaagatataacctgcaagcatataatacaaaaaaaaattgcaaaactgtttagaacgctaataaaatttatgcagttataaaaatggcattactgcacagttttaagatgatgcagatttttttacagttgtattgtggtgcagaactggattttctgtaacttaaaaaaaatccacagttttaaaggcaataatcagtaaatgttattttcagggactacatcctgtctttaaaaagaaatgaaaagtaaatcttaccacaataaatataaaaaaatcttgtcagttacttttcttttacatattttgctgtgcaaaattgttttatatcttgagttactaactaaccacgcgtgttgttcctatgtgcttttctttcattttcaattctggttatatcaagaaaagataatctacaataataaacggcatttttttttgattctgtaaaaaaaaa

SEQ ID NO: 1999 - protein, 373 aa, Homo sapien
  Unsure 3300: Unknown amino acid
MASELAMSNSDLPTSPLAMEYVNDFDLMKFEVKKEPVETDRIISQCGRLIAGGSLSSTPMSTPCSSVPPSPSFSAPSPGSGSEQKAHLEDYYWMTGYPQQLNPEALGFSPEDAVEALISNSHQLQGGFDGYARGAQQLAAAAGAGAGASLGGSGEEMGPAAAVVSAVIAAAAAQSGAGPHYHHHHHHAAGHHHHPTAGAPGAAGSAAASAGGAGGAGGGGPASAGGGGGGGGGGGGGGAAGAGGALHPHHAAGGLHFDDRFSDEQLVTMSVRELNRQLRGVSKEEVIRLKQKRRTLKNRGYAQSCRFKRVQQRHVLESEKNQLLQQVDHLKQEISRLVRERDAYKEKYEKLVSSGFRENGSSSDNPSSPEFFM

SEQ ID NO: 2000 - DNA, 1919 bp, Homo sapien
gtcctgccgagctgtgagggcaacggaggggaaataaaagggaacggctccgaatctgccccagcggccgctgcgagacctcggcgccgacatcgcgacagcgaagcgctttgcacgccaggaaggtcccctctatgtgctgctgagccggtcctggacgcgacgagcccgccctcggtcttcggagcagaaatcgcaaaaacggaaggactggaaatggcagaccatatgatggccatgaaccacgggcgcttccccgacggcaccaatgggctgcaccatcaccctgcccaccgcatgggcatggggcagttcccgagcccccatcaccaccagcagcagcagccccagcacgccttcaacgccctaatgggcgagcacatacactacggcgcgggcaacatgaatgccacgagcggcatcaggcatgcgatggggccggggactgtgaacggagggcaccccccgagcgcgctggcccccgcggccaggtttaacaactcccagttcatgggtcccccggtggccagccagggaggctccctgccggccagcatgcagctgcagaagctcaacaaccagtatttcaaccatcacccctacccccacaaccactacatgccggatttgcaccctgctgcaggccaccagatgaacgggacaaaccagcacttccgagattgcaaccccaagcacagcggcggcagcagcacccccggcggctcgggcggcagcagcacccccggcggctctggcagcagctcgggcggcggcgcgggcagcagcaacagcggcggcggcagcggcagcggcaacatgcccgcctccgtggcccacgtccccgctgcaatgctgccgcccaatgtcatagacactgatttcatcgacgaggaagttcttatgtccttggtgatagaaatgggtttggaccgcatcaaggagctgcccgaactctggctggggcaaaacgagtttgattttatgacggacttcgtgtgcaaacagcagcccagcagagtgagctgttgactcgatcgaaaccccggcgaaagaaatcaaacccccaacttcttcggcgtgaattaaaagaaacattcccttagacacagtatctcacttttcagatcttgaaaggtttgagaacttggaaacaaagtaaactataaacttgtacaaattggttttaaaaaaaattgctgccacttttttttcctgtttttgtttcgtttttgtagccttgacattcacccacctcccttatgtagttgaaatatctagctaacttggtctttttcgttgtttgtttttactcctttccctcactttctccagtgctcaactgttagatattaatcttggcaaactgcttaatcttgtggattttgtagatggtttcaaatgactgaactgcattcagatttacgagtgaaaggaaaaattgcattagttggttgcatgaactttgaagggcagatattactgcacaaactgccatctcgcttcatttttttaactatgcatttgagtacagactaatttttaaaatatgctaaactggaagattaaacagatgtggcccaaactgttctggatcaggaaagtcatactgttcactttcaagttggctgtcccccccgccgcccccccccacccccatatgtacagatgataatagggtgtggaatgtcgtcagtggcaaacatttcacagattattttgtttctgtcttcaacatttttgacactgtgctaatagttatattcagtacatgaaaagatactactgtgttgaaagccttttaggaaattttgacagtatttttgtacaaaacatttttttgaaaaaatacttgttaatttattctattttaatttgccaatgtcaataaaaagttaagaaataaaaaaaaaaaaaaaaaa

SEQ ID NO: 2001 - protein, 270 aa, Homo sapien
MADHMMAMNHGRFPDGTNGLHHHPAHRMGMGQFPSPHHHQQQQPQHAFNALMGEHIHYGAGNMNATSGIRHAMGPGTVNGGHPPSALAPAARFNNSQFMGPPVASQGGSLPASMQLQKLNNQYFNHHPYPHNHYMPDLHPAAGHQMNGTNQHFRDCNPKHSGGSSTPGGSGGSSTPGGSGSSSGGGAGSSNSGGGSGSGNMPASVAHVPAAMLPPNVIDTDFIDEEVLMSLVIEMGLDRIKELPELWLGQNEFDFMTDFVCKQQPSRVSC

SEQ ID NO: 2002 - DNA, 6212 bp, Homo sapien
ggaaaggggaacagttaaatttgtaatttgggttgtgtgaaaacttctttgggcctcataaacaaccacagaaccacaagttgggtagcctggcagtgtcagaagtctgaacccagcatagtggtcagcaggcaggacgaatcacactgaatgcaaaccacagggtttcgcagcgtggtgagcatcaccaacccacagccaaggcggcgctggcttttttttttttttaatctttaacaatttgaatatttgtttttacaaaggtgcattttttaatagggcttggggagtcccagaggtatccagcagaggggagaagaaagagagatgtagggctagaggggtgaggctgaaacagtgacctgtcttggttttcgctccgaaggtaaaagaaatcattgagtcccccgccttcagaagagggtgcattttcaggaggaagcgatggcttcagacagcatatttgagtcatttccttcgtacccacagtgcttcatgagagaatgcatacttggaatgaatccttctagagacgtccacgatgccagcacgagccgccgcttcacgccgccttccaccgcgctgagcccaggcaagatgagcgaggcgttgccgctgggcgccccggacgccggcgctgccctggccggcaagctgaggagcggcgaccgcagcatggtggaggtgctggccgaccacccgggcgagctggtgcgcaccgacagccccaacttcctctgctccgtgctgcctacgcactggcgctgcaacaagaccctgcccatcgctttcaaggtggtggccctaggggatgttccagatggcactctggtcactgtgatggctggcaatgatgaaaactactcggctgagctgagaaatgctaccgcagccatgaagaaccaggttgcaagatttaatgacctcaggtttgtcggtcgaagtggaagagggaaaagcttcactctgaccatcactgtcttcacaaacccaccgcaagtcgccacctaccacagagccatcaaaatcacagtggatgggccccgagaacctcgaagacatcggcagaaactagatgatcagaccaagcccgggagcttgtccttttccgagcggctcagtgaactggagcagctgcggcgcacagccatgagggtcagcccacaccacccagcccccacgcccaaccctcgtgcctccctgaaccactccactgcctttaaccctcagcctcagagtcagatgcaggatacaaggcagatccaaccatccccaccgtggtcctacgatcagtcctaccaatacctgggatccattgcctctccttctgtgcacccagcaacgcccatttcacctggacgtgccagcggcatgacaaccctctctgcagaactttccagtcgactctcaacggcacccgacctgacagcgttcagcgacccgcgccagttccccgcgctgccctccatctccgacccccgcatgcactatccaggcgccttcacctactccccgacgccggtcacctcgggcatcggcatcggcatgtcggccatgggctcggccacgcgctaccacacctacctgccgccgccctaccccggctcgtcgcaagcgcagggaggcccgttccaagccagctcgccctcctaccacctgtactacggcgcctcggccggctcctaccagttctccatggtgggcggcgagcgctcgccgccgcgcatcctgccgccctgcaccaacgcctccaccggctccgcgctgctcaaccccagcctcccgaaccagagcgacgtggtggaggccgagggcagccacagcaactcccccaccaacatggcgccctccgcgcgcctggaggaggccgtgtggaggccctactgaggcgccaggcctggcccggctgggccacgcgggccgccgccttcgcctccgggcgcgcgggcctcctgttcgcgacaagcccgccgggatcccgggccctgggcccggccaccgtcctggggccgagggcgcccgacggccaggatctcgctgtaggtcaggcccgcgcagcctcctgcgcccagaagcccacgccgccgccgtctgctggcgccccggccctcgcggaggtgtccgaggcgacgcacctcgagggtgtccgccggccccagcacccaggggacgcgctggaaagcaaacaggaagattcccggagggaaactgtgaatgcttctgatttagcaatgctgtgaataaaaagaaagattttatacccttgacttaactttttaaccaagttgtttattccaaagagtgtggaattttggttggggtggggggagaggagggatgcaactcgccctgtttggcatctaattcttatttttaatttttccgcaccttatcaattgcaaaatgcgtatttgcatttgggtggtttttatttttatatacgtttatataaatatatataaattgagcttgcttctttcttgctttgaccatggaaagaaatatgattcccttttctttaagttttatttaacttttcttttggacttttgggtagttgtttttttttgttttgttttgtttttttgagaaacagctacagctttgggtcatttttaactactgtattcccacaaggaatccccagatatttatgtatcttgatgttcagacatttatgtgttgataattttttaattatttaaatgtacttatattaagaaaaatatcaagtactacattttcttttgttcttgatagtagccaaagttaaatgtatcacattgaagaaggctagaaaaaaagaatgagtaatgtgatcgcttggttatccagaagtattgtttacattaaactccctttcatgttaatcaaacaagtgagtagctcacgcagcaacgtttttaataggatttttagacactgagggtcactccaaggatcagaagtatggaattttctgccaggctcaacaagggtctcatatctaacttcctccttaaaacagagaaggtcaatctagttccagagggttgaggcgggtgccaataattacatctttggagaggatttgatttctgcccagggatttgctcaccccaaggtcatctgataatttcacagatgctgtgtaacagaacacagccaaagtaaactgtgtaggggagccacatttacataggaaccaaatcaatgaatttaggggttacgattatagcaatttaagggccaccagaagcaggcctcgaggagtcaatttgcctctgtgtgcctcagtggagacaagtgggaaaacatggtcccacctgtgcgagaccccctgtcctgtgctgctcactcaacaacatctttgtgttgctttcaccaggctgagaccctaccctatggggtatatgggcttttacctgtgcaccagtgtgacaggaaagattcatgtcactactgtccgtggctacaattcaaaggtatccaatgtcgctgtaaattttatggcactatttttattggaggatttggtcagaatgcagttgttgtacaactcataaatactaactgctgattttgacacatgtgtgctccaaatgatctggtggttatttaacgtacctcttaaaattcgttgaaacgatttcaggtcaactctgaagagtatttgaaagcaggacttcagaacagtgtttgatttttattttataaatttaagcattcaaattaggcaaatctttggctgcaggcagcaaaaacagctggacttatttaaaacaacttgtttttgagttttcttatatatatattgattatttgttttacacacatgcagtagcactttggtaagagttaaagagtaaagcagcttatgttgtcaggtcgttcttatctagagaagagctatagcagatctcggacaaactcagaatatattcactttcatttttgacaggattccctccacaactcagtttcatatattattccgtattacatttttgcagctaaattaccataaaatgtcagcaaatgtaaaaatttaatttctgaaaagcaccattagcccatttcccccaaattaaacgtaaatgttttttttcagcacatgttaccatgtctgacctgcaaaaatgctggagaaaaatgaaggaaaaaattatgtttttcagtttaattctgttaactgaagatattccaactcaaaaccagcctcatgctctgattagataatcttttacattgaacctttactctcaaagccatgtgtggagggggcttgtcactattgtaggctcactggattggtcatttagagtttcacagactcttaccagcatatatagtatttaattgtttcaaaaaaaatcaaactgtagttgttttggcgataggtctcacgcaacacatttttgtatgtgtgtgtgtgtgcgtgtgtgtgtgtgtgtgtgaaaaattgcattcattgacttcaggtagattaaggtatctttttattcattgccctcaggaaagttaaggtatcaatgagacccttaagccaatcatgtaataactgcatgtgtctggtccaggagaagtattgaataagccatttctactgcttactcatgtccctatttatgatttcaacatggatacatatttcagttctttctttttctcactatctgaaaatacatttccctccctctcttccccccaatatctccctttttttctctcttcctctatcttccaaaccccactttctccctcctccttttcctgtgttctcttaagcagatagcacatacccccacccagtaccaaatttcagaacacaagaaggtccagttcttcccccttcacataaaggaacatggtttgtcagcctttctcctgtttatgggtttcttccagcagaacagagacattgccaaccatattggatctgcttgctgtccaaaccagcaaacttcctgggcaaatcacaatcagtgagtaaatagacagcctttctgctgccttgggtttctgtgcagataaacagaaatgctctgattagaaaggaaatgaatggttccactcaaatgtcctgcaatttaggattgcagatttctgccttgaaatacctgtttctttgggacattccgtcctgatgatttttatttttgttggtttttatttttggggggaatgacatgtttgggtcttttatacatgaaaatttgtttgacaataatctcacaaaacatattttacatctgaacaaaatgcctttttgtttaccgtagcgtatacatttgttttgggatttttgtgtgtttgttgggaattttgtttttagccaggtcagtattgatgaggctgatcatttggctctttttttccttccagaagagttgcatcaacaaagttaattgtatttatgtatgtaaatagattttaagcttcattataaaatattgttaatgcctataactttttttcaatttttttgtgtgtgtttctaaggactttttcttaggtttgctaaatactgtagggaaaaaatgcttctttctaactttgtttattttagactttaaaatgagctacttcttattcacttttgtaaacagctaatagcatggttccaattttttttaagttcactttttttgttctaggggaaatgaatgtgcaaaaaaagaaaaagaactgttggttatttgtgttattctggatgtataaaaatcaatggaaaaaaataaactttcaaattgaaatgacggtataacacatctactgaaaaagcaacgggaaatgtggtcctatttaagccagcccccacctagggtctatttgtgtggcagttattgggtttggtcacaaaacatcctgaaaattcgtgcgtgggcttctttctccctggtacaaacgtatggaatgcttcttaaaggggaactgtcaagctggtgtcttcagccagatgacatgagagaatatcccagaaccctctctccaaggtgtttctagatagcacaggagagcaggcactgcactgtccacagtccacggtacacagtcgggtgggccgcctcccctctcctgggagcattcgtcgtgcccagcctgagcagggcagctggactgctgctgttcaggagccaccagagccttcctctctttgtaccacagtttcttctgtaaatccagtgttacaatcagtgtgaatggcaaataaacagtttgacaagtacata

SEQ ID NO: 2003 - protein, 480 aa, Homo sapien
MASDSIFESFPSYPQCFMRECILGMNPSRDVHDASTSRRFTPPSTALSPGKMSEALPLGAPDAGAALAGKLRSGDRSMVEVLADHPGELVRTDSPNFLCSVLPTHWRCNKTLPIAFKVVALGDVPDGTLVTVMAGNDENYSAELRNATAAMKNQVARFNDLRFVGRSGRGKSFTLTITVFTNPPQVATYHRAIKITVDGPREPRRHRQKLDDQTKPGSLSFSERLSELEQLRRTAMRVSPHHPAPTPNPRASLNHSTAFNPQPQSQMQDTRQIQPSPPWSYDQSYQYLGSIASPSVHPATPISPGRASGMTTLSAELSSRLSTAPDLTAFSDPRQFPALPSISDPRMHYPGAFTYSPTPVTSGIGIGMSAMGSATRYHTYLPPPYPGSSQAQGGPFQASSPSYHLYYGASAGSYQFSMVGGERSPPRILPPCTNASTGSALLNPSLPNQSDVVEAEGSHSNSPTNMAPSARLEEAVWRPY

SEQ ID NO: 2004 - DNA, 7248 bp, Homo sapien
tactcaaaattcacatgataaaataattgatcctgaaaaacgtgttcctactcaaggaatgtttgataaaaatgggataaagggaggtttgaaaagtgtttctttattcacatcaaagttagcaaagccatccactatgtttgtgtcatctacagaggagttaaaccaaaagtctttttctggaccatctaatttgggtaaattcaccaaatgcacattattaggaaggacttcatattcttcgatcaatactccaaaatcacagttgaatggattttatggaaaccgatcagctggtagcatgcaaaaggcctagagcgaactcctgtgccaccagaagcagttctggagaaagcttagctcaatccccagacagtagtaaatctattaattgtgaaaaaatggtaaggtcacaaagtttttcacattccattcagaattcattccttccaccttcatctataaccagtcacattcctttatagagctgtggatcttacaaagccttatcagaaccaacagctatccattagagtgcctctacggtcaagtatgctaacaagaaattcccggcagccagaagtactcaatgggaatgaacatttggggtatggatttaataggccttatgctgctggtggaaagaagttggctttaccaaatggcccaggtgtaacttctactttaggttatagaatggttcatccctctctactgaaatctagccgatctccattttctgggactatgacagttgatggaaataaaaattcacctgctgacacatgtgtagaggaagatgctacagttttggctaaggacagagctgctaataaggaccaagaactgattgaaaatgaaagttatagaacaaaaaacaaccagaccatgaaacatgatgctaaaatgagatacctgagtgatgatgtggatgacatttccttgtcgtctttgtcatcttctgataagaatgatttaagtgaagactttagtgatgattttatagatatagaagactccaacagaactagaataactccagaggaaatgtctctcaaagaagagaaacatgaaaatgggccaccacaggatatgtttgattcccccaaggaaaatgaaaaagccttcagtaaaactgatgaatggatagatataagtgtctctgacaggagtgaatgtacaaaacatacttctgggaataatttggtttcaccagatacagactacagagctggttcttcgtttgaactctctccatctgatagctctgatggaacatacatgtgggatgaagaaggcttggaacccattggaaatgtccatccagttgggagctatgagtcctctgaaatgaacagcatagatattttgaataatcttgaatcatgtgaccttgaggatgatgatcttatgcttgatgtggatctgcctgaggatgcacctcttgaaaatgtggagtgtgacaatatgaaccgctttgaccgaccagacagaaatgttcggcagcctcaggaaggtttttggaaaaggccaccccagaggtggagtggacaggagcattaccacctcagccaccctgaccactatcatcaccatggaaaaagtgacttgagcagaggctctccctatagagaatctcctttgggtcattttgaaagctatggagggatgccctttttccaggctcagaagatgtttgttgatgtaccagaaaatacagtgatactggatgagatgacccttcggcacatggttcaggattgcactgctgtaaaaactcagttactcaaactgaaacgtctcctgcatcagcatgatggaagtggttcattgcatgatattcaactgtcattgccatccagtccagaaccagaagatggtgataaagtatataagaatgaagatttattaaatgaaataaaacaacttaaagacgaaataaagaaaaaagatgaaaagatccaactattagaacttcagcttgcaactcagcatatctgccaccaaaaatgtaaagaggaaaaatgcacttatgctgataaatatacccaaacaccctggagacgaattcctggtgggtattctgctccctccttctctccttggcagggctccttccaggggatcccacggactgttccaccgcaccgcagacagacctcaagtactacagccttccagcagccttcccagacccacagatcacacccagggaaaactaataaagccacaacgtatcgaggcccgcagtgaatgctcaatccaagacatgcatcagggcggtgcacatccggaagaaagctttacacacgtcttgcaccaagaaagcaactatggtttggaagagcagcctttttcatcaggcccacaattaacaatggatgtggctaagagtacaccttctgaagcaaacttaaacattactgtaaatgctcaagagccttatcatttggcaaacaatcaaattagtgacatgcagtttatacccacttctcttcagacacctcccgagtcaagtacagtagaccaggctaagagagttggaagaaatcagtctccgccagtgggttatatgtctcagcccaagtccttgcagcttttaaagccatccatattgagttctttggtaccgcctccagtttctgaatcatctccaagtaggactcccacttgtaaaaagtcaccaataatcacaacatgtaattcagcaaaacttcagccaacatctagtcaaacaaatcttgcaaataatcagaatctgaaagcatctaagctccgccccccctcaggctctttcaaacaaaaacaaacaaacagcccccaactagagcctcaaagcttccaggccaagacaagcatcccaaggccactaacacaacgaaaagaaatcatgcagaatccaaatggcaatttgcattctggggattgtttggcctctaatcgatattctcgtcttcctaaaccaaagatacattaagtacatagccatcacctgccaatttgtttcttaaaaacaatctcttctgtaatagctttatgtgcagcttgcagcttgctactgtggtggaggttccattgaaagcctgcaaatcttaaattaaaatgtggaagcttctactagtttggctccttcattttatatcctggttgaagtacatgccatttgagcataattatctcaggtaaacacgaaagtttgcttacccatttcagaggcctgccaaaggcccaaatcatgttatccatccctctccaggtcagaaaattcataatattttactgagcaggcaagaagtgtgctttgctggtttagtcctattaaggtctgtatttattgtggttgtcagaacctcaccccttttcacttgtctctcctgtgaatatggctactattttaactaaagatatggtgataatggaagatggtagtctgtaagcagagttctggccagtgttttgtatatttaaaaggtctatgcaaaagctttgtgatgaataaaggagattaggcttttaatggaaagtctatgtaagttttatttttccttgccagggtcagtcagctaatgttactgttgattcatttcccaaattccccagactgaaaatgtttcttattacatataaatcagttatatattcctttacatcttgttttacaaacacatgtgcatgcacacacacacatacacacacataccatttatgtttgtatttgttactgggtaaattttggagcgcttgagatacaccttgaaacctgtacctaaagatgtattcatttgtaacatatgttggtgctagagttttgctggtaattcaggtttgaacccttaggcttgtggatccatgatagccattttaaggttccacagcattatgtctttaattgtaatatttatatttattgattttctgctaatatctgaagactgaaataatgaacttgaaacatttgcacaaaactttgatggggtataaatataccatatatagggattgtaaactattttctatagcaaaacaagttaaaatattttgagaaaaataacaaatttaaataagactatcttgagaaagctggagttcataatattctccccctcccccatctccagtctcctaggtttcccttttctgtgttttttgtttttttctgtttgttttttgagacagagtcttgctccattgcccaggctggattacagtggcgcaatctcggctcactgcaacttctgcctcccgggttcaagcgattctcctgcctcagcctcctgagtagctgggactacaggcatgtgccaccatgcctggctaatttttttgtatttttagtagagatgaggtttcaccttgttggtcaggctggtctcgaactcctgacctcaagtgatccacccacctcgtctatggtgtatttttgaaagacaattttttaaaggtagatttgggaaaaaaatagaattgaagatgggaaattttgttttattaaaaaggtgctagaagatgtttcaaagacaatattcttattttaatacgctgtagaaggtaggtgtggaacctccatgctaccatgtgcacaaacctaattatgctttgggtcacttgtcagttcagtaaatctgccttcctcttctcccaaatcatgtcatctttaggttgttcacctgcagctgctttaaatgaattagtatctttcagatagataaccttacaaggagaatgtttgttttgagcagctgaccaaaaatatatcaaacaggattatggccaaaaagtcactcaaatttctagagattcctttaaaagatgtatgttgatgaaattgcccctttataagaaaaacaacagcaagtcttttagtagaaatttgaaagaagtgtttgctaccattttgacccattattcccttacctatcagatgaatttgccattcactggatagaaaccattcttggatttggtaagaggtgagcaagacaaatcttgtaccatactcttatgtaccagcacttctgatggagaagcagtgaagttcagaacgttcttcacatagtccagatactgttagagtcaggcaaatcagcaaagcactttgttatggagatgacccatgatggctgcagttgtaagtgggcatacatgttctatcattttgaaggagaaagaaaaccgttctcacatgtcgcaaatatgtgaatcatactatattcccctaaagtaaaaccagtgacttagtggtttttggtttatttagaagttggtttagacccttatgaaacattatttacgagttggccttatccttaagggaaaagttctaaatttttaaatttatttttaattccctagtctgagggaaatgtctttattgtccattacataaaaatgttgactccagtaatttatttttctctattttttcctccatgtatttactccatttttctctattttttccttccctgatggatttgcagaaatgttaaccaattagctcaacttttctctacctttgttgagtcttaatcttttagaagataggcttaccgtatatttatgaagcataatatattaaaagaaaacaaatctaggatgcttgcatgacataaagtatttgcctgcagttttcattaaaaactgcaagaatatcatgcttgtctgcttcttagtaaatgttaagtctgaaatggaagtgaggatgtaactctactgaataatcaaagatcatcttagatttggcttgatctgtgtttattgcttctattaatgtaaatcaactctgtgccaaatcctcctccacaaaccatttattgtcttagttctagtggtatcaatgaagatagttacagtatatgaattctaagtcctgaggaagaaattttatggggtttgttaagtttcacattcgtgaaagaggaaattagtagagtattcagactttgatatttggctgttaatgggatgcatatcaaatttttaaaagaaggcttggcctaaggagtttattggtacaggtgcagatgattttaaggcattaaaggattatagagttatgtcatttgagactgtttctaataactgagaccatctaacatttttcttttggagtctcatttttatttgtgcaatattttcaggcatataggctactgttcattgtatttatatatatattagaatttactaagtactttaacaagtaaaaatctgaatatgaaagaaaatatcagatttgcactttaaatgagcttaattgcttgaagttgtgcctgaaatatcgaattgcctcctattgggtgtggctttgttgaaataaatttgtaattgttgctgtttgaagatatcagtacagctgttcacagaaatatattcccagcatgtcacttttccattaaagcactaagttttctttgaatgttccattgttccgataagtattttacttttttctcagtacatcagagagagcgtgatccccctacagctgtcacttccaaatgttcctgtagcataaatggtgttacagacactgaggtgcactcttggtttctgagcagagttgtcatactggtttcctggctctagggcactggggatgtactttgaaatcaccgaacaggcttgcaattaagatcaataaggctgcagcaccatttcaatttactttccatcttacccagtagtttttgtgtttttaaattcgtttgggtggttatgtttgcatgcttaagcacacatttgaaaattaattatagctgtactacccgatgtttttccttggggatgatggccttgttcctttttaaattctgatgcttgaattctattttctagtgatttttcacatctccctttaagtttttgctgcagcaatttgagagagtacttttgattaaatgattctgatggtgggcaccaatctacaactatgtcattaactgaagatacatgttttaatcttgttgggaataagcttacccactttctccttggtaaagcgtttacttaacaaaataatacccgagaatgtaaggtctctaagtcattactaacaaagagcaaaaataatatctgcagtattgtttttcccattgattttaagtcagtttagagtacaaactgtatattagaatttgcctgtaaaatgaattctaaaaagcagatgtaaagtctctcctgaaaatgttggcatagtaaataaaaataaagttcataattataaagtaaaaaaaaaaaaaaaaaaaa

SEQ ID NO: 2005 - protein, 566 aa, Homo sapien
MLTRNSRQPEVLNGNEHLGYGFNRPYAAGGKKLALPNGPGVTSTLGYRMVHPSLLKSSRSPFSGTMTVDGNKNSPADTCVEEDATVLAKDRAANKDQELIENESYRTKNNQTMKHDAKMRYLSDDVDDISLSSLSSSDKNDLSEDFSDDFIDIEDSNRTRITPEEMSLKEEKHENGPPQDMFDSPKENEKAFSKTDEWIDISVSDRSECTKHTSGNNLVSPDTDYRAGSSFELSPSDSSDGTYMWDEEGLEPIGNVHPVGSYESSEMNSIDILNNLESCDLEDDDLMLDVDLPEDAPLENVECDNMNRFDRPDRNVRQPQEGFWKRPPQRWSGQEHYHLSHPDHYHHHGKSDLSRGSPYRESPLGHFESYGGMPFFQAQKMFVDVPENTVILDEMTLRHMVQDCTAVKTQLLKLKRLLHQHDGSGSLHDIQLSLPSSPEPEDGDKVYKNEDLLNEIKQLKDEIKKKDEKIQLLELQLATQHICHQKCKEEKCTYADKYTQTPWRRIPGGYSAPSFSPWQGSFQGIPRTVPPHRRQTSSTTAFQQPSQTHRSHPGKTNKATTYRGPQ

SEQ ID NO: 2006 - DNA, 3231 bp, Homo sapien
cgtgaaggcaaagagaacacgctgcaaaaggcttccaagaatcctcgacatggcaaggaggagctcgttccagtcgtgtcagataatatccctgttcacttttgccgttggagtcagtatctgcttaggattcactgcacatcgaattaagagagcagaaggatgggaggaaggtcctcctacagtgctatcagactccccctggaccaacatctccggatcttgcaagggcaggtgctttgaacttcaagaggctggacctcctgattgtcgctgtgacaacttgtgtaagagctataccagttgctgccatgactttgatgagctgtgtttgaagacagcccgtggctgggagtgtactaaggacagatgtggagaagtcagaaatgaagaaaatgcctgtcactgctcagaggactgcttggccaggggagactgctgtaccaattaccaagtggtttgcaaaggagagtcgcattgggttgatgatgactgtgaggaaataaaggccgcagaatgccctgcagggtttgttcgccctccattaatcatcttctccgtggatggcttccgtgcatcatacatgaagaaaggcagcaaagtcatgcctaatattgaaaaactaaggtcttgtggcacacactctccctacatgaggccggtgtacccaactaaaacctttcctaacttatacactttggccactgggctatatccagaatcacatggaattgttggcaattcaatgtatgatcctgtatttgatgccacttttcatctgcgagggcgagagaaatttaatcatagatggtggggaggtcaaccgctatggattacagccaccaagcaaggggtgaaagctggaacattcttttggtctgttgtcatccctcacgagcggagaatattaaccatattgcggtggctcaccctgccagatcatgagaggccttcggtctatgccttctattctgagcaacctgatttctctggacacaaatatggccctttcggccctgaggagagtagttatggctcaccttttactccggctaagagacctaagaggaaagttgcccctaagaggagacaggaaagaccagttgctcctccaaagaaaagaagaagaaaaatacataggatggatcattatgctgcggaaactcgtcaggacaaaatgacaaatcctctgagggaaatcgacaaaattgtggggcaattaatggatggactgaaacaactaaaactgcgtcggtgtgtcaacgtcatctttgtcggagaccatggaatggaagatgtcacatgtgatagaactgagttcttgagtaattacctaactaatgtggatgatattactttagtgcctggaactctaggaagaattcgatccaaatttagcaacaatgctaaatatgaccccaaagccattattgccaatctcacgtgtaaaaaaccagatcagcactttaagccttacttgaaacagcaccttcccaaacgtttgcactatgccaacaacagaagaattgaggatatccatttattggtggaacgcagatggcatgttgcaaggaaacctttggatgtttataagaaaccatcaggaaaatgctttttccagggagaccacggatttgataacaaggtcaacagcatgcagactgtttttgtaggttatggcccaacatttaagtacaagactaaagtgcctccatttgaaaacattgaactttacaatgttatgtgtgatctcctgggattgaagccagctcctaataatgggacccatggaagtttgaatcatctcctgcgcactaataccttcaggccaaccatgccagaggaagttaccagacccaattatccagggattatgtaccttcagtctgattttgacctgggctgcacttgtgatgataaggtagagccaaagaacaagttggatgaactcaacaaacggcttcatacaaaagggtctacagaagagagacacctcctctatgggcgacctgcagtgctttatcggactagatatgatatcttatatcacactgactttgaaagtggttatagtgaaatattcctaatgctactctggacatcatatactgtttccaaacaggctgaggtttccagcgttcctgaccatctgaccagttgcgtccggcctgatgtccgtgtttctccgagtttcagtcagaactgtttggcctacaaaaatgataagcagatgtcctacggattcctctttcctccttatctgagctcttcaccagaggctaaatatgatgcattccttgtaaccaatatggttccaatgtatcctgctttcaaacgggtctggaattatttccaaagggtattggtgaagaaatatgcttcggaaagaaatggagttaacgtgataagtggaccaatcttcgactatgactatgatggcttacatgacacagaagacaaaataaaacagtacgtggaaggcagttccattcctgttccaactcactactacagcatcatcaccagctgtctggatttcactcagcctgccgacaagtgtgacggccctctctctgtgtcctccttcatcctgcctcaccggcctgacaacgaggagagctgcaatagctcagaggacgaatcaaaatgggtagaagaactcatgaagatgcacacagctagggtgcgtgacattgaacatctcaccagcctggacttcttccgaaagaccagccgcagctacccagaaatcctgacactcaagacatacctgcatacatatgagagcgagatttaactttctgagcatctgcagtacagtcttatcaactggttgtatatttttatattgtttttgtatttattaatttgaaaccaggacattaaaaatgttagtattttaatcctgtaccaaatctgacatattatgcctgaatgactccactgtttttctctaatgcttgatttaggtagccttgtgttctgagtagagcttgtaataaatactgcagcttgagaaaaagtggaagcttctaaatggtgctgcagatttgatatttgcattgaggaaatattaattttccaatgcacagttgccacatttagtcctgtactgtatggaaacactgattttgtaaagttgcctttatttgctgttaactgttaactatgacagatatatttaagccttataaaccaatcttaaacataataaatcacacattcagtttt

SEQ ID NO: 2007 - protein, 915 aa, Homo sapien
MARRSSFQSCQIISLFTFAVGVSICLGFTAHRIKRAEGWEEGPPTVLSDSPWTNISGSCKGRCFELQEAGPPDCRCDNLCKSYTSCCHDFDELCLKTARGWECTKDRCGEVRNEENACHCSEDCLARGDCCTNYQVVCKGESHWVDDDCEEIKAAECPAGFVRPPLIIFSVDGFRASYMKKGSKVMPNIEKLRSCGTHSPYMRPVYPTKTFPNLYTLATGLYPESHGIVGNSMYDPVFDATFHLRGREKFNHRWWGGQPLWITATKQGVKAGTFFWSVVIPHERRILTILRWLTLPDHERPSVYAFYSEQPDFSGHKYGPFGPEESSYGSPFTPAKRPKRKVAPKRRQERPVAPPKKRRRKIHRMDHYAAETRQDKMTNPLREIDKIVGQLMDGLKQLKLRRCVNVIFVGDHGMEDVTCDRTEFLSNYLTNVDDITLVPGTLGRIRSKFSNNAKYDPKAIIANLTCKKPDQHFKPYLKQHLPKRLHYANNRRIEDIHLLVERRWHVARKPLDVYKKPSGKCFFQGDHGFDNKVNSMQTVFVGYGPTFKYKTKVPPFENIELYNVMCDLLGLKPAPNNGTHGSLNHLLRTNTFRPTMPEEVTRPNYPGIMYLQSDFDLGCTCDDKVEPKNKLDELNKRLHTKGSTEERHLLYGRPAVLYRTRYDILYHTDFESGYSEIFLMLLWTSYTVSKQAEVSSVPDHLTSCVRPDVRVSPSFSQNCLAYKNDKQMSYGFLFPPYLSSSPEAKYDAFLVTNMVPMYPAFKRVWNYFQRVLVKKYASERNGVNVISGPIFDYDYDGLHDTEDKIKQYVEGSSIPVPTHYYSIITSCLDFTQPADKCDGPLSVSSFILPHRPDNEESCNSSEDESKWVEELMKMHTARVRDIEHLTSLDFFRKTSRSYPEILTLKTYLHTYESEI

SEQ ID NO: 2008 - DNA, 1556 bp, Homo sapien
gcagccgcggtgtcgcgaagtcctcccgggttgcccccgcggcgtcagagggagggcgggcgccgcgttggtgacggcgaccctgcagcccaaggagcgctccactcgctgccgccggagggccggtgacctcttggctaccccgcgtcggaggcttagatggctcaggcgaagatcaacgctaaagccaacgaggggcgcttctgccgctcctcctccatggctgaccgctccagccgcctgctggagagcctggaccagctggagctcagggttgaagctttgagagaagcagcaactgctgttgagcaagagaaagaaatccttctggaaatgatccacagtatccaaaatagccaggacatgaggcagatcagtgacggagaaagagaagaattaaatctgactgcaaaccgtttgatgggaagaactctcaccgttgaagtgtcagtagaaacaattagaaacccccagcagcaagaatccctaaagcatgccacaaggattattgatgaggtggtcaataagtttctggatgatttgggaaatgccaagagtcatttaatgtcgctctacagtgcatgttcatctgaggtgccacatgggccagttgatcagaagtttcaatccatagtaattggctgtgctcttgaagatcagaagaaaattaagagaagattagagactctgcttagaaatattgaaaactctgacaaggccatcaagctattagagcattctaaaggagctggttccaaaactctgcaacaaaatgctgaaagcagattcaattagtcttcaaacctaagagcatttacacaatacacaaggtgtaaaaatgataaaatactattttaattgataactagttctttgttaggtataaccacttagttgacactgatagttgtttcagatgaggaaaatattccatcaagtatcttcagttttgtgaataacaaaactagcaatattttaattatctatctagagattttttagattgaattcttgtcttgtactaggatctagcatatttcactattctgtggatgaatacatagtttgtggggaaaacaaacgttcagctaggggcaaaaagcatgactgctttttcctgtctggcatggaatcacgcagtcaccttgggcatttagtttactagaaattctttactgaagcagcacacacatttactacacacacagtgttaacaaagcactgtgcttagagggtaaaaaggaatcacaaaacaagaatctttccaaagttgtctcattcagcaatgttaaggcatctgtatcaaattattttggatgtaaagattcctgtgtctcataatatgaatgtattttttgatatacaagaaactgacataaaatgtgagaaaaccacctataatttaccactgtgaacaattatatatctatctgcttcatcttttctcaaatgcatcaattctctaaaattcctatattgtaacttgcctttttttaaaaaagttagatgctgatataaagtctgcttaattgtcaacttaaaaaaaaaaaaaaaaa

SEQ ID NO: 2009 - protein, 211 aa, Homo sapien
MAQAKINAKANEGRFCRSSSMADRSSRLLESLDQLELRVEALREAATAVEQEKEILLEMIHSIQNSQDMRQISDGEREELNLTANRLMGRTLTVEVSVETIRNPQQQESLKHATRIIDEVVNKFLDDLGNAKSHLMSLYSACSSEVPHGPVDQKFQSIVIGCALEDQKKIKRRLETLLRNIENSDKAIKLLEHSKGAGSKTLQQNAESRFN

SEQ ID NO: 2010 - DNA, 2825 bp, Homo sapien
gcgaaattgaggtttcttggtattgcgcgtttctcttccttgctgactctccgaatggccatggactcgtcgcttcaggcccgcctgtttcccggtctcgctatcaagatccaacgcagtaatggtttaattcacagtgccaatgtaaggactgtgaacttggagaaatcctgtgtttcagtggaatgggcagaaggaggtgccacaaagggcaaagagattgattttgatgatgtggctgcaataaacccagaactcttacagcttcttcccttacatccgaaggacaatctgcccttgcaggaaaatgtaacaatccagaaacaaaaacggagatccgtcaactccaaaattcctgctccaaaagaaagtcttcgaagccgctccactcgcatgtccactgtctcagagcttcgcatcacggctcaggagaatgacatggaggtggagctgcctgcagctgcaaactcccgcaagcagttttcagttcctcctgcccccactaggccttcctgccctgcagtggctgaaataccattgaggatggtcagcgaggagatggaagagcaagtccattccatccgtggcagctcttctgcaaaccctgtgaactcagttcggaggaaatcatgtcttgtgaaggaagtggaaaaaatgaagaacaagcgagaagagaagaaggcccagaactctgaaatgagaatgaagagagctcaggagtatgacagtagttttccaaactgggaatttgcccgaatgattaaagaatttcgggctactttggaatgtcatccacttactatgactgatcctatcgaagagcacagaatatgtgtctgtgttaggaaacgcccactgaataagcaagaattggccaagaaagaaattgatgtgatttccattcctagcaagtgtctcctcttggtacatgaacccaagttgaaagtggacttaacaaagtatctggagaaccaagcattctgctttgactttgcatttgatgaaacagcttcgaatgaagttgtctacaggttcacagcaaggccactggtacagacaatctttgaaggtggaaaagcaacttgttttgcatatggccagacaggaagtggcaagacacatactatgggcggagacctctctgggaaagcccagaatgcatccaaagggatctatgccatggcctcccgggacgtcttcctcctgaagaatcaaccctgctaccggaagttgggcctggaagtctatgtgacattcttcgagatctacaatgggaagctgtttgacctgctcaacaagaaggccaagctgcgcgtgctggaggacggcaagcaacaggtgcaagtggtggggctgcaggagcatctggttaactctgctgatgatgtcatcaagatgctcgacatgggcagcgcctgcagaacctctgggcagacatttgccaactccaattcctcccgctcccacgcgtgcttccaaattattcttcgagctaaagggagaatgcatggcaagttctctttggtagatctggcagggaatgagcgaggcgcagacacttccagtgctgaccggcagacccgcatggagggcgcagaaatcaacaagagtctcttagccctgaaggagtgcatcagggccctgggacagaacaaggctcacaccccgttccgtgagagcaagctgacacaggtgctgagggactccttcattggggagaactctaggacttgcatgattgccacgatctcaccaggcataagctcctgtgaatatactttaaacaccctgagatatgcagacagggtcaaggagctgagcccccacagtgggcccagtggagagcagttgattcaaatggaaacagaagagatggaagcctgctctaacggggcgctgattccaggcaatttatccaaggaagaggaggaactgtcttcccagatgtccagctttaacgaagccatgactcagatcagggagctggaggagaaggctatggaagagctcaaggagatcatacagcaaggaccagactggcttgagctctctgagatgaccgagcagccagactatgacctggagacctttgtgaacaaagcggaatctgctctggcccagcaagccaagcatttctcagccctgcgagatgtcatcaaggccttacgcctggccatgcagctggaagagcaggctagcagacaaataagcagcaagaaacggccccagtgacgactgcaaataaaaatctgtttggtttgacacccagcctcttccctggccctccccagagaactttgggtacctggtgggtctaggcagggtctgagctgggacaggttctggtaaatgccaagtatgggggcatctgggcccagggcagctggggagggggtcagagtgacatgggacactccttttctgttcctcagttgtcgccctcacgagaggaaggagctcttagttacccttttgtgttgcccttctttccatcaaggggaatgttctcagcatagagctttctccgcagcatcctgcctgcgtggactggctgctaatggagagctccctggggttgtcctggctctggggagagagacggagcctttagtacagctatctgctggctctaaaccttctacgcctttgggccgagcactgaatgtcttgtactttaaaaaaatgtttctgagacctctttctactttactgtctccctagagtcctagaggatccctactgttttctgttttatgtgtttatacattgtatgtaacaataaagagaaaaaataaaaaaaaaaaaaaaaaaaaaaaaaaaaaaaa

SEQ ID NO: 2011 - protein, 725 aa, Homo sapien
MAMDSSLQARLFPGLAIKIQRSNGLIHSANVRTVNLEKSCVSVEWAEGGATKGKEIDFDDVAAINPELLQLLPLHPKDNLPLQENVTIQKQKRRSVNSKIPAPKESLRSRSTRMSTVSELRITAQENDMEVELPAAANSRKQFSVPPAPTRPSCPAVAEIPLRMVSEEMEEQVHSIRGSSSANPVNSVRRKSCLVKEVEKMKNKREEKKAQNSEMRMKRAQEYDSSFPNWEFARMIKEFRATLECHPLTMTDPIEEHRICVCVRKRPLNKQELAKKEIDVISIPSKCLLLVHEPKLKVDLTKYLENQAFCFDFAFDETASNEVVYRFTARPLVQTIFEGGKATCFAYGQTGSGKTHTMGGDLSGKAQNASKGIYAMASRDVFLLKNQPCYRKLGLEVYVTFFEIYNGKLFDLLNKKAKLRVLEDGKQQVQVVGLQEHLVNSADDVIKMLDMGSACRTSGQTFANSNSSRSHACFQIILRAKGRMHGKFSLVDLAGNERGADTSSADRQTRMEGAEINKSLLALKECIRALGQNKAHTPFRESKLTQVLRDSFIGENSRTCMIATISPGISSCEYTLNTLRYADRVKELSPHSGPSGEQLIQMETEEMEACSNGALIPGNLSKEEEELSSQMSSFNEAMTQIRELEEKAMEELKEIIQQGPDWLELSEMTEQPDYDLETFVNKAESALAQQAKHFSALRDVIKALRLAMQLEEQASRQISSKKRPQ

SEQ ID NO: 2012 - DNA, 3801 bp, Homo sapien
aaggtaaagccactagagagaaactgaaagaaaacattcttaagataaattgaattgacattttctctctaaaatatgatttatagaccacagataggaattaagagtttcctgataattttggcttcatattattttaaaggattatcaagaggaaattgctattgctcaagagaacaaaatacagctccaacaaatgggagaacgacttgctaaagccagccatgaaagcaaagcatctgagattgaatacaagctgggaaaggtcaacgaccggtggcagcatctcctggacctcattgcagccagggtgaagaagctgaaggagaccctggtagccgtgcagcagcttgataagaacatgagcagcctgaggacctggctcgctcacatcgagtcagagctggccaagccaatagtctacgattcctgtaactcggaagaaatacagagaaagcttaatgagcagcaggagcttcagagagacatagagaagcacagtacaggtgttgcatctgtcctcaacctgtgtgaagtcctgctgcacgactgtgacgcctgtgccactgatgccgagtgtgactctatacagcaggctacgagaaacctggaccggcggtggagaaacatttgtgctatgtccatggaaaggaggctgaaaatcgaagagacgtggcgattgtggcagaaatttctggatgactattcacgttttgaagattggctgaagtcttcagaaaggacagctgcttttcccagctcttctggggtgatctatacagttgccaaggaagaactaaagaaatttgaggctttccagcgacaggtccacgagtgcctgacgcagctggaactgatcaacaagcagtaccgccgcctggccagggagaaccgcactgattcagcatgtagcctcaaacagatggttcacgaaggcaaccagagatgggacaacctgcaaaagcgtgtcacctccatcttgcgcagactcaagcattttattggccagcgtgaggagtttgagactgcgcgggacagcattctggtctggctcacagagatggatctgcagctcactaatattgaacatttttctgagtgtgatgttcaagctaaaataaagcaactcaaggccttccagcaggaaatttcactgaaccacaataagattgagcagataattgcccaaggagaacagctgatagaaaagagtgagcccttggatgcagcgatcatcgaggaggaactagatgagctccgacggtactgccaggaggtcttcgggcgtgtggaaagataccataagaaactgatccgcctgcctctcccagacgatgagcacgacctctcagacagggagctggagctggaagactctgcagctctgtcggacctgcactggcacgaccgctctgcagacagcctgctttctccacagccttcctccaatctctccctctcgctcgctcagcccctccggagcgagcggtcaggacgagacaccccagctagtgtggactccatccccctggagtgggatcacgactatgacctcagtcgggacctggagtctgcaatgtccagagctctgccctctgaggatgaagaaggtcaggatgacaaagatttctacctccggggagctgttgccttatcagatgtaatgatccccgaaagccctgaggcctatgtaaaactcacagaaaatgcaatcaaaaatacctccggggaccacagtgccctagagtcacagatccgacaactgggcaaagccctggatgatagccgctttcagatacagcaaaccgaaaatatcattcgcagcaaaactcccacggggccggagctagacaccagctacaaaggctacatgaaactgctgggcgaatgcagtagcagtatagactccgtgaagagactggagcacaaactgaaggaggaagaggagagccttcctggctttgttaacctgcatagtaccgaaacccaaacggctggtgtgattgaccgatgggagcttctccaggcccaggcattgagcaaggagttgaggatgaagcagaacctccagaagtggcagcagtttaactcagacttgaacagcatctgggcctggctgggggacacggaggaggagttggaacagctccagcgtctggaactcagcactgacatccagaccatcgagctccagatcaaaaagctcaaggagctccagaaagctgtggaccaccgcaaagccatcatcctctccatcaatctctgcagccctgagttcacccaggctgacagcaaggagagccgggacctgcaggatcgcttgtcgcagatgaatgggcgctgggaccgagtgtgctctctgctggaggagtggcggggcctgctgcaggatgccctgatgcagtgccagggtttccatgaaatgagccatggtttgcttcttatgctggagaacattgacagaaggaaaaatgaaattgtccctattgattctaaccttgatgcagagatacttcaggaccatcacaaacagcttatgcaaataaagcatgagctgttggaatcccaactcagagtagcctctttgcaagacatgtcttgccaactactggtgaatgctgaaggaacagactgtttagaagccaaagaaaaagtccatgttattggaaatcggctcaaacttctcttgaaggaggtcagtcgtcatatcaaggaactggagaagttattagacgtgtcaagtagtcagcaggatttgtcttcctggtcttctgctgatgaactggacacctcagggtctgtgagtcccacatcaggaaggagcaccccaaacagacagaaaacgccacgaggcaagtgtagtctctcacagcctggaccctctgtcagcagtccacatagcaggtccacaaaaggtggctccgattcctccctttctgagccagggccaggtcggtccggccgcggcttcctgttcagagtcctccgagcagctcttccccttcagcttctcctgctcctcctcatcgggcttgcctgccttgtaccaatgtcagaggaagactacagctgtgccctctccaacaactttgcccggtcattccaccccatgctcagatacacgaatggccctcctccactctgaactaagcagatgccatctgcagaagtgctggtagcataaggaggatcgggtcataagcaatcccaaactaccaacaagaggaccttgatcttggcgaaagccctcggtgtggcagctttagccctcctccagatcacatgtgtgcaaattatggcttcagaggtggaagataaacagtgacgggggaacaaacagacaacaagaaggtttggaagaaatctggtttgagactctgaaccttagcactaaggagattgagtaaggacctccaaagttccccggactcatgaattctgggcccttggcccattctgtgcacagccaaggacttcagtagaccatctgggcagctttcccatggtgctgctccaaccatcagataaatgaccctcccaagcaccatgtcagtgtcgtacaatctaccaaccaaccagtgctgaagagattttagaaccttgtaacatacaatttttaagagcttatatggcagcttcctttttaccttgttttcctttggggcatgatgttttaacctttgctttagaagcacaagctgtaaatctaaaaggcacttttttttagaggtataaagaaaaactagatgtaataaataagatcatggaaggctttatgtgaaaaaagttgaatgttatagt

SEQ ID NO: 2013 - protein, 982 aa, Homo sapien
MGERLAKASHESKASEIEYKLGKVNDRWQHLLDLIAARVKKLKETLVAVQQLDKNMSSLRTWLAHIESELAKPIVYDSCNSEEIQRKLNEQQELQRDIEKHSTGVASVLNLCEVLLHDCDACATDAECDSIQQATRNLDRRWRNICAMSMERRLKIEETWRLWQKFLDDYSRFEDWLKSSERTAAFPSSSGVIYTVAKEELKKFEAFQRQVHECLTQLELINKQYRRLARENRTDSACSLKQMVHEGNQRWDNLQKRVTSILRRLKHFIGQREEFETARDSILVWLTEMDLQLTNIEHFSECDVQAKIKQLKAFQQEISLNHNKIEQIIAQGEQLIEKSEPLDAAIIEEELDELRRYCQEVFGRVERYHKKLIRLPLPDDEHDLSDRELELEDSAALSDLHWHDRSADSLLSPQPSSNLSLSLAQPLRSERSGRDTPASVDSIPLEWDHDYDLSRDLESAMSRALPSEDEEGQDDKDFYLRGAVALSDVMIPESPEAYVKLTENAIKNTSGDHSALESQIRQLGKALDDSRFQIQQTENIIRSKTPTGPELDTSYKGYMKLLGECSSSIDSVKRLEHKLKEEEESLPGFVNLHSTETQTAGVIDRWELLQAQALSKELRMKQNLQKWQQFNSDLNSIWAWLGDTEEELEQLQRLELSTDIQTIELQIKKLKELQKAVDHRKAIILSINLCSPEFTQADSKESRDLQDRLSQMNGRWDRVCSLLEEWRGLLQDALMQCQGFHEMSHGLLLMLENIDRRKNEIVPIDSNLDAEILQDHHKQLMQIKHELLESQLRVASLQDMSCQLLVNAEGTDCLEAKEKVHVIGNRLKLLLKEVSRHIKELEKLLDVSSSQQDLSSWSSADELDTSGSVSPTSGRSTPNRQKTPRGKCSLSQPGPSVSSPHSRSTKGGSDSSLSEPGPGRSGRGFLFRVLRAALPLQLLLLLLIGLACLVPMSEEDYSCALSNNFARSFHPMLRYTNGPPPL

SEQ ID NO: 2014 - DNA, 2089 bp, Homo sapien; identical to SEQ ID NO: 1643

SEQ ID NO: 2015 - protein, 425 aa, Homo sapien; identical to SEQ ID NO: 1644

SEQ ID NO: 2016 - DNA, 2514 bp, Homo sapien
cacgagggtgaattctgccctggacagggctttgcccttggaggatccccaggtggccttacccgtgattcttactcggcatcctccattccccaaactccctcctccctgttaaatgtcaacctagacctggacctgggtgggaggaaactgtagcctgagtgtccacagggacacacgtgagccacagggctagaagcacaggcccgtcaccccaggaggaaaagcccagggtctggggcagcagagccatcgcatcatgtttcccagggcaacttgaggtctgacttttggctccctcgccctaagaggctcttcctctcttttgctcatccaccttcacaccacttgtgagctgacccccaggaacagcttggctgttccaccagagcagagggaatcattgctggactggatttcttctggagggaagcaccatgaattaaaggtgccagagctccatgcatggaaaagtggcctgttggttcaacgtggtttccttgtacttgatcctcctgaaatgagagattttcctgagatgactgagtatggagattaccaggcagatgataccgaaatgcttaaaggggctgtggctgaggctgtagcatctctgctggaggtgagacactctgggaactgatttgacctcgaatgctcctaaaagagaacttgatagcctgacagcagagaagtattatttggtggggagtctgagaaagcctggcttgtattatctgtccaaaaggaagcctcttcatctcctggtgccttggttgactattttggaaataggcatatcaaggttcctgattcagcactttgctcttttaataacaaatcgtccaaagatctcaaagtaagggtttttttttttagcttccactcttccgcagacttggtcatcgacctatttttgttgaagaatgaaaggcaatgacaagtttaacatatacaaattcgtgaattcttgttcattttgcattcctgcagtcagtgctaatccgtcgttcttaatcaggagttctgccaggtttaaggtcacctgcactcccagccaagtggtgatgtatgcctcccactctctgcaaggttttcctcatttttatattcatttattcatcattcattcattcacctaactttcattaaatagctgcaccatcccaggccctgtgcggatcgggaatacaaagatgagataaaacattgtccctgcccccgggggcttcacatgccactggaaacaacagactcttaaactaacaattcaagcaggcgccaagtgctacgacagaggtgtgaataaaagcatcaggaaatcggatggagaaccaccattcacccaagggtcagaggaggtttcaaagaaaaggtgtcattggagcagtgttttgcagaatgagccagagttcaccaagcaggcaaggcaaggaagggtgttgcagagagggaacagcatatgcaaaggcatatcagttcatggcatcacatctttcactggggaagccagtttccacaggcagcatcccaaggttcaataaggccttatttaacaagcaagcaaaatgcaaaccaaaccattattcatttattggcttaagtatgctttctcctgaaaactttagcattgggtgcaaatattcagtatggttctcggagtccaaagggttttaagccagggcacaaccagaaaagtggctctctttggtagggagaggggctccaatatttcgttctctccccatggggcactgacagagaaatgaaatagttttatctggaaaattccagagctattatttactccttaccaagggaagttacttcttgtaaaaacttttaagccatttatcaacaagttcttgttgactcagggcataatgagttcctgagacatgctcttttgggggctggggctttaggtagaagaatttcaaggaaaagaattctcagcagagctcaagattgtagaaactcagcagaagctggtaaaaacatggggagcccggaggacaggctgctgtccagggcagaggccatgaagaagtgcttccgtggccgacagtctggaaatgaatccatcatacattagtgccatagagtttagtaaccgtccagcaagtgtcatcacttttacagaaaacaaggtccagtaatagcaagtcttagtacatcctcacttttattataaatgggtgttttttcataatttttactgacgctcagtaaccatgcaaaattgtgtatagcattaatgtatctacatacctacacctatctatatataagctcatggtagaaaaccatagctaagtagcatcgcagacttaagcgtacaaagtgatcttgttcacaagtaatctgttgacagtgccaataaatgataaaaaaaaaattaacatgtcacaatgtaacggatgaccatatgcacaattccatgaattaaatctgtttcctgtgttagtcagtattcttaaataaaatttataattgaaaaaaaaaaaaaaaaaa

SEQ ID NO: 2017 - protein, 116 aa, Homo sapien
MENHHSPKGQRRFQRKGVIGAVFCRMSQSSPSRQGKEGCCREGTAYAKAYQFMASHLSLGKPVSTGSIPRFNKALFNKQAKCKPNHYSFIGLSMLSPENFSIGCKYSVWFSESKGF

SEQ ID NO: 2018 - DNA, 2514 bp, Homo sapien; identical to SEQ ID NO: 2016

SEQ ID NO: 2019 - protein, 116 aa, Homo sapien; identical to SEQ ID NO: 2017

SEQ ID NO: 2020 - DNA, 1550 bp, Homo sapien
ggcacgagggggaaggcaagatggcggcgcccatggaggtggccgtgtgtacggactcggcggccccgatgtggagctgcatcgtgtgggaacttcactcgggcgccaacctgctcacctaccgcggcggccaggcgggaccccgcggcctggcgctgctcaatggcgagtatctgctggcggcgcagctgggcaagaactacatcagcgcctgggagctgcagcggaaggaccagctccagcagaagatcatgtgccccgggcctgtcacctgtctgactgcatcacccaatggtctctacgtcctggcaggagttgcagaaagcatccacctgtgggaggtctccaccgggaaccttctggtcatcctgagtcgacactaccaggacgtctcctgccttcagttcacaggggacagcagccacttcatctcagggggcaaggactgcctggtgctggtttggagcctctgcagcgtgctgcaggccgacccctccaggattccggcgcccaggcacgtctggtctcaccacacgctccccatcacggacctgcactgcggctttgggggccccctggcccgggtggccacctcctcactggaccagacggtgaagctatgggaggtctcctcgggggagctgctgctctccgtcctctttgacgtgtccatcatggcagtgaccatggacctggctgagcaccatatgttctgcgggggcagtgagggctccatcttccaggtcgacctcttcacctggcccggacagagggagaggagcttccacccagagcaggacgccgggaaggtcttcaaagggcacaggaaccaggtgacttgcctgtcagtgtccactgacggcagcgtgctgctctcaggctcccacgacgagaccgtgcgcctctgggacgtgcagagcaagcagtgcatccggacggtggccctcaaaggcccagtcaccaatgccgccatcctgctggcgcccgtcagcatgctgagctcagacttcaggcccagcctgccgctgccccacttcaacaagcacctgctgggcgccgagcacggggacgagccgcgccacgggggcctcactctgcgcctgggcctccaccagcagggctcggagcccagctacctggaccgcacggagcagctgcaggccgtcctgtgcagcaccatggagaagagcgtgctcggcggccaggaccagctgcgcgtccgtgtgacggagctggaggacgaggtgcgcaacctgcgcaagatcaatcgggacctgttcgacttctccacgcgcttcatcacgcggccggccaagtgaggcccggagaccccggcccgaggcgcccaggcctgagccccatgcctcccagcaaccagggcccgcgggtgtggcccccaccagcccaggcctggactctcctcagttctgtgtcgtgttcgggtttttcctctgtgactgggccgtcttggtgtctcgtggcacgcgtcacagtggtgctagtctgtttttaacaaaagaggatgaaaagccaaaaaaaaaaaaaaaaaa

SEQ ID NO: 2021 - protein, 438 aa, Homo sapien
HEGEGKMAAPMEVAVCTDSAAPMWSCIVWELHSGANLLTYRGGQAGPRGLALLNGEYLLAAQLGKNYISAWELQRKDQLQQKIMCPGPVTCLTASPNGLYVLAGVAESIHLWEVSTGNLLVILSRHYQDVSCLQFTGDSSHFISGGKDCLVLVWSLCSVLQADPSRIPAPRHVWSHHTLPITDLHCGFGGPLARVATSSLDQTVKLWEVSSGELLLSVLFDVSIMAVTMDLAEHHMFCGGSEGSIFQVDLFTWPGQRERSFHPEQDAGKVFKGHRNQVTCLSVSTDGSVLLSGSHDETVRLWDVQSKQCIRTVALKGPVTNAAILLAPVSMLSSDFRPSLPLPHFNKHLLGAEHGDEPRHGGLTLRLGLHQQGSEPSYLDRTEQLQAVLCSTMEKSVLGGQDQLRVRVTELEDEVRNLRKINRDLFDFSTRFITRPAK

SEQ ID NO: 2022 - DNA, 4444 bp, Homo sapien
acggagacggaccacagcaagcagaggctgggggggggaaagacgaggaaagaggaggaaaacaaaagctgctacttatggaagatacaaaggagtctaacgtgaagacattttgctccaagaatatcctagccatccttggcttctcctctatcatagctgtgatagctttgcttgctgtggggttgacccagaacaaagcattgccagaaaacgttaagtatgggattgtgctggatgcgggttcttctcacacaagtttatacatctataagtggccagcagaaaaggagaatgacacaggcgtggtgcatcaagtagaagaatgcagggttaaaggtcctggaatctcaaaatttgttcagaaagtaaatgaaataggcatttacctgactgattgcatggaaagagctagggaagtgattccaaggtcccagcaccaagagacacccgtttacctgggagccacggcaggcatgcggttgctcaggatggaaagtgaagagttggcagacagggttctggatgtggtggagaggagcctcagcaactacccctttgacttccagggtgccaggatcattactggccaagaggaaggtgcctatggctggattactatcaactatctgctgggcaaattcagtcagaaaacaaggtggttcagcatagtcccatatgaaaccaataatcaggaaacctttggagctttggaccttgggggagcctctacacaagtcacttttgtaccccaaaaccagactatcgagtccccagataatgctctgcaatttcgcctctatggcaaggactacaatgtctacacacatagcttcttgtgctatgggaaggatcaggcactctggcagaaactggccaaggacattcaggttgcaagtaatgaaattctcagggacccatgctttcatcctggatataagaaggtagtgaacgtaagtgacctttacaagaccccctgcaccaagagatttgagatgactcttccattccagcagtttgaaatccagggtattggaaactatcaacaatgccatcaaagcatcctggagctcttcaacaccagttactgcccttactcccagtgtgccttcaatgggattttcttgccaccactccagggggattttggggcattttcagctttttactttgtgatgaagtttttaaacttgacatcagagaaagtctctcaggaaaaggtgactgagatgatgaaaaagttctgtgctcagccttgggaggagataaaaacatcttacgctggagtaaaggagaagtacctgagtgaatactgcttttctggtacctacattctctccctccttctgcaaggctatcatttcacagctgattcctgggagcacatccatttcattggcaagatccagggcagcgacgccggctggactttgggctacatgctgaacctgaccaacatgatcccagctgagcaaccattgtccacacctctctcccactccacctatgtcttcctcatggttctattctccctggtccttttcacagtggccatcataggcttgcttatctttcacaagccttcatatttctggaaagatatggtatagcaaaagcagctgaaatatgctggctggagtgaggaaaaaaatcgtccagggagcattttcctccatcgcagtgttcaaggccatccttccctgtctgccagggccagtcttgacgagtgtgaagcttccttggcttttactgaagcctttcttttggaggtattcaatatcctttgcctcaaggacttcggcagatactgtctctttcatgagtttttcccagctacacctttctcctttgtactttgtgcttgtataggttttaaagacctgacacctttcataatctttgctttataaaagaacaatattgactttgtctagaagaactgagagtcttgagtcctgtgataggaggctgagctggctgaaagaagaatctcaggaactggttcagttgtactctttaagaacccctttctctctcctgtttgccatccattaagaaagccatatgatgcctttggagaaggcagacacacattccattcccagcctgctctgtgggtaggagaattttctacagtaggcaaatatgtgctaaagccaaagagttttataaggaaatatatgtgctcatgcagtcaatacagttctcaatcccacccaaagcaggtatgtcaataaatcacatattcctaggtgatacccaaatgctacagagtggaacactcagacctgagatttgcaaaaagcagatgtaaatatatgcattcaaacatcagggcttactatgaggtaggtggtatatacatgtcacaaataaaaatacagttacaactcagggtcacaaaaaatgcatcttccaatgcatatttttattatggtaaaatatacataaatataattcaccattttaacatttaattcatattaaatacgtacaaatcagtgacatttagtacattcacagtgttgtgccaccatcaccactatttagttccagaacatttgcatcatcaatacattgtctagagacaagactatcctgggtaggcagaaaccatagatcttttgtgtttacagctatggaaaccaactgtaccataaagatagttcactgagttttaaagccaagccacatcttatttttccaaggtttaatttagtgagagggcagcattagtgtggagtggcatgcttttgccctatcgtggaatttacacatcagaatgtgcaggatccaagtctgaaagtgttgccacccgtcacacaacatgggctttgtttgcttattccatgaagcagcagctatagaccttaccatggaaacatgaagagaccctgcacccctttccttaaggattgctgcaagagttacctgttgagcaggattgactggtgatgtttcattctgaccttgtcccaagctctccatctctagatctggggactgactgttgagctgatggggaaagaaaagctctcacacaaaccggaagccaaatgtcccctatctcttgaatgatcaagtcacttttgacaacatccaggtgaatataaaaacttaataaagctgtggaaaggaactcttaatcttcttttctgctacttaggttaaattcactagatcttgattaggaatcaaaattcgaattgggacatgttcaaattctttcttgtggtagttgcctatactgtcatcgctgctgttggttgagcatttgtggtgtaccacgctgtgtgctcaagggtattacattcatcttctcatttaatcctcacaacaatctgaagaaggtaggtattacaattcccacttcatagaaacagaaactgaggttcagagaggttaagtcatttgcccaaatggctgagccaaagcctaccatgtacctaacctttattttctttcccgaacataccaggctgtctcctcataacttccaagcatgcacttaaaactccacatgaatacaaggttcatgggacttggtattcatagaaagggaggcagaaagctggtctgttcctgataggcttgtaatttaatatcattctgttcatgtgctttggatggaagcacatctggcatatgatgctaatcagtggttcccatacccctggcttcctaattttaatgtttgctcacagcatagtagattgacatcaaatagtggccgatgatgatgaaaataaaggtcaaataagttgagccaataacagccgcttttttccttctgtctgcgtatacaaagcactgtcatgcacacaatctattctgaccctcacaacaacccataagggtgtaaatagtatttccattttacaaatgaggatcacacaaactactacatggcagagcagatactccaactcatgtcttctggttgaagcctattgctttttcttttctaaacactttccctcagcaagttggaattagacttcacaagtctccttcagagaacacaaatcttttcttattccattcctgtttggttgcctacgtccaatctccccctccccagagatgccaaaaaaaaaatcctttaaggtatttgggagccaaactcaacttgttaaaatctcaaattatggagacaatcagcagacacaacctaaccccaattattttggcaggaaggttggtttagaggcagatccagcaatctgctttgggccactctgggtggggtaggtgaaataagattggtcactgttaactaattttaatattggattggccattggttatcactgattaccattctcccctggattttcacccaggactcaaaacttggttctgctaaccctgttcctttatgaggaaccttttaaagattcctttataaggtgggagttttttttctatgaacctataggggaga

SEQ ID NO: 2023 - protein, 535 aa, Homo sapien
GDGPQQAEAGGGKDEERGGKQKLLLMEDTKESNVKTFCSKNILAILGFSSIIAVIALLAVGLTQNKALPENVKYGIVLDAGSSHTSLYIYKWPAEKENDTGVVHQVEECRVKGPGISKFVQKVNEIGIYLTDCMERAREVIPRSQHQETPVYLGATAGMRLLRMESEELADRVLDVVERSLSNYPFDFQGARIITGQEEGAYGWITINYLLGKFSQKTRWFSIVPYETNNQETFGALDLGGASTQVTFVPQNQTIESPDNALQFRLYGKDYNVYTHSFLCYGKDQALWQKLAKDIQVASNEILRDPCFHPGYKKVVNVSDLYKTPCTKRFEMTLPFQQFEIQGIGNYQQCHQSILELFNTSYCPYSQCAFNGIFLPPLQGDFGAFSAFYFVMKFLNLTSEKVSQEKVTEMMKKFCAQPWEEIKTSYAGVKEKYLSEYCFSGTYILSLLLQGYHFTADSWEHIHFIGKIQGSDAGWTLGYMLNLTNMIPAEQPLSTPLSHSTYVFLMVLFSLVLFTVAIIGLLIFHKPSYFWKDMV

SEQ ID NO: 2024 - DNA, 2081 bp, Homo sapien; identical to SEQ ID NO: 1659

SEQ ID NO: 2025 - protein, 517 aa, Homo sapien; identical to SEQ ID NO: 1660

SEQ ID NO: 2026 - DNA, 878 bp, Homo sapien
gcgcgggcagggccgcacgagctggctggctgcttgcacccacatccttctttctctgggacctggggtcgcggttacttgggctggccggcgaacccttgagtggcctggcggggagcgggcctcgcgcgcctggagggccctgtggaacgaagagaggcacacagcatggcagaaaaccgagagccccgcggtgctgtggaggctgaactggatccagtggaatacacccttaggaaaaggcttcccagccgcttgccccggagacccaatgacatttatgtcaacatgaagacggactttaaggcccagctggcccgctgccagaagctgctggacggaggggcccggggtcagaacgcgtgctctgagatctacattcacggcttgggcctggccatcaaccacgccatcaacatcgcgctgcagctgcaggcgggcagcttcgggtccttgcaggtggctgccaatacctccaccgtggagcttgttgatgagctggagccagagaccgacacacgggagccactgactcggatccgcaacaactcagccatccacatccgagtcttcagggtcacacccaagtaattgaaaagacactcctccacttatcccctccgtgatatggctcttcgcatgctgagtactggacctcggaccagagccatgtaagaaaaggcctgttccctggaagcccaaaggactctgcattgagggtgggggtaattgtctcttggtggcccagttagtgggccttcctgagtgtgtgtatgcggtctgtaactattgccatataaataaaaaatcctgttgcactagtgtcctgccaaaaaaaaaaaaaaaaaaaaaaaaaaaaaaaaaaaaaaaaaaaaaaa

SEQ ID NO: 2027 - protein, 140 aa, Homo sapien
MAENREPRGAVEAELDPVEYTLRKRLPSRLPRRPNDIYVNMKTDFKAQLARCQKLLDGGARGQNACSEIYIHGLGLAINHAINIALQLQAGSFGSLQVAANTSTVELVDELEPETDTREPLTRIRNNSAIHIRVFRVTPK

SEQ ID NO: 2028 - DNA, 1622 bp, Homo sapien
ggcacgaggaagctactcagataagaggctccaagaggacatttttggatgtgaaaaacaatgagaaggaggacaacacacatttacaatcgtcttaattttgtactcagaaaaaggatgtgaagacaatgcacagggaatacaatagtttcagatctgtgtacagtttccttttgcttcatctcctgcaacaatgtaatgaagacaccatgatatcattaacatttcacacaaaaggaaaatgaggctgaaatggtgtgggcaaggcccaggaatctggagcatccctaaccaagcagcagagcacctgggatagagaaagtgctcaagaatgttcacttactgattactacaatcaaaaaaagatacgacactaatttaccacattcttcttacttattttatgagatactattcttccaaggtggagaaagtggagaaagtagagtgacgcagctaagggagtaaatcgaccctcagccaacaagtggcaaaagcctgaagaaagtgatcaagatcactgatgaccccgcggcccatctccaagggggcgggtatcacaaccccgacgccacaccacgtatcattccgcaaaactcccgcgcctcccacgcagaactggcaagagggaaggcgagacagcagtgaacagctggtacgcagcacccacagcaccgcggcagcagctagtgccgactcccgcctagctcttttgactctgttcgcgggaagaatggggaaacagtaaggttgcggcgcctcccgcgagacgaggtacctgaggctggccccgcagtcccccgccgcaccagcaccggagcttcacaccccacttccggggtcaagtcaccgccgggaatcctgtgatcgcagaaaggtagtctcaggttccgcccctatccaagtcccgcctccactgcctctcgccctgtatctgtcaacttccgggacgccgcgcgtcactaagcagccaatctccacttccggactcatccagccccttctccacccctttcagagacagcgcgattgcgatttaggtttccgcgcatttaattggcgaagctggagcgctagtcttcgctgattggtgccgagaaatctgccccatagacacccgcggggcgcacagtttcagtcgtccgtgggtttcccgccagccgcagtcttggaccataatcatggtggacatgatggacttgcccaggtcgcgcatcaacgccggcatgctagctcaattcatcgacaagcctgtctgcttcgtagggaggctggaaaagattcatcccaccggaaaaatgtttattctttcagatggagaaggaaaaaatggaaccatcgagttgatggaaccccttgatgaagaaatctctggaattgtggaagtggttggaagagtaaccgccaaggccaccatcttgtgtacatcttatgtccagtttaaagaagatagccatccttttgatcttggactttacaatgaagctgtgaaaattatccatgacttccctcagttttatcctttagggattgtgcaacatgattgatcttgatggattttcatacgattgtaaatgagctatattaaagtctattaaaggaaaaaaaaaaaaaaaaaaaaa

SEQ ID NO: 2029 - protein, 121 aa, Homo sapien
MVDMMDLPRSRINAGMLAQFIDKPVCFVGRLEKIHPTGKMFILSDGEGKNGTIELMEPLDEEISGIVEVVGRVTAKATILCTSYVQFKEDSHPFDLGLYNEAVKIIHDFPQFYPLGIVQHD

SEQ ID NO: 2030 - DNA, 2496 bp, Homo sapien
gttttgaaagttgatggagcgaactgcttttccaaagactcttttgaaaaactttttaagtaggccattctgactttaacatttctctttgtcttaacattagacaaaaagtaaccttcctgaagaggacatgtgattggaagttgtcaattgttgaagcattggtaactccagtctctaacgttttagaaaatcataacaagcggttctctaccctgtaaaggtgaactactgagttcttcattatgtctgatggagattatgattacctcatcaagtttttagctttgggagactctggtgtagggaagaccagtgtactttaccaatatacagatggtaaatttaactccaaatttatcacaacagtgggcattgatttcagggaaaaaagagtggtgtacagagccagtgggccggatggagccactggcagaggccagagaatccacctgcagttatgggacacagcagggcaggagaggtttcgtagcttaacgacagcgttcttcagagatgctatgggttttcttctactttttgatctgacaaatgagcaaagtttcctcaatgtcagaaactggataagccagctacagatgcatgcatattgtgaaaacccagatatagtgctgtgtggaaacaagagtgatctggaggaccagagagtagtgaaagaggaggaagccatagcactcgcagagaaatatggaatcccctactttgaaactagtgctgccaatgggacaaacataagccaagcaattgagatgcttctggacctgataatgaagcgaatggaacggtgtgtggacaagtcctggattcctgaaggagtggtgcgatcaaatggtcatgcctctacggatcagttaagtgaagaaaaggagaaaggggcatgtggctgttgagaagtcaagtaagtgacatagtagttcaggtggcccatgcctgggatcttctctatgattgatacatggcacagtgagagattaatgggcattgtgtacaaattgcttctcaccatccccattagacctacgaataaagcatccggttctaaaattaatttgttgcagctttgtaaatatttctttaagattcagcctgagagttaggagaaatatttcagagccaaaagtgccttatacaaccttagcctattatagtaaatcattcaaggattcagaattttgcagtcacagaagagtgtatttattatgtagaatgaatgagggtactgtcacctgccttaatgtaggtaggcccagagtcttacatttaagatcttacatgcagttataaaaccgccacagtcttcaatccagatttgaagactcatgccataggtgacattctaaaataccattaaagccacttaaatgttaaataagaatatacatgcacatcagctcaatgtctttgagtattaattttatgtaagcattctatttaacatgaatataggacaaatcatggctatatctatagaccttggataaactggattgaccaattatacactcacggtgacttttttattggtgggaaggggattggggtggggcaggctggcttaatgtaatatgagcaaccaaagtgggacttctgtctccccgctatattcccattgctctgaatggttgattgaagggtcagggaactagattttatggctttagttcactgtgattgtacatttatacttggcctatgtgctggccgcacctgaacatagctggtgcttatgccgagttatttgtgatgagtaaatatttagtttctttttcttcatatttataatgttgatctggcatcctcaggctgcagctttattagcttataaattactcatctctgtctttaccagcaggctctgtattgttgatatttgcaacttgttttgcttttccattggtggaattgaaataattagtttttaattacataagatgcctgtttgctatttggtggaagatagatgttcatattgaagcagtcacatttgtactgtagttcaataaaagaaaaatgaagtattctgtagcctatatttttcatagagctcatgagcatttactgtacttgctgggtcttgccaagatcatttattccgctgcattgccaaagtgtcttcataccaaattaaaggtggttttaatatatgtttcatggaagttgtttataaaattcaaaggtatttcatttaggtgaaaagtcttatttattaaagtggtttgaataaagtagatcaaaacttccagagatcttaatggctatataggaagaaatatcactcaccataatttaaataaagaataaaaatacatgtattttatggtggcaaatgtttggtagaactgtaattagaaaaatacaagtatatttgcgtgatggttacactagaagcccagactttacgactacacaatatattcatgtatctaaactgtacttgtaccccctaaatttatttttaaaaaaaaaaaaaaaaaa

SEQ ID NO: 2031 - protein, 221 aa, Homo sapien
MSDGDYDYLIKFLALGDSGVGKTSVLYQYTDGKFNSKFITTVGIDFREKRVVYRASGPDGATGRGQRIHLQLWDTAGQERFRSLTTAFFRDAMGFLLLFDLTNEQSFLNVRNWISQLQMHAYCENPDIVLCGNKSDLEDQRVVKEEEAIALAEKYGIPYFETSAANGTNISQAIEMLLDLIMKRMERCVDKSWIPEGVVRSNGHASTDQLSEEKEKGACGC

SEQ ID NO: 2032 - DNA, 4336 bp, Homo sapien
gtctaaaactctcttttctcttggctcttcttattcgagtgatgaggaggaggagttgcataattcacggcccttccacagtaccttccacaataccagtgctaatctgactgagagtataacagaagagaactataatttcctgccacatagcccctccaagaaagattctgaatggaagagtggaacaaaagtcagtcgtacattcagctacatcaagaataaaatgtctagcagcaagaagagcaaagaaaaggaaaaagaaaaagataagattaaggagaaggagaaagattctaaagacaaggagaaagataagaagactgtcaacgggcacactttcagttccattcctgttgtgggtcccatcagctgtagccagtgtatgaagcccttcaccaacaaagatgcctatacttgtgcaaattgcagtgcttttgtccacaaaggctgccgagaaagtctagcctcctgtgcaaaggtcaaaatgaagcagcccaaagggagccttcaggcacatgacacatcatcactgcccacggtcattatgagaaacaagccctcacagcccaaggagcgtcctcggtccgcagtcctcctggtggatgaaaccgctaccaccccaatatttgccaatagacgatcccagcagagtgtctcgctctccaaaagtgtctccatacagaacattactggagttggcaatgatgagaacatgtcaaacacctggaaattcctgtctcattcaacagactcactaaataaaatcagcaaggtcaatgagtcaacagaatcacttactgatgagggagtaggtacagacatgaatgaaggacaactactgggagactttgagattgagtccaaacagctggaagcagagtcttggagtcggataatagacagcaagtttctaaaacagcaaaagaaagatgtggtcaaacggcaagaagtaatatatgagttgatgcagacagagtttcatcatgtccgcactctcaagatcatgagtggtgtgtacagccaggggatgatggcggatctgctttttgagcagcagatggtagaaaagctgttcccctgtttggatgagctgatcagtatccatagccaattcttccagaggattctggagcggaagaaggagtctctggtggataaaagtgaaaagaactttctcatcaagaggataggggatgtgcttgtaaatcagttttcaggtgagaatgcagaacgtttaaagaagacatatggcaagttttgtgggcaacataaccagtctgtaaactacttcaaagacctttatgccaaggataagcgttttcaagcctttgtaaagaagaagatgagcagttcagttgttagaaggcttggaattccagagtgcatattgcttgtaactcagcggattaccaagtacccagttttattccaaagaatattgcagtgtaccaaagacaatgaagtggagcaggaagatctagcacagtccttgagcctggtgaaggatgtgattggagctgtagacagcaaagtggcaagttatgaaaagaaagtgcgtctcaatgagatttatacaaagacagatagcaagtcaatcatgaggatgaagagtggtcagatgtttgccaaggaagatttgaaacggaagaagcttgtacgtgatgggagtgtgtttctgaagaatgcagcaggaaggttgaaagaggttcaagcagttcttctcactgacattttagttttccttcaagaaaaagaccagaagtacatctttgcatcattggaccagaagtcaacagtgatctctttaaagaagctgattgtgagagaagtggcacatgaggagaaaggtttattcctgatcagcatggggatgacagatccagagatggtagaagtccatgccagctccaaagaggaacgaaacagctggattcagatcattcaggacacaatcaacaccctgaacagagatgaagatgaaggaattcctagtgagaatgaggaagaaaagaaaatgttggacaccagagcccgagaattaaaagaacaacttcaccagaaggaccaaaaaatcctactcttgttggaagagaaggagatgattttccgggacatggctgagtgcagcacccctctcccagaggattgctccccaacacatagccctagagttctcttccgctccaacacagaagaggctctcaaaggaggacctttaatgaaaagtgcaataaatgaggtggagatccttcagggtttggtgagtggaaatctgggaggcacacttgggccgactgtcagcagccccattgagcaagatgtggtcggtcccgtttccctgccccggagagcagagacctttggaggatttgacagccatcagatgaatgcttcaaaaggaggcgagaaggaagagggagatgatggccaagatcttaggagaacggaatcagatagtggcctaaaaaagggtggaaatgctaacctggtatttatgcttaaaagaaacagtgagcaggttgtccagagcgttgttcatctctacgagctcctcagcgctctgcagggtgtggtgctgcagcaggacagctacattgaggaccagaaactggtgctgagcgagagggcgctcactcgcagcttgtcccgcccgagctccctcattgagcaggagaagcagcgcagcctggagaagcagcgccaggacctggccaacctgcagaagcagcaggcccagtacctcgaggagaagcgcaggcgcgagcgtgagtgggaagctcgtgagagggagctgcgggagcgggaggccctcctggcccagcgcgaggaggaggtgcagcaggggcagcaggacctggaaaaggagcgggaggagctccagcagaagaagggcacataccagtatgacctggagcgactgcgtgctgcccagaaacagcttgagagggaacaggagcagctgcgccgggaggcagagcggctcagccagcggcagacagaacgggacctgtgtcaggtttcccatccacataccaagctgatgaggatcccatcgttcttccccagtcctgaggagcccccctcgccatctgcaccttccatagccaaatcagggtcattggactcagaactttcagtgtccccaaaaaggaacagcatctctcggacacacaaagataaggggccttttcacatactgagttcaaccagccagacaaacaaaggaccagaagggcagagccaggcccctgcgtccacctctgcctctacccgcctgtttgggttaacaaagccaaaggaaaagaaggagaaaaaaaagaagaacaaaaccagccgctctcagcccggtgatggtcccgcgtcagaagtatcagcagagggtgaagagatcttctgctgaccctcttcctctctgctgaggcagctgcctcctgatcctggccagcccacctctcctgctgtccccgcgtgcacaagtctcttacactggacgcccactgctcctcagcgtccagtcctcctgggcggccccaggtcctggacaataagcaacagatgatattgagtgtcgggtggggaaggaggcccagactctgcttcggccatgatttgtgactgcccaggactctcaggttgggctggccctactcaggattacactgaaagtaatggcctcgtaagtacaggtgatggttttggacacgtcaggaattcctaaaggctgaaagagtgtatccaagtaaggtctgaacctccgactgccttttatttgggggaacacaaaaccaaacagcagatgttttggacttgatctgtgtacgtacatggggacctgtctgcatatacacacggggaatgccagaagaaggcccagtctgcaccaggcgtctggtcaacttagcacaagggcagtgcctggacggacccggagcccccgcatatcagcagttcacccagtactcctcagagactggtttccctctaaacccatcccgggcacataccacccctgttttgcatgtatttctcatttcattttagggatgacaaacatttgtgaaaccagtgagagaaggcttgatgtgtataaaagacgtgatgtgcaccacctcgatctcggtgtttcaggcactaaagcaacaaaacaacccatagtatctcattttgtcatcagatccagaagaaatatcctggttttccagcatgtttacccacatgttttgggcatggataaagtgaagagggctactcaccattatccctgcagcgtgacaccttttgattgtcactgaccactcagaaggggccacggcctcctggctgtgttcctgag

SEQ ID NO: 2033 - protein, 1058 aa, Homo sapien
MSSSKKSKEKEKEKDKIKEKEKDSKDKEKDKKTVNGHTFSSIPVVGPISCSQCMKPFTNKDAYTCANCSAFVHKGCRESLASCAKVKMKQPKGSLQAHDTSSLPTVIMRNKPSQPKERPRSAVLLVDETATTPIFANRRSQQSVSLSKSVSIQNITGVGNDENMSNTWKFLSHSTDSLNKISKVNESTESLTDEGVGTDMNEGQLLGDFEIESKQLEAESWSRIIDSKFLKQQKKDVVKRQEVIYELMQTEFHHVRTLKIMSGVYSQGMMADLLFEQQMVEKLFPCLDELISIHSQFFQRILERKKESLVDKSEKNFLIKRIGDVLVNQFSGENAERLKKTYGKFCGQHNQSVNYFKDLYAKDKRFQAFVKKKMSSSVVRRLGIPECILLVTQRITKYPVLFQRILQCTKDNEVEQEDLAQSLSLVKDVIGAVDSKVASYEKKVRLNEIYTKTDSKSIMRMKSGQMFAKEDLKRKKLVRDGSVFLKNAAGRLKEVQAVLLTDILVFLQEKDQKYIFASLDQKSTVISLKKLIVREVAHEEKGLFLISMGMTDPEMVEVHASSKEERNSWIQIIQDTINTLNRDEDEGIPSENEEEKKMLDTRARELKEQLHQKDQKILLLLEEKEMIFRDMAECSTPLPEDCSPTHSPRVLFRSNTEEALKGGPLMKSAINEVEILQGLVSGNLGGTLGPTVSSPIEQDVVGPVSLPRRAETFGGFDSHQMNASKGGEKEEGDDGQDLRRTESDSGLKKGGNANLVFMLKRNSEQVVQSVVHLYELLSALQGVVLQQDSYIEDQKLVLSERALTRSLSRPSSLIEQEKQRSLEKQRQDLANLQKQQAQYLEEKRRREREWEARERELREREALLAQREEEVQQGQQDLEKEREELQQKKGTYQYDLERLRAAQKQLEREQEQLRREAERLSQRQTERDLCQVSHPHTKLMRIPSFFPSPEEPPSPSAPSIAKSGSLDSELSVSPKRNSISRTHKDKGPFHILSSTSQTNKGPEGQSQAPASTSASTRLFGLTKPKEKKEKKKKNKTSRSQPGDGPASEVSAEGEEIFC

SEQ ID NO: 2034 - DNA, 2950 bp, Homo sapien
ggcacgagggagagtcgaacccggagcagggtcccatccgagcgtggactggcggcaggatgttcagctggatggggcggcaggcgggcgggcgcgaacgcgctggcggcgcggacgcggtgcagacggtgacgggcgggctgcgctcgctctacctgcgcaaggtgctgccgctggaggaggcgtaccgcttccacgagttccactcgcctgcgctggaggacgccgacttcgagaacaagcccatgatcctgctggtgggccagtacagcaccggcaagaccaccttcatcagatacctactggagcaggatttcccaggcatgaggattggtccggagcccaccacagactccttcatcgccgtgatgtatggagagactgagggcagcaccccagggaatgctttagtcgtggaccccaaaaagccgtttagaaagctcagtcgctttggaaacgctttcctgaatcgattcatgtgctcacagctccccaatcaggtcctgaagagcatcagcgtcatcgacagccccggcatcctttctggggagaagcagcgcatcagccgaggctatgacttctgccaggtcctgcagtggtttgccgagagggtggacaggatcatcctgctctttgacgctcacaagctggacatctcagatgaattctcagaggccatcaaggccttccggggccaggacgacaagatccgtgtcgtgctgaataaggccgaccaagtggacacgcagcagctgatgcgggtctacggggccctcatgtggtccctaggcaaggtcatcaacacgcccgaggtactgcgcgtctacattggctccttctgggcgcagcccctgcagaacacggacaaccgccggctcttcgaggctgaggcccaggacctcttcagagacatccagagcctcccccagaaggcagcggtgcgcaagctcaacgacctcatcaagcgagcgaggctggccaaggtgcatgcctacatcatcagctacctgaagaaggagatgccaagtgtatttggaaaggaaaacaagaagagagagcttatcagcaggctaccggaaatctacattcagctacagcgagaataccagatttctgcaggggacttccctgaggtcaaggctatgcaggaacagcttgagaactatgacttcaccaaattccactcgctgaagcccaagctgatcgaggcagtggacaacatgctgagcaacaagatctcgcccctcatgaacctcatcagccaggaggagacgagcacgcccacgcagctggtgcagggcggcgccttcgatggcaccaccgagggccccttcaaccagggctacggggagggtgccaaggagggcgccgacgaggaggagtgggtcgtggccaaagacaagcccgtctacgacgagctcttctacactctgtcgcccatcaatggcaagatatcaggtgtcaacgccaagaaggagatggtgacctccaagctgcccaacagcgtcctgggcaagatctggaagctggccgactgcgactgcgacggcatgcttgatgaggaggagttcgcgctggccaagcacctcatcaagatcaagctcgacggctacgagctgcccagcagcctgcccccccacctcgtgcccccctcgcacaggaagtccctgcccaaggccgactgaggggtgggctgcagaacggggtgggaactgggggacctgggcctcaggcctgctccaccactgactcaccgaatgaccttgggcaaggcactgccctctctgtgccttggtttccccatctgtagaatggggagggtggacactggaaactagatgacttctttcacctccaaaattcccttagtttctatgaaaatattgggggtaggggggtggattaggagattgaagggttgagaagaaagagaaattgtccaaagagtcctcagaacctgcctggagaaatgcgcatgggggtgggcctggtaagtcccaggaaccacaggaagtgagctaaggctcacccagagcagctgggtctccaggctgcctgggctttttgtcctcatgaacaactctggagcagctgtctgtccctcagagggcacctggaggcagcaaagattatcttatttattttattttgttttctgctatatttagagtggcaaaaaaatagagcagagggtttctgctgtctccagactgtctaccaaagagaaggcgacagatgcctcctgggtttggaagggggatgcactgtggatctgccatccattctgcagtctccagcagagcaggcagtcaggccccagcgtgcctccatcccagtgccccgatgaccatctggtcagccctcccaacctcccttccagggggcttaccagcaaagccatattcggctaggaatttggaattcacaacctttattaacccctggcaaaacttcccgtttgcatgtcaaatcacattgaagcctgaagattagcttttcttactggtttttccaataagtaatagcaaagcccacttatcatacttaaactacagtaaagaaaagaggtggttctctgcagtgatcgtttagtgtggccctcaaacattaaatatccccaggtctccttggtgggtggcaggatttaaattcaatcaaatcctgtcctagtgtgtgcagtgtcttcggccctgtggacacaggtgaatgagggaccagccctgccctgggctgttgagaagagatcagtccacccagagttagacattgtttttgtagaaaacaggcatttattatgtctagggttttgtgttttttttttttccttacaggataaaagcctttatacagaaacaaaatggaacctttcatataaaaccttttctttaaaaaaaaaaaaaaaaaaaaaaaaaaaaaaaaaaaaaaaaaaaaaaaaaaaaaaaaaaaaaaa

SEQ ID NO: 2035 - protein, 541 aa, Homo sapien
MFSWMGRQAGGRERAGGADAVQTVTGGLRSLYLRKVLPLEEAYRFHEFHSPALEDADFENKPMILLVGQYSTGKTTFIRYLLEQDFPGMRIGPEPTTDSFIAVMYGETEGSTPGNALVVDPKKPFRKLSRFGNAFLNRFMCSQLPNQVLKSISVIDSPGILSGEKQRISRGYDFCQVLQWFAERVDRIILLFDAHKLDISDEFSEAIKAFRGQDDKIRVVLNKADQVDTQQLMRVYGALMWSLGKVINTPEVLRVYIGSFWAQPLQNTDNRRLFEAEAQDLFRDIQSLPQKAAVRKLNDLIKRARLAKVHAYIISYLKKEMPSVFGKENKKRELISRLPEIYIQLQREYQISAGDFPEVKAMQEQLENYDFTKFHSLKPKLIEAVDNMLSNKISPLMNLISQEETSTPTQLVQGGAFDGTTEGPFNQGYGEGAKEGADEEEWVVAKDKPVYDELFYTLSPINGKISGVNAKKEMVTSKLPNSVLGKIWKLADCDCDGMLDEEEFALAKHLIKIKLDGYELPSSLPPHLVPPSHRKSLPKAD

SEQ ID NO: 2036 - DNA, 1140 bp, Homo sapien
  Unsure 23: Unknown base
ctggcgctgctggggctcggcgncggcctttgtctgcgggcacggccgctgcggtgctcaggaacagcccatggaagaatcatatgaagaggtggtgactgaggtcgtaagcaggagtggacatgtttggatttccaacagctaccctgctggactgtcatggaagatatgcccagaatgtagcgttcttcaatgtgatgactgaagcccaccacaaatatgaccactctgaggctacaggatcctcaagctgggatatccaaaattctttcagaagagagaagctggaacaaaaatccccagattcgaagacactacaggaagattcacctggagtgagacaaagggtctatgagtgccaggagtgtggaaaatccttccggcaaaaaggtagtctaacgttacatgagagaatccacactggtcaaaagccttttgagtgcacccactgtggaaaaagcttcagggccaaaggcaatcttgttacacatcaacggatacacacgggagagaagccttatcagtgcaaggagtgtgggaaaagcttcagtcaacgaggtagtctcgctgtccacgagagactccacactggacagaaaccctacgagtgtgctatttgtcagagaagcttcaggaatcagagtaaccttgctgttcacaggagagttcacagtggtgagaagccctatagatgtgatcagtgtggaaaagccttcagtcagaaaggaagcttaattgttcacatcagagtccacacaggcctgaagccctatgcctgtacccagtgcaggaagagtttccacaccagggggaattgtattctgcatggcaaaatccacacaggagagacaccctatctgtgcggccagtgtggaaaaagcttcacccagagagggagtctggctgtgcaccagcgaagctgctcacagaggctcaccctttgaccactttcctgaagagaagttctctttatgaattaagagtacaaaatcctctgagatgaagcaacctatccagttctatggaatgaatggagaatctttcagaaagaccatcattgggtagggcaaactgatttttttcctttcccccaaaagagtatgaaaaataaaggtcttgtttattatcattaaaaaaaaa

SEQ ID NO: 2037 - protein, 273 aa, Homo sapien
  Unsure 23: Unknown amino acid
MFGFPTATLLDCHGRYAQNVAFFNVMTEAHHKYDHSEATGSSSWDIQNSFRREKLEQKSPDSKTLQEDSPGVRQRVYECQECGKSFRQKGSLTLHERIHTGQKPFECTHCGKSFRAKGNLVTHQRIHTGEKPYQCKECGKSFSQRGSLAVHERLHTGQKPYECAICQRSFRNQSNLAVHRRVHSGEKPYRCDQCGKAFSQKGSLIVHIRVHTGLKPYACTQCRKSFHTRGNCILHGKIHTGETPYLCGQCGKSFTQRGSLAVHQRSCSQRLTL

SEQ ID NO: 2038 - DNA, 4839 bp, Homo sapien
ggctgtttggagtgtaccgtcctcagtaatgaatccagaagaacaaatcgtgacatggcttatatctttgggagttttagagtcccctaaaaagaccatctgtgatccggaggagtttttaaagtcctcgctgaaaaatggggtagttctgtgcaaactgatcaacagactcatgcctggctctgtggaaaagttttgtctggatccccaaactgaagctgactgcatcaacaacatcaatgacttcctgaaaggatgtgcaaccctccaagtggaaatatttgatcctgatgacctttattcaggggtcaatttctccaaggtactgagtactcttttagctgtcaacaaagcaacagaagatcagctatcagaaagaccatgtggacgttcctcttctcttagtgctgctaatacttctcagacaaacccacagggagcagtttctagcacagtttcagggctgcaaaggcagtcaaagacagtggagatgacggaaaatggaagtcatcagttgatagtaaaagcaagattcaactttaagcagactaatgaggatgaactgtcagtttgtaagggggacatcatttacgtcacacgagttgaagaaggaggctggtgggaaggcacattaaatgggagaacaggctggttccccagtaattatgtccgtgaaattaaatccagtgagagacctctctccccaaaagccgtcaaaggatttgaaactgctccacttaccaagaattattatactgtggtgttacagaacatcctggacactgaaaaagaatatgctaaagaacttcagtctcttcttgttacttacttaagacccctgcagtccaataacaatctgagtactgtggaggttacatctttactgggaaacttcgaggaagtatgcacatttcaacagacactctgccaagccttggaagaatgttcaaagtttccagaaaaccagcacaaagtaggaggttgtctactgagtctcatgcctcattttaaatctatgtatctggcttactgtgcaaaccatccttcagctgtaaatgtgctcactcagcacagtgatgagttggaacaattcatggaaaatcaaggtgcatcgagcccaggtatcctcattttaacaacaaacctcagcaaaccattcatgcgactggagaaatatgttactctcttgcaagagttagaacggcatatggaggatactcatccagatcatcaggatattctgaaagcaatcgtagcattcaaaactctcatggggcaatgtcaagatctgaggaagagaaaacagctggagttacagatactgtccgaacctattcaggcatgggaaggagaagatattaaaaacttgggaaatgtgatttttatgtcacaagtaatggtgcagtatggagcatgtgaggaaaaagaggagcggtaccttatgttattttcaaatgtcctgataatgttatctgcaagtcctcggatgagtggctttatctatcagggaaaaataccaatagcaggaacggtggtgactagattagatgaaattgaagggaatgactgcacatttgaaatcactggtaacacagtggagagaattgtggtccattgtaacaacaaccaggacttccaggaatggttggagcagctgaacagactgatcagaggacctgcctcttgcagttcattatccaaaacctcatcgtcatcatgtagtgctcattcttcttttagctctaccggacagccccgaggacccttggagcctcctcaaattataaaaccgtggagtttaagttgtctacgacctgcacctccacttagaccatcagcagcactaggttataaagagaggatgtcttatatcttaaaggagtctagtaaaagccctaaaacgatgaagaaatttcttcataaaaggaagactgagagaaaaccatcggaggaggaatatgtgattaggaaaagtacagctgctctggaagaggatgctcaaatccttaaagtgatcgaagcctactgcaccagcgcaaattttcaacaaggccatggctcaagtactcgaaaagattccattccacaagtcctactccctgaggaagagaaactcatcattgaagaaaccagaagcaacggccagaccatcatggaagaaaagagccttgttgatactgtttacgccttgaaggacgaggtcagagaactgaagcaggaaaataaaagaatgaagcaatgcctggaagaagaactgaaatcaagaagggacctagaaaagctggtgcggaggcttttgaagcaaacagatgagtgtattcgaggcgagtccagtagcaagacctcaattcttccataaccatcactgtgccactgggtggagtgtgccttcagggcatcttgaaatgtcccgctgaatgatttgactcagtttgctcacttctttggcttttgttttgtgtttgagtctctctctctctctccctctctcttctctttctctccccgctgtgtgcatatgtgtgtgcgtgcacgtgcgcgcttgggcatttgctgttgtttggttattggttggttgttcattttttttttcaacaggtgaaaaagcaggaagtggtggtagagatggcctcagagtcttttccattcagtaagaaagagaaagggaatgcaggccagttacttaaaaggtcttcagattgccttcagttcacagtgcctctgcaacagccattgccctcaggtcacattctttgggctggctgcccttgcaaagcagctggccaaggcttattaaatgtgaacccaacttttccccagggctttcctgtacctgcaagcctcttagtacttaatttaccgaaggcaaatcttccagactatggcttgagtaggatgaaagacaaacacatctgcccaatgatccagctgcccttccttagaccatcacatgcctcccctcaatcacaggttttaaaattactgccctatgttgtctataagaccaagaaaactgtagtacccttattccttttgtgtcatgtaaattgtaactcaggggggcagaagctctggtcacccacaccaacaccaaatccatcagcaaattctactggacaatcctcccttttagtagcagagttgaccgccttttcccattgcatgataggtttctttccctcattctgcctagtgtgtaagttttctatttccccagtacttttagccaaccttaccaagtggtgtgtaaactagtatgtatgtgctttgcttactttttaaaaaaatgtagttagactgtgaggagttactttatgtacgttgcatattcaaactgtgatgttttatccttcaaaacaatctgcattaagaagatattgtgccctactagacagctttcattcactttattactctctcatatatgctgtgagaagttgtaatattaattggcctctttgggtgggactctaagcagtatttgcagaaatatgcttctggtccaacttgtacatccagaacaaaagggcccctctagtagctgtgtgctggattattcaggactgattaactcaagttgctcattgaatcacatcatccactttatcccagaaactagaactgtgagaaaccaggtttagaagacagtcacagaacagcacacatccaaattcagcgccattgaaagttggcctaaggctcagtgccactcacccctccctccccaaaagacaagagaaatttggccagatggggaaggtcactggaaattgaggccaaagggctgatcagaattgcctttataatatatttgatggatgcctataaatgtgggttttgcaaatattgtttaaaaaccaaacttgaagccaggcatggtggcccacacctgtggtcccagctactcaggaggctgaggtgggaggatcatttgagcccaggaggtcaaggctgcagtgagctgtgatgacaccactgcactccaacctaggtaacagagagacacctctgtctctgaaaaaacaaaacttgaagtttgaaacccccagcttgctgaggagccctttttatttttggtactgagagtctcaaggtcccatagctacatggtacagggctgttgtctgcttgctgcacagcagaaattacaccatccacaggaaatggactatttttgcagtccaacatcagccaaccacacacagccgtgtttggaagctgaagagtaaagaaatttctaggaatggctgttgttctgttttttagcacagccatttagatataacatccttcacttaaaaattaaaaacatcagtactaccaccaccaccaacaacatcaacacagatcttcacatctgcccattctgtggttagtcaatggcttgcaataaatgtgcaaactgcatctataggaaacatttttgtgattacggaatactttagttgattgctgaaaatattgaaaggtcttcattttacagtgatgagtacatatgcatgtttcggggacttggcccttctgatgaggggccctcggtactctggataacgaagcttgtgcagagtggtaaccatgcttacacactaaactataatataaaggaaatgaagccatgttaatctgagagcagtgtcgccatagttgtgttgtttacaatactctataaatgggttcctgttgccctgtaattaaactgctgcccgtagaggcctttcagttccttttctgtccttccccttcttaacacaagctcaaattttctaacttgtttttattttgaagacttttaaaatggacattttcaatacataaaaataaacagtgctttataaaaat

SEQ ID NO: 2039 - protein, 776 aa, Homo sapien
MNPEEQIVTWLISLGVLESPKKTICDPEEFLKSSLKNGVVLCKLINRLMPGSVEKFCLDPQTEADCINNINDFLKGCATLQVEIFDPDDLYSGVNFSKVLSTLLAVNKATEDQLSERPCGRSSSLSAANTSQTNPQGAVSSTVSGLQRQSKTVEMTENGSHQLIVKARFNFKQTNEDELSVCKGDIIYVTRVEEGGWWEGTLNGRTGWFPSNYVREIKSSERPLSPKAVKGFETAPLTKNYYTVVLQNILDTEKEYAKELQSLLVTYLRPLQSNNNLSTVEVTSLLGNFEEVCTFQQTLCQALEECSKFPENQHKVGGCLLSLMPHFKSMYLAYCANHPSAVNVLTQHSDELEQFMENQGASSPGILILTTNLSKPFMRLEKYVTLLQELERHMEDTHPDHQDILKAIVAFKTLMGQCQDLRKRKQLELQILSEPIQAWEGEDIKNLGNVIFMSQVMVQYGACEEKEERYLMLFSNVLIMLSASPRMSGFIYQGKIPIAGTVVTRLDEIEGNDCTFEITGNTVERIVVHCNNNQDFQEWLEQLNRLIRGPASCSSLSKTSSSSCSAHSSFSSTGQPRGPLEPPQIIKPWSLSCLRPAPPLRPSAALGYKERMSYILKESSKSPKTMKKFLHKRKTERKPSEEEYVIRKSTAALEEDAQILKVIEAYCTSANFQQGHGSSTRKDSIPQVLLPEEEKLIIEETRSNGQTIMEEKSLVDTVYALKDEVRELKQENKRMKQCLEEELKSRRDLEKLVRRLLKQTDECIRGESSSKTSILP

SEQ ID NO: 2040 - DNA, 7260 bp, Homo sapien
tcactgtcactgctaaattcagagcagattagagcctgcgcaatggaataaagtcctcaaaattgaaatgtgacattgctctcaacatctcccatctctctggatttccttttgcttcattattcctgctaaccaattcattttcagactttgtacttcagaagcaatgggaaaaatcagcagtcttccaacccaattatttaagtgctgcttttgtgatttcttgaaggtgaagatgcacaccatgtcctcctcgcatctcttctacctggcgctgtgcctgctcaccttcaccagctctgccacggctggaccggagacgctctgcggggctgagctggtggatgctcttcagttcgtgtgtggagacaggggcttttatttcaacaagcccacagggtatggctccagcagtcggagggcgcctcagacaggcatcgtggatgagtgctgcttccggagctgtgatctaaggaggctggagatgtattgcgcacccctcaagcctgccaagtcagctcgctctgtccgtgcccagcgccacaccgacatgcccaagacccagaaggaagtacatttgaagaacgcaagtagagggagtgcaggaaacaagaactacaggatgtaggaagaccctcctgaggagtgaagagtgacatgccaccgcaggatcctttgctctgcacgagttacctgttaaactttggaacacctaccaaaaaataagtttgataacatttaaaagatgggcgtttcccccaatgaaatacacaagtaaacattccaacattgtctttaggagtgatttgcaccttgcaaaaatggtcctggagttggtagattgctgttgatcttttatcaataatgttctatagaaaagaaaaaaaaatatatatatatatatatcttagtccctgcctctcaagagccacaaatgcatgggtgttgtatagatccagttgcactaaattcctctctgaatcttggctgctggagccattcattcagcaaccttgtctaagtggtttatgaattgtttccttatttgcacttctttctacacaactcgggctgtttgttttacagtgtctgataatcttgttagtctatacccaccacctcccttcataacctttatatttgccgaatttggcctcctcaaaagcagcagcaagtcgtcaagaagcacaccaattctaacccacaagattccatctgtggcatttgtaccaaatataagttggatgcattttattttagacacaaagctttatttttccacatcatgcttacaaaaaagaataatgcaaatagttgcaactttgaggccaatcatttttaggcatatgttttaaacatagaaagtttcttcaactcaaaagagttccttcaaatgatgagttaatgtgcaacctaattagtaactttcctctttttattttttccatatagagcactatgtaaatttagcatatcaattatacaggatatatcaaacagtatgtaaaactctgttttttagtataatggtgctattttgtagtttgttatatgaaagagtctggccaaaacggtaatacgtgaaagcaaaacaataggggaagcctggagccaaagatgacacaaggggaagggtactgaaaacaccatccatttgggaaagaaggcaaagtccccccagttatgccttccaagaggaacttcagacacaaaagtccactgatgcaaattggactggcgagtccagagaggaaactgtggaatggaaaaagcagaaggctaggaattttagcagtcctggtttctttttctcatggaagaaatgaacatctgccagctgtgtcatggactcaccactgtgtgaccttgggcaagtcacttcacctctctgtgcctcagtttcctcatctgcaaaatgggggcaatatgtcatctacctacctcaaaggggtggtataaggtttaaaaagataaagattcagatttttttaccctgggttgctgtaagggtgcaacatcagggcgcttgagttgctgagatgcaaggaattctataaataacccattcatagcatagctagagattggtgaattgaatgctcctgacatctcagttcttgtcagtgaagctatccaaataactggccaactagttgttaaaagctaacagctcaatctcttaaaacacttttcaaaatatgtgggaagcatttgattttcaatttgattttgaattctgcatttggttttatgaatacaaagataagtgaaaagagagaaaggaaaagaaaaaggagaaaaacaaagagatttctaccagtgaaaggggaattaattactctttgttagcactcactgactcttctatgcagttactacatatctagtaaaaccttgtttaatactataaataatattctattcattttgaaaaacacaatgattccttcttttctaggcaatataaggaaagtgatccaaaatttgaaatattaaaataatatctaataaaaagtcacaaagttatcttctttaacaaactttactcttattcttagctgtatatacatttttttaaaaagtttgttaaaatatgcttgactagagtttcagttgaaaggcaaaaacttccatcacaacaagaaatttcccatgcctgctcagaagggtagcccctagctctctgtgaatgtgttttatccattcaactgaaaattggtatcaagaaagtccactggttagtgtactagtccatcatagcctagaaaatgatccctatctgcagatcaagattttctcattagaacaatgaattatccagcattcagatctttctagtcaccttagaactttttggttaaaagtacccaggcttgattatttcatgcaaattctatattttacattcttggaaagtctatatgaaaaacaaaaataacatcttcagtttttctcccactgggtcacctcaaggatcagaggccaggaaaaaaaaaaaagactccctggatctctgaatatatgcaaaaagaaggccccatttagtggagccagcaatcctgttcagtcaacaagtattttaactctcagtccaacattatttgaattgagcacctcaagcatgcttagcaatgttctaatcactatggacagatgtaaaagaaactatacatcatttttgccctctgcctgttttccagacatacaggttctgtggaataagatactggactcctcttcccaagatggcacttctttttatttcttgtccccagtgtgtaccttttaaaattattccctctcaacaaaactttataggcagtcttctgcagacttaacatgttttctgtcatagttagatgtgataattctaagagtgtctatgacttatttccttcacttaattctatccacagtcaaaaatcccccaaggaggaaagctgaaagatgcaactgccaatattatctttcttaactttttccaacacataatcctctccaactggattataaataaattgaaaataactcattataccaattcactattttattttttaatgaattaaaactagaaaacaaattgatgcaaaccctggaagtcagttgattactatatactacagcagaatgactcagatttcatagaaaggagcaaccaaaatgtcacaaccaaaactttacaagctttgcttcagaattagattgctttataattcttgaatgaggcaatttcaagatatttgtaaaagaacagtaaacattggtaagaatgagctttcaactcataggcttatttccaatttaattgaccatactggatacttaggtcaaatttctgttctctcttgcccaaataatattaaagtattatttgaactttttaagatgaggcagttcccctgaaaaagttaatgcagctctccatcagaatccactcttctagggatatgaaaatctcttaacacccaccctacatacacagacacacacacacacacacacacacacacacacacacacacattcaccctaaggatccaatggaatactgaaaagaaatcacttccttgaaaattttattaaaaaacaaacaaacaaacaaaaagcctgtccacccttgagaatccttcctctccttggaacgtcaatgtttgtgtagatgaaaccatctcatgctctgtggctccagggtttctgttactattttatgcacttgggagaaggcttagaataaaagatgtagcacattttgctttcccatttattgtttggccagctatgccaatgtggtgctattgtttctttaagaaagtacttgactaaaaaaaaaagaaaaaaagaaaaaaaagaaagcatagacatatttttttaaagtataaaaacaacaattctatagatagatggcttaataaaatagcattaggtctatctagccaccaccacctttcaactttttatcactcacaagtagtgtactgttcaccaaattgtgaatttgggggtgcaggggcaggagttggaaattttttaaagttagaaggctccattgttttgttggctctcaaacttagcaaaattagcaatatattatccaatcttctgaacttgatcaagagcatggagaataaacgcgggaaaaaagatcttataggcaaatagaagaatttaaaagataagtaagttccttattgatttttgtgcactctgctctaaaacagatattcagcaagtggagaaaataagaacaaagagaaaaaatacatagatttacctgcaaaaaatagcttctgccaaatcccccttgggtattctttggcatttactggtttatagaagacattctcccttcacccagacatctcaaagagcagtagctctcatgaaaagcaatcactgatctcatttgggaaatgttggaaagtatttccttatgagatgggggttatctactgataaagaaagaatttatgagaaattgttgaaagagatggctaacaatctgtgaagattttttgtttcttggttttgtttttttttttttttttactttatacagtctttatgaatttcttaatgttcaaaatgacttggttcttttcttcttttttttatatcagaatgaggaataataagttaaacccacatagactctttaaaactataggctagatagaaatgtatgtttgacttgttgaagctataatcagactatttaaaatgttttgctatttttaatcttaaaagattgtgctaatttattagagcagaacctgtttggctctcctcagaagaaagaatctttccattcaaatcacatggctttccaccaatattttcaaaagataaatctgatttatgcaatggcatcatttattttaaaacagaagaattgtgaaagtttatgcccctcccttgcaaagaccataaagtccagatctggtaggggggcaacaacaaaaggaaaatgttgttgattcttggttttggattttgttttgttttcaatgctagtgtttaatcctgtagtacatatttgcttattgctattttaatattttataagaccttcctgttaggtattagaaagtgatacatagatatcttttttgtgtaatttctatttaaaaaagagagaagactgtcagaagctttaagtgcatatggtacaggataaagatatcaatttaaataaccaattcctatctggaacaatgcttttgttttttaaagaaacctctcacagataagacagaggcccaggggatttttgaagctgtctttattctgcccccatcccaacccagcccttattattttagtatctgcctcagaattttatagagggctgaccaagctgaaactctagaattaaaggaacctcactgaaaacatatatttcacgtgttccctctcttttttttcctttttgtgagatggggtctcgcactgtcccccaggctggagtgcagtggcatgatctcggctcactgcaacctccacctcctgggtttaagcgattctcctgcctcagcctcctgagtagctgggattacaggcacccaccactatgcccggctaattttttggatttttaatagagacggggttttaccatgttggccaggttggactcaaactcctgaccttgtgatttgcccgcctcagcctcccaaattgctgggattacaggcatgagccaccacaccctgcccatgtgttccctcttaatgtatgattacatggatcttaaacatgatccttctctcctcattcttcaactatctttgatggggtctttcaaggggaaaaaaatccaagcttttttaaagtaaaaaaaaaaaaagagaggacacaaaaccaaatgttactgctcaactgaaatatgagttaagatggagacagagtttctcctaataaccggagctgaattacctttcactttcaaaaacatgaccttccacaatccttagaatctgcctttttttatattactgaggcctaaaagtaaacattactcattttattttgcccaaaatgcactgatgtaaagtaggaaaaataaaaacagagctctaaaatccctttcaagccacccattgaccccactcaccaactcatagcaaagtcacttctgttaatcccttaatctgattttgtttggatatttatcttgtacccgctgctaaacacactgcaggagggactctgaaacctcaagctgtctacttacatcttttatctgtgtctgtgtatcatgaaaatgtctattcaaaatatcaaaacctttcaaatatcacgcagcttatattcagtttacataaaggccccaaataccatgtcagatctttttggtaaaagagttaatgaactatgagaattgggattacatcatgtattttgcctcatgtatttttatcacacttataggccaagtgtgataaataaacttacagacactgaattaatttcccctgctactttgaaaccagaaaataatgactggccattcgttacatctgtcttagttgaaaagcatattttttattaaattaattctgattgtatttgaaattattattcaattcacttatggcagaggaatatcaatcctaatgacttctaaaaatgtaactaattgaatcattatcttacatttactgtttaataagcatattttgaaaatgtatggctagagtgtcataataaaatggtatatctttctttagtaattacaaaaaaaaaaaaaaaaaaaaaaaa

SEQ ID NO: 2041 - protein, 153 aa, Homo sapien
MGKISSLPTQLFKCCFCDFLKVKMHTMSSSHLFYLALCLLTFTSSATAGPETLCGAELVDALQFVCGDRGFYFNKPTGYGSSSRRAPQTGIVDECCFRSCDLRRLEMYCAPLKPAKSARSVRAQRHTDMPKTQKEVHLKNASRGSAGNKNYRM

SEQ ID NO: 2042 - DNA, 7260 bp, Homo sapien; identical to SEQ ID NO: 2040

SEQ ID NO: 2043 - protein, 153 aa, Homo sapien; identical to SEQ ID NO: 2041

SEQ ID NO: 2044 - DNA, 1718 bp, Homo sapien
ggcacgaggcacgtggttatgctgccggagtttgggccgccactgtaggaaaagtaacttcagctgcagccccaaagcgagtgagccgagccggagccatggagggccagagcgtggaggagctgctcgcaaaggcagagcaggacgaggcagagaagttgcaacgcatcacggtgcacaaggagctggagctgcagtttgacctgggcaacctgctggcgtcggaccggaaccccccgaccgggctgcggtgcgccggacccacgccggaggccgagctacaggccctggcgcgggacaacacgcaactgctcatcaaccagctgtggcagctgcccacggagcgcgtggaagaggcgatagtggcgcggctgccggagcccaccacacgcctgccgcgagagaagcctctgccccgaccgcggccacttacacgctggcagcagttcgcgcgcctcaagggcatccgtcccaagaagaagaccaacctggtgtgggacgaggtgagtggccagtggcggcggcgctggggctaccagcgcgcccgggacgacaccaaagaatggctgattgaggtgcccggcaatgccgaccccttggaggaccagttcgccaagcggattcaggccaagaaggaaagggtggccaagaacgagctgaaccggctgcgtaacctggcccgcgcgcacaagatgcagctgcccagcgcggccggcttgcaccctaccggacaccagagtaaggaggagctgggccgcgccatgcaagtggccaaggtctccaccgcctctgtggggcgctttcaggagcgcctccccaaggagaaggtgccccggggctccggcaagaaaaggaagtttcaaccccttttcggggactttgcagccgagaaaaagaaccagttggagctgcttcgtgtcatgaacagcaagaagcctcagctggatgtgactagggccaccaataagcagatgagggaggaggaccaggaggaggccgccaagaggaggaaaatgagccagaagggcaagagaaagggaggccggcaggggcctgggggcaagaggaaagggggcccgcccagccagggagggaagaggaaagggggcttgggaggcaagatgaattctgggccgcctggcttgggtggcaagagaaaaggaggacagcgcccaggaggaaagaggaggaagtaatagtttctaactgtcggacccgtctgtaaaccaaggactatgaatactaaatgttaagttctaggcaattatacggggactcagaaggacctggccgctgccttcattgagtttaaagggacaggattgcccttccgtcaagaaagtatgtaagtgttggactgcacaaattaatgtttttcccacaaccgagactttggagattaagaacttatttgaggatttaagaattagggaaataatttggtggaaaccgggaatgagttctattcttaaacagcctttttttttctttttaatgttggatatacggcgaggtagagttggccatatttcagagacttagattgacgtatatgtttctgcattatttttacaacaagtttgtgtatcagagcgggagtgcgggggagggaaagaaaacaaacagtttcagaattgaataggcaagtgactgttttaaagattaagtaataaagatgtcttatctagtgtgacttttaaaaaaaaaaaaaaaaaaaa

SEQ ID NO: 2045 - protein, 365 aa, Homo sapien
MEGQSVEELLAKAEQDEAEKLQRITVHKELELQFDLGNLLASDRNPPTGLRCAGPTPEAELQALARDNTQLLINQLWQLPTERVEEAIVARLPEPTTRLPREKPLPRPRPLTRWQQFARLKGIRPKKKTNLVWDEVSGQWRRRWGYQRARDDTKEWLIEVPGNADPLEDQFAKRIQAKKERVAKNELNRLRNLARAHKMQLPSAAGLHPTGHQSKEELGRAMQVAKVSTASVGRFQERLPKEKVPRGSGKKRKFQPLFGDFAAEKKNQLELLRVMNSKKPQLDVTRATNKQMREEDQEEAAKRRKMSQKGKRKGGRQGPGGKRKGGPPSQGGKRKGGLGGKMNSGPPGLGGKRKGGQRPGGKRRK

SEQ ID NO: 2046 - DNA, 2006 bp, Mus musculus
ctagcagcgggtcggagatcgaaggaacgggccaattgcggctgaaacgtctttggaaggaggaagggggtgagggagcatccctttgagtttcgcctcttctcgaggcggtggtgggaagggagacatacttaatactgccctcttaatccaacggaccttacatcgtgtagactgccgggagggcggcgggaaaagggcaagacgggagttggggaagggaaggagccaggaagccgcgcgggagggcgcgcgcgcgcgcccctttttcagcagtgtggcggggtcgcacgcacgcccgcctcggcggctgggcgcgatttgcgacagtggggggggcggtggaggtggcggcggcagcggcaactttgcggcaagctcgggccgggcttgcttgacggcggtgtggcggaggccccgccccaggcggcaggaacctggagggaggcggaggaatatgtccgagagggaagtgtcgactgcgccggcgggaacagacatgcctgcggccaagaagcagaagctgagcagtgacgagaacagcaatccagacctctctggagacgagaatgatgacgctgtcagtatagaaagtggtacaaacactgaacgccctgatacacctacaaacacgccaaatgcacctggaaggaaaagttggggaaagggaaaatggaagtcaaagaaatgcaaatattctttcaaatgtgtaaatagtctcaaggaagatcataaccaaccattgtttggagttcagtttaactggcacagtaaagaaggagatccattagtgtttgcaactgtaggaagcaacagagttaccttgtatgaatgtcattcacaaggagaaatccggttgttgcaatcttacgtggatgctgatgctgatgaaaacttttacacttgtgcatggacctatgatagcaatacgagccatcctctgctggctgtagctggatctagaggcataattaggataataaatcctataacaatgcagtgtataaagcactatgttggccatggaaatgctatcaatgagctgaaattccatccaagagatccaaatcttctcctgtcagtaagtaaagatcatgctttacgattatggaatatccagacggacactctggtggcaatatttggaggcgtagaagggcacagagatgaagttctaagtgctgattatgatcttttgggtgaaaaaataatgtcctgtggtatggatcattctcttaaactttggaggatcaattcaaagagaatgatgaatgcaattaaggaatcttatgattataatccaaataaaactaacaggccatttatttctcagaaaatccattttcctgatttttctaccagagacatacataggaattatgttgattgtgtgcgatggttaggcgatttgatactttctaagtcttgtgaaaatgccattgtgtgctggaaacctggcaagatggaagatgatatagataaaattaaacccagtgaatctaatgtgactattcttgggcgatttgattacagccagtgtgacatttggtacatgaggttttctatggatttctggcaaaagatgcttgcattgggcaatcaagttggcaaactttatgtttgggatttagaagtagaagatcctcataaagccaaatgtacaacactgactcatcataaatgtggtgctgctattcgacaaaccagttttagcagggatagcagcattcttatagctgtttgtgatgatgccagtatttggcgctgggatcgacttcgataaaatacttttgcctaatcaaaattagagtgtgtttgttgtctgtgtaaaatagaattaatgtatcttgctagtaagggcacgtagagcatttagagttgtctttcagcattcaatcaggctgagctgaatgtagtgatgtttacattgtttacattctttgtactgtcttcctgctcagactctactgcttttaataaaaatttatttttgtaaaaaaaaaaaa

SEQ ID NO: 2047 - protein, 441 aa, Mus musculus
MSEREVSTAPAGTDMPAAKKQKLSSDENSNPDLSGDENDDAVSIESGTNTERPDTPTNTPNAPGRKSWGKGKWKSKKCKYSFKCVNSLKEDHNQPLFGVQFNWHSKEGDPLVFATVGSNRVTLYECHSQGEIRLLQSYVDADADENFYTCAWTYDSNTSHPLLAVAGSRGIIRIINPITMQCIKHYVGHGNAINELKFHPRDPNLLLSVSKDHALRLWNIQTDTLVAIFGGVEGHRDEVLSADYDLLGEKIMSCGMDHSLKLWRINSKRMMNAIKESYDYNPNKTNRPFISQKIHFPDFSTRDIHRNYVDCVRWLGDLILSKSCENAIVCWKPGKMEDDIDKIKPSESNVTILGRFDYSQCDIWYMRFSMDFWQKMLALGNQVGKLYVWDLEVEDPHKAKCTTLTHHKCGAAIRQTSFSRDSSILIAVCDDASIWRWDRLR

SEQ ID NO: 2048 - DNA, 8093 bp, Homo sapien; identical to SEQ ID NO: 1707

SEQ ID NO: 2049 - protein, 248 aa, Homo sapien; identical to SEQ ID NO: 1708

SEQ ID NO: 2050 - DNA, 3367 bp, Homo sapien
gaggccgagctcggctgggcttggcgaggctgcagcgcggccaccggcgggagtgcagcggccactgtacccagagattcaaaaccccaaacccgggacttgggggcgctgagccgggccgggaagcagagcctggtcgtgaggaacagccgcccgttgctgtctgcccctttgcggacagcgtctccctcgactccgcttaggaagtggtgggggcggcgtggcccccgtcgggaggcgttcgaacgcccgctaggagagagaaaggattcccctgtgcttggagcccgcactcgggcgcggagggagcggcggcaggctctcgctttcggcaccatgggctgcacgctgagcgccgaggacaaggcggcggtggagcggagtaagatgatcgaccgcaacctccgtgaggacggcgagaaggcggcgcgcgaggtcaagctgctgctgctcggtgctggtgaatctggtaaaagtacaattgtgaagcagatgaaaattatccatgaagctggttattcagaagaggagtgtaaacaatacaaagcagtggtctacagtaacaccatccagtcaattattgctatcattagggctatggggaggttgaagatagactttggtgactcagcccgggcggatgatgcacgccaactctttgtgctagctggagctgctgaagaaggctttatgactgcagaacttgctggagttataaagagattgtggaaagatagtggtgtacaagcctgtttcaacagatcccgagagtaccagcttaatgattctgcagcatactatttgaatgacttggacagaatagctcaaccaaattacatcccgactcaacaagatgttctcagaactagagtgaaaactacaggaattgttgaaacccattttactttcaaagatcttcattttaaaatgtttgatgtgggaggtcagagatctgagcggaagaagtggattcattgcttcgaaggagtggcggcgatcatcttctgtgtagcactgagtgactacgacctggttctagctgaagatgaagaaatgaaccgaatgcatgaaagcatgaaattgtttgacagcatatgtaacaacaagtggtttacagatacatccattatactttttctaaacaagaaggatctttttgaagaaaaaatcaaaaagagccctctcactatatgctatcaagaatatgcaggatcaaacacatatgaagaggcagctgcatatattcaatgtcagtttgaagacctcaataaaagaaaggacacaaaggaaatatacacccacttcacatgtgccacagatactaagaatgtgcagtttgtttttgatgctgtaacagatgtcatcataaaaaataatctaaaagattgtggtctcttttaagttttgcagttcatggtaaaatgcattttcaaaccaaatgagtacttatatatggatctctgtagactagagtcttgcagcaacacagaatgtaatataaggcaaatgcatctgggacttgaccaaagttgttctgttttgtttttttaactgaaagtaacagaaggacctttcttaaatgtgacagatggtcctgcagtgtgaaactgaaggacagtgttaaagctgggctctagtatattgatgatttctgcataagtgtaaatatgcaaatgtatgtatacatgtatttatgactttagttttcgacattatttttaggttttaagagtggcaacttaggattttagggtgatggctttggaaataacataaatataccttgtactgaatgacagactattactacgtttgccagttttaaacagctttatttatgttcatgtcctgtaaatttttaagtacagtaattaatattaggaaacattacagcccttatctagattatatgtatacttgtattaataaaaatgttatttgtacaaacattgcacagactattttaataacatgatttgttctttaaattttatgtgttttattgaaatgttcttaagatgaatacacctgcctttggatcaactatttaaacattgtatgcattttgatttttcctactttaagaaaataaaataatttaattttacattagattccacgttagatttggtttgaaaaactaaaatttcagatttctgaggatatactgtcttagacttattgtacacacttagtttttattcacttgttttcactctgaattttaatatttggctgatatgaatgcattgcctcaaaggtgatgtcatcttaatttttattcactttaaataactacatttttgtttataactaagtttggagggatcctaagagcatttttgtgggtaaaaaaaaaacctgtggacataatgaattttgagacattgattggtgaggcttttatttcccttgaggagtctcttgtacctagcatacatgatagctccttgttgggaagataacaagaaggatctttgaatactctattgctgatataatgcaagatttaaatttatacatataactaatttcaaatgtaattatcacactatgttaaaattacttttttcccttagataattcaaatttctccacttgcttgagattatatcatttctttttcaattatactattatttctgagaatgaaatggacgattacacttagaaaatgagtaatagtgtttaataagtcagtgattatatgtgtgctcaaataagtgttatgtatcagctagatactgagctttgatagaataattttcttttgattattcatgatgtgtcatctctgaccttgtttcagcaaagtaaacagcactccccaccccaccctcatttttttactcatcttggaaaaggttagtctttcagtacacgttactggtaagtagtttccaagttacgtgttgtcactgggttgaagtatatttgtgtgtgtgtgtgtgtgtgtgtgtgtgtgtgtgtgtgtgtaaccataaactatattcatatctgtttcatttggaggattttcttctttgtaatgtaaagaaattcaaagttatcaaagttccttaaatgtgttagtttagattctttatgtgcctttcatgaaagatatgttttcattaattttactggtggacctgtaatatccacattgtgaagctgtgtatgaaattcaactataatatgaataaatttgaatcatgagaattatgggttaaaaagccacaaagaagcacatattggtgaccatcattaatgaaatcctgaactttattctgtgtaattgtgttaataaatcctaataaatttaaatttttaaaattttacaaacaaaaaaaaaaaaaaaaaaaaaaaagaaaaaaaaaaaaaaaaa

SEQ ID NO: 2051 - protein, 354 aa, Homo sapien
MGCTLSAEDKAAVERSKMIDRNLREDGEKAAREVKLLLLGAGESGKSTIVKQMKIIHEAGYSEEECKQYKAVVYSNTIQSIIAIIRAMGRLKIDFGDSARADDARQLFVLAGAAEEGFMTAELAGVIKRLWKDSGVQACFNRSREYQLNDSAAYYLNDLDRIAQPNYIPTQQDVLRTRVKTTGIVETHFTFKDLHFKMFDVGGQRSERKKWIHCFEGVAAIIFCVALSDYDLVLAEDEEMNRMHESMKLFDSICNNKWFTDTSIILFLNKKDLFEEKIKKSPLTICYQEYAGSNTYEEAAAYIQCQFEDLNKRKDTKEIYTHFTCATDTKNVQFVFDAVTDVIIKNNLKDCGLF

SEQ ID NO: 2052 - DNA, 2140 bp, Homo sapien
ggagctccaggcgcacatccgcagtcagccacctcgcgcgcgcctccaggagcaaggatggagaggctggtgatcaggatgcccttctgtcatctgtctacctacagcctggtttgggtcatggcagcagtggtgctgtgcacagcacaagtgcaagtggtgacccaggatgaaagagagcagctgtacacacctgcttccttaaaatgctctctgcaaaatgcccaggaagccctcattgtgacatggcagaaaaagaaagctgtaagcccagaaaacatggtcaccttcagcgagaaccatggggtggtgatccagcctgcctataaggacaagataaacattacccagctgggactccaaaactcaaccatcaccttctggaatatcaccctggaggatgaagggtgttacatgtgtctcttcaatacctttggttttgggaagatctcaggaacggcctgcctcaccgtctatgtacagcccatagtatcccttcactacaaattctctgaagaccacctaaatatcacttgctctgccactgcccgcccagcccccatggtcttctggaaggtccctcggtcagggattgaaaatagtacagtgactctgtctcacccaaatgggaccacgtctgttaccagcatcctccatatcaaagaccctaagaatcaggtggggaaggaggtgatctgccaggtgctgcacctggggactgtgaccgactttaagcaaaccgtcaacaaaggctattggttttcagttccgctattgctaagcattgtttccctggtaattcttctcgtcctaatctcaatcttactgtactggaaacgtcaccggaatcaggaccgagagccctaactaagtcacacagcaccctgaaagtgattccctggtctacttgaatttgacacaagagaaaagcaggaggaaaaggggccattctccaaaggacctgaaagagcaaaagaggtgggagcgaaagccttaaggatcccacgactttttactgccatctgagctactcagtgtttgaatcccaagaggaagtcagtttacctctcaggtctgttgtaggacttgattttgtaaagcaatgccatgttatgtggttgaaagggcactggacttagtatcaggagcactgagctcacagactgacttgggctcctactggtggggacctctgttagtcactttacctcatccaaagtataaaggaattggaccaaataatttaccacatagctctaaaacttaatttaaaatgtaattccagaaaaaaaaagggaataagcaaagggggaagaattgaaagagagagagaagaaagaatacagagagcttaccttttgcctttctgttgatgttacatctcttcttcctatgttcttaggtctatgagtctgtttccccatcatttggtatctagtccagttcctgcttactgctttgctaatagctggccttgctagaatccttggttcactgctgttcttcatgtgcttctatgagatttactccaacacaaataggactgaatttattgtgaagtaacattggcaatcttaacttattcatttaacttatttttatagctagataaatattgttagtcttagacaatagctcacattttttgagaagcatgccctccctgtccatttgtcttataacatgacccagccctattttacgtcattctaaattcagcctcatataatgaaaatacattatgaaaacagatgtttaggagatttcctgtatagcagtcagccaattcatatgctttgtctctgctggcttctttttccatgcgttaacttttcccaatagcagaggaggcaaatatgagcatacaatccctttgttctaaagatattgttccagctagtggaatgatgttgaatctttaataaccataattagttgctttttcagtatcttctgctttgtctgtgtctatccagtggcctaggaattaaagtgtaagttgtttttgctgttaaattggatatttatatatatatatatagcaagattttcatgtgttatttaattctgtattgtttcttatatttgtagtaaaatattgaacaattaaaagtgttgactccaaaaaaaaaaaaaaaaa

SEQ ID NO: 2053 - protein, 269 aa, Homo sapien
MERLVIRMPFCHLSTYSLVWVMAAVVLCTAQVQVVTQDEREQLYTPASLKCSLQNAQEALIVTWQKKKAVSPENMVTFSENHGVVIQPAYKDKINITQLGLQNSTITFWNITLEDEGCYMCLFNTFGFGKISGTACLTVYVQPIVSLHYKFSEDHLNITCSATARPAPMVFWKVPRSGIENSTVTLSHPNGTTSVTSILHIKDPKNQVGKEVICQVLHLGTVTDFKQTVNKGYWFSVPLLLSIVSLVILLVLISILLYWKRHRNQDREP

SEQ ID NO: 2054 - DNA, 2140 bp, Homo sapien; identical to SEQ ID NO: 2052

SEQ ID NO: 2055 - protein, 269 aa, Homo sapien; identical to SEQ ID NO: 2053

SEQ ID NO: 2056 - DNA, 1408 bp, Homo sapien
cgggaacgccgctcttcgcctctcagcggcggcttgtcctttgttccggacgcccgctcctcagccctgcgtcctggggtcgctgctgcatcccgcacgcctccaccggctgcagacccatggccgagcgcggggaactcgacttgaccggcgccaaacagaacacaggagtgtggctagtcaaggttcctaaatatttgtcacagcaatgggctaaagcctctggaagaggtgaagttgggaaactgcggattgccaagactcaaggaaggactgaggtgtcatttactttgaatgaggatcttgcaaatattcatgatattggtggaaaaccagcttcagtcagtgctcctagagaacatccatttgtcttgcaaagtgttggaggacagacattaacagtatttactgagagctcatcagataagctgtcattggaaggaatagtggtacaaagagctgaatgccgaccagctgccagtgaaaactacatgcgattaaaaagattgcaaatagaagagtcttccaaaccagtgaggctatcacaacagctggacaaagttgtaacaaccaattacaaacctgttgctaatcatcaatacaatatcgaatatgaaaggaaaaagaaagaagacggaaagcgagctcgagctgataaacaacatgttttagacatgctattttcagcctttgagaaacatcaatactataatcttaaggacttggtggacatcacaaaacaacctgtggtgtacctgaaggaaatcttaaaagaaattggtgttcagaatgtaaaagggatccacaaaaacacatgggagctgaagccagagtacagacactatcaaggagaagaaaagagtgactaagaagactcctagccagcatgctagtgaaaggctagcagcgatgctatgcaaaaggcgctgatactggaaggcttgaacaccgtatgtttaataggggttaagtgacagtactttgatttctctcggtaaattttttaaacctgtaaggcttgtaaagtttcttaactgtttttttgaggagaaagaacagatttatttatagacttaacttgtattaaaccagattattcacagtaggaataggggttggaggattaagagggtttttcttaaatattagcttttaatgtgtacaattaggaaatttttttaagtgaggactctctacccttgccgtatctaaggagctgaggtaatacagatccaaggagaattgtatagcaagaaaaaaacagtcaactacagaaactcttaaaaggaataaaaacccaaagttccttattttgaaattgtcaaagaacaaacggtgtttttcttttaaacaggtgatcacgtttcttttcatactcaacgttaataaaaggagagagtttgtagtg

SEQ ID NO: 2057 - protein, 249 aa, Homo sapien
MAERGELDLTGAKQNTGVWLVKVPKYLSQQWAKASGRGEVGKLRIAKTQGRTEVSFTLNEDLANIHDIGGKPASVSAPREHPFVLQSVGGQTLTVFTESSSDKLSLEGIVVQRAECRPAASENYMRLKRLQIEESSKPVRLSQQLDKVVTTNYKPVANHQYNIEYERKKKEDGKRARADKQHVLDMLFSAFEKHQYYNLKDLVDITKQPVVYLKEILKEIGVQNVKGIHKNTWELKPEYRHYQGEEKSD

SEQ ID NO: 2058 - DNA, 2365 bp, Homo sapien
tcccagccttcccatccccccaccgaaagcaaatcattcaacgacccccgaccctccgacggcaggagccccccgacctcccaggcggaccgcccttccctccccgcgcgggttccgggcccggcgagagggcgcgacgacagccgaggccatggaggtgacggcggaccagccgcgctgggtgagccaccaccaccccgccgtgctcaacgggcagcacccggacacgcaccacccgggcctcagccactcctacatggacgcggcgcagtacccgctgccggaggaggtggatgtgctttttaacatcgacggtcaaggcaaccacgtcccgccctactacggaaactcggtcagggccacggtgcagaggtaccctccgacccaccacgggagccaggtgtgccgcccgcctctgcttcatggatccctaccctggctggacggcggcaaagccctgggcagccaccacaccgcctccccctggaatctcagccccttctccaagacgtccatccaccacggctccccggggcccctctccgtctaccccccggcctcgtcctcctccttgtcggggggccacgccagcccgcacctcttcaccttcccgcccaccccgccgaaggacgtctccccggacccatcgctgtccaccccaggctcggccggctcggcccggcaggacgagaaagagtgcctcaagtaccaggtgcccctgcccgacagcatgaagctggagtcgtcccactcccgtggcagcatgaccgccctgggtggagcctcctcgtcgacccaccaccccatcaccacctacccgccctacgtgcccgagtacagctccggactcttcccccccagcagcctgctgggcggctcccccaccggcttcggatgcaagtccaggcccaaggcccggtccagcacaggcagggagtgtgtgaactgtggggcaacctcgaccccactgtggcggcgagatggcacgggacactacctgtgcaacgcctgcgggctctatcacaaaatgaacggacagaaccggcccctcattaagcccaagcgaaggctgtctgcagccaggagagcagggacgtcctgtgcgaactgtcagaccaccacaaccacactctggaggaggaatgccaatggggaccctgtctgcaatgcctgtgggctctactacaagcttcacaatattaacagacccctgactatgaagaaggaaggcatccagaccagaaaccgaaaaatgtctagcaaatccaaaaagtgcaaaaaagtgcatgactcactggaggacttccccaagaacagctcgtttaacccggccgccctctccagacacatgtcctccctgagccacatctcgcccttcagccactccagccacatgctgaccacgcccacgccgatgcacccgccatccagcctgtcctttggaccacaccacccctccagcatggtcaccgccatgggttagagccctgctcgatgctcacagggcccccagcgagagtccctgcagtccctttcgacttgcatttttgcaggagcagtatcatgaagcctaaacgcgatggatatatgtttttgaaggcagaaagcaaaattatgtttgccactttgcaaaggagctcactgtggtgtctgtgttccaaccactgaatctggaccccatctgtgaataagccattctgactcatatcccctatttaacagggtctctagtgctgtgaaaaaaaaaaatcctgaacattgcatataacttatattgtaagaaatactgtacaatgactttattgcatctgggtagctgtaaggcatgaaggatgccaagaagtttaaggaatatgggagaaatagtgtggaaattaagaagaaactaggtctgatattcaaatggacaaactgccagttttgtttcctttcactggccacagttgtttgatgcattaaaagaaaataaaaaaaagaaaaaagagaaaagaaaaaaaaagaaaaaagttgtaggcgaatcatttgttcaaagctgttggccctctgcaaaggaaataccagttctgggcaatcagtgttaccgttcaccagttgccattgagggtttcagagagcctttttctaggcctacatgctttgtgaacaagtccctgtaattgttgtttgtatgtataattcaaagcaccaaaataagaaaagatgtagatttatttcatcatattatacagaccgaactgttgtataaatttatttactgctagtcttaagaactgctttctttcgtttgtttgtttcaatattttccttctctctcaattttcggttgaataaactagattacattcagttggcaaaaaaaaaaaaa

SEQ ID NO: 2059 - protein, 443 aa, Homo sapien
MEVTADQPRWVSHHHPAVLNGQHPDTHHPGLSHSYMDAAQYPLPEEVDVLFNIDGQGNHVPPYYGNSVRATVQRYPPTHHGSQVCRPPLLHGSLPWLDGGKALGSHHTASPWNLSPFSKTSIHHGSPGPLSVYPPASSSSLSGGHASPHLFTFPPTPPKDVSPDPSLSTPGSAGSARQDEKECLKYQVPLPDSMKLESSHSRGSMTALGGASSSTHHPITTYPPYVPEYSSGLFPPSSLLGGSPTGFGCKSRPKARSSTGRECVNCGATSTPLWRRDGTGHYLCNACGLYHKMNGQNRPLIKPKRRLSAARRAGTSCANCQTTTTTLWRRNANGDPVCNACGLYYKLHNINRPLTMKKEGIQTRNRKMSSKSKKCKKVHDSLEDFPKNSSFNPAALSRHMSSLSHISPFSHSSHMLTTPTPMHPPSSLSFGPHHPSSMVTAMG

SEQ ID NO: 2060 - DNA, 3042 bp, Homo sapien
ggagccgcgtgccctccgccccggggtgcccattgcgcagagcgtggcctggagacccgcgagccggggaaggtcgccgtggagtcccgaccagaggccggggttggggtcggtgcagaccgagggctggtttccttgactgtgggagaaacgccgggagccggagtgacccgaggagggactccgcctccgagcggctgaggaccccggtgcagaggagcctggctcgcagaattgcagagtcgtcgcccctttttacaacctggtcccgttttattctgccatacccagtttttggatttttgtcttccccttcttctcttgctaaacgacccctccaagataatttttaaaaaaccttctcctttgctcacctttgcttcccagccttcccatccccccaccgaaagcaaatcattcaacgacccccgacctccgacggcaggagccccccgacctcccaggcggaccgccctccctccccgcgcgcgggttccgggcccggcgagagggcgcgagcacagccgaggccatggaggtgacggcggaccagccgcgctgggtgagccaccaccaccccgccgtgctcaacgggcagcacccggacacgcaccacccgggcctcagccactcctacatggacgcggcgcagtacccgctgccggaggaggtggatgtgctttttaacatcgacggtcaaggcaaccacgtcccgccctactacggaaactcggtcagggccacggtgcagaggtaccctccgacccaccacgggagccaggtgtgccgcccgcctctgcttcatggatccctaccctggctggacggcggcaaagccctgggcagccaccacaccgcctccccctggaatctcagccccttctccaagacgtccatccaccacggctccccggggcccctctccgtctaccccccggcctcgtcctcctccttgtcggggggccacgccagcccgcacctcttcaccttcccgcccaccccgccgaaggacgtctccccggacccatcgctgtccaccccaggctcggccggctcggcccggcaggacgagaaagagtgcctcaagtaccaggtgcccctgcccgacagcatgaagctggagtcgtcccactcccgtggcagcatgaccgccctgggtggagcctcctcgtcgacccaccaccccatcaccacctacccgccctacgtgcccgagtacagctccggactcttcccccccagcagcctgctgggcggctcccccaccggcttcggatgcaagtccaggcccaaggcccggtccagcacagaaggcagggagtgtgtgaactgtggggcaacctcgaccccactgtggcggcgagatggcacgggacactacctgtgcaacgcctgcgggctctatcacaaaatgaacggacagaaccggcccctcattaagcccaagcgaaggctgtctgcagccaggagagcagggacgtcctgtgcgaactgtcagaccaccacaaccacactctggaggaggaatgccaatggggaccctgtctgcaatgcctgtgggctctactacaagcttcacaatattaacagacccctgactatgaagaaggaaggcatccagaccagaaaccgaaaaatgtctagcaaatccaaaaagtgcaaaaaagtgcatgactcactggaggacttccccaagaacagctcgtttaacccggccgccctctccagacacatgtcctccctgagccacatctcgcccttcagccactccagccacatgctgaccacgcccacgccgatgcacccgccatccagcctgtcctttggaccacaccacccctccagcatggtcaccgccatgggttagagccctgctcgatgctcacagggcccccagcgagagtccctgcagtccctttcgacttgcatttttgcaggagcagtatcatgaagcctaaacgcgatggatatatgtttttgaaggcagaaagcaaaattatgtttgccactttgcaaaggagctcactgtggtgtctgtgttccaaccactgaatctggaccccatctgtgaataagccattctgactcatatcccctatttaacagggtctctagtgctgtgaaaaaaaaaaatgctgaacattgcatataacttatattgtaagaaatactgtacaatgactttattgcatctgggtagctgtaaggcatgaaggatgccaagaagtttaaggaatatgggagaaatagtgtggaaattaagaagaaactaggtctgatattcaaatggacaaactgccagttttgtttcctttcactggccacagttgtttgatgcattaaaagaaaataaaaaaaagaaaaaagagaaaagaaaaaaaaaggaaaaagttgtaggcgaatcatttgttcaaagctgttggcctctgcaaaggaaataccagttctgggcaatcagtgttaccgttcaccagttgccattgagggtttcagagagcctttttctaggcctacatgctttgtgaacaagtccctgtaattgttgtttgtatgtataattcaaagcaccaaaataagaaaagatgtagatttatttcatcatattatacagaccgaactgttgtataaatttatttactgctagtcttaagaactgctttctttcgtttgtttgtttcaatattttccttctctctcaatttttggttgaataaactagattacattcagttggcctaaggtggttgtgctcggagggtttcttgtttcttttccattttgtttttggatgatatttattaaatagcttctaagagtccggcggcatctgtcttgtccctattcctgcagcctgtgctgagggtagcagtgtatgagctaccagcgtgcatgtcagcgaccctggcccgacaggccacgtcctgcaatcggcccggctgcctcttcgccctgtcgtgttctgtgttagtgatcactgcctttaatacagtctgttggaataatattataagcataataataaagtgaaaatattttaaaact

SEQ ID NO: 2061 - protein, 621 aa, Homo sapien
SRVPSAPGCPLRRAWPGDPRAGEGRRGVPTRGRGWGRCRPRAGFLDCGRNAGSRSDPRRDSASERLRTPVQRSLARRIAESSPLFTTWSRFILPYPVFGFLSSPSSLAKRPLQDNFLKNLLLCSPLLPSLPIPPPKANHSTTPDLRRQEPPDLPGGPPSLPARGFRARREGASTAEAMEVTADQPRWVSHHHPAVLNGQHPDTHHPGLSHSYMDAAQYPLPEEVDVLFNIDGQGNHVPPYYGNSVRATVQRYPPTHHGSQVCRPPLLHGSLPWLDGGKALGSHHTASPWNLSPFSKTSIHHGSPGPLSVYPPASSSSLSGGHASPHLFTFPPTPPKDVSPDPSLSTPGSAGSARQDEKECLKYQVPLPDSMKLESSHSRGSMTALGGASSSTHHPITTYPPYVPEYSSGLFPPSSLLGGSPTGFGCKSRPKARSSTEGRECVNCGATSTPLWRRDGTGHYLCNACGLYHKMNGQNRPLIKPKRRLSAARRAGTSCANCQTTTTTLWRRNANGDPVCNACGLYYKLHNINRPLTMKKEGIQTRNRKMSSKSKKCKKVHDSLEDFPKNSSFNPAALSRHMSSLSHISPFSHSSHMLTTPTPMHPPSSLSFGPHHPSSMVTAMG

SEQ ID NO: 2062 - DNA, 2365 bp, Homo sapien; identical to SEQ ID NO: 2058

SEQ ID NO: 2063 - protein, 443 aa, Homo sapien; identical to SEQ ID NO: 2059

SEQ ID NO: 2064 - DNA, 3446 bp, Homo sapien
ttctagtttgcggttcaggtttgccgctgccggccagcgtcctctggccatggacaccccggaaaatgtccttcagatgcttgaagcccacatgcagagctacaagggcaatgaccctcttggtgaatgggaaagatacatacagtgggtagaagagaattttcctgagaataaagaatacttgataactttactagaacatttaatgaaggaatttttagataagaagaaataccacaatgacccaagattcatcagttattgtttaaaatttgctgagtacaacagtgacctccatcaattttttgagtttctgtacaaccatgggattggaaccctgtcatcccctctgtacattgcctgggcggggcatctggaagcccaaggagagctgcagcatgccagtgctgtccttcagagaggaattcaaaaccaggctgaacccagagagttcctgcaacaacaatacaggttatttcagacacgcctcactgaaacccatttgccagctcaagctagaacctcagaacctctgcataatgttcaggttttaaatcaaatgataacatcaaaatcaaatccaggaaataacatggcctgcatttctaagaatcagggttcagagctttctggagtgatatcttcagcttgtgataaagagtcaaatatggaacgaagagtgatcacgatttctaaatcagaatattctgtgcactcatctttggcatccaaagttgatgttgagcaggttgttatgtattgcaaggagaagcttattcgtggggaatcagaattttcctttgaagaattgagagcccagaaatacaatcaacggagaaagcatgagcaatgggtaaatgaagacagacattatatgaaaaggaaagaagcaaatgcttttgaagaacagctattaaaacagaaaatggatgaacttcataagaagttgcatcaggtggtggagacatcccatgaggatctgcccgcttcccaggaaaggtccgaggttaatccagcacgtatggggccaagtgtaggctcccagcaggaactgagagcgccatgtcttccagtaacctatcagcagacaccagtgaacatggaaaagaacccaagagaggcacctcctgttgttcctcctttggcaaatgctatttctgcagctttggtgtccccagccaccagccagagcattgctcctcctgttcctttgaaagcccagacagtaacagactccatgtttgcagtggccagcaaagatgctggatgtgtgaataagagtactcatgaattcaagccacagagtggagcagagatcaaagaagggtgtgaaacacataaggttgccaacacaagttcttttcacacaactccaaacacatcactgggaatggttcaggcaacgccatccaaagtgcagccatcacccaccgtgcacacaaaagaagcattaggtttcatcatgaatatgtttcaggctcctacacttcctgatatttctgatgacaaagatgaatggcaatctctagatcaaaatgaagatgcatttgaagcccagtttcaaaaaaatgtaaggtcatctggggcttggggagtcaataagatcatctcttctttgtcatctgcttttcatgtgtttgaagatggaaacaaagaaaattatggattaccacagcctaaaaataaacccacaggagccaggacctttggagaacgctctgtcagcagacttccttcaaaaccaaaggaggaagtgcctcatgctgaagagtttttggatgactcaactgtatggggtattcgctgcaacaaaaccctggcacccagtcctaagagcccaggagacttcacatctgctgcacaacttgcgtctacaccattccacaagcttccagtggagtcagtgcacattttagaagataaagaaaatgtggtagcaaaacagtgtacccaggcgactttggattcttgtgaggaaaacatggtggtgccttcaagggatggaaaattcagtccaattcaagagaaaagcccaaaacaggccttgtcgtctcacatgtattcagcatccttacttcgtctgagccagcctgctgcaggtggggtacttacctgtgaggcagagttgggcgttgaggcttgcagactcacagacactgacgctgccattgcagaagatccaccagatgctattgctgggctccaagcagaatggatgcagatgagttcacttgggactgttgatgctccaaacttcattgttgggaacccatgggatgataagctgattttcaaacttttatctgggctttctaaaccagtgagttcctatccaaatacttttgaatggcaatgtaaacttccagccatcaagcccaagactgaatttcaattgggttctaagctggtctatgtccatcaccttcttggagaaggagcctttgcccaggtgtacgaagctacccagggagatctgaatgatgctaaaaataaacagaaatttgttttaaaggtccaaaagcctgccaacccctgggaattctacattgggacccagttgatggaaagactaaagccatctatgcagcacatgtttatgaagttctattctgcccacttattccagaatggcagtgtattagtaggagagctctacagctatggaacattattaaatgccattaacctctataaaaatacccctgaaaaagtgatgcctcaaggtcttgtcatctcttttgctatgagaatgctttacatgattgagcaagtgcatgactgtgaaatcattcatggagacattaaaccagacaatttcatacttggaaacggatttttggaacaggatgatgaagatgatttatctgctggcttggcactgattgacctgggtcagagtatagatatgaaactttttccaaaaggaactatattcacagcaaagtgtgaaacatctggttttcagtgtgttgagatgctcagcaacaaaccatggaactaccagatcgattactttggggttgctgcaacagtatattgcatgctctttggcacttacatgaaagtgaaaaatgaaggaggagagtgtaagcctgaaggtctttttagaaggcttcctcatttggatatgtggaatgaattttttcatgttatgttgaatattccagattgtcatcatcttccatctttggatttgttaaggcaaaagctgaagaaagtatttcaacaacactatactaacaagattagggccctacgtaataggctaattgtactgctcttagaatgtaagcgttcacgaaaataaaatttggatatagacagtccttaaaaatcacactgtaaatatgaatctgctcactttaaacctgtttttttttcatttattgtttatgtaaatgtttgttaaaaataaatcccatggaatatttccatgtaaaaaaaaa

SEQ ID NO: 2065 - protein, 1085 aa, Homo sapien
MDTPENVLQMLEAHMQSYKGNDPLGEWERYIQWVEENFPENKEYLITLLEHLMKEFLDKKKYHNDPRFISYCLKFAEYNSDLHQFFEFLYNHGIGTLSSPLYIAWAGHLEAQGELQHASAVLQRGIQNQAEPREFLQQQYRLFQTRLTETHLPAQARTSEPLHNVQVLNQMITSKSNPGNNMACISKNQGSELSGVISSACDKESNMERRVITISKSEYSVHSSLASKVDVEQVVMYCKEKLIRGESEFSFEELRAQKYNQRRKHEQWVNEDRHYMKRKEANAFEEQLLKQKMDELHKKLHQVVETSHEDLPASQERSEVNPARMGPSVGSQQELRAPCLPVTYQQTPVNMEKNPREAPPVVPPLANAISAALVSPATSQSIAPPVPLKAQTVTDSMFAVASKDAGCVNKSTHEFKPQSGAEIKEGCETHKVANTSSFHTTPNTSLGMVQATPSKVQPSPTVHTKEALGFIMNMFQAPTLPDISDDKDEWQSLDQNEDAFEAQFQKNVRSSGAWGVNKIISSLSSAFHVFEDGNKENYGLPQPKNKPTGARTFGERSVSRLPSKPKEEVPHAEEFLDDSTVWGIRCNKTLAPSPKSPGDFTSAAQLASTPFHKLPVESVHILEDKENVVAKQCTQATLDSCEENMVVPSRDGKFSPIQEKSPKQALSSHMYSASLLRLSQPAAGGVLTCEAELGVEACRLTDTDAAIAEDPPDAIAGLQAEWMQMSSLGTVDAPNFIVGNPWDDKLIFKLLSGLSKPVSSYPNTFEWQCKLPAIKPKTEFQLGSKLVYVHHLLGEGAFAQVYEATQGDLNDAKNKQKFVLKVQKPANPWEFYIGTQLMERLKPSMQHMFMKFYSAHLFQNGSVLVGELYSYGTLLNAINLYKNTPEKVMPQGLVISFAMRMLYMIEQVHDCEIIHGDIKPDNFILGNGFLEQDDEDDLSAGLALIDLGQSIDMKLFPKGTIFTAKCETSGFQCVEMLSNKPWNYQIDYFGVAATVYCMLFGTYMKVKNEGGECKPEGLFRRLPHLDMWNEFFHVMLNIPDCHHLPSLDLLRQKLKKVFQQHYTNKIRALRNRLIVLLLECKRSRK

SEQ ID NO: 2066 - DNA, 2201 bp, Homo sapien
gggggtgggaagagctgaagcaggcgctcttggctcggcgcggcccgctgcaatccgtggaggaacgcgccgccgagccaccatcatgcctgggcacttacaggaaggcttcggctgcgtggtcaccaaccgattcgaccagttatttgacgacgaatcggaccccttcgaggtgctgaaggcagcagagaacaagaaaaaagaagccggcgggggcggcgttgggggccctggggccaagagcgcagctcaggccgcggcccagaccaactccaacgcggcaggcaaacagctgcgcaaggagtcccagaaagaccgcaagaacccgctgccccccagcgttggcgtggttgacaagaaagaggagacgcagccgcccgtggcgcttaagaaagaaggaataagacgagttggaagaagacctgatcaacaacttcagggtgaagggaaaataattgatagaagaccagaaaggcgaccacctcgtgaacgaagattcgaaaagccacttgaagaaaagggtgaaggaggcgaattttcagttgatagaccgattattgaccgacctattcgaggtcgtggtggtcttggaagaggtcgagggggccgtggacgtggaatgggccgaggagatggatttgattctcgtggcaaacgtgaatttgataggcatagtggaagtgatagatctggcctgaagcacgaggacaaacgtggaggtagcggatctcacaactggggaactgtcaaagacgaattaactgacttggatcaatcaaatgtgactgaggaaacacctgaaggtgaagaacatcatccagtggcagacactgaaaataaggagaatgaagttgaagaggtaaaagaggagggtccaaaagagatgactttggatgagtggaaggctattcaaaataaggaccgggcaaaagtagaatttaatatccgaaaaccaaatgaaggtgctgatgggcagtggaagaagggatttgttcttcataaatcaaagagtgaagaggctcatgctgaagattcggttatggaccatcatttccggaagccagcaaatgatataacgtctcagctggagatcaattttggagaccttggccgcccaggacgtggcggcaggggaggacgaggtggacgtgggcgtggtgggcgcccaaaccgtggcagcaggaccgacaagtcaagtgcttctgctcctgatgtggatgacccagaggcattcccagctctggcttaactggatgccataagacaaccctggttcctttgtgaacccttctgttcaaagcttttgcatgcttaaggattccaaacgactaagaaattaaaaaaaaaaagactgtcattcataccattcacacctaaagactgaattttatctgttttaaaaatgaacttctcccgctacacagaagtaacaaatatggtagtcagttttgtatttagaaatgtattggtagcagggatgttttcataattttcagagattatgcattcttcatgaatacttttgtattgctgcttgcaaatatgcatttccaaacttgaaatataggtgtgaacagtgtgtaccagtttaaagctttcacttcatttgtgttttttaattaaggacttagaagttcccccaattacaaactggttttaaatattggacatactggttttaatacctgctttgcatattcacacatggtcaactgggacatgttaaactttgatttgtcaaattttatgctgtgtggaatactaactatatgtattttaacttagttttaatattttcattttgggggaaaaatcttttttcacttctcatgatagctgttatatatatatgctaaatctttatatacagaaatatcagtacttgaacaaattcaaagcacatttggtttattaacccttgctccttgcatggctcattaggttcaaattataactaatttacattttcagctatatttactttttaaatgcttgagtttcccattttaaaatctaaactagacatcttaattggtgaaagttgtttaaactacttattgttggtaggcacatcgtgtcaagtgaagtagttttataggtatgggttttttctcccccttcaccagggtgggtggaataagttgatttggccaatgtgtaatatttaaactgttctgtaaaataaaaaaaaaaaaaaaaaa

SEQ ID NO: 2067 - protein, 387 aa, Homo sapien
MPGHLQEGFGCVVTNRFDQLFDDESDPFEVLKAAENKKKEAGGGGVGGPGAKSAAQAAAQTNSNAAGKQLRKESQKDRKNPLPPSVGVVDKKEETQPPVALKKEGIRRVGRRPDQQLQGEGKIIDRRPERRPPRERRFEKPLEEKGEGGEFSVDRPIIDRPIRGRGGLGRGRGGRGRGMGRGDGFDSRGKREFDRHSGSDRSGLKHEDKRGGSGSHNWGTVKDELTDLDQSNVTEETPEGEEHHPVADTENKENEVEEVKEEGPKEMTLDEWKAIQNKDRAKVEFNIRKPNEGADGQWKKGFVLHKSKSEEAHAEDSVMDHHFRKPANDITSQLEINFGDLGRPGRGGRGGRGGRGRGGRPNRGSRTDKSSASAPDVDDPEAFPALA

SEQ ID NO: 2068 - DNA, 3668 bp, Homo sapien
ggcagagggtgggccttaggacgggtctcccttaaactgggcgatcaggcagcgaccctagaggcgtctgtagggtaaagctgggggttctgtagccggaggcggcggcgagtccagaacgtcctggccttacagggagaaggcgtcactcgcggttacaagtgcctgaccctcactccagttggcggaggaggagaaggaaggggccgggccgggtcccctcccctcgcgccccggatggatgtgcccggcccggtgtctcggcgggcggcggcggcggcggccactgtgctcctgcggaccgctcgggtccgtcgcgaatgctggttcttgccgaccgcgctgctctgcgcctacggcttcttcgccagcctcaggccgtccgagcccttcctgaccccgtacctgctggggccggacaagaacctgaccgagagggaggtcttcaatgaaatttatccagtatggacttactcttacctggtgctactgtttcctgtgttccttgccacagactacctccgttataaacctgttgttctactgcaggggctcagccttattgttacatggtttatgctgctctatgcccagggactgctggccattcaatttctagaatttttttatggcatcgccacagccactgaaattgcctattactcttatatctacagtgtggtggacctgggcatgtaccagaaagtcacaagttactgtcgaagtgccactttggtgggctttacagtgggctctgtcctagggcaaatccttgtctcagtggcaggctggtcgctgttcagcctgaatgtcatctctcttacctgtgtttcagtggcttttgctgtggcctggtttttacctatgccacagaagagcctcttctttcaccacattccttctacctgccagagagtgaatggcatcaaggtacaaaatggtggcattgttactgacaccccagcttctaaccaccttcctggctgggaggacattgagtcaaaaatccctctaaatatggaggagcctcccgtggaggaaccggaacccaagccagaccgtctccttgtattgaaagtactatggaatgatttcctgatgtgctactcctctcgccctcttctctgctggtctgtgtggtgggccctctctacctgtggctattttcaagttgtgaactacacacagggcctgtgggagaaagtgatgccttctcgctatgctgctatctataatggtggcgtggaggccgtttcaaccttactgggtgctgttgctgtgtttgcagttggttatataaaaatatcctggtcaacttggggagaaatgacattatctctcttttctctcctgattgctgctgcagtgtatatcatggacactgtgggtaacatttgggtgtgctatgcatcctatgttgtcttcagaatcatctacatgttactcatcacgatagcaacttttcaaattgctgcaaacctcagcatggaacgctatgccctagtatttggtgtaaataccttcattgccctggcactgcagacgctgctcactctaattgtggtagatgccagtggccttggattagaaattaccactcagtttttgatctatgccagttattttgcactcatcgctgtggttttcctggccagtggtgcagtcagtgttatgaagaaatgtagaaagctggaagatccacaatcaagttctcaagtaaccacttcataatatactgctgaagggcttcttcttatagcaagaactctgcacagcaactgcctggatgtatttgattttttaaagcgtagacatatatttatgaatgtgcatttcttgacttcacagcagccacttgactaataccttgtgttccgggaataacatgatactattcagaggagccagaagtaaagtttatttcatggattatttatgagagctaatttaaggatgactttttttctgattcaaaagtgaacttgattttaaaaaccagtcaagagcaatcaaagcagcacatggtgttgtatacttcattagcaagtgagtttggtgttttataggtcacatatgtctgtatctacttagccagatgcttggcctggtgggaccagggctccacagaggccacaaaatgttgcaagtcatgatggatggaaatatgttctaacagcatctgcctctattcaatttaattcttatttctgtgttactcatgtacattggtctttctacatagttattctatcactggcaatatttgttctggtttagtgttctgtattttaaggtgtacgtatcatttctaattttaagttattttaaaaaaattcatcatatgaatgttcttggttcccattgtgacgattatttatttctgtaaaatttgtttagaagtacgtttttgcattattcatatgcttcccagagaagctcatttagttagaaaataaggcaagttttgaagcctgctaaatgaagagacttaagaaagcttaaggtacgcttgcttgtctttaaatcttcaatatgaaggactattaattccaagattaaaagttcatatataggctaaagatgtaactaggccatttgtatttgtattcccttttatttccaaaataaaatgaaaaatctttttttaataatttcatccctatttatagtttttatattaatttgtttttcttatccaagtaaagatgtcaataggaattgcattagtccaaggcctttttcataaactgagcctcttttcaattatttcaatgggacaggaactaggatagatgtgattcctgcatttttttaccttaaatctgcctttgtttctaaaggtagatcatcttgaatatttgcttaaaattgctagtgatttcattaccaagttacttgaaaaaatgttctatatgcatttaattctgaaatcagtctaccaaggggctgctagtatatgtcagacatgaaaactattttaaagctgactttgttgccttatcttgaaaagaatctagataggtgcttttaactggggtattaacttttttagaatgacacagctgaacagtgttaataatagtgtgtcaagattgcaaagtcgacatactcatttggtttaagcaggaatcctagaagcaaatggatggggataagaataggtcattttctattcaccatcctttactattaagggaaaggaaaagaacactagctaaggaagggaaagggaagtgatatcataaaagtagcaaccttcattttacattctgtctgtttttctttttttgctttgttttgtttgtgctaatttgggaattgtgtactccgaaacaagtagaaaagtgctgtttgagggattttattaaatctttttttaatggaatgtggtacaaattgttcatgttaccaaagcaatatttccctggaatttaattcaaagtttgtggcatacaacctgagccttttcttatataagacaagaatatgttcacatcttggtatgtggccatatttatagaatgctgaactcaatgtgcaagttgtactgtatgcagttttgtaaataagtgaaaataatttgttgtactttttattcaattctgtatagattataaaattatttttattaaataaatattttacagtataaaaaaaaaaaaaaaaaa

SEQ ID NO: 2069 - protein, 497 aa, Homo sapien
MDVPGPVSRRAAAAAATVLLRTARVRRECWFLPTALLCAYGFFASLRPSEPFLTPYLLGPDKNLTEREVFNEIYPVWTYSYLVLLFPVFLATDYLRYKPVVLLQGLSLIVTWFMLLYAQGLLAIQFLEFFYGIATATEIAYYSYIYSVVDLGMYQKVTSYCRSATLVGFTVGSVLGQILVSVAGWSLFSLNVISLTCVSVAFAVAWFLPMPQKSLFFHHIPSTCQRVNGIKVQNGGIVTDTPASNHLPGWEDIESKIPLNMEEPPVEEPEPKPDRLLVLKVLWNDFLMCYSSRPLLCWSVWWALSTCGYFQVVNYTQGLWEKVMPSRYAAIYNGGVEAVSTLLGAVAVFAVGYIKISWSTWGEMTLSLFSLLIAAAVYIMDTVGNIWVCYASYVVFRIIYMLLITIATFQIAANLSMERYALVFGVNTFIALALQTLLTLIVVDASGLGLEITTQFLIYASYFALIAVVFLASGAVSVMKKCRKLEDPQSSSQVTTS

SEQ ID NO: 2070 - DNA, 3928 bp, Homo sapien
agcggagtgctgctgcggcgtcccgcggcctccccgagtcgggcgggaggggagagcgggtgtggatttgtcttgacggtaattgttgcgtttccacgtctcggaggcctgcgcgctgggttgctccttcttcgggagcgagctgttctcagcgatcccactcccagccggggctccccacacacactgggctgcgtgcgtgtggagtgggacccgcgcacacgcgtgtctctggacagctacggcgccgaaagaactaaaattccagatggcaaactcaatgaatggcagaaaccctggtggtcgaggaggaaatccccgaaaaggtcgaattttgggtattattgatgctattcaggatgcagttggaccccctaagcaagctgccgcagatcgcaggaccgtggagaagacttggaagctcatggacaaagtggtaagactgtgccaaaatcccaaacttcagttgaaaaatagcccaccatatatacttgatattttgcctgatacatatcagcatttacgacttatattgagtaaatatgatgacaaccagaaacttgcccaactcagtgagaatgagtactttaaaatctacattgatagccttatgaaaaagtcaaaacgggcaataagactctttaaagaaggcaaggagagaatgtatgaagaacagtcacaggacagacgaaatctcacaaaactgtcccttatcttcagtcacatgctggcagaaatcaaagcaatctttcccaatggtcaattccagggagataactttcgtatcacaaaagcagatgctgctgaattctggagaaagttttttggagacaaaactatcgtaccatggaaagtattcagacagtgccttcatgaggtccaccagattagctctggcctggaagcaatggctctaaaatcaacaattgatttaacttgcaatgattacatttcagtttttgaatttgatatttttaccaggctgtttcagccttggggctctattttgcggaattggaatttcttagctgtgacacatccaggttacatggcatttctcacatatgatgaagttaaagcacgactacagaaatatagcaccaaacccggaagctatattttccggttaagttgcactcgattgggacagtgggccattggctatgtgactggggatgggaatatcttacagaccatacctcataacaagcccttatttcaagccctgattgatggcagcagggaaggattttatctttatcctgatgggaggagttataatcctgatttaactggattatgtgaacctacacctcatgaccatataaaagttacacaggaacaatatgaattatattgtgaaatgggctccacttttcagctctgtaagatttgtgcagagaatgacaaagatgtcaagattgagccttgtgggcatttgatgtgcacctcttgccttacggcatggcaggagtcggatggtcagggctgccctttctgtcgttgtgaaataaaaggaactgagcccataatcgtggatccctttgatccaagagatgaaggctccaggtgttgcagcatcattgacccctttggcatgccgatgctcgacttggacgacgatgatgatcgtgaggagtccttgatgatgaatcggttggcaaacgtccgaaagtgcactgacaggcagaactcaccagtcacatcaccaggatcctctccccttgcccagagaagaaagccacagcctgacccactccagatcccacatctaagcctgccacccgtgcctcctcgcctggatctaattcagaaaggcatagttagatctccctgtggcagcccaacgggttcaccaaagtcttctccttgcatggtgagaaaacaagataaaccactcccagcaccacctcctcccttaagagatcctcctccaccgccacctgaaagacctccaccaatcccaccagacaatagactgagtagacacatccatcatgtggaaagcgtgccttccaaagacccgccaatgcctcttgaagcatggtgccctcgggatgtgtttgggactaatcagcttgtgggatgtcgactcctaggggagggctctccaaaacctggaatcacagcgagttcaaatgtcaatggaaggcacagtagagtgggctctgacccagtgcttatgcggaaacacagacgccatgatttgcctttagaaggagctaaggtcttttccaatggtcaccttggaagtgaagaatatgatgttcctccccggctttctcctcctcctccagttaccaccctcctccctagcataaagtgtactggtccgttagcaaattctctttcagagaaaacaagagacccagtagaggaagatgatgatgaatacaagattccttcatcccaccctgtttccctgaattcacaaccatctcattgtcataatgtaaaacctcctgttcggtcttgtgataatggtcactgtatgctgaatggaacacatggtccatcttcagagaagaaatcaaacatccctgacttaagcatatatttaaagggagatgtttttgattcagcctctgatcccgtgccattaccacctgccaggcctccaactcgggacaatccaaagcatggttcttcactcaacaggacgccctctgattatgatcttctcatccctccattaggtgaagatgcttttgatgccctccctccatctctcccacctcccccacctcctgcaaggcatagtctcattgaacattcaaaacctcctggctccagtagccggccatcctcaggacaggatctttttcttcttccttcagatccctttgttgatctagcaagtggccaagttcctttgcctcccgctagaaggttaccaggtgaaaatgtcaaaactaacagaacatcacaggactatgatcagcttccttcatgttcagatggttcacaggcaccagccagaccccctaaaccacgaccgcgcaggactgcaccagaaattcaccacagaaaaccccatgggcctgaggcggcattggaaaatgtcgatgcaaaaattgcaaaactcatgggagagggttatgcctttgaagaggtgaagagagccttagagatagcccagaataatgtcgaagttgcccggagcatcctccgagaatttgccttccctcctccagtatccccacgtctaaatctatagcagccagaactgtagacaccaaaatggaaagcaatcgatgtattccaagagtgtggaaataaagagaactgagatggaattcaagagagaagtgtctcctcctcgtgtagcagcttgagaagaggcttgggagtgcagcttctcaaaggagaccgatgcttgctcaggatgtcgacagctgtggcttccttgtttttgctagccatatttttaaatcagggttgaactgacaaaaataatttaaagacgtttacttcccttgaactttgaacctgtgaaatgctttaccttgtttacaatttggcaaagttgcagtttgttcttgtttttagtttagttttgttttggtgttttgatacctgtactgtgttcttcacagaccctttgtagcgtggtcaggtctgctgtaacatttcccaccaactctcttgctgtccacatcaacagctaaatcatttattcatatggatctctaccatccccatgccttgcccaggtccagttccatttctctcattcacaagatgctttgaaggttctgattttcaactgatcaaactaatgcaaaaaaaaaagtatgtattcttcactactgagtttcttctttggaaaccatcactattgagagatgggaaaaacctgaatgtataaagcatttatttgtcaataaactgccttttgtaaggggttttcacaaaaaaaaaaaaaaaa

SEQ ID NO: 2071 - protein, 982 aa, Homo sapien
MANSMNGRNPGGRGGNPRKGRILGIIDAIQDAVGPPKQAAADRRTVEKTWKLMDKVVRLCQNPKLQLKNSPPYILDILPDTYQHLRLILSKYDDNQKLAQLSENEYFKIYIDSLMKKSKRAIRLFKEGKERMYEEQSQDRRNLTKLSLIFSHMLAEIKAIFPNGQFQGDNFRITKADAAEFWRKFFGDKTIVPWKVFRQCLHEVHQISSGLEAMALKSTIDLTCNDYISVFEFDIFTRLFQPWGSILRNWNFLAVTHPGYMAFLTYDEVKARLQKYSTKPGSYIFRLSCTRLGQWAIGYVTGDGNILQTIPHNKPLFQALIDGSREGFYLYPDGRSYNPDLTGLCEPTPHDHIKVTQEQYELYCEMGSTFQLCKICAENDKDVKIEPCGHLMCTSCLTAWQESDGQGCPFCRCEIKGTEPIIVDPFDPRDEGSRCCSIIDPFGMPMLDLDDDDDREESLMMNRLANVRKCTDRQNSPVTSPGSSPLAQRRKPQPDPLQIPHLSLPPVPPRLDLIQKGIVRSPCGSPTGSPKSSPCMVRKQDKPLPAPPPPLRDPPPPPPERPPPIPPDNRLSRHIHHVESVPSKDPPMPLEAWCPRDVFGTNQLVGCRLLGEGSPKPGITASSNVNGRHSRVGSDPVLMRKHRRHDLPLEGAKVFSNGHLGSEEYDVPPRLSPPPPVTTLLPSIKCTGPLANSLSEKTRDPVEEDDDEYKIPSSHPVSLNSQPSHCHNVKPPVRSCDNGHCMLNGTHGPSSEKKSNIPDLSIYLKGDVFDSASDPVPLPPARPPTRDNPKHGSSLNRTPSDYDLLIPPLGEDAFDALPPSLPPPPPPARHSLIEHSKPPGSSSRPSSGQDLFLLPSDPFVDLASGQVPLPPARRLPGENVKTNRTSQDYDQLPSCSDGSQAPARPPKPRPRRTAPEIHHRKPHGPEAALENVDAKIAKLMGEGYAFEEVKRALEIAQNNVEVARSILREFAFPPPVSPRLNL

SEQ ID NO: 2072 - DNA, 836 bp, Homo sapien
ccggtgagtcgccggcgctgcagagggaggcggcactggtctcgacgtggggcggccagcgatgaagccgcccagttcaatacaaacaagtgagtttgactcatcagatgaagagcctattgaagatgaacagactccaattcatatatcatggctatctttgtcacgagtgaattgttctcagtttctcggtttatgtgctcttccaggttgtaaatttaaagatgttagaagaaatgtccaaaaagatacagaagaactaaagagctgtggtatacaagacatatttgttttctgcaccagaggggaactgtcaaaatatagagtcccaaaccttctggatctctaccagcaatgtggaattatcacccatcatcatccaatcgcagatggagggactcctgacatagccagctgctgtgaaataatggaagagcttacaacctgccttaaaaattaccgaaaaaccttaatacactgctatggaggacttgggagatcttgtcttgtagctgcttgtctcctactatacctgtctgacacaatatcaccagagcaagccatagacagcctgcgagacctaagaggatccggggcaatacagaccatcaagcaatacaattatcttcatgagtttcgggacaaattagctgcacatctatcatcaagagattcacaatcaagatctgtatcaagataaaggaattcaaatagcatatatatgaccatgtctgaaatgtcagttctctagcataatttgtattgaaatgaaaccaccagtgttatcaacttgaatgtaaatgtacatgtgcagatattcctaaagttttattgac

SEQ ID NO: 2073 - protein, 212 aa, Homo sapien
MKPPSSIQTSEFDSSDEEPIEDEQTPIHISWLSLSRVNCSQFLGLCALPGCKFKDVRRNVQKDTEELKSCGIQDIFVFCTRGELSKYRVPNLLDLYQQCGIITHHHPIADGGTPDIASCCEIMEELTTCLKNYRKTLIHCYGGLGRSCLVAACLLLYLSDTISPEQAIDSLRDLRGSGAIQTIKQYNYLHEFRDKLAAHLSSRDSQSRSVSR

SEQ ID NO: 2074 - DNA, 3939 bp, Homo sapien
cctgggtcctctcggcgccagagccgctctccgcatcccaggacagcggtgcggccctcggccggggcgcccactccgcagcagccagcgagccagctgccccgtatgaccgcgccgggcgccgccgggcgctgccctcccacgacatggctgggctccctgctgttgttggtctgtctcctggcgagcaggagtatcaccgaggaggtgtcggagtactgtagccacatgattgggagtggacacctgcagtctctgcagcggctgattgacagtcagatggagacctcgtgccaaattacatttgagtttgtagaccaggaacagttgaaagatccagtgtgctaccttaagaaggcatttctcctggtacaagacataatggaggacaccatgcgcttcagagataacaccgccaatcccatcgccattgtgcagctgcaggaactctctttgaggctgaagagctgcttcaccaaggattatgaagagcatgacaaggcctgcgtccgaactttctatgagacacctctccagttgctggagaaggtcaagaatgtctttaatgaaacaaagaatctccttgacaaggactggaatattttcagcaagaactgcaacaacagctttgctgaatgctccagccaagatgtggtgaccaagcctgattgcaactgcctgtaccccaaagccatccctagcagtgacccggcctctgtctcccctcatcagcccctcgccccctccatggcccctgtggctggcttgacctgggaggactctgagggaactgagggcagctccctcttgcctggtgagcagcccctgcacacagtggatccaggcagtgccaagcagcggccacccaggagcacctgccagagctttgagccgccagagaccccagttgtcaaggacagcaccatcggtggctcaccacagcctcgcccctctgtcggggccttcaaccccgggatggaggatattcttgactctgcaatgggcactaattgggtcccagaagaagcctctggagaggccagtgagattcccgtaccccaagggacagagctttccccctccaggccaggagggggcagcatgcagacagagcccgccagacccagcaacttcctctcagcatcttctccactccctgcatcagcaaagggccaacagccggcagatgtaactgctacagccttgcccagggtgggccccgtgatgcccactggccaggactggaatcacaccccccagaagacagaccatccatctgccctgctcagagaccccccggagccaggctctcccaggatctcatcactgcgcccccaggccctcagcaacccctccaccctctctgctcagccacagctttccagaagccactcctcgggcagcgtgctgccccttggggagctggagggcaggaggagcaccagggatcggacgagccccgcagagccagaagcagcaccagcaagtgaaggggcagccaggcccctgccccgttttaactccgttcctttgactgacacaggccatgagaggcagtccgagggatcctccagcccgcagctccaggagtctgtcttccacctgctggtgcccagtgtcatcctggtcttgctggctgtcggaggcctcttgttctacaggtggaggcggcggagccatcaagagcctcagagagcggattctcccttggagcaaccagagggcagccccctgactcaggatgacagacaggtggaactgccagtgtagagggaattctaagctggacgcacagaacagtctcttcgtgggaggagacattatggggcgtccaccaccacccctccctggccatcctcctggaatgtggtctgccctccaccagagctcctgcctgccaggactggaccagagcagccaggctggggcccctctgtctcaacccgcagacccttgactgaatgagagaggccagaggatgctccccatgctgccactatttattgtgagccctggaggctcccatgtgcttgaggaaggctggtgagcccggctcaggaccctcttccctcaggggctgcagcctcctctcactcccttccatgccggaacccaggccagggacccaccggcctgtggtttgtgggaaagcagggtgcacgctgaggagtgaaacaaccctgcacccagagggcctgcctggtgccaaggtatcccagcctggacaggcatggacctgtctccagacagaggagcctgaagttcgtggggcgggacagcctcggcctgatttcccgtaaaggtgtgcagcctgagagacgggaagaggaggcctctgcacctgctggtctgcactgacagcctgaagggtctacaccctcggctcacctaagtccctgtgctggttgccaggcccagaggggaggccagccctgccctcaggacctgcctgacctgccagtgatgccaagagggggatcaagcactggcctctgcccctcctccttccagcacctgccagagcttctccagcaggccaagcagaggctcccctcatgaaggaagccattgcactgtgaacactgtacctgcctgctgaacagcctccccccgtccatccatgagccagcatccgtccgtcctccactctccagcctctccccagcctcctgcactgagctggcctcaccagtcgactgagggagcccctcagccctgaccttctcctgacctggcctttgactccccggagtggagtggggtgggagaacctcctgggccgccagccagagccgctctttaggctgtgttcttcgcccaggtttctgcatcttccactttgacattcccaagagggaagggactagtgggagagagcaagggaggggagggcacagacagagagcctacagggcgagctctgactgaagatgggcctttgaaatataggtatgcacctgaggttgggggagggtctgcactcccaaaccccagcgcagtgtcctttccctgctgccgacaggaacctggggctgagcaggttatccctgtcaggagccctggactgggctgcatctcagccccacctgcatggtatccagctcccatccacttctcacccttctttcctcctgaccttggtcagcagtgatgacctccaactctcacccaccccctctaccatcacctctaaccaggcaagccagggtgggagagcaatcaggagagccaggcctcagcttccaatgcctggagggcctccactttgtggccagcctgtggtgctggctctgaggcctaggcaacgagcgacagggctgccagttgcccctgggttcctttgtgctgctgtgtgcctcctctcctgccgccctttgtcctccgctaagagaccctgccctacctggccgctgggccccgtgactttcccttcctgcccaggaaagtgagggtcggctggccccaccttccctgtcctgatgccgacagcttagggaagggcactgaacttgcatatggggcttagccttctagtcacagcctctatatttgatgctagaaaacacatatttttaaatggaagaaaaataaaaaggcattcccccttcatccccctaccttaaacatataatattttaaaggtcaaaaaagcaatccaacccactgcagaagctctttttgagcacttggtggcatcagagcaggaggagccccagagccacctctggtgtcccccaggctacctgctcaggaaccccttctgttctctgagaactcaacagaggacattggctcacgcactgtgagattttgtttttatacttgcaactggtgaattattttttataaagtcatttaaatatctatttaaaagataggaagctgcttatatatttaataataaaagaagtgcacaagctgccgttgacgtagctcgag

SEQ ID NO: 2075 - protein, 554 aa, Homo sapien
MTAPGAAGRCPPTTWLGSLLLLVCLLASRSITEEVSEYCSHMIGSGHLQSLQRLIDSQMETSCQITFEFVDQEQLKDPVCYLKKAFLLVQDIMEDTMRFRDNTANPIAIVQLQELSLRLKSCFTKDYEEHDKACVRTFYETPLQLLEKVKNVFNETKNLLDKDWNIFSKNCNNSFAECSSQDVVTKPDCNCLYPKAIPSSDPASVSPHQPLAPSMAPVAGLTWEDSEGTEGSSLLPGEQPLHTVDPGSAKQRPPRSTCQSFEPPETPVVKDSTIGGSPQPRPSVGAFNPGMEDILDSAMGTNWVPEEASGEASEIPVPQGTELSPSRPGGGSMQTEPARPSNFLSASSPLPASAKGQQPADVTATALPRVGPVMPTGQDWNHTPQKTDHPSALLRDPPEPGSPRISSLRPQALSNPSTLSAQPQLSRSHSSGSVLPLGELEGRRSTRDRTSPAEPEAAPASEGAARPLPRFNSVPLTDTGHERQSEGSSSPQLQESVFHLLVPSVILVLLAVGGLLFYRWRRRSHQEPQRADSPLEQPEGSPLTQDDRQVELPV

SEQ ID NO: 2076 - DNA, 7383 bp, Homo sapien
ttctgcttatcatggttaccaacaaaatgactgctgcctttagaaaccctagtgggaaacaggtggcgacagacaaagttgcagaaaagctgagctctactctctcatgggtgaagaacacagtatcgcatacagtcagtcagatggccagtcaggtggcaagtccatctacttcattacataccacatcctcatctaccacactatcaacaccagccctttcaccatcttccccatcacagttgagtccagacgtcttagaactcctggctaaactggaagaacagaatatattgttagaaacggatagtaagtctttaagatctgtaaatgggtcaagaagaaacagtggctcttctcttgtgtcgagttcatcagcctctagcaacctcagtcaccttgaagaagattcttggattctttggggaagaattgttaatgaatgggaagatgtacgcaaaaagaaggaaaagcaagttaaggaacttgttcataaagggataccccatcactttagagcaatagtttggcaacttttatgcagtgcacaaagtatgccaattaaggatcagtattcagaactcctgaaaatgacctcgccttgtgaaaaattgatccgaagggacattgctagaacttaccctgaacacaacttttttaaggaaaaagatagccttggacaggaggttttatttaatgtaatgaaggcttactctttagtagatcgtgaggttggttactgtcaaggaagtgcttttatagttggattgttgcttatgcagatgccagaagaagaagctttctgtgtatttgttaaattaatgcaagattatagacttcgtgaactttttaaaccaagtatggcagaattgggcctttgtatgtaccagtttgaatgtatgatacaggagcatcttccagagctctttgtacattttcaatctcagagttttcatacctcaatgtatgcatcatcctggtttctgactatctttcttacaacttttccactaccagttgcaacaaggatatttgatatctttatgtctgagggtttagaaatagtgtttcgtgtaggattagcacttcttcagatgaatcaggcagaactgatgcaacttgacatggaagggatgttacagcactttcaaaaggtcattccacatcagtttgatggtgtcccagacaagctaatccaagcagcttaccaagtccaatacaattcaaaaaaaatgaaaaagcttgaaaaggaatacactacaataaaaacgaaagaaatggaagagcaagttgaaattaaaaggttacgcacagaaaatagacttttaaaacagcgcatcgagacattagaaaaacataaatgcagttccaactacaacgaagattttgtgctacagctagagaaggaattggtccaagcccgactgagtgaagctgagtctcagtgtgcattaaaagagatgcaggataaagtcttggatatagagaagaggaataactcccttcctgatgagaataatattgcaaggcttcaggaagaactcattgctgtgaaacttagagaagcagaagccattatgggtttgaaagaacttagacagcaagtcaaggatttagaggaacactggcagcgccacttagctcgtactactgggagatggaaagacccacccaagaaaaatgctatgaatgagttacaggatgaactgatgaccattcgacttagagaagctgaaacacaagcagaaataagagaaataaaacaaaggatgatggaaatggaaacacagaaccagatcaatagtaaccatcttcgaagagcagaacaagaggtgattagcctacaggagaaagtgcagtatctttctgcacagaacaaaggactccttactcaattaagtgaagcaaagcgtaaacaagcagagattgaatgcaagaataaggaagaagtgatggctgtgaggcttcgggaagcagatagcatagctgctgtggctgaactacgacaacacattgctgagcttgaaatccagaaagaagaaggaaagcttcaaggacagcttaacaagtctgattctaaccagtatattggggaactgaaagatcagatagcagagctgaatcatgagctcaggtgcctaaaaggccagaagggcttctcaggccaacctccttttgatggaatccacattgtcaaccatttaataggagatgatgaatcattccattcctccgatgaagattttatagataattccttacaggaaactggtgttggttttcctttgcacggaaaatctggctcgatgtctttggaccccgcagtggcagatggtagtgagagcgaaacagaagacagtgtgctggagaccagagagagcaaccaagtggttcaaaaggagcggcccccgagaagaagagagtcgtattcaaccactgtctgaccatcactgtgacctagactatggatttatttaagggatcagttatcatatgattagggctttttggaaataatttgttttcatatgtatatatatatatatatatatatattttacagtcttatctgcctttttatctttgccaaatctttaccactgatttaccattgccataaagtagactggtatatggttaatgtgtaaaacaaggttctaacagtattactgaatattaatgtttcttgtttagaaaatgcaactatatctatatgtgggaaccatttctgaagttcaaaactatggaaaattgaattttcttcaaacaaaactgctcttgtgcaatattttatgctcagtgagcaaattgtgtatttatgtttatcaatttgttccccaggtggctgtctacaaacatttgaccaaaacatacatttgaattaccttgggtttttttttattggtgttttttttttaagacagagattcagtttgtcacccaggctggagtgctgtggtgtgattttagttcactgcaacttccgcttcccaggttcaagcaattttcctgcttcagcttcccgagtacctgggactatatgtgcgcaccaccacgcctggctaattttttgtatttttagtagagatggggtttcaccatgttggctgggctggtctcgaactcctaacctcaagtgatccacccgcctcagcctcccaaagtgctgggattacaggtgtgagccactgcacccagcctaccttgtctgtttgtgtctgggaggttttttttttctatttttattttttcatgaaaattattggtgggccactgaaagtccccacacacaaagcctttattctatataattttataaacacaaattcatgattatctgttttgagagttttaagttttgttttaatgtttaacttttatgtgcatatgatgctttccatgtgttggttactagagtagtaggttaactacagacatactgttttgtttgtacatatttataaatctgtaccacctaacattgaacatcattttatatgaagaacatacatgttgcaaaatgactgctttcagcatctaacaggacttctgtaaataataggttaaaagttaaaaataaaacactaatgttttaagagctttagtattttgcttagcattcaatactagcagattcataactgatgcctgttcaaaaacactgttggtggaatcttttatttcatgtgtatgtaactactaaatttttcatgactgaagaggttatagcacatattagttagtgctaatattctactgaatataatttaagcaatgggctaaggtccaagaaacatagcaattatatctacaaataatctattaacatgatcttcagaatctctagtttttgttctatagataaagccataagaatcctttcctaccagtttttcctatatcatttagatattatttcctagaaaacaggatgcctgtcactgataagttagagaaaacacccaaattatacttgcactatggaaagacgacatggatttgttgtctgggtactttctactctcatttttgttagcctatgaaaaaaaaaaacattttgttaacctatggaaaaagccttggaagagaaaagtagaattcagtatgtatggaggcacagttttgcacagtatgttgcatgcggcaaaaaaaaaaatatgaaatagagtagaagagataaaagtagttttctgtcaaaaactaggagttaagccttcaggtacgttgtggactaggctttccagcaaggtttttgtagctatttgcttgcctgagaaatgaaattgaaaacatacccctgcgtgtctgtccttaacaccaggctaaattctggtggttaaataacttacctgtggttacaagctagtaagtagcagagccaagattttttttaatatagagacaggtgtctcactgtgttgtccaggctggtcttgaactcctggcctcaagtggtcctcctgcctcagcctcccaaagtgtggggattacaggtgcgagctactgctcccagcaagagccaagattttaacctagatctccctaacaccaaagcttttgaaagggtttcagctgaagaatttcttcaattcttctgttttgtttttatttttgttttttgagatgaagtctcactgcactcaggctggagtgcagtggtacgatcttggctcactgcaacttccacttcccgggttcaagcgattctcctgcctcagctcccaagtagctgggactacaggtgcacgccaccacaactggctaatttttgtatttttagtagagatggggtttcgctatgttggccaggctgatctcaaacttctgacctcaggtgatccacccactttgacctcccaaagtgctgggattactagacgtaagccaccacacctggcaattccctgcttttttgacaacataatttaaatgaatttgatttaaatgtttcctgaatatatatacagatagatagatgagtatcaacacttacaagctctacacagtctgtgagtgtagatactacttacttgtaggattgtcttgtgctttggggatttttgttcggagttctatactatcagcccagaaagctatcaatgtccaagtgaagtgagatgatgcatgccacattattgctttgaccttcacatcaagaaatctgaatgatctggaccagggtcagcaaagtgcagcctacaagttattgcagtcagctgccagtttttacttttttaaatagttgggaaaaaaattccaaagactgatattttgtgtcacatgaaaattatatgaaattcaaattgcagtgtccataagtaaagttttattggggcacacccatgctcacccttttaaatattgtgtatggccgctttgtgctacagtagcagagttgagtcattgcaagggagaccatatggcccaggtagcctaaatatttatctgatcctttacagaaaaagtttgctaacccttgataacagatactctaaaatgcaggtttttcttcttcagtttagctcagtggtaggtcaattgtttgcttttgctattaagcttatgatttggaaacgtaaaattttcatggtggatcttataatcagaactattcaaaagggaaaacatgccagccattttatatgatgaagtctcttattccatagaaaactgtagaaaggtatctgtatctttggagaaggagaaagaaaggaaagaactccagaatcccatcactgttctttaaagcatgcatcacagacctttaagagtatgctttattgagtaaaggttatagtttgactttaagataagaaattttctagaatcatgtttgaattctaaacgttgatattcttaagtaccatttctgattaggaattaggtgttaaaagaatcatggtaaggaaaccttaatccgttgaaactcttgtaatttggacaacaaaaaactagaaataacactcttttctttgaagatctgattcaaatacaccttagaagagtttaaaatctcccaggcctttaggatgcaataggatattatgccttggtttgactccttttcattcaaattaatgtaagtatgttgttcaagactttgaagcattgaacaatgttctcgacgaattttatttaattactgacattttgtgatatttgaatgttattaagttaaacacttagagttgagtatattcaggggagaaaagtgaatgaaatgactcataataagaaagcttgctcccttgggacagttaccttcctggtgtcattgccatcctgggttgacaagctgagagtagaggatacaagtgatgtgaataaaatggaaattgcattgagttaatgaaacatacacttttagatcaagataacattcaacagcctttttagaaattgcacactcctatagtcccacttactcaaggaggtgggggcagggaggatcactggagtacaggagtttggggctgtagtgtgtaatgatcaacacctgtgaaagaataaccactgcactccaacctgggcaacatggcaagaccctgtctctttaaaaaaaaaaaaaaatcctgggaaaagaagtcaaagatgtaattttacacaatttctgcccccaccgtcttttttgtttgtttgtttgtttgtttgttttttggctagatactaggtattcagtgtttgctgagatgacaggtttctactaatcagccagttatttgggaaggagaaaaactttttctcaattctgaacatgatgcagcttgttaactctccagatagtgcctttgattgaaaataaggtctacacctttttaagtatattatttctgacatcgtaagaaataatttagttccttattctcatttatcttttatataatgtactgtaatattcaggtttaaagtaaaataagtatatggaattatattttggtaaaactgtttcatgaccagcttgattaatgtatattaacataccagacattgacagcgaacatttcatgaaatcagttatttacttactaaaacaatgagttttagcttgaaagttactgctgctctattattaacaaaactaagttttaaaaattaattttaattctactgaagtttaatttctggttaaaggtatagtggatgctatttatgatccaagtttttacatcacatccattgatctgcctatcccttctttttactccaaagaggagatgatagaataatacattcagtatactaccaagaagcaaagttataatgtgtttcattttgctattggaattttttattgtaacattgtatgataacctgaaatgtttacttgtgccttttctttaaacaattaaagttttccattttataagaaacaaaaaaaaaaaa

SEQ ID NO: 2077 - protein, 810 aa, Homo sapien
MVTNKMTAAFRNPSGKQVATDKVAEKLSSTLSWVKNTVSHTVSQMASQVASPSTSLHTTSSSTTLSTPALSPSSPSQLSPDVLELLAKLEEQNILLETDSKSLRSVNGSRRNSGSSLVSSSSASSNLSHLEEDSWILWGRIVNEWEDVRKKKEKQVKELVHKGIPHHFRAIVWQLLCSAQSMPIKDQYSELLKMTSPCEKLIRRDIARTYPEHNFFKEKDSLGQEVLFNVMKAYSLVDREVGYCQGSAFIVGLLLMQMPEEEAFCVFVKLMQDYRLRELFKPSMAELGLCMYQFECMIQEHLPELFVHFQSQSFHTSMYASSWFLTIFLTTFPLPVATRIFDIFMSEGLEIVFRVGLALLQMNQAELMQLDMEGMLQHFQKVIPHQFDGVPDKLIQAAYQVQYNSKKMKKLEKEYTTIKTKEMEEQVEIKRLRTENRLLKQRIETLEKHKCSSNYNEDFVLQLEKELVQARLSEAESQCALKEMQDKVLDIEKRNNSLPDENNIARLQEELIAVKLREAEAIMGLKELRQQVKDLEEHWQRHLARTTGRWKDPPKKNAMNELQDELMTIRLREAETQAEIREIKQRMMEMETQNQINSNHLRRAEQEVISLQEKVQYLSAQNKGLLTQLSEAKRKQAEIECKNKEEVMAVRLREADSIAAVAELRQHIAELEIQKEEGKLQGQLNKSDSNQYIGELKDQIAELNHELRCLKGQKGFSGQPPFDGIHIVNHLIGDDESFHSSDEDFIDNSLQETGVGFPLHGKSGSMSLDPAVADGSESETEDSVLETRESNQVVQKERPPRRRESYSTTV

SEQ ID NO: 2078 - DNA, 759 bp, Homo sapien
ctgtgctgtaaaaacaagagtaacatttttatattaaagttaaataaagttacaactttgaagagagtttctgcaagacatgacacaaagctgctagcagaaaatcaaaacgctgattaaaagaagcacggtatgatgaccaaacataaaaagtgttttataattgttggtgttttaataacaactaatattattactctgatagttaaactaactcgagattctcagagtttatgcccctatgattggattggtttccaaaacaaatgctattatttctctaaagaagaaggagattggaattcaagtaaatacaactgttccactcaacatgccgacctaactataattgacaacatagaagaaatgaattttcttaggcggtataaatgcagttctgatcactggattggactgaagatggcaaaaaatcgaacaggacaatgggtacatggagctacatttaccaaatcgtttggcatgagagggagtgaaggatgtgcctacctcagcgatgatggtgcagcaacagctagatgttacaccgaaagaaaatggatttgcaggaaaagaatacactaagttaatgtctaagataatggggaaaatagaaaataacattattaagtgtaaaaccagcaaagtacttttttaattaaacaaagttcgagttttgtacctgtctggttaattctgcttacgtgtcaggctacacataaaagccacttcaaagattggcaaaaaaaaaaaaaaaaaaaa

SEQ ID NO: 2079 - protein, 149 aa, Homo sapien
MMTKHKKCFIIVGVLITTNIITLIVKLTRDSQSLCPYDWIGFQNKCYYFSKEEGDWNSSKYNCSTQHADLTIIDNIEEMNFLRRYKCSSDHWIGLKMAKNRTGQWVHGATFTKSFGMRGSEGCAYLSDDGAATARCYTERKWICRKRIH

SEQ ID NO: 2080 - DNA, 1368 bp, Homo sapien
cctgctttgccgaagtgggagaaaaaacagaggaaagaagagtagaaagggatattcttaaggaaatgttcccctatgaagcatctacaccaacaggaattagtgctagttgccgcagaccaatcaaaggggctgcaggccggccattagaactcagtgatttcaggatggaggagtctttttcatctaaatatgttcctaagtatgttcccttggcagatgtcaagtcagaaaagacaaaaaagggacgctccattcccgtatggataaaaattttgctgtttgttgttgtggcagtttttttgtttttggtctatcaagctatggaaaccaaccaagtaaatcccttctctaattttcttcatgttgaccctagaaaatccaactgaatggtatctctttggcacgttcaacttggtctcctattttcaataactgttgaaaaacatttgtgtacacttgttgactccaagaactaaaaataatgtgatttcgcctcaataaatgtagtatttcattgaaaagcaaacaaaatatatataaatggacttcattaaaatgtttttgaactttggactagtaggagatcactttgtgccatatgaataatcttttttagctctggaactttttgtaggctttatttttttaatgtgggcatcttatttcatttttgaaaaaatgtatatgttttttgtgtatttgggaaacgaagggtgaaacatggtagtataatgtgaagctacacatttaaatacttagaattcttacagaaaagattttaagaattattctctgctgaataaaaactgcaaatatgtgaaacataatgaaattcagtaagaggaaaagtaacttggttgtactttttgtaactgcaacaaagtttgatggtgtttatgaggaaaagtacagcaataatctcttctgtaacctttattaatagtaatgttgttgtagccctatcatactcactttttaagacacagtatcatgaaagtcctatttcagtaagacccatttacatacagtagatttttagcagagatcttttagtgtaacatacatattttagagaattgttggctagctgtacatgttttgaaaagctgtttagctagctataaggctataattggaaatttgtattttttatttacagcaaaacatttattcagtcatccagtttgctaccaaaatatgttttagataagtgtgtgtatgtttgtttagaagttagaaattgtaaacactggtcttatgtttcatttggattcattattgcattgtcttgttaccagaaacaaattttgccgagcttttttgccctatatttcccagcataatttgattaaaaaaaaaaaaaaa

SEQ ID NO: 2081 - protein, 107 aa, Homo sapien
MFPYEASTPTGISASCRRPIKGAAGRPLELSDFRMEESFSSKYVPKYVPLADVKSEKTKKGRSIPVWIKILLFVVVAVFLFLVYQAMETNQVNPFSNFLHVDPRKSN

SEQ ID NO: 2082 - DNA, 2374 bp, Homo sapien
ggttggtgcgagcttccagcttggccgcagttggttcgtagttcggctctggggtcttttgtgtccgggtctggcttggctttgtgtccgcgagtttttgttccgctccgcagcgctcttcccgggcaggagccgtgaggctcggaggcggcagcgcggtccccggccaggagcaagcgcgccggcgtgagcggcggcggcaaaggctgtggggagggggcttcgcagatccccgagatgccggagttcctggaagacccctcggtcctgacaaaagacaagttgaagagtgagttggtcgccaacaatgtgacgctgccggccggggagcagcgcaaagacgtgtacgtccagctctacctgcagcacctcacggctcgcaaccggccgccgctccccgccggcaccaacagcaaggggcccccggacttctccagtgacgaagagcgcgagcccaccccggtcctcggctctggggccgccgccgcgggccggagccgagcagccgtcggcaggaaagccacaaaaaaaactgataaacccagacaagaagataaagatgatctagatgtaacagagctcactaatgaagatcttttggatcagcttgtgaaatacggagtgaatcctggtcctattgtgggaacaaccaggaagctatatgagaaaaagcttttgaaactgagggaacaaggaacagaatcaagatcttctactcctctgccaacaatttcttcttcagcagaaaatacaaggcagaatggaagtaatgattctgacagatacagtgacaatgaagaagactctaaaatagagctcaagcttgagaagagagaaccactaaagggcagagcaaagactccagtaacactcaagcaaagaagagttgagcacaatcaggtgggagaaaaaacagaggaaagaagagtagaaagggatattcttaaggaaatgttcccctatgaagcatctacaccaacaggaattagtgctagttgccgcagaccaatcaaaggggctgcaggccggccattagaactcagtgatttcaggatggaggagtctttttcatctaaatatgttcctaagtatgttcccttggcagatgtcaagtcagaaaagacaaaaaagggacgctccattcccgtatggataaaaattttgctgtttgttgttgtggcagtttttttgtttttggtctatcaagctatggaaaccaaccaagtaaatcccttctctaattttcttcatgttgaccctagaaaatccaactgaatggtatctctttggcacgttcaacttggtctcctattttcaataactgttgaaaaacatttgtgtacacttgttgactccaagaactaaaaataatgtgatttcgcctcaataaatgtagtatttcattgaaaagcaaacaaaatatatataaatggacttcattaaaatgtttttgaactttggactagtaggagatcactttgtgccatatgaataatcttttttagctctggaactttttgtaggctttatttttttaatgtgggcatcttatttcatttttgaaaaaatgtatatgttttttgtgtatttgggaaacgaagggtgaaacatggtagtataatgtgaagctacacatttaaatacttagaattcttacagaaaagattttaagaattattctctgctgaataaaaactgcaaatatgtgaaacataatgaaattcagtaagaggaaaagtaacttggttgtactttttgtaactgcaacaaagtttgatggtgtttatgaggaaaagtacagcaataatctcttctgtaacctttattaatagtaatgttgttgtagccctatcatactcactttttaagacacagtatcatgaaagtcctatttcagtaagacccatttacatacagtagatttttagcagagatcttttagtgtaacatacatattttagagaattgttggctagctgtacatgttttgaaaagctgtttagctagctataaggctataattggaaatttgtattttttatttacagcaaaacatttattcagtcatccagtttgctaccaaaatatgttttagataagtgtgtgtatgtttgtttagaagttagaaattgtaaacactggtcttatgtttcatttggattcattattgcattgtcttgttaccagaaacaaattttgccgagctttttttgccctatatttcccagcataatttgattagaaagtacaaaaagggccgggcgcggtggcttacgcctgtaatcccagcactttgggaggccagggcgggtggatcacgaggtcaggagatcgggaccatcctggccaacatggtgaaaccccgtctctacta

SEQ ID NO: 2083 - protein, 345 aa, Homo sapien
MPEFLEDPSVLTKDKLKSELVANNVTLPAGEQRKDVYVQLYLQHLTARNRPPLPAGTNSKGPPDFSSDEEREPTPVLGSGAAAAGRSRAAVGRKATKKTDKPRQEDKDDLDVTELTNEDLLDQLVKYGVNPGPIVGTTRKLYEKKLLKLREQGTESRSSTPLPTISSSAENTRQNGSNDSDRYSDNEEDSKIELKLEKREPLKGRAKTPVTLKQRRVEHNQVGEKTEERRVERDILKEMFPYEASTPTGISASCRRPIKGAAGRPLELSDFRMEESFSSKYVPKYVPLADVKSEKTKKGRSIPVWIKILLFVVVAVFLFLVYQAMETNQVNPFSNFLHVDPRKSN

SEQ ID NO: 2084 - DNA, 2431 bp, Homo sapien; identical to SEQ ID NO: 1757

SEQ ID NO: 2085 - protein, 713 aa, Homo sapien; identical to SEQ ID NO: 1758

SEQ ID NO: 2086 - DNA, 6475 bp, Homo sapien
gccgggcagtgggcaggtatggctgagggcgtgtgagcgccgagcgctaagggccgccgccaccatgccagggggcgcaggcgccgccaggctctgcttgctggcgtttgccctgcagcccctccggccgcgggcggcgcgggagcctggatggacaagaggaagtgaggaaggcagccccaagctgcagcatgaacttatcatacctcagtggaagacttcagaaagccccgtgagagaaaagcatccactcaaagctgagctcagggtaatggctgaggggcgagaactgatcctggacctggagaagaatgagcaactttttgctccttcctacacagaaacccattatacttcaagtggtaaccctcaaaccaccacacggaaattggaggatcactgcttttaccacggcacggtgagggagacagaactgtccagcgtcacgctcagcacttgccgaggaattagaggactgattacggtgagcagcaacctcagctacgtcatcgagcccctccctgacagcaagggccaacaccttatttacagatctgaacatctcaagccgcccccgggaaactgtgggttcgagcactccaagcccaccaccagggactgggctcttcagtttacacaacagaccaagaagcgacctcgcaggatgaaaagggaagatttaaactccatgaagtatgtggagctttacctcgtggctgattatttagagtttcagaagaatcgacgagaccaggacgccaccaaacacaagctcatagagatcgccaactatgttgataagttttaccgatccttgaacatccggattgctctcgtgggcttggaagtgtggacccacgggaacatgtgtgaagtttcagagaatccatattctaccctctggtcctttctcagttggaggcgcaagctgcttgcccagaagtaccatgacaacgcccaattaatcacgggcatgtccttccacggcaccaccatcggcctggcccccctcatggccatgtgctctgtgtaccagtctggaggagtcaacatggaccactccgagaatgccattggcgtggctgccaccatggcccacgagatgggccacaactttggcatgacccatgattctgcagattgctgctcggccagtgcggctgatggtgggtgcatcatggcagctgccactgggcacccctttcccaaagtgttcaatggatgcaacaggagggagctggacaggtatctgcagtcaggtggtggaatgtgtctctccaacatgccagacaccaggatgttgtatggaggccggaggtgtgggaacgggtatctggaagatggggaagagtgtgactgtggagaagaagaggaatgtaacaacccctgctgcaatgcctctaattgtaccctgaggccgggggcggagtgtgctcacggctcctgctgccaccagtgtaagctgttggctcctgggaccctgtgccgcgagcaggccaggcagtgtgacctcccggagttctgtacgggcaagtctccccactgccctaccaacttctaccagatggatggtaccccctgtgagggcggccaggcctactgctacaacggcatgtgcctcacctaccaggagcagtgccagcagctgtggggacccggagcccgacctgcccctgacctctgcttcgagaaggtgaatgtggcaggagacacctttggaaactgtggaaaggacatgaatggtgaacacaggaagtgcaacatgagagatgcgaagtgtgggaagatccagtgtcagagctctgaggcccggcccctggagtccaacgcggtgcccattgacaccactatcatcatgaatgggaggcagatccagtgccggggcacccacgtctaccgaggtcctgaggaggagggtgacatgctggacccagggctggtgatgactggaaccaagtgtggctacaaccatatttgctttgaggggcagtgcaggaacacctccttctttgaaactgaaggctgtgggaagaagtgcaatggccatggggtctgtaacaacaaccagaactgccactgcctgccgggctgggccccgcccttctgcaacacaccgggccacgggggcagtatcgacagtgggcctatgccccctgagagtgtgggtcctgtggtagctggagtgttggtggccatcttggtgctggcggtcctcatgctgatgtactactgctgcagacagaacaacaaactaggccaactcaagccctcagctctcccttccaagctgaggcaacagttcagttgtcccttcagggtttctcagaacagcgggactggtcatgccaacccaactttcaagctgcagacgccccagggcaagcgaaaggtgatcaacactccggaaatcctgcggaagccctcccagcctcctccccggccccctccagattatctgcgtggtgggtccccacctgcaccactgccagctcacctgagcagggctgctaggaactccccagggcccgggtctcaaatagagaggacggagtcgtccaggaggcctcctccaagccggccaattccccccgcaccaaattgcatcgtttcccaggacttctccaggcctcggccgccccagaaggcactcccggcaaacccagtgccaggccgcaggagcctccccaggccaggaggtgcatccccactgcggccccctggtgctggccctcagcagtcccggcctctggcagcacttgccccaaagtttccagaatacagatcacagagggctggagggatgattagctcgaaaatctagacctgtccaaggggcttctccctttccttgagctctctggacactgcagaggacccatgaccatggaaccctgaagaagcatgtctggccgcctctgagctcctcccaccctcctccaggaacctccacatctccaaaaatctccctgttgactcagtgcctcctcggcttccttggaagcccagagggactatgatctgatggcctctaggtgttgttttgtgcaatatacagccccaggtagggaggggagagtatgaggagggtgactggcagcttctcctccagactcctagccccgaggtgctgatggagatgctcaaggccagcaagcccctcaggccagcacttcgcttgcagaagccatccattcactcctggggtgcagggcacgcaagagagcttcccattgcttctgctctcctcagaggtcccgggctggatggaggtggtacttacccaccccttttagcttttagggattaaggaagggtcaagccagccactgctgtggccctgcccagggcttggttgagggaacggcttctggctgtatggctgcatgtgacaagccacgtcccctcccacctctccccaaacccctgcatccctgtattcacacgggtcactctgactcagacaggtactattcgtaggcagtgtagacagcaggaggagcaccgggcttgggcttcctctgagccgtgatgccaaaggttgcgactcctgactctggataatttttagttgctctttgttttctctgccgcactttcctggtgccccacgcttttctctcttccttcccctctcattctccctctaatgtgtggtgctttggtgagcaaaccctcagcagtcctgaccttcgggtgaccaggtgcttgtgacctacaagtcagagtccactctcacagtcggccactggatttccctcactggctctcaggagtgtgaccagagtagactcggggcatggccattggggtcatatgtttatttttcattgtgttttgtgacctcagcagggtgggggtcttcctccttactctaagctaaatctaggtgaggtttccccttagggagcccagctatttacaaagtacacacgagggagcaggctggtcattgacttcgggctggaccgttgccctctgagcagagaacagacccattttctgggagctgcccgagatcactggagaaggcagccagcagcagctgcactggaacagtcagagcagggagcctcttcctcaacccagctttttgtcattcacttccttttgttctctctctggtcactgcccttacctgaccctcacagaaagagagctctgagcaggtgagggggtctgcggtggctcctgtcttccctgcagcagggaaggagggccgtgtggtgctttgctagataggacggtttttgcaaagcacctggagatgtttgctgggagatagactcccactccacaaaggtgctgggtggctctccggacaggagctggcctgactctcactcctctgaggctttcctggggcctcctcccatcctgccatgagcaattgtttgctcttgaaaacctcactgcaaggctgaagctgacttctgattcaccaccccagggcctccttatagttctctgcacacaataggtgcttcttggatgttcttgggtttggaaataagtggaaaatacgggatgtacccctgggggaaaagcctgggttgggtttagaaagatctcaggaaaatgagtttctcttccctcagggtggctgtgatacaggttccccatgtccttgccgtgggtcatccttgctgtgggtcatccttgctgtggagatccattccccacctttcctgtggcccaaccttttatttaaatgtgctaccctctgcctcaaggcttggttcctggaaagtaaaggtgaaaacatcccctttcacccctctgcaaaacaaacaagcaacatcctcaaaacccaaccccatgcctcacagagcttcctgtggcttctccagcctttctccctcacatcaggaggtagatagctctgaaatgacagcgccacagccatagtgactgcatgagccatctgaacctgcagtccaccctccctggaaccacaccagaaagagacctgggttgtcgttttcttgctttttgttttgttttgttttattattttcatatcacctccatcccataaagttgtactgtgaactggaagatggtggaatgttttggaatttgatagactttcggcaaccagttctactaatgcttcactcctggctctgttcagggaagctgcccaggaagaagactggccattatgcatccccttttctttccagtgcccagtatgctgtttttgaggtgtcaaatacaaataaatctgggcttagggaaggagagaccttattccaaagcatgattgcagaaggggaaagggaatattgcaaaagggagaggaaggggccttatgggaatagtgaaaaggctcagaccgaccgatggcaagatctgcaagcgtctcaaagcccaggcagaaaaggacttttcttttattggaagaagtaaacatggctagaaagaaccacgttcagggaatgacgttgtgcccagggtttttttttttttttttttttgtctccaggggaggggctgtttgctggctcaggctgaggatggcccaaagtccagggtctggtggggaggagggaagcttaactcaagtttgggttagtgagttagcaagctctttgtgcagatggggatgtaggtaaatctttttaaaagtgaaattaacctcctgccaattttacaacccaagaatttttttttaagggccttggagccatctctaaaacaaacctcaagggatttagtgccctgtctccctgtctctagaagccttagcctgggcacctggctcaatcttgtaactgcctgctagccatagattcctttcagccttgctgacttctccctataagagtaaagcctttttctgccccagctctgagacacttgcagatcttaaggtctgagacttgctgattttctggttggagtgtttttttgtattgccatagtcccttccccctgaagcaatagcccctccccacctcctgcaatacgcctttccaatctttattggaagtctctccctgcctacttcctaatttattcttatttgacagagggtatggaagacttgcaatttgaaaactggggaccagttccaaagtcagtaattgtgttaaccacgtgtataacagctctgctggacacccaagaaagccatgggaacaccaactggaaaggtccccttccccaggggagcctgcgaaggagaggttctgtagaatccaagcccacatttccaaagtcacccccaacgcgtcctctcacaccgtccactgtgcgtttgtatgtgtctgggatccagggcaatgtgaattttctttttatttgggagattgttcacggaaaacagatcttcttctctcttgtccacctattaattgtttacaatatttgtacatctatgcaaaatacttgaatgggccatggtgccttttttccttgttagtatttaattaaaaatgaattgtttgtcatttgcaatgttaaaaaaaaaaaa

SEQ ID NO: 2087 - protein, 918 aa, Homo sapien
MPGGAGAARLCLLAFALQPLRPRAAREPGWTRGSEEGSPKLQHELIIPQWKTSESPVREKHPLKAELRVMAEGRELILDLEKNEQLFAPSYTETHYTSSGNPQTTTRKLEDHCFYHGTVRETELSSVTLSTCRGIRGLITVSSNLSYVIEPLPDSKGQHLIYRSEHLKPPPGNCGFEHSKPTTRDWALQFTQQTKKRPRRMKREDLNSMKYVELYLVADYLEFQKNRRDQDATKHKLIEIANYVDKFYRSLNIRIALVGLEVWTHGNMCEVSENPYSTLWSFLSWRRKLLAQKYHDNAQLITGMSFHGTTIGLAPLMAMCSVYQSGGVNMDHSENAIGVAATMAHEMGHNFGMTHDSADCCSASAADGGCIMAAATGHPFPKVFNGCNRRELDRYLQSGGGMCLSNMPDTRMLYGGRRCGNGYLEDGEECDCGEEEECNNPCCNASNCTLRPGAECAHGSCCHQCKLLAPGTLCREQARQCDLPEFCTGKSPHCPTNFYQMDGTPCEGGQAYCYNGMCLTYQEQCQQLWGPGARPAPDLCFEKVNVAGDTFGNCGKDMNGEHRKCNMRDAKCGKIQCQSSEARPLESNAVPIDTTIIMNGRQIQCRGTHVYRGPEEEGDMLDPGLVMTGTKCGYNHICFEGQCRNTSFFETEGCGKKCNGHGVCNNNQNCHCLPGWAPPFCNTPGHGGSIDSGPMPPESVGPVVAGVLVAILVLAVLMLMYYCCRQNNKLGQLKPSALPSKLRQQFSCPFRVSQNSGTGHANPTFKLQTPQGKRKVINTPEILRKPSQPPPRPPPDYLRGGSPPAPLPAHLSRAARNSPGPGSQIERTESSRRPPPSRPIPPAPNCIVSQDFSRPRPPQKALPANPVPGRRSLPRPGGASPLRPPGAGPQQSRPLAALAPKFPEYRSQRAGGMISSKI

SEQ ID NO: 2088 - DNA, 3452 bp, Homo sapien
ctgaagcttgcatgcctgcaggtcgacccacgcgtccgcggacgcgtgggcggacgcgtgggtttttcctttcttccagaaggagatttaaccatagtagaaagaatggagaactattaactgccttccttctgtgggctgtgattttcagaggggaatgctaagaggtgattttcaatgttgggactcaaaggtgaagacactgaaggacagaatttttggcagaggaaagatcttcttcggtcaccatacttgagttagctctagggaagtggaggtttccatttggaattctatagcttcttccaggtcatagtgtctgccccccaccttccagtatctcctgatatgcagcatgaatgaaaatggcaagtttcctggccttccttctgctcaactttcgtgtctgcctccttttgcttcagctgctcatgcctcactcagctcagttttctgtgcttggaccctctgggcccatcctggccatggtgggtgaagacgctgatctgccctgtcacctgttcccgaccatgagtgcagagaccatggagctgaagtgggtgagttccagcctaaggcaggtggtgaacgtgtatgcagatggaaaggaagtggaagacaggcagagtgcaccgtatcgagggagaacttcgattctgcgggatggcatcactgcagggaaggctgctctccgaatacacaacgtcacagcctctgacagtggaaagtacttgtgttatttccaagatggtgacttctatgaaaaagccctggtggagctgaaggttgcagcactgggttctgatcttcacgttgatgtgaagggttacaaggatggagggatccatctggagtgcaggtccactggctggtacccccaaccccaaatacagtggagcaacaacaagggagagaacatcccgactgtggaagcacctgtggttgcagacggagtgggcctgtatgcagtagcagcatctgtgatcatgagaggcagctctggggagggtgtatcctgtaccatcagaagttccctcctcggcctggaaaagacagccagcatttccatcgcagaccccttcttcaggagcgcccagaggtggatcgccgccctggcacggaccctgcctgtcttgctgctgcttcttgggggagccggttacttcctgtggcaacagcaggaggaaaaaaagactcagttcagaaagaaaaagagagagcaagagttgagagaaatggcatggagcacaatgaagcaagaacaaagcacaagagtgaagctcctggaggaactcagatggagaagtatccagtatgcatctcggggagagagacattcagcctataatgaatggaaaaaggccctcttcaagcctgcggatgtgattctggatccaaaaacagcaaaccccatcctccttgtttctgaggaccagaggagtgtgcagcgtgccaaggagccccaggatctgccagacaaccctgagagatttaattggcattattgtgttctcggctgtgagagcttcatatcagggagacattactgggaggtggaggtaggggacaggaaagagtggcatataggggtgtgcagtaagaatgtgcagagaaaaggctgggtcaaaatgacacctgagaatggattctggactatggggctgactgatgggaataagtatcggactctaactgagcccagaaccaacctgaaacttcctaagccccctaagaaagtgggggtcttcctggactatgagactggagatatctcattctacaatgctgtggatggatcgcatattcatactttcctggacgtctccttctctgaggctctatatcctgttttcagaattttgaccttggagcccacggccctgagtatttgtccagcgtgaaaagaagaagagagttcctccaattctgaccgagtgctgatcattccctagagacaccagtaaccccgggcttagctaacgaaagtggggagcctcaggctgaagtaacttttctctgcttctccctgcccagctcagagctgagggcctccccctccacagcaaccaatcacaaccataaagctacaagcacgcactgaagcactttactgatactcattcaattattcatatgacagttgtttgagtttggtaccatcttattttccccttatacagataaggaaactggggtgcagaaaagtgaattgactacaaagtagacatgactagttaacaacacagctgggatctaaacagcaataactaacattaatggagaacttaaaatgctctgagtgctgtgttatgagctttggtggatgtcactcctttaatcctcgcaacaccctgtcgggtagtctcatttagcaagtatggaagttgaggcagggcaacattaagcaacttacataactcatgcagtaatttctgcagttgggagatgttcagcttcagtccccggccctatggccgttcttttccaccctgtttcttcccccataggaagaacccacctgtagccctgaggttcttttcccaggatggctccaggataaggatcactgtaggtggttgtggagttgacacccctgttgactccttcccagctgattgtcagagccttagacccagcacgccttggattagctttgcagagtgtcttggttgagagaataacctcaccgtacccacatgacacgtgatttggaaagagactagaggccacacttgataaatcatggggaacagatgtgttccacccaacaaatgtgataagtgatcatgcagccagagccagccttccttcaatcaaggtttccaggcagagcaaataccctagagattttctgtgatataggaaatttggatgaagggagctagaagaaatacagggatttttttttttttttaagatggagtcttactctgttgctaggctggagtgcagtggtgcgatctcagctccctgcaacctccacctcctgggttcaaacaattctcctgcctcagcctcccgagtactgggaatataggtgcacgccaccacacccaacaaatttttgtacttttagtacagatgagggttcactatgttggccaggatggtctcgatctcttgacctcatgatccacccacctcggtctcccaaagtgctgggattacaggcttgagccaccgggtgaccggcttacagggatatttttaatcccgttatggactctgtctccaggagaggggtctatccacccctgctcattggtggatgttaaaccaatattcctttcaactgctgcctgctagggaaaaactactcctcattatcatcattattattgctctccactgtatcccctctacctggcatgtgcttgtcaagttctagttgttcaataaatttgttaataatgctgaaaaaaaaaaaaaaaaaaaaaaaaaaaaaaaaaaaa

SEQ ID NO: 2089 - protein, 513 aa, Homo sapien
MKMASFLAFLLLNFRVCLLLLQLLMPHSAQFSVLGPSGPILAMVGEDADLPCHLFPTMSAETMELKWVSSSLRQVVNVYADGKEVEDRQSAPYRGRTSILRDGITAGKAALRIHNVTASDSGKYLCYFQDGDFYEKALVELKVAALGSDLHVDVKGYKDGGIHLECRSTGWYPQPQIQWSNNKGENIPTVEAPVVADGVGLYAVAASVIMRGSSGEGVSCTIRSSLLGLEKTASISIADPFFRSAQRWIAALARTLPVLLLLLGGAGYFLWQQQEEKKTQFRKKKREQELREMAWSTMKQEQSTRVKLLEELRWRSIQYASRGERHSAYNEWKKALFKPADVILDPKTANPILLVSEDQRSVQRAKEPQDLPDNPERFNWHYCVLGCESFISGRHYWEVEVGDRKEWHIGVCSKNVQRKGWVKMTPENGFWTMGLTDGNKYRTLTEPRTNLKLPKPPKKVGVFLDYETGDISFYNAVDGSHIHTFLDVSFSEALYPVFRILTLEPTALSICPA

SEQ ID NO: 2090 - DNA, 2500 bp, Homo sapien
cccaggcgcagccaatgggaagggtcggaggcatggcacagccaatgggaagggccggggcaccaaagccaatgggaagggccgggagcgcgcggcgcgggagatttaaaggctgctggagtgaggggtcgcccgtgcaccctgtcccagccgtcctgtcctggctgctcgctctgcttcgctgcgcctccactatgctctccctccgtgtcccgctcgcgcccatcacggacccgcagcagctgcagctctcgccgctgaaggggctcagcttggtcgacaaggagaacacgccgccggccctgagcgggacccgcgtcctggccagcaagaccgcgaggaggatcttccaggagcccacggagccgaaaactaaagcagctgcccccggcgtggaggatgagccgctgctgagagaaaacccccgccgctttgtcatcttccccatcgagtaccatgatatctggcagatgtataagaaggcagaggcttccttttggaccgccgaggaggttgacctctccaaggacattcagcactgggaatccctgaaacccgaggagagatattttatatcccatgttctggctttctttgcagcaagcgatggcatagtaaatgaaaacttggtggagcgatttagccaagaagttcagattacagaagcccgctgtttctatggcttccaaattgccatggaaaacatacattctgaaatgtatagtcttcttattgacacttacataaaagatcccaaagaaagggaatttctcttcaatgccattgaaacgatgccttgtgtcaagaagaaggcagactgggccttgcgctggattggggacaaagaggctacctatggtgaacgtgttgtagcctttgctgcagtggaaggcattttcttttccggttcttttgcgtcgatattctggctcaagaaacgaggactgatgcctggcctcacattttctaatgaacttattagcagagatgagggtttacactgtgattttgcttgcctgatgttcaaacacctggtacacaaaccatcggaggagagagtaagagaaataattatcaatgctgttcggatagaacaggagttcctcactgaggccttgcctgtgaagctcattgggatgaattgcactctaatgaagcaatacattgagtttgtggcagacagacttatgctggaactgggttttagcaaggttttcagagtagagaacccatttgactttatggagaatatttcactggaaggaaagactaacttctttgagaagagagtaggcgagtatcagaggatgggagtgatgtcaagtccaacagagaattcttttaccttggatgctgacttctaaatgaactgaagatgtgcccttacttggctgattttttttttccatctcataagaaaaatcagctgaagtgttaccaactagccacaccatgaattgtccgtaatgttcattaacagcatctttaaaactgtgtagctacctcacaaccagtcctgtctgtttatagtgctggtagtatcaccttttgccagaaggcctggctggctgtgacttaccatagcagtgacaatggcagtcttggctttaaagtgaggggtgaccctttagtgagcttagcacagcgggattaaacagtcctttaaccagcacagccagttaaaagatgcagcctcactgcttcaacgcagattttaatgtttacttaaatataaacctggcactttacaaacaaataaacattgttttgtactcacggcggcgataatagcttgatttatttggtttctacaccaaatacattctcctgaccactaatgggagccaattcacaattcactaagtgactaaagtaagttaaacttgtgtagactaagcatgtaatttttaagttttattttaatgaattaaaatatttgttaaccaactttaaagtcagtcctgtgtatacctagatattagtcagttggtgccagatagaagacaggttgtgtttttatcctgtggcttgtgtagtgtcctgggattctctgccccctctgagtagagtgttgtgggataaaggaatctctcagggcaaggagcttcttaagttaaatcactagaaatttaggggtgatctgggccttcatatgtgtgagaagccgtttcattttatttctcactgtattttcctcaacgtctggttgatgagaaaaaattcttgaagagttttcatatgtgggagctaaggtagtattgtaaaatttcaagtcatccttaaacaaaatgatccacctaagatcttgcccctgttaagtggtgaaatcaactagaggtggttcctacaagttgttcattctagttttgtttggtgtaagtaggttgtgtgagttaattcatttatatttactatgtctgttaaatcagaaattttttattatctatgttcttctagattttacctgtagttcataaaaaaaaaaaaaaaaaaaaaaaaa

SEQ ID NO: 2091 - protein, 389 aa, Homo sapien
MLSLRVPLAPITDPQQLQLSPLKGLSLVDKENTPPALSGTRVLASKTARRIFQEPTEPKTKAAAPGVEDEPLLRENPRRFVIFPIEYHDIWQMYKKAEASFWTAEEVDLSKDIQHWESLKPEERYFISHVLAFFAASDGIVNENLVERFSQEVQITEARCFYGFQIAMENIHSEMYSLLIDTYIKDPKEREFLFNAIETMPCVKKKADWALRWIGDKEATYGERVVAFAAVEGIFFSGSFASIFWLKKRGLMPGLTFSNELISRDEGLHCDFACLMFKHLVHKPSEERVREIIINAVRIEQEFLTEALPVKLIGMNCTLMKQYIEFVADRLMLELGFSKVFRVENPFDFMENISLEGKTNFFEKRVGEYQRMGVMSSPTENSFTLDADF

SEQ ID NO: 2092 - DNA, 4572 bp, Homo sapien
ggcggcgctagcttcggagtctcccgcgcgcacctcagccgcctcctagcggcgcggcgctcgctcctacgcctaaaatgaccaatgtgtgatttcagtggaataaatggcgtccaaagtcacagatgctatagtctggtatcaaaagaagattggagcatatgatcaacaaatatgggaaaaatctgttgaacagagagaaatcaaggggctaaggaataaaccaaagaaaacagcacatgtgaaaccagacctcatagatgttgatcttgtaagagggtctgcatttgcaaaggcaaagcctgaaagtccttggacttctctgaccagaaagggaattgttcgagttgtatttttcccctttttcttccggtggtggttacaagtaacatcaaaggtcatctttttctggcttcttgtcctttatcttcttcaagttgctgcaatagtattattctgctccacttctagcccacacagcatacctctgacagaggtgattgggccgatatggctgatgctgctcctgggaactgtgcattgccagattgtttccacaagaacacccaaacctcctctaagtacagggggtaaaagaagaaggaaattaagaaaagcagcccatttggaagtacatagggaaggagatggttctagtaccacagataacacacaagagggagcagttcagaaccacggtacaagcacctctcacagcgttggcactgtcttcagagatctctggcatgctgctttctttttatcaggatcaaagaaagcaaagaattcaattgataaatcaactgaaactgacaatggctatgtatcccttgatgggaagaagactgttaaaagcggtgaagatggaatacaaaaccatgaacctcagtgtgaaactattcgaccagaagagacagcctggaacacaggaacactgaggaatggtcctagcaaagatacccaaaggacaataacaaatgtctctgatgaagtctccagtgaggaaggtcctgaaacaggatactcattacgtcgtcatgtggacaggacttctgaaggtgttcttcggaatagaaagtcacaccattataagaaacattaccctaatgaggacgcccctaaatcgggtactagttgcagctctcgctgttcaagttccagacaggattctgagagtgcaaggccagaatctgaaacagaagatgtgttatgggaagacttgttacattgtgcagaatgccattcatcttgtaccagtgagacagatgtggaaaatcatcagattaatccatgtgtgaaaaaagaatatagagatgacccttttcatcagagtcatttgccctggctccatagttcccacccaggattagaaaaaataagtgctatagtatgggaaggtaatgattgtaagaaagcagacatgtctgtacttgaaatcagtggaatgataatgaacagagtgaacagccatataccaggaataggataccagatttttggaaatgcagtctctctcatactgggtttaactccatttgttttccgactttctcaagctacagacttggaacaactcacagcacattctgcttcagaactttatgtgattgcatttggttctaatgaagatgtcatagttctttctatggttataataagttttgtggttcgcgtgtctcttgtgtggattttcttttttttgctctgtgtagcagaaagaacttataaacagcgattactttttgcaaaactctttggacatttaacatctgcaaggagggctcgaaaatctgaggttcctcatttccggttgaagaaagtacagaatataaaaatgtggctatctctccgttcctatcttaagcgtcgaggtcctcagcgatcagttgatgtaatagtttcatctgctttcttattgactatctcagttgtatttatctgttgtgcccagataaacctctacttgaaaatggagaaaaaacctaacaaaaaggaggaactgacactagtgaataatgttttaaaactggctactaaactgctaaaggagttggacagtccttttagattatatgggcttacaatgaatccgctgctttataacatcacccaggttgttatcctgtcagctgtttctggtgttatcagtgacttgcttggatttaatttaaagctatggaagattaagtcatgacaattcaaagaaaagaagatgtagcctcttttccagaataagagtactgactaagctgcctgaaagcttgtcactgattctttgcttcaggagtctcagctagggagttgaagtgtttacatcagactgtcttgtgcaattcttatatttattttactggttcacttttttttacatttattttagtctttatatttttatttttaagcattgatgtacttagttgttgaaagggtgatgaaactgatatccagatacttgagatcctggtaattggtcataaataattggcaaaataacaaattgtgaaaatagaagccattgctcagcaccgtttctccatcaatgccgtgaacttgccttacttgaggaaaaattctttaactttggaatattgcattgaactcagctatacacataaaacattttctttggtaaatcaagatccagtcagggtttctcttgaattattttggaacaatgccaggatccaaactgattaagttacagtttaagcacccttcagtattaatatatacggtattatataacaggtcaacaagtgctctttgatgataaaacttgtaatagagcaataattgtaaatggttaccatactgtaagatattttgataaaaattaactagtaatacttgtatttatttgaaacactgggctgtttgcacagctccaactgtgcatgctcaaaatgtgcactttttaaaattgttacttttaatgcgtatctttatatgggatctgttatagtatactagggcatgatatggtatccttttgagtgaggtatatactcatctcacaagtgaagtgcctactgatattactaaagtacattatgtttactcaagtaaataattttctccccatggtacactctagtgtaggctattcataccacactgaaatgaacaactgaagaataaggctaagaaccaataaaatatttctctaattgctagttgtaaaactgtatccaaattttcagaaaagacagcttcagcttgcaaattctatcctctaaacttatctggtgcattctccccaccccacccccattatataagggctattttagatgcttttaacctccccaacaaataatttgccaagtgtccaatgagaacttatcatgttggtgtgttaggtaaatcgggcaaatatgatagtgtcttacattgggccttgattttaagttgttatatttgtacaatcgagtattttagaaattacatgaaacatgaaacagtttttgcaattttttttaaactgggcatctggtttctaaaaatttatttgaaacaatctagaattttcttggtgcaaagtgtatcatgtggaatatcctcatatttttaccatattttaagaactttaagacgattaattgtaaataatttatttgattggtgcagttctaatccctaaatcataatcttaaaatcaggaatgtgtggagaacagagccatgtcatatcactttgctcttaccattccttttgatcagcctcaattcagcctcattgtgtagtatgttttttctttctatgaaaaacaacagaaagcatttcattttatttgcctatgttcaaatatgtttaataatgaccaaagtgcattctgagttttttcaaggaatgtaatactggagctttaagaacatacttagtttctcatgtgaaaacttaggctttgtctgatgtttttccttcctctattgtctaatgttgaggttgtttttaggaattatgttttataaactttttcaatataaggtacatgcctatacagaacttaacattttgcacagaatatatcaaatatattttgagaaaaaaagtacggcatgagttctgttaggaataaaagatgaaactattgtatctcacaaaaaatcttatttcagaatggaaatatttttgagaaaagtagctgagtatactggtttaagaaaatgcttgttttagattgaggttaacttagagttgggagttgatttattaagtacagtatacctctcaacagtttataaataatatgttgaattatgtcagtgtgggcagcagtagaatactaaaaggaaaatgtcatgttaagcaatttcagaacattaactgaactattttcaaagcagaaaaattgacattgctgcctttaagaataccatgaatgtaagaaattgaaagaaattgtaaaatatcacataatatagaaatggcagttcaaagagaattgtggcagatgttgtgtgtgaactgttgtttctttgccacatgtgttgtatttgaaagttttacagtaagtttaaaataaaacattctgtgactgaaaaaaaaaaaaaaaaaaaaaaaaaaaaaaaa

SEQ ID NO: 2093 - protein, 695 aa, Homo sapien
MASKVTDAIVWYQKKIGAYDQQIWEKSVEQREIKGLRNKPKKTAHVKPDLIDVDLVRGSAFAKAKPESPWTSLTRKGIVRVVFFPFFFRWWLQVTSKVIFFWLLVLYLLQVAAIVLFCSTSSPHSIPLTEVIGPIWLMLLLGTVHCQIVSTRTPKPPLSTGGKRRRKLRKAAHLEVHREGDGSSTTDNTQEGAVQNHGTSTSHSVGTVFRDLWHAAFFLSGSKKAKNSIDKSTETDNGYVSLDGKKTVKSGEDGIQNHEPQCETIRPEETAWNTGTLRNGPSKDTQRTITNVSDEVSSEEGPETGYSLRRHVDRTSEGVLRNRKSHHYKKHYPNEDAPKSGTSCSSRCSSSRQDSESARPESETEDVLWEDLLHCAECHSSCTSETDVENHQINPCVKKEYRDDPFHQSHLPWLHSSHPGLEKISAIVWEGNDCKKADMSVLEISGMIMNRVNSHIPGIGYQIFGNAVSLILGLTPFVFRLSQATDLEQLTAHSASELYVIAFGSNEDVIVLSMVIISFVVRVSLVWIFFFLLCVAERTYKQRLLFAKLFGHLTSARRARKSEVPHFRLKKVQNIKMWLSLRSYLKRRGPQRSVDVIVSSAFLLTISVVFICCAQINLYLKMEKKPNKKEELTLVNNVLKLATKLLKELDSPFRLYGLTMNPLLYNITQVVILSAVSGVISDLLGFNLKLWKIKS

SEQ ID NO: 2094 - DNA, 4845 bp, Homo sapien
gcacgagagctaggccggcggcagtggtggtggcggcggcgcaagggtgagggcggccccagaaccccaggtaggtagagcaagaagatggtgtttctgcccctcaaatggtcccttgcaaccatgtcatttctactttcctcactgttggctctcttaactgtgtccactccttcatggtgtcagagcactgaagcatctccaaaacgtagtgatgggacaccatttccttggaataaaatacgacttcctgagtacgtcatcccagttcattatgatctcttgatccatgcaaaccttaccacgctgaccttctggggaaccacgaaagtagaaatcacagccagtcagcccaccagcaccatcatcctgcatagtcaccacctgcagatatctagggccaccctcaggaagggagctggagagaggctatcggaagaacccctgcaggtcctggaacacccccgtcaggagcaaattgcactgctggctcccgagcccctccttgtcgggctcccgtacacagttgtcattcactatgctggcaatctttcggagactttccacggattttacaaaagcacctacagaaccaaggaaggggaactgaggatactagcatcaacacaatttgaacccactgcagctagaatggcctttccctgctttgatgaacctgccttcaaagcaagtttctcaatcaaaattagaagagagccaaggcacctagccatctccaatatgccattggtgaaatctgtgactgttgctgaaggactcatagaagaccattttgatgtcactgtgaagatgagcacctatctggtggccttcatcatttcagattttgagtctgtcagcaagataaccaagagtggagtcaaggtttctgtttatgctgtgccagacaagataaatcaagcagattatgcactggatgctgcggtgactcttctagaattttatgaggattatttcagcataccgtatcccctacccaaacaagatcttgctgctattcccgactttcagtctggtgctatggaaaactggggactgacaacatatagagaatctgctctgttgtttgatgcagaaaagtcttctgcatcaagtaagcttggcatcacaatgactgtggcccatgaactggctcaccagtggtttgggaacctggtcactatggaatggtggaatgatctttggctaaatgaaggatttgccaaatttatggagtttgtgtctgtcagtgtgacccatcctgaactgaaagttggagattatttctttggcaaatgttttgacgcaatggaggtagatgctttaaattcctcacaccctgtgtctacacctgtggaaaatcctgctcagatccgggagatgtttgatgatgtttcttatgataagggagcttgtattctgaatatgctaagggagtatcttagtgctgacgcatttaaaagtggtattgtacagtatctccagaagcatagctataaaaatacaaaaaacgaggacctgtgggatagtatggcaagtatttgccctacagatggtgtaaaagggatggatggcttttgctctagaagtcaacattcatcttcatcctcacattggcatcaggaaggggtggatgtgaaaaccatgatgaacacttggacactgcagaagggttttcccctaataaccatcacagtgagggggaggaatgtacacatgaagcaagagcactacatgaagggctctgacggcgccccggacactgggtacctgtggcatgttccattgacattcatcaccagcaaatccgacatggtccatcgatttttgctaaaaacaaaaacagatgtgctcatcctcccagaagaggtggaatggatcaaatttaatgtgggcatgaatggctattacattgtgcattacgaggatgatggatgggactctttgactggccttttaaaaggaacacacacagcagtcagcagtaatgatcgggcgagtctcattaacaatgcatttcagctcgtcagcattgggaagctgtccattgaaaaggccttggatttatccctgtacttgaaacatgaaactgaaattatgcccgtgtttcaaggtttgaatgagctgattcctatgtataagttaatggagaaaagagatatgaatgaagtggaaactcaattcaaggccttcctcatcaggctgctaagggacctcattgataagcagacatggacagacgagggctcagtctcagagcgaatgctgcggagtcaactactactcctcgcctgtgtgcacaactatcagccgtgcgtacagagggcagaaggctatttcagaaagtggaaggaatccaatggaaacttgagcctgcctgtcgacgtgaccttggcagtgtttgctgtgggggcccagagcacagaaggctgggattttctttatagtaaatatcagttttctttgtccagtactgagaaaagccaaattgaatttgccctctgcagaacccaaaataaggaaaagcttcaatggctactagatgaaagctttaagggagataaaataaaaactcaggagtttccacaaattcttacactcattggcaggaacccagtaggatacccactggcctggcaatttctgaggaaaaactggaacaaacttgtacaaaagtttgaacttggctcatcttccatagcccacatggtaatgggtacaacaaatcaattctccacaagaacacggcttgaagaggtaaaaggattcttcagctctttgaaagaaaatggttctcagctccgttgtgtccaacagacaattgaaaccattgaagaaaacatcggttggatggataagaattttgataaaatcagagtgtggctgcaaagtgaaaagcttgaacgtatgtaaaaattcctcccttgccaggttcctgttatctctaatcaccaacattttgttgagtgtattttcaaactagagatggctgttttggctccaactggagatacttttttcccttcaactcattttttgactatccctgtgaaaagaatagctgttagtttttcatgaatgggctatcgctaccatgtgttttgttcatcacaggtgttgccctgcaacgtaaacccaagtgttgggttccctgccacagaagaataaagtaccttattcttctcattttatagtttatgcttaagcacccgtgtccaaaaccctgtaccccatgtttatcattcataaactgtttcatcagtctcctcgaaagactctgaatagtcgactactgaacaatgaacacctggatctgagactaagccggacgatgactgggttaaagctctcccggctcacccctccagacccgctgcccatccctcttccttgctccatgcccaggggctgacttgtaaaggccaagtcatcaagctttcttgccctttggatgttggtcagtggggagccggagagctggagctggggtcggaggaggtagtaggtggaggtgttcttccctgattcccttgcgggatgcctcgggctggcctcccctgagggttttagctccgagaggggaccctcttttccacacagccttctccacctctggattttggtaactgctccctcctcatcccttcaggattagtggcctcagtgggagtctggcttttactagtcctggcggacttgtggtttctacataatgtgctcgcacttttgcaaaaaatcttctttttatagaaccctcctcagataattctgagtgtcatctatttccctgactggtacagtatctcttctgaaaaagcagagtgcattcaagtctgtaggaaaacccttttcttagggaggtgattttttttctctctctgcttcttatttggcctactttacaatttctaactaactagttattggcatttactgacagtaaattattgcagtcaccaataaatgatagtacattgtgaaacaaaatatttgctcatattagcaaataggacattctttggctttgaagtctttcttttgtgaagacttcacacacggttgcttcagcacacagttgctgctcaggttttatgtatagatgataataatagaaagcacagtttactaacatggtaaaccaacggagttcaagtcaagtcagttaataccctaagaattagattttatttcttattctgaaaacttgctacacagggacttatctaacccatagtgtgctctgttgctgacttgattcaagttgcagcgtgttttgcgctgactctaaggtgcggaaatcctcacacctggcaaaggagaattcaaactgaactttttgaatataaggcaaaaacttcaagataagggaatatgattgatgattggtacgaaaaatgtcaaaatgtgttcccctaatacacgacaaaatagagtgacttctggacataaatctgccatttattaaaccattcactacaacaaataaataggtataaaagtggaattggaatttttatacttatttgttgtagtgaatggtttaataaaaatagaaatcactggtaatttccaccccaaactaaactatttcccttcttttaaaaaaatacacaaccaagattttaatgtaaaatattttgctttaattgtattttatgccttgattaatgaaacatggaaatattgattttcagttttggtcacctgaggaacctatctttgtttgcttttggaaaagcccattttctaaacagatacaatattgccacaacaatgtgcagaaacctttttgataataaaaaattgttctttgcctctaaaaaaaaaaaaaaaaaaaaaaaaaaa

SEQ ID NO: 2095 - protein, 941 aa, Homo sapien
MVFLPLKWSLATMSFLLSSLLALLTVSTPSWCQSTEASPKRSDGTPFPWNKIRLPEYVIPVHYDLLIHANLTTLTFWGTTKVEITASQPTSTIILHSHHLQISRATLRKGAGERLSEEPLQVLEHPRQEQIALLAPEPLLVGLPYTVVIHYAGNLSETFHGFYKSTYRTKEGELRILASTQFEPTAARMAFPCFDEPAFKASFSIKIRREPRHLAISNMPLVKSVTVAEGLIEDHFDVTVKMSTYLVAFIISDFESVSKITKSGVKVSVYAVPDKINQADYALDAAVTLLEFYEDYFSIPYPLPKQDLAAIPDFQSGAMENWGLTTYRESALLFDAEKSSASSKLGITMTVAHELAHQWFGNLVTMEWWNDLWLNEGFAKFMEFVSVSVTHPELKVGDYFFGKCFDAMEVDALNSSHPVSTPVENPAQIREMFDDVSYDKGACILNMLREYLSADAFKSGIVQYLQKHSYKNTKNEDLWDSMASICPTDGVKGMDGFCSRSQHSSSSSHWHQEGVDVKTMMNTWTLQKGFPLITITVRGRNVHMKQEHYMKGSDGAPDTGYLWHVPLTFITSKSDMVHRFLLKTKTDVLILPEEVEWIKFNVGMNGYYIVHYEDDGWDSLTGLLKGTHTAVSSNDRASLINNAFQLVSIGKLSIEKALDLSLYLKHETEIMPVFQGLNELIPMYKLMEKRDMNEVETQFKAFLIRLLRDLIDKQTWTDEGSVSERMLRSQLLLLACVHNYQPCVQRAEGYFRKWKESNGNLSLPVDVTLAVFAVGAQSTEGWDFLYSKYQFSLSSTEKSQIEFALCRTQNKEKLQWLLDESFKGDKIKTQEFPQILTLIGRNPVGYPLAWQFLRKNWNKLVQKFELGSSSIAHMVMGTTNQFSTRTRLEEVKGFFSSLKENGSQLRCVQQTIETIEENIGWMDKNFDKIRVWLQSEKLERM

SEQ ID NO: 2096 - DNA, 1661 bp, Homo sapien
ccgagggcggggccgggcccgggagcctgtggcttcaggaagaggagggcaaggtgtctggctgcgcgtttggctgcaatgagctcggcctcggggctccgcagggggcacccggcaggtggggaagaaaacatgacagaaacagatgccttctataaaagagaaatgtttgatccggcagaaaagtacaaaatggaccacaggaggagaggaattgctttaatcttcaatcatgagaggttcttttggcacttaacactgccagaaaggcggggcacctgcgcagatagagacaatcttacccgcaggttttcagatctaggatttgaagtgaaatgctttaatgatcttaaagcagaagaactactgctcaaaattcatgaggtgtcaactgttagccacgcagatgccgattgctttgtgtgtgtcttcctgagccatggcgaaggcaatcacatttatgcatatgatgctaaaatcgaaattcagacattaactggcttgttcaaaggagacaagtgtcacagcctggttggaaaacccaagatatttatcattcaggcatgtcggggaaaccagcacgatgtgccagtcattcctttggatgtagtagataatcagacagagaagttggacaccaacataactgaggtggatgcagcctccgtttacacgctgcctgctggagctgacttcctcatgtgttactctgttgcagaaggatattattctcaccgggaaactgtgaacggctcatggtacattcaagatttgtgtgagatgttgggaaaatatggctcctccttagagttcacagaactcctcacactggtgaacaggaaagtttctcagcgccgagtggacttttgcaaagacccaagtgcaattggaaagaagcaggttccctgttttgcctcaatgctaactaaaaagctgcatttctttccaaaatctaattaattaatagaggctatctaattccacactctgtattgaaaatggctttctcagccaggcgtggttactcacacctgtaatcccagcactttgggagtccaaggtgggcggatcacctgaggtcgggagttcgagaccagcctgaccaacatggagaagccccgtctctactaaaaatgcaaaaaaaaatttagctaggcatggcggcgcatgcctgcaatcccagctacttggaaggctgaggcaggagaatcacttgaacccaggaggtggaggctgcggtgagccgagattgcgccattgcactccagcctgggcaacgagtgaaactccgtctcaaaaaaaagaaaatgtctttctcttccttttatataaatatcgttagggtgaagcattatggtctaatgattcaaatgttttaaagtttaatgcctagcagagaactgccttaaaaaaaaaaaaaaaaagttcatgttggccatggtgaaagggtttgatatggagaaacaaaatcctcaggaaattagataaataaaaatttataagcatttgtattattttttaataaactgcagggttacacaaaaatctagctgatttaacttgtattttgtcacttttttataaaagtttattgtttgatgtttttaaaggtttttgaaatccaggaattaaatcatcccttaataaaatattcgaaattc

SEQ ID NO: 2097 - protein, 293 aa, Homo sapien
MSSASGLRRGHPAGGEENMTETDAFYKREMFDPAEKYKMDHRRRGIALIFNHERFFWHLTLPERRGTCADRDNLTRRFSDLGFEVKCFNDLKAEELLLKIHEVSTVSHADADCFVCVFLSHGEGNHIYAYDAKIEIQTLTGLFKGDKCHSLVGKPKIFIIQACRGNQHDVPVIPLDVVDNQTEKLDTNITEVDAASVYTLPAGADFLMCYSVAEGYYSHRETVNGSWYIQDLCEMLGKYGSSLEFTELLTLVNRKVSQRRVDFCKDPSAIGKKQVPCFASMLTKKLHFFPKSN

SEQ ID NO: 2098 - DNA, 1702 bp, Homo sapien
agactcaacaagagctccagcaaagactttcactgtagcttgacttgacctgagattaactagggaatcttgagaataaagatgagctctgaaaattgtttcgtagcagagaacagctctttgcatccggagagtggacaagaaaatgatgccaccagtccccatttctcaacacgtcatgaagggtccttccaagttcctgtcctgtgtgctgtaatgaatgtggtcttcatcaccattttaatcatagctctcattgccttatcagtgggccaatacaattgtccaggccaatacacattctcaatgccatcagacagccatgtttcttcatgctctgaggactgggttggctaccagaggaaatgctactttatttctactgtgaagaggagctggacttcagcccaaaatgcttgttctgaacatggtgctactcttgctgtcattgattctgaaaaggacatgaactttctaaaacgatacgcaggtagagaggaacactgggttggactgaaaaaggaacctggtcacccatggaagtggtcaaatggcaaagaatttaacaactggttcaacgttacagggtctgacaagtgtgtttttctgaaaaacacagaggtcagcagcatggaatgtgagaagaatttatactggatatgtaacaaaccttacaaataataaggaaacatgttcacttattgactattatagaatggaactcaaggaaatctgtgtcagtggatgctgctctgtggtccgaagtcttccatagagactttgtgaaaaaaaattttatagtgtcttgggaattttcttccaaacagaactatggaaaaaaaggaagaaattccaggaaaatctgcactgtgggcttttattgccatgagctagaagcatcacaggttgaccaataaccatgcccaagaatgagaagaatgactatgcaacctttggatgcactttatattattttgaatccagaaataatgaaataactaggcgtggacttactatttattgctgaatgactaccaacagtgagagcccttcatgcatttgcactactggaaggagttagatgttggtactagatactgaatgtaaacaaaggaattatggctggtaacataggtttttagtctaattgaatcccttaaactcagggagcatttataaatggacaaatgcttatgaaactaagatttgtaatatttctctctttttagagaaatttgccaatttactttgttatttttccccaaaaagaatgggatgatcgtgtatttatttttttacttcctcagctgtagacaggtccttttcgatggtacatatttctttgcctttataatcttttatacagtgtcttacagagaaaagacataagcaaagactatgaggaatatttgcaagacatagaatagtgttggaaaatgtgcaatatgtgatgtggcaaatctctattaggaaatattctgtaatcttcagacctagaataatactagtcttataataggtttgtgactttcctaaatcaattctattacgtgcaatacttcaatacttcatttaaaatatttttatgtgcaataaaatgtatttgtttgtattttgtgttcagtacaattataagctgtttttatatatgtgaaataaaagtagaataaacacaaaaaaaaaaaaaaaaaaaaaaaaaaaa

SEQ ID NO: 2099 - protein, 199 aa, Homo sapien
MSSENCFVAENSSLHPESGQENDATSPHFSTRHEGSFQVPVLCAVMNVVFITILIIALIALSVGQYNCPGQYTFSMPSDSHVSSCSEDWVGYQRKCYFISTVKRSWTSAQNACSEHGATLAVIDSEKDMNFLKRYAGREEHWVGLKKEPGHPWKWSNGKEFNNWFNVTGSDKCVFLKNTEVSSMECEKNLYWICNKPYK

SEQ ID NO: 2100 - DNA, 913 bp, Homo sapien
agagccggcgccgtcaccgcccgcattgccgctcccagtcccgcgctcggcacgacatgaaatcccccgacgaggtgctacgcgagggcgagttggagaagcgcagcgacagcctcttccagctatggaagaagaagcgcggggtgctcacctccgaccgcctgagcctgttccccgccagcccccgcgcgcgccccaaggagctgcgcttccactccatcctcaaggtggactgcgtggagcgcacgggcaagtacgtgtacttcaccatcgtcaccaccgaccacaaggagatcgacttccgctgcgcgggcgagagctgctggaacgcggccatcgcgctggcgctcatcgatttccagaaccgccgcgccctgcaggactttcgcagccgccaggaacgcaccgcacccgccgcacccgccgaggacgccgtggctgccgcggccgccgcaccctccgagccctcggagccctccaggccatccccgcagcccaaaccccgcacgccatgagcccgccgcgggccatacgctggacgagtcggaccgaggctaggacgtggccggcgctctccagccctgcagcagaagaacttcccgtgcgcgcggatcctcgctccgttgcacgggcgccttaagttattggactatctaatatctatgtatttatttcgctggttctttgtagtcacatattttatagtcttaatatcttgtttttgcatcactgtgcccattgcaaataaatcacttggccagtttgcttttctaccatccggctgtggctcagtgagactcctgctgggagggtggaggcccaggaatgggcgggcaggacaccctcatccagtcctgcggggctggtgtgaaaggcgctgggaaccggctttgaatgaataaatgaatcgtgt

SEQ ID NO: 2101 - protein, 152 aa, Homo sapien
MKSPDEVLREGELEKRSDSLFQLWKKKRGVLTSDRLSLFPASPRARPKELRFHSILKVDCVERTGKYVYFTIVTTDHKEIDFRCAGESCWNAAIALALIDFQNRRALQDFRSRQERTAPAAPAEDAVAAAAAAPSEPSEPSRPSPQPKPRTP

SEQ ID NO: 2102 - DNA, 1530 bp, Homo sapien
gtgaggacaccgctttacaacgatgcagggggccccatgtcaccctcacccatgggaagtttgacttggtggactcagccaagccacagaggtctaacgcttctctgcggtgatttcaggctgccctggcagaaagcacagtgcctgcagacatgctgtcactgctccacgcatcaacgctggcagtccttggggctctgtgtgtatatggtgcaggtcacctagagcaacctcaaatttccagtactaaaacgctgtcaaaaacagcccgcctggaatgtgtggtgtctggaataacaatttctgcaacatctgtatattggtatcgagagagacctggtgaagtcatacagttcctggtgtccatttcatatgacggcactgtcagaaaggaatccggcattccgtcaggcaaatttgaggtggataggatacctgaaacgtctacatccactctcaccattcacaatgtagagaaacaggacatagctacctactactgtgccttgttggagggaaattataagaaactctttggcagtggaacaacacttgttgtcacagataaacaacttgatgcagatgtttcccccaagcccactatttttcttccttcaattgctgaaacaaagctccagaaggctggaacatacctttgtcttcttgagaaatttttccctgatgttattaagatacattggcaagaaaagaagagcaacacgattctgggatcccaggaggggaacaccatgaagactaacgacacatacatgaaatttagctggttaacggtgccagaaaagtcactggacaaagaacacagatgtatcgtcagacatgagaataataaaaacggagttgatcaagaaattatctttcctccaataaagacagatgtcatcacaatggatcccaaagacaattgttcaaaagatgcaaatgatacactactgctgcagctcacaaacacctctgcatattacatgtacctcctcctgctcctcaagagtgtggtctattttgccatcatcacctgctgtctgcttagaagaacggctttctgctgcaatggagagaaatcataacagacggtggcacaaggaggccatcttttcctcatcggttattgtccctagaagcgtcttctgaggatctagttgggctttctttctgggtttgggccatttcagttctcatgtgtgtactattctatcattattgtataacggttttcaaaccagtgggcacacagagaacctcactctgtaataacaatgaggaatagccacggcgatctccagcaccaatctctccatgttttccacagctcctccagccaacccaaatagcgcctgctatagtgtagacatcctgcggcttctagccttgtccctctcttagtgttctttaatcagataactgcctggaagcctttcattttacacgccctgaagcagtcttctttgctagttgaattatgtggtgtgtttttccgtaataagcaaaataaatttaaaaaaatgaaaagtt

SEQ ID NO: 2103 - protein, 310 aa, Homo sapien [sequence omitted]

SEQ ID NO: 2104 - DNA, 2618 bp, Homo sapien
gggagtgtggcgttctgtgaagagttcggtgctaacctccctcacgcggcggtggctgccgggaccctagcaggtttcagctggagcggcggcggcggcaacatggcagagaccgcggccggagtgggccgcttcaagaccaactatgctgtggagcgcaaaattgagcctttctacaagggcggaaaagcacagctggaccagactggccagcacctcttctgcgtctgtggcaccagagtcaacattctggaagtggcctcgggggccgtgctgcggagtctggagcaggaggaccaggaggacatcactgcctttgacctcagccctgacaacgaggtgctggtgacagccagtcgggcattgctgctggctcagtgggcctggcaagagggcagcgttacccgcctgtggaaggcgatacacacggcccccgtggccaccatggccttcgaccccacctccactctgctagccacaggtggctgtgatggggccgtgcgcgtctgggacatcgtgcggcactacgggacacaccacttccgaggctcgcccggtgtcgtgcacctagtggccttccacccggaccctacacgcctgctgctcttctcctcggccacggatgccgccatccgcgtgtggtcactgcaggaccggtcatgcctggctgtgctgactgcccactacagcgccgtcacctcactggccttcagcgccgacggccacaccatgctcagctccggccgtgacaagatatgtatcatctgggaccttcagagctgccaggccacgaggaccgtgcctgtgtttgagagcgtggaggctgctgtgctgttgccagaggagccagtgtcccagctgggtgtgaagtccccagggctgtactttctgacagctggcgaccaaggcactctgcgcgtgtgggaggcagcttctgggcagtgtgtgtacacgcaggcccagccgccgggccctgggcaggagctgacccactgcaccctggcacacaccgccggcgtggtcctcaccgccaccgccgaccacaacctgttgctctacgaggctcgctccctgcggctgcagaaacagttcgctggctacagtgaggaggttttggatgtccggtttcttgggcccgaggactcccacgttgtcgtggcctccaatagcccctgcctaaaagtgtttgagctgcagacgtcagcctgccagatcctccacggccacacggatatcgtcctggccctggatgtgttccggaaggggtggctctttgccagctgtgccaaggatcagagcgtccgtatctggagaatgaacaaggctggccaggtgatgtgcgtggctcagggttccggtcacacacacagtgtgggcaccgtctgctgctctaggctgaaggagtccttcctggtgacaggcagccaggactgcactgtgaagctgtggcctcttcccaaagccttgctgtccaagaacacagccccagacaacggccctatcctcctgcaggcccagaccactcagcgctgccatgataaggacatcaacagcgtggctattgcccccaacgacaagctgctggccacaggctcacaggaccgcacggccaagctctgggccctgccacagtgccagctgctgggtgtcttctcaggccaccggcgtggcctctggtgcgtccagttctctcccatggaccaggtgctggccacggcctcagctgatggcaccatcaagctctgggcactccaggacttcagctgtctcaagacatttgaggggcacgatgcttctgtgctgaaggtggcctttgtgagccgtggcacgcagctgctgtccagcggttcggatggcctcgtgaagctctggaccatcaagaacaacgagtgtgtgcggacgctggatgcccacgaggacaaggtctgggggctgcactgcagccggctggacgaccacgccctcactggggccagtgactcccgagtcatcctctggaaggatgtgaccgaggcggagcaggcagaggagcaggccaggcaagaggagcaggtggtcaggcagcaagagctggacaacctgctgcatgagaagcggtacctgcgggcgctgggcctggccatctccctggatcggccccacaccgtgctgactgtcatccaggccatccggagggaccctgaggcctgcgagaagctggaagccaccatgctccgactgcggcgcgaccagaaagaggccctgctgcgcttctgcgtcacgtggaacaccaactcgcggcactgccacgaggcccaggccgtgctgggtgtgctcttgaggcgagaggcccccgaggagctgctggcctacgaaggcgtgcgggcagcgcttgaggccctgctgccctacactgagcggcactttcagcggctcagcaggaccctccaggccgccgctttcttggacttcctgtggcacaacatgaagctccctgtgccggccgccgcccccaccccctgggaaacccataaaggcgcactgccctagccggtccggcctctctccagtccatcctgaacccctggaaaacccataaaggccgctctcctggcaaaaaaaaaaaaaaaaaaaaaaaa

SEQ ID NO: 2105 - protein, 808 aa, Homo sapien
MAETAAGVGRFKTNYAVERKIEPFYKGGKAQLDQTGQHLFCVCGTRVNILEVASGAVLRSLEQEDQEDITAFDLSPDNEVLVTASRALLLAQWAWQEGSVTRLWKAIHTAPVATMAFDPTSTLLATGGCDGAVRVWDIVRHYGTHHFRGSPGVVHLVAFHPDPTRLLLFSSATDAAIRVWSLQDRSCLAVLTAHYSAVTSLAFSADGHTMLSSGRDKICIIWDLQSCQATRTVPVFESVEAAVLLPEEPVSQLGVKSPGLYFLTAGDQGTLRVWEAASGQCVYTQAQPPGPGQELTHCTLAHTAGVVLTATADHNLLLYEARSLRLQKQFAGYSEEVLDVRFLGPEDSHVVVASNSPCLKVFELQTSACQILHGHTDIVLALDVFRKGWLFASCAKDQSVRIWRMNKAGQVMCVAQGSGHTHSVGTVCCSRLKESFLVTGSQDCTVKLWPLPKALLSKNTAPDNGPILLQAQTTQRCHDKDINSVAIAPNDKLLATGSQDRTAKLWALPQCQLLGVFSGHRRGLWCVQFSPMDQVLATASADGTIKLWALQDFSCLKTFEGHDASVLKVAFVSRGTQLLSSGSDGLVKLWTIKNNECVRTLDAHEDKVWGLHCSRLDDHALTGASDSRVILWKDVTEAEQAEEQARQEEQVVRQQELDNLLHEKRYLRALGLAISLDRPHTVLTVIQAIRRDPEACEKLEATMLRLRRDQKEALLRFCVTWNTNSRHCHEAQAVLGVLLRREAPEELLAYEGVRAALEALLPYTERHFQRLSRTLQAAAFLDFLWHNMKLPVPAAAPTPWETHKGALP

SEQ ID NO: 2106 - DNA, 3355 bp, Homo sapien
acatacttcttcctccttcggaagggctggtaacttgttgagcggacggaacggcggcggcggcggcaccatccaggcgggcaccatgggcacgtccgcgctctgggcgctctggctgctgctcgcgctgtgctgggcgccccgggagagcggcgccaccggaaccgggagaaaagccaaatgtgaaccctcccaattccagtgcacaaatggtcgctgtattacgctgttgtggaaatgtgatggggatgaagactgtgttgacggcagtgatgaaaagaactgtgtaaagaagacgtgtgctgaatctgacttcgtgtgcaacaatggccagtgtgttcccagccgatggaagtgtgatggagatcctgactgcgaagatggttcagatgaaagcccagaacagtgccatatgagaacatgccgcatacatgaaatcagctgtggcgcccattctactcagtgtatcccagtgtcctggagatgtgatggtgaaaatgattgtgacagtggagaagatgaagaaaactgtggcaatataacatgtagtcccgacgagttcacctgctccagtggccgctgcatctccaggaactttgtttgcaatggccaggatgactgcagcgatggcagtgatgagctggactgtgccccgccaacctgtggcgcccatgagttccagtgcagcacctcctcctgcatccccatcagctgggtatgcgacgatgatgcagactgctccgaccaatctgatgagtccctggagcagtgtggccgtcagccagtcatacacaccaagtgtccagccagcgaaatccagtgcggctctggcgagtgcatccataagaagtggcgatgtgatggggaccctgactgcaaggatggcagtgatgaggtcaactgtccctctcgaacttgccgacctgaccaatttgaatgtgaggatggcagctgcatccatggcagcaggcagtgtaatggtatccgagactgtgtcgatggttccgatgaagtcaactgcaaaaatgtcaatcagtgcttgggccctggaaaattcaagtgcagaagtggagaatgcatagatatcagcaaagtatgtaaccaggagcaggactgcagggactggagtgatgagcccctgaaagagtgtcatataaacgaatgcttggtaaataatggtggatgttctcatatctgcaaagacctagttataggctacgagtgtgactgtgcagctgggtttgaactgatagataggaaaacctgtggagatattgatgaatgccaaaatccaggaatctgcagtcaaatttgtatcaacttaaaaggcggttacaagtgtgaatgtagtcgtggctatcaaatggatcttgctactggcgtgtgcaaggcagtaggcaaagagccaagtctgatcttcactaatcgaagagacatcaggaagattggcttagagaggaaagaatatatccaactagttgaacagctaagaaacactgtggctctcgatgctgacattgctgcccagaaactattctgggccgatctaagccaaaaggctatcttcagtgcctcaattgatgacaaggttggtagacatgttaaaatgatcgacaatgtctataatcctgcagccattgctgttgattgggtgtacaagaccatctactggactgatgcggcttctaagactatttcagtagctaccctagatggaaccaagaggaagttcctgtttaactctgacttgcgagagcctgcctccatagctgtggacccactgtctggctttgtttactggtcagactggggtgaaccagctaaaatagaaaaagcaggaatgaatggattcgatagacgtccactggtgacagcggatatccagtggcctaacggaattacacttgaccttataaaaagtcgcctctattggcttgattctaagttgcacatgttatccagcgtggacttgaatggccaagatcgtaggatagtactaaagtctctggagttcctagctcatcctcttgcactaacaatatttgaggatcgtgtctactggatagatggggaaaatgaagcagtctatggtgccaataaattcactggatcagagctagccactctagtcaacaacctgaatgatgcccaagacatcattgtctatcatgaacttgtacagccatcaggtaaaaattggtgtgaagaagacatggagaatggaggatgtgaatacctatgcctgccagcaccacaaattaatgatcactctccaaaatatacctgttcctgtcccagtgggtacaatgtagaggaaaatggccgagactgtcaaagtactgcaactacwgtgacttacagtgagacaaaagatacgaacacaacagaaatttcagcaactagtggactagttcctggagggatcaatgtgaccacagcagtatcagaggtcagtgttcccccaaaagggacttctgccgcatgggccattcttcctctcttgctcttagtgatggcagcagtaggtggctacttgatgtggcggaattggcaacacaagaacatgaaaagcatgaactttgacaatcctgtgtacttgaaaaccactgaagaggacctctccatagacattggtagacacagtgcttctgttggacacacgtacccagcaatatcagttgtaagcacagatgatgatctagcttgacttctgtgacaaatgttgacctttgaggtctaaacaaataatacccccgtcggaatggtaaccgagccagcagctgaagtctctttttcttcctctcggctggaagaacatcaagatacctttgcgtggatcaagcttgtgtacttgaccgtttttatattacttttgtaaatattcttgtccacattctacttcagctttggatgtggttaccgagtatctgtaacccttgaatttctagacagtattgccacctctggccaaatatgcactttccctagaaagccatattccagcagtgaaacttgtgctatagtgtataccacctgtacatacattgtataggccatctgtaaatatcccagagaacaatcactattcttaagcactttgaaaatatttctatgtaaattattgtaaactttttcaatggttgggacaatggcaataggacaaaacgggttactaagatgaaattgccaaaaaaatttataaactaattttgtacgtatgaatgatatctttgacctcaatggaggtttgcaaagactgagtgttcaaactactgtacatttttttcaagtgctaaaaaaattaaaccagcagcttaaaaaaaaaaaaaaaaaaaaaaaaaaaaaaaaaaaaaaa

SEQ ID NO: 2107 - protein, 873 aa, Homo sapien
MGTSALWALWLLLALCWAPRESGATGTGRKAKCEPSQFQCTNGRCITLLWKCDGDEDCVDGSDEKNCVKKTCAESDFVCNNGQCVPSRWKCDGDPDCEDGSDESPEQCHMRTCRIHEISCGAHSTQCIPVSWRCDGENDCDSGEDEENCGNITCSPDEFTCSSGRCISRNFVCNGQDDCSDGSDELDCAPPTCGAHEFQCSTSSCIPISWVCDDDADCSDQSDESLEQCGRQPVIHTKCPASEIQCGSGECIHKKWRCDGDPDCKDGSDEVNCPSRTCRPDQFECEDGSCIHGSRQCNGIRDCVDGSDEVNCKNVNQCLGPGKFKCRSGECIDISKVCNQEQDCRDWSDEPLKECHINECLVNNGGCSHICKDLVIGYECDCAAGFELIDRKTCGDIDECQNPGICSQICINLKGGYKCECSRGYQMDLATGVCKAVGKEPSLIFTNRRDIRKIGLERKEYIQLVEQLRNTVALDADIAAQKLFWADLSQKAIFSASIDDKVGRHVKMIDNVYNPAAIAVDWVYKTIYWTDAASKTISVATLDGTKRKFLFNSDLREPASIAVDPLSGFVYWSDWGEPAKIEKAGMNGFDRRPLVTADIQWPNGITLDLIKSRLYWLDSKLHMLSSVDLNGQDRRIVLKSLEFLAHPLALTIFEDRVYWIDGENEAVYGANKFTGSELATLVNNLNDAQDIIVYHELVQPSGKNWCEEDMENGGCEYLCLPAPQINDHSPKYTCSCPSGYNVEENGRDCQSTATTVTYSETKDTNTTEISATSGLVPGGINVTTAVSEVSVPPKGTSAAWAILPLLLLVMAAVGGYLMWRNWQHKNMKSMNFDNPVYLKTTEEDLSIDIGRHSASVGHTYPAISVVSTDDDLA

SEQ ID NO: 2108 - DNA, 929 bp, Homo sapien
  Unsure 58: Unknown base
ttttctgaggtacatcagatccatcaggtccgagctgtgttgactaccactacttttnccttcgtctcaattatgtcttggaaaaaggctttgcggatccccggaggccttcgggcagcaactgttaccttgatgctggcgatgctgagcaccccaatggctgagggcagagactctcccgaggatttcgtgtaccagtttaaggccatgtgctacatcaccaacgggacggagcgcttgcgttatgtgaccagatacatctataaccgagaggagtacgcacgcttcgacagcgacgtggaggtgtaccgggcggtgacgccgctggggccgcctgacgccgagtactggaacagccagaaggaagtcctggagaggacccgggcggagttggacacggtgtgcagacacaactaccagttggagctccgcacgaccttgcagcggcgagtggagcccacagtgaccatctccccatccaggacagaggccctcaaccaccacaacctgctggtctgctcagtgacagatttctatccagcccagatcaaagtccggtggtttcggaatgaccaggaggagacaaccggcgttgtgtccaccccccttattaggaacggtgactggaccttccagatcctggtgatgctggaaatgactccccagcatggagacgtctacacctgccacgtggagcaccccagcctccagaaccccatcaccgtggagtggcgggctcagtctgaatctgcccagagcaagatgctgagtggcattggaggcttcgtgctggggctcatcttcctcgggctgggccttattatccatcacaggagtcagaaagggctcctgcactgactcctgagactattttaactgggattggttatcacttttctgtaacgcctgcttgtccctgcccagaattc

SEQ ID NO: 2109 - protein, 261 aa, Homo sapien [sequence omitted]

SEQ ID NO: 2110 - DNA, 2776 bp, Homo sapien
gcggccgcgtcgaccggaggtgcctgtttacccgcgccggactcaccgccgccgccgccgcgggatccgagtgcgggcgcgggcgcgggcgctcccggcgagccacggtggtgctggctagagtgtttacgtttggacccaagcttaacttttccaatgtggaatcctgggccttcattggttccgatgtcataggaatctacgctagagggcttcctgtgtgccgggcactgtggtttttggaagaagctgaccgcctgaaaagaaattataaaacatgaaaatcgctttgaggtgaccaagtccagaggcccctaactcctcccaagctggatctggggtgtaagaactgtgacttcagatcatccaatggcagaccagagaatggacatttcttcaaccatcagtgatttcatgtccccgggccccaccgacctgctttccagctctcttggtaccagtggtgtggattgcaaccgcaaacggaaaggcagctccactgactaccaagaaagcatggacacagacaaagatgaccctcatggaaggttagaatatacagaacaccaaggaaggataaaaaatgcaagggaagctcacagtcagattgaaaagcggcgtcgggataaaatgaacagttttatagatgaattggcttctttggtaccaacatgcaacgcaatgtccaggaaattagataaacttactgtgctaaggatggctgttcagcacatgaaaacattaagaggtgccaccaatccatacacagaagcaaactacaaaccaacttttctatcagacgatgaattgaaacacctcattctcagggcagcagatggatttttgtttgtcgtaggatgtgaccgagggaagatactctttgtctcagagtctgtcttcaagatcctcaactacagccagaatgatctgattggtcagagtttgtttgactacctgcatcctaaagatattgccaaagtcaaggagcagctctcctcctctgacaccgcaccccgggagcggctcatagatgcaaaaactggacttccagttaaaacagatataacccctgggccatctcgattatgttctggagcacgacgttctttcttctgtaggatgaagtgtaacaggccttcagtaaaggttgaagacaaggacttcccctctacctgctcaaagaaaaaagcagatcgaaaaagcttctgcacaatccacagcacaggctatttgaaaagctggccacccacaaagatggggctggatgaagacaacgaaccagacaatgaggggtgtaacctcagctgcctcgtcgcaattggacgactgcattctcatgtagttccacaaccagtgaacggggaaatcagggtgaaatctatggaatatgtttctcggcacgcgatagatggaaagtttgtttttgtagaccagagggcaacagctattttggcatatttaccacaagaacttctaggcacatcgtgttatgaatattttcaccaagatgacataggacatcttgcagaatgtcataggcaagttttacagacgagagaaaaaattacaactaattgctataaatttaaaatcaaagatggttcttttatcacactacggagtcgatggttcagtttcatgaacccttggaccaaggaagtagaatatattgtctcaactaacactgttgttttagccaacgtcctggaaggcggggacccaaccttcccacagctcacagcatccccccacagcatggacagcatgctgccctctggagaaggtggcccaaagaggacccaccccactgttccagggattccagggggaacccgggctggggcaggaaaaataggccgaatgattgctgaggaaatcatggaaatccacaggataagagggtcatcgccttctagctgtggctccagcccattgaacatcacgagtacgcctccccctgatgcctcttctccaggaggcaagaagattttaaatggagggactccagacattccttccagtggcctactatcaggccaggctcaggagaacccaggttatccatattctgatagttcttctattcttggtgagaacccccacataggtatagacatgattgacaacgaccaaggatcaagtagtcccagtaatgatgaggcagcaatggctgtcatcatgagcctcttggaagcagatgctggactgggtggccctgttgactttagtgacttgccatggccgctgtaaacactacatgttgctttggcaacagctatagtatcaaagtgcattactggtggagttttacagtctgtgaagcttactggataaggagagaatagcttttatgtactgacttcataaaagccatctcagagccattgatacaagtcaatcttactatatgtaacttcagacaaagtggaactaagcctgctccagtgtttcctcatcattgattattgggctagctgtggatagcttgcattaattgtatattttggattctgtttgtgttgaattttttaatcattgtgcacagaagcatcattggtagcttttatatgcaaatggtcatttcagatgtatggtgtttttacactacaaagaagtcccccatgtggatatttcttatactaattgtatcataaagccgtttattcttccttgtaagaatcctttactataaatatgggttaaagtataatgtactagacagttaaatatttttaataaatgtttcccttgttctataaaaaaaaaaaaaaaaaaa

SEQ ID NO: 2111 - protein, 626 aa, Homo sapien
MADQRMDISSTISDFMSPGPTDLLSSSLGTSGVDCNRKRKGSSTDYQESMDTDKDDPHGRLEYTEHQGRIKNAREAHSQIEKRRRDKMNSFIDELASLVPTCNAMSRKLDKLTVLRMAVQHMKTLRGATNPYTEANYKPTFLSDDELKHLILRAADGFLFVVGCDRGKILFVSESVFKILNYSQNDLIGQSLFDYLHPKDIAKVKEQLSSSDTAPRERLIDAKTGLPVKTDITPGPSRLCSGARRSFFCRMKCNRPSVKVEDKDFPSTCSKKKADRKSFCTIHSTGYLKSWPPTKMGLDEDNEPDNEGCNLSCLVAIGRLHSHVVPQPVNGEIRVKSMEYVSRHAIDGKFVFVDQRATAILAYLPQELLGTSCYEYFHQDDIGHLAECHRQVLQTREKITTNCYKFKIKDGSFITLRSRWFSFMNPWTKEVEYIVSTNTVVLANVLEGGDPTFPQLTASPHSMDSMLPSGEGGPKRTHPTVPGIPGGTRAGAGKIGRMIAEEIMEIHRIRGSSPSSCGSSPLNITSTPPPDASSPGGKKILNGGTPDIPSSGLLSGQAQENPGYPYSDSSSILGENPHIGIDMIDNDQGSSSPSNDEAAMAVIMSLLEADAGLGGPVDFSDLPWPL

SEQ ID NO: 2112 - DNA, 1284 bp, Homo sapien
ggctccttcgggaaacccagccccgtcaccgggctccgagcggctcgcaggcgagcgacagcggcctcagccccggcagcgcccagcggcggctgcggaaagcggagggagtccgacgcgggcgcgggcggggagcgtgcgtccgttcgcacaggcagcgggaggaggggcggcgcgaaccatggccggggacagcgagcagaccctgcagaaccaccagcagcccaacggcggcgagcccttccttataggcgtcagcgggggaacagctagcggcaagtcttccgtgtgtgctaagatcgtgcagctcctggggcagaatgaggtggactatcgccagaagcaggtggtcatcctgagccaggatagcttctaccgtgtccttacctcggagcagaaggccaaagccctgaagggccagttcaactttgaccacccggatgcctttgacaatgaactcattctcaaaacactcaaagaaatcactgaagggaaaacagtccagatccccgtgtatgactttgtctcccattcccggaaggaggagacagttactgtctatcccgcagacgtggtgctctttgaagggatcctggccttctactcccaggaggtacgagacctgttccagatgaagctttttgtggatacagatgcggacacccggctctcacgcagagtattaagggacatcagcgagagaggcagggatcttgagcagattttatctcagtacattacgttcgtcaagcctgcctttgaggaattctgcttgccaacaaagaagtatgctgatgtgatcatccctagaggtgcagataatctggtggccatcaacctcatcgtgcagcacatccaggacatcctgaatggagggccctccaaacggcagaccaatggctgtctcaacggctacaccccttcacgcaagaggcaggcatcggagtccagcagcaggccgcattgacccgtctccatcggaccccagcccctatctccaagagacagaggaggggtcaggaggcactgctcatctgtacatactgtttcctatgacattactgtatttaagaaaacaccatggagatgaaatgcctttgattttttttttctttttgtactttggaacgacaaaatgaaacagaacttgaccctgagcttaaataacaaaactgtgccaactactactggtgatgcctaattatgaatccaacgtgtaaccagttataaatacatatatatataaaaaaaaaaaaaaaaaaaaaaaaaaaaaaaaaaaaaaaa

SEQ ID NO: 2113 - protein, 261 aa, Homo sapien
MAGDSEQTLQNHQQPNGGEPFLIGVSGGTASGKSSVCAKIVQLLGQNEVDYRQKQVVILSQDSFYRVLTSEQKAKALKGQFNFDHPDAFDNELILKTLKEITEGKTVQIPVYDFVSHSRKEETVTVYPADVVLFEGILAFYSQEVRDLFQMKLFVDTDADTRLSRRVLRDISERGRDLEQILSQYITFVKPAFEEFCLPTKKYADVIIPRGADNLVAINLIVQHIQDILNGGPSKRQTNGCLNGYTPSRKRQASESSSRPH

SEQ ID NO: 2114 - DNA, 5471 bp, Homo sapien
ccggggtcccctttcacccaagtgagccagctcaggctgtctgcaaagccggaggtgcgggcagctccgggcattgcattggtgcggaggcttttatatgccagagaaccctgagtgtgcccctgacatgacaaggagccgtcgtcgttaggactaccgaccagactcccggaaatcatgttggtaggatcccagtctttttcgcctggagggcccaatgggatcattagaagccagtcctttgcgggtttcagcggcctccaggaaaggcgatccaggtgtaactccttcattgaaaattcctccgctctcaagaagcctcaggccaaactgaagaaaatgcacaatttaggccacaaaaacaacaatccccccaaagagcctcagcctaaaagggtggaagaagtctacagggccttgaaaaatggacttgatgaatatctggaggttcaccagacggagctggacaagttgacagctcagttaaaagatatgaaaagaaactctcgcctgggtgtactgtatgacctagacaagcaaattaaaacaattgaaagatacatgagacgcctggagtttcatataagtaaggtagatgaactctatgaagcttattgtatccagcgacgcctccaggatggtgccagcaaaatgaagcaagccttcgcaacatcccctgccagcaaagctgcccgggagagtctgacagagatcaatcggagcttcaaggagtacacagagaatatgtgcaccattgaagtggagctagagaatctgctgggagaattctccatcaagatgaaaggtctggctggctttgcacgcctctgtcctggagatcaatatgaaattttcatgaagtatggccggcagcggtggaaactgaaaggcaaaatagaagtaaatggcaagcagagctgggatggagaagaaacagtttttctgcccctgatagttgggttcatctccatcaaggtcacggagctcaaagggctagcaactcacatcctggtaggtagcgtgacctgtgagaccaaagagctgtttgcagcccgacctcaggtagtggctgtcgacatcaatgaccttggtaccatcaaactgaacctggaaatcacctggtatccatttgacatggaggacatgaccgcatcctcaggcgctgggaacaaggcagcagcccttcagaggagaatgtccatgtacagccagggtaccccggaaacgcccaccttcaaagaccactccttctttaggtggctgcatccttccccagacaagcccaggcggctgtctgtcttgagtgccttgcaagacactttctttgccaagctgcaccgcagccgctccttcagtgacctgccctccctcaggccgagtcccaaggccgtgctagagctctattcaaatctacctgatgacatctttgaaaatggaaaggcagccgaggagaaaatgccactgtcgctcagcttcagtgacctgcccaacggggactgcgccctcacctcccactcaacaggctccccttccaactcaacaaatccagaaattaccatcacccctgcggagtttaacctcagcagcttggcctcccagaatgagggtatggatgacaccagctcagcatcttccaggaactccctgggagaaggccaagagccaaagtcacacctgaaggaggaagacccagaggagcccagaaaacctgcctcggccccatctgaggcttgccgccgacagtcctcaggtgctggggctgagcacctgttccttgagaatgatgttgcagaagcacttctgcaagagtctgaggaggcctctgagctcaagcctgtggaactggacacttcggaaggaaacatcacaaagcagctggtcaagaggctcacatctgcagaggtgccaatggccacagacaggctgctctctgagggttctgttggtggagaatctgaaggctgcagatcctttctagatggaagcttagaggatgcttttaatgggcttttacttgcattagaaccacataaagagcagtataaagagtttcaggatctgaaccaagaagtcatgaatttggatgatattctaaaatgcaagccagcagtaagccgcagcaggtcttccagtttaagtctcacagttgaaagtgctttagaaagctttgatttcctgaacacctctgattttgacgaggaggaggatggtgatgaggtttgtaatgttggcggaggtgctgactcagtattttcagacactgagactgagaaacacagttacaggtcggttcacccagaagccagggggcatctcagtgaagcgctcactgaagacacaggagttgggaccagtgtggcaggaagtcctctcccactgaccacaggcaacgagagcctggacatcaccatcgtcaggcacctccagtactgcacccaactcgtgcagcaaattgttttctcaagcaaaaccccatttgtggcaagaagtctcttagagaagctttctaggcagatccaagtgatggagaaactcgcagctgtcagtgatgagaacataggaaatatcagttctgttgtggaagccataccagaatttcacaaaaagctgtctttgctgtcattctggaccaagtgctgcagccctgttggtgtctaccacagcccagcggacagagtgatgaagcagctggaggccagctttgccagaactgtcaacaaagaatatccaggacttgcagacccagtgtttcgaaccctggtgtcccaaattctggaccaggctgagcctctgctttcctccagcctgtcctcggaagtcgtcactgttttccagtattacagttacttcaccagccacggcgtcagtgacctggagagttacctgagccagctggccaggcaagtttccatggttcagactctgcaatcactaagagatgaaaaactgctacaaaccatgagtgaccttgctcccagcaacctcctggcccagcaggaagtactcaggactctggctctgctattaaccagagaggacaacgaagttagcgaggctgtgacgctttacttggcagcagcctccaaaaatcagcatttcagggaaaaggccttgctctattactgtgaagcactaacaaagacaaacctccagctccagaaagcagcttgcctggctctgaaaatccttgaggctactgaaagcattaaaatgctggtgacattgtgtcaatctgatactgaagaaatcagaaatgtggcctcagaaaccctcttgtctctgggagaagatgggcggctggcatatgaacaattggacaaatttcctcgagactgtgttaaagtcggaggtcgtcatggaactgaagttgccacagccttttaattacagattaactgcctaacagctgtcttaatatctggcccttttcatcaggatggtgctgtggtttgggctggaaattgtttagagcctgagagacacgacaactgaaataaaaatgtaggccaggtgcagtggctcatgcctgtaatcccagtactttgggaggccaacgcaggagaattgcttaagcccaggaggttcaagaccaacctgggcaacatagcaaggccctgtctctacaaaaaaaatagtttaattagtcgggcgtggtggcatgcacctgtagtcccagctacttgggaggctaaggtgggaggattgcttgagcccagaagattcaggctgcagtgagccataattgccccactgcactccagactgggtgacagagcaaaaccctgtctcaaaaaacaaaacaacaacaacaactaaaaaaacatgttatagaaagaattcagagtctcgtttcacagtacctatctacttttcctttggccaatatagaatagggctatggtataattcaaatagattacatcgtcgattgtgtctaataatactcagtgaaagagtccatcttatcttaatatgtatgaaatttaaaaatagccatctttgtacttttttgcaagtttctctataagcttgaaatagtcatgtgatacttcgacaaacatcatatgccttgcagtttttctcggtcgtgttctcagggttgagtagtccccttagctacctaactttactttcaatacaaagcacaaaaaagaatacttcaaataaaagtttgcctgcagaacctggcaaaatgacccattatgagagtttagatgttttaattttatgtgctcccagctactctggagtctgaggtgggaggatcacttgaggcagaggttgcagtaagctgagattacactactgcactccagcccatgtgacagaggaatgagagccagtctcaaaaaaaaaaaacaaaaaactcccataatttattttgtttcttttccccatcctgaaaattcccaaatcatgtttccattatggaaaaatgataagtaaatgactaagaactacattaagattatgcctatacacttaaacaaaaaactcaaagcttatgctttttttttttaattaatgagagctattttttatgatattcttaccataggggtgttttgctgctaagacaaatcaaaaccaaaagctgtagattcacaaacctgtgatgctctttgaggtggaggaacctagaagtcagagaaatcctaatggagtaggagtggaggaacatttaaagtggtccctccttctgtaaaaatgaccgtgggattagaaagaaggacatcctgaggggtggttactgcccccagggaaatcactcactggtaggattccctggccaaatagttcaaacatcaggtcccattattgcttcagtatcagagatgcaagttcattaagcaaagtacaagaccattcagtagctcttattaaaatatcttttcttcctctaaagagtgtacaaggtggggtatgccaaggtatcaaaacaatatatgtgagtgtaatttaaactgtggaatatcaactgtactatggacgtgtttgtatcatttagatgtcattttaaatatttacattttagcaagacttttaaaaaggactcatttcatttcaaagtgcaaattgtttgccaggcttctggcaaatggttctttcaactgtgaacttatagtgtacatatctgtatatttataaatattatatatattcatacatccttcagtttaaaggtacattgtacagtctgtagttaggaggtatagcctatagcttatgttaaatggttgaaatggttctttttatagaaagtcaaacacagatgttacaggattttgtgtttggtttgtcatttttttattttttattttgactattgcatgagtaattaattccagatcttttgtattcacttctgtattttatgtttggttgaggggtgcttttagttgtgtggcatttgtattcattgatctttcagtcatgtaagttaaaataaaaattatttttgaattactagc

SEQ ID NO: 2115 - protein, 1068 aa, Homo sapien
MLVGSQSFSPGGPNGIIRSQSFAGFSGLQERRSRCNSFIENSSALKKPQAKLKKMHNLGHKNNNPPKEPQPKRVEEVYRALKNGLDEYLEVHQTELDKLTAQLKDMKRNSRLGVLYDLDKQIKTIERYMRRLEFHISKVDELYEAYCIQRRLQDGASKMKQAFATSPASKAARESLTEINRSFKEYTENMCTIEVELENLLGEFSIKMKGLAGFARLCPGDQYEIFMKYGRQRWKLKGKIEVNGKQSWDGEETVFLPLIVGFISIKVTELKGLATHILVGSVTCETKELFAARPQVVAVDINDLGTIKLNLEITWYPFDMEDMTASSGAGNKAAALQRRMSMYSQGTPETPTFKDHSFFRWLHPSPDKPRRLSVLSALQDTFFAKLHRSRSFSDLPSLRPSPKAVLELYSNLPDDIFENGKAAEEKMPLSLSFSDLPNGDCALTSHSTGSPSNSTNPEITITPAEFNLSSLASQNEGMDDTSSASSRNSLGEGQEPKSHLKEEDPEEPRKPASAPSEACRRQSSGAGAEHLFLENDVAEALLQESEEASELKPVELDTSEGNITKQLVKRLTSAEVPMATDRLLSEGSVGGESEGCRSFLDGSLEDAFNGLLLALEPHKEQYKEFQDLNQEVMNLDDILKCKPAVSRSRSSSLSLTVESALESFDFLNTSDFDEEEDGDEVCNVGGGADSVFSDTETEKHSYRSVHPEARGHLSEALTEDTGVGTSVAGSPLPLTTGNESLDITIVRHLQYCTQLVQQIVFSSKTPFVARSLLEKLSRQIQVMEKLAAVSDENIGNISSVVEAIPEFHKKLSLLSFWTKCCSPVGVYHSPADRVMKQLEASFARTVNKEYPGLADPVFRTLVSQILDQAEPLLSSSLSSEVVTVFQYYSYFTSHGVSDLESYLSQLARQVSMVQTLQSLRDEKLLQTMSDLAPSNLLAQQEVLRTLALLLTREDNEVSEAVTLYLAAASKNQHFREKALLYYCEALTKTNLQLQKAACLALKILEATESIKMLVTLCQSDTEEIRNVASETLLSLGEDGRLAYEQLDKFPRDCVKVGGRHGTEVATAF

SEQ ID NO: 2116 - DNA, 930 bp, Homo sapien
attttttaaattattaggtgtgggcagaagaaaaagctagtgatcaacagtggcaatggagctgtggaggacagaaagccaagtggactcaacggagaggccagcaagtctcaggaaatggtgcatttggtgaacaaggagtcgtcagaaactccagaccagtttatgacagctgatgagacaaggaacctgcagaatgtggacatgaagattggggtgtaacacctacaccattatcttggaaagaaacaaccgttggaaacataaccattacagggagctgggacacttaacagatgcaatgtgctactgattgtttcattgcgaatcttttttagcataaaattttctactctttttgttttttgtgttttgttctttaaagtcaggtccaatttgtaaaaacagcattgctttctgaaattagggcccaattaataatcagcaagaatttgatcgttccagttcccacttggaggcctttcatccctcgggtgtgctatggatggcttctaacaaaaactacacatatgtattcctgatcgccaacctttcccccaccagctaaggacatttcccagggttaatagggcctggtccctgggaggaaatttgaatgggtccattttgcccttccatagcctaatccctgggcattgttttccactgaggttgggggttggggtgtactagttacatatcttcaacagaccccctctagaaatttttcagatgcttctgggagacacccaaagggtgaagctatttatctgtagtaaactatttatctgtgtttttgaaatattaaaccctggatcagtcctttgatcagtataattttttaaagttactttgtcagaggcacaaaagggtttaaactgattcataataaatatctgtacttcttcgatcttcaccttttgtgctgtg

SEQ ID NO: 2117 - DNA, 3394 bp, Homo sapien
agcgggtcggtgtgacaactgatcgggtgaacgatgcaccactaaccaccatggaaacaaggaaaaataaagcaagctcacaggatctctcttcactggattgagagcctcagcctgccgactgagaaaaagagttccaggaaaaagaaggaatcccggctgcagcctcctgccttcctttatattttaaaatagagagataagattgcgtgcatgtgtgcatatctatagtatatattttgtacactttgttacacagacacacaaatgcacctatttataccgggcaagaacacaaccatgtgattatctcaaccaaggaactgaggaatccagcacgcaaggacatcggaggtgggctagcactgaaactgcttttcaagcatcatgctgctattcctgcaaatactgaagaagcatgggatttaaatattttacttctaaataaatgaattactcaatctcctatgaccatctatacatactccaccttcaaaaagtacatcaatattatatcattaaggaaatagtaaccttctcttctccaatatgcatgacatttttggacaatgcaattgtggcactggcacttgtttcagtgaagaaaaactttgtggttctatggcattcatcatttgacaaatgcaagcatcttccttatcaatcagctcctattgaacttactagcactgactgtggaatccttaagggcccattacatttctgaagaagaaagctaagatgaaggacatgccactccgaattcatgtgctacttggcctagctatcactacactagtacaagctgtagataaaaaagtggattgtccacggttatgtacgtgtgaaatcaggccttggtttacacccagatccatttatatggaagcatctacagtggattgtaatgatttaggtcttttaactttcccagccagattgccagctaacacacagattcttctcctacagactaacaatattgcaaaaattgaatactccacagactttccagtaaaccttactagcctggatttatctcaaaacaatttatcttcagtcaccaatattaatgtaaaaaagatgcctcagctcctttctgtgtacctagaggaaaacaaacttactgaactgcctgaaaaatgtctgtccgaactgagcaacttacaagaactctatattaatcacaacttgctttctacaatttcacctggagcctttattggcctacataatcttcttcgacttcatctcaattcaaatagattgcagatgatcaacagtaagtggtttgatgctcttccaaatctagagattctgatgattggggaaaatccaattatcagaatcaaagacatgaactttaagcctcttatcaatcttcgcagcctggttatagctggtataaacctcacagaaataccagataacgccttggttggactggaaaacttagaaagcatctctttttacgataacaggcttattaaagtaccccatgttgctcttcaaaaagttgtaaatctcaaatttttggatctaaataaaaatcctattaatagaatacgaaggggtgattttagcaatatgctacacttaaaagagttggggataaataatatgcctgagctgatttccatcgatagtcttgctgtggataacctgccagatttaagaaaaatagaagctactaacaaccctagattgtcttacattcaccccaatgcatttttcagactccccaagctggaatcactcatgctgaacagcaatgctctcagtgccctgtaccatggtaccattgagtctctgccaaacctcaaggaaatcagcatacacagtaaccccatcaggtgtgactgtgtcatccgttggatgaacatgaacaaaaccaacattcgattcatggagccagattcactgttttgcgtggacccacctgaattccaaggtcagaatgttcggcaagtgcatttcagggacatgatggaaatttgtctccctcttatagctcctgagagctttccttctaatctaaatgtagaagctgggagctatgtttcctttcactgtagagctactgcagaaccacagcctgaaatctactggataacaccttctggtcaaaaactcttgcctaataccctgacagacaagttctatgtccattctgagggaacactagatataaatggcgtaactcccaaagaagggggtttatatacttgtatagcaactaacctagttggcgctgacttgaagtctgttatgatcaaagtggatggatcttttccacaagataacaatggctctttgaatattaaaataagagatattcatgccaattcagttttggtgtcctggaaagcaagttctaaaattctcaaatctagtgttaaatggacagcctttgtcaagactgaaaattctcatgctgcgcaaagtgctcgaataccatctgatgtcaaggtatataatcttactcatctgaatccatcaactgagtataaaatttgtattgatattcccaccatctatcagaaaaacagaaaaaaatgtgtaaatgtcaccaccaaaggtttgcaccctgatcaaaaagagtatgaaaagaataataccacaacacttatggcctgtcttggaggccttctggggattattggtgtgatatgtcttatcagctgcctctctccagaaatgaactgtgatggtggacacagctatgtgaggaattacttacagaaaccaacctttgcattaggtgagctttatcctcctctgataaatctctgggaagcaggaaaagaaaaaagtacatcactgaaagtaaaagcaactgttataggtttaccaacaaatatgtcctaaaaaccaccaaggaaacctactccaaaaatgaacaaaaaaaaaaaaagcgaaagactgcagttgtgctaaaaacaaaacaaaacaaacaaacaaacaaaaaagtaaaaaaagattactttcgagagagaagtttaagcttcaccaatgctgctcctgaccaatggaaatatgtacaacttcagcattttaagtaactggcttcaaggggtactgtggcaaccaaataaaataactccattttctaaaactttcatgtaacttttatgtctggactacagttcaagtggacaaaaacatttctgtattttttttaagtaaataagagtagttgaactgagcaatacctcctcctgtgttgtattacacatattagccacgagtttttgcagtgaccagataaacttgaattgacacgtggtgtaataaaatggacaaattctgtagagtagacacagtgagtatgtggacctcttttataaggaaaaatacattttggattaaaatcaaaaaaaaaaaaaaaaaaaaa

SEQ ID NO: 2118 - protein, 708 aa, Homo sapien
MKDMPLRIHVLLGLAITTLVQAVDKKVDCPRLCTCEIRPWFTPRSIYMEASTVDCNDLGLLTFPARLPANTQILLLQTNNIAKIEYSTDFPVNLTSLDLSQNNLSSVTNINVKKMPQLLSVYLEENKLTELPEKCLSELSNLQELYINHNLLSTISPGAFIGLHNLLRLHLNSNRLQMINSKWFDALPNLEILMIGENPIIRIKDMNFKPLINLRSLVIAGINLTEIPDNALVGLENLESISFYDNRLIKVPHVALQKVVNLKFLDLNKNPINRIRRGDFSNMLHLKELGINNMPELISIDSLAVDNLPDLRKIEATNNPRLSYIHPNAFFRLPKLESLMLNSNALSALYHGTIESLPNLKEISIHSNPIRCDCVIRWMNMNKTNIRFMEPDSLFCVDPPEFQGQNVRQVHFRDMMEICLPLIAPESFPSNLNVEAGSYVSFHCRATAEPQPEIYWITPSGQKLLPNTLTDKFYVHSEGTLDINGVTPKEGGLYTCIATNLVGADLKSVMIKVDGSFPQDNNGSLNIKIRDIHANSVLVSWKASSKILKSSVKWTAFVKTENSHAAQSARIPSDVKVYNLTHLNPSTEYKICIDIPTIYQKNRKKCVNVTTKGLHPDQKEYEKNNTTTLMACLGGLLGIIGVICLISCLSPEMNCDGGHSYVRNYLQKPTFALGELYPPLINLWEAGKEKSTSLKVKATVIGLPTNMS

SEQ ID NO: 2119 - DNA, 2961 bp, Homo sapien
acatactccaccttcaaaaagtacatcaatattatatcattaaggaaatagtaaccttctcttctccaatatgcatgacatttttggacaatgcaattgtggcactggcacttatttcagtgaagaaaaactttgtggttctatggcattcatcatttgacaaatgcaagcatcttccttatcaatcagctcctattgaacttactagcactgactgtggaatccttaagggcccattacatttctgaagaagaaagctaagatgaaggacatgccactccgaattcatgtgctacttggcctagctatcactacactagtacaagctgtagataaaaaagtggattgtccacggttatgtacgtgtgaaatcaggccttggtttacacccagatccatttatatggaagcatctacagtggattgtaatgatttaggtcttttaactttcccagccagattgccagctaacacacagattcttctcctacagactaacaatattgcaaaaattgaatactccacagactttccagtaaaccttactggcctggatttatctcaaaacaatttatcttcagtcaccaatattaatgtaaaaaagatgcctcagctcctttctgtgtacctagaggaaaacaaacttactgaactgcctgaaaaatgtctgtccgaactgagcaacttacaagaactctatattaatcacaacttgctttctacaatttcacctggagcctttattggcctacataatcttcttcgacttcatctcaattcaaatagattgcagatgatcaacagtaagtggtttgatgctcttccaaatctagagattctgatgattggggaaaatccaattatcagaatcaaagacatgaactttaagcctcttatcaatcttcgcagcctggttatagctggtataaacctcacagaaataccagataacgccttggttggactggaaaacttagaaagcatctctttttacgataacaggcttattaaagtaccccatgttgctcttcaaaaagttgtaaatctcaaatttttggatctaaataaaaatcctattaatagaatacgaaggggtgattttagcaatatgctacacttaaaagagttggggataaataatatgcctgagctgatttccatcgatagtcttgctgtggataacctgccagatttaagaaaaatagaagctactaacaaccctagattgtcttacattcaccccaatgcatttttcagactccccaagctggaatcactcatgctgaacagcaatgctctcagtgccctgtaccatggtaccattgagtctctgccaaacctcaaggaaatcagcatacacagtaaccccatcaggtgtgactgtgtcatccgttggatgaacatgaacaaaaccaacattcgattcatggagccagattcactgttttgcgtggacccacctgaattccaaggtcagaatgttcggcaagtgcatttcagggacatgatggaaatttgtctccctcttatagctcctgagagctttccttctaatctaaatgtagaagctgggagctatgtttcctttcactgtagagctactgcagaaccacagcctgaaatctactggataacaccttctggtcaaaaactcttgcctaataccctgacagacaagttctatgtccattctgagggaacactagatataaatggcgtaactcccaaagaagggggtttatatacttgtatagcaactaacctagttggcgctgacttgaagtctgttatgatcaaagtggatggatcttttccacaagataacaatggctctttgaatattaaaataagagatattcaggccaattcagttttggtgtcctggaaagcaagttctaaaattctcaaatctagtgttaaatggacagcctttgtcaagactgaaaattctcatgctgcgcaaagtgctcgaataccatctgatgtcaaggtatataatcttactcatctgaatccatcaactgagtataaaatttgtattgatattcccaccatctatcagaaaaacagaaaaaaatgtgtaaatgtcaccaccaaaggtttgcaccctgatcaaaaagagtatgaaaagaataataccacaacacttatggcctgtcttggaggccttctggggattattggtgtgatatgtcttatcagctgcctctctccagaaatgaactgtgatggtggacacagctatgtgaggaattacttacagaaaccaacctttgcattaggtgagctttatcctcctctgataaatctctgggaagcaggaaaagaaaaaagtacatcactgaaagtaaaagcaactgttataggtttaccaacaaatatgtcctaaaaaccaccaaggaaacctactccaaaaatgaacaaaaaaaaaaaaaagcgaaagactgcagttgtgctaaaaacaaaacaaaacaaacaaacaaacaaaaaagtaaaaaaagattactttcgagagagaagtttaagcttcaccaatgctgctcctgaccaatggaaatatgtacaacttcagcattttaagtaactggcttcaaggggtactgtggcaaccaaataaaataactccattttctaaaactttcatgtaacttttatgtctggactacagttcaagtggacaaaaacatttctgtattttttttaagtaaataagagtagttgaactgagcaatacctcctcctgtgttgtattacacatattagccacgagtttttgcagtgaccagataaacttgaattgacacgtggtgtaataaaatggacaaattctgtagagtagacacagtgagtatgtggacctcttttataaggaaaaatacattttggattaaaatcaattgcttctgtcttgttttgtttctaaataaagaataatttctgggaaaaaaaaaaaaaaaaaaa

SEQ ID NO: 2120 - protein, 708 aa, Homo sapien
MKDMPLRIHVLLGLAITTLVQAVDKKVDCPRLCTCEIRPWFTPRSIYMEASTVDCNDLGLLTFPARLPANTQILLLQTNNIAKIEYSTDFPVNLTGLDLSQNNLSSVTNINVKKMPQLLSVYLEENKLTELPEKCLSELSNLQELYINHNLLSTISPGAFIGLHNLLRLHLNSNRLQMINSKWFDALPNLEILMIGENPIIRIKDMNFKPLINLRSLVIAGINLTEIPDNALVGLENLESISFYDNRLIKVPHVALQKVVNLKFLDLNKNPINRIRRGDFSNMLHLKELGINNMPELISIDSLAVDNLPDLRKIEATNNPRLSYIHPNAFFRLPKLESLMLNSNALSALYHGTIESLPNLKEISIHSNPIRCDCVIRWMNMNKTNIRFMEPDSLFCVDPPEFQGQNVRQVHFRDMMEICLPLIAPESFPSNLNVEAGSYVSFHCRATAEPQPEIYWITPSGQKLLPNTLTDKFYVHSEGTLDINGVTPKEGGLYTCIATNLVGADLKSVMIKVDGSFPQDNNGSLNIKIRDIQANSVLVSWKASSKILKSSVKWTAFVKTENSHAAQSARIPSDVKVYNLTHLNPSTEYKICIDIPTIYQKNRKKCVNVTTKGLHPDQKEYEKNNTTTLMACLGGLLGIIGVICLISCLSPEMNCDGGHSYVRNYLQKPTFALGELYPPLINLWEAGKEKSTSLKVKATVIGLPTNMS

SEQ ID NO: 2121 - DNA, 1283 bp, Homo sapien
cggacgcgtgggtgctgtgtgggataaacagtaatggcggaggctgcaactcccggaacaacagccacaacatcaggagcaggagcggcagcggcgacggcggcagcagcctcccccaccccgatccccacagtcaccgccccgtccctgggggcgggcggagggggcggcggcagcgacggcagcggcggcggctggactaaacaggtcacctgcaggtattttatgcatggggtttgtaaggaaggagacaactgtcgctactcgcatgacctctctgacagtccgtatagtgtagtgtgcaagtattttcagcgagggtactgtatttatggagaccgctgcagatatgaacatagcaagccattgaaacaggaagaagcaactgctacagagctaactacaaagtcatcccttgctgcttcctcaagtctctcatcgatagttggaccacttgttgaaatgaatacaggcgaagctgagtcaagaaattcaaactttgcaactgtaggagcaggttcagaggactgggtgaatgctattgagtttgttcctgggcaaccctactgtggccgtactgcgccttcctgcactgaagcacccctgcagggctcagtgaccaaggaagaatcagagaaagagcaaaccgccgtggagacaaagaagcagctgtgcccctatgctgcagtgggagaaagccaaccccagtgagcgccgcttcgggatcctctccaactgcaaccacacctactgtctcaagtgcattcgcaagtggaggagtgctaagcaatttgagagcaagatcataaagtgagactcctccccagtcttcatttgtgctttctcttttggggaagaatttagtaacttgtgccaactttcaaccagatggaccgcatttaaatgcatgcattttatcttgaaactgggatattctaatggggatttcttctttgtatttcagctagcttctaggttagttggtctatctacttttatttgaatgaggaaaccctgtgtatcagttagaatcttcgtgctttttctgaggagattgtgtttaatggattattagccagtttaggctcagtgaacaaactgatctagctctgaatgtatgtttcctgacgttttacatttccactttcctattccattcattaagctagccaacaatccaccatcctttaaagattgttctcataactgaacaaaaaccacataatctaaacagagcaaagctacaagaaataaatttatttaaacgaaaaaaaaaaaaaaaa

SEQ ID NO: 2122 - protein, 225 aa, Homo sapien
MAEAATPGTTATTSGAGAAAATAAAASPTPIPTVTAPSLGAGGGGGGSDGSGGGWTKQVTCRYFMHGVCKEGDNCRYSHDLSDSPYSVVCKYFQRGYCIYGDRCRYEHSKPLKQEEATATELTTKSSLAASSSLSSIVGPLVEMNTGEAESRNSNFATVGAGSEDWVNAIEFVPGQPYCGRTAPSCTEAPLQGSVTKEESEKEQTAVETKKQLCPYAAVGESQPQ

SEQ ID NO: 2123 - DNA, 1666 bp, Homo sapien
atttgctttctctttttcctttcttccggatgagaggctaagccataatagaaagaatggagaattattgattgaccgtctttattctgtgggctctgattctccaatgggaataccaagggatggttttccatactggaacccaaaggtaaagacactcaaggacagacatttttggcagagcatagatgaaaatggcaagttccctggctttccttctgctcaactttcatgtctccctcctcttggtccagctgctcactccttgctcagctcagttttctgtgcttggaccctctgggcccatcctggccatggtgggtgaagacgctgatctgccctgtcacctgttcccgaccatgagtgcagagaccatggagctgaagtgggtaagttccagcctaaggcaggtggtgaacgtgtatgcagatggaaaggaagtggaagacaggcagagtgcaccgtatcgagggagaacttcgattctgcgggatggcatcactgcagggaaggctgctctccgaatacacaacgtcacagcctctgacagtggaaagtacttgtgttatttccaagatggtgacttctatgaaaaagccctggtggagctgaaggttgcagcactgggttctaatcttcacgtcgaagtgaagggttatgaggatggagggatccatctggagtgcaggtccaccggctggtacccccaaccccaaatacagtggagcaacgccaagggagagaacatcccagctgtggaagcacctgtggttgcagatggagtgggcctatatgaagtagcagcatctgtgatcatgagaggcggctccggggagggtgtatcctgcatcatcagaaattccctcctcggcctggaaaagacagccagcatttccatcgcagaccccttcttcaggagcgcccagccctggatcgcagccctggcagggaccctgcctatcttgctgctgcttctcgccggagccagttacttcttgtggagacaacagaaggaaataactgctctgtccagtgagatagaaagtgagcaagagatgaaagaaatgggatatgctgcaacagagcgggaaataagcctaagagagagcctccaggaggaactcaagaggaaaaaatccagtacttgactcgtggagaggagtcttcgtccgataccaataagtcagcctgatgctctaatggaaaaatggccctcttcaagcctggtgaggaaatgcttcagatgaggctccaccttgttaaataaattggatgtatggaaaaatagactgcagaaaaggggaactcatttagctcacgagtggtcgagtgaagattgaaaattaacctctgagggccagcacagcagctcatgcctgtaatcctagcactttggaaggctgaggagggcggatcacaaggtcaggagatcaagaccatcctggctaacacggtgaaaccccgtctctactaaaaatacaaaaaataaaaaattagccgggcatggtgacgggcacctgtagtcccagctactcgggaggctgaggcaggagaatggcatgaacccggaaggcagagcttgcagtgagccgagatcacgccactgcactccagcctgggagacagagcgagactctgtctcaagaaaaaaaaaaaaaaaaaaaaa

SEQ ID NO: 2124 - protein, 319 aa, Homo sapien
MKMASSLAFLLLNFHVSLLLVQLLTPCSAQFSVLGPSGPILAMVGEDADLPCHLFPTMSAETMELKWVSSSLRQVVNVYADGKEVEDRQSAPYRGRTSILRDGITAGKAALRIHNVTASDSGKYLCYFQDGDFYEKALVELKVAALGSNLHVEVKGYEDGGIHLECRSTGWYPQPQIQWSNAKGENIPAVEAPVVADGVGLYEVAASVIMRGGSGEGVSCIIRNSLLGLEKTASISIADPFFRSAQPWIAALAGTLPILLLLLAGASYFLWRQQKEITALSSEIESEQEMKEMGYAATEREISLRESLQEELKRKKSST

SEQ ID NO: 2125 - DNA, 2894 bp, Homo sapien
  Unsure 2236, 2238, 2738: Unknown base
gggcggacaggcacagagggagggagcgagcgagcagtgagtaagccagcaagggcggtcgggtcccgaggtcagccgagatttctcaggtccctccggccccctccctggagtccacagcgcctccggtgtccagaggatcggacacggcccggcccggccatggcctcgttgctgaaggtggatcaggaagtgaagctcaaggttgattctttcagggagcggatcacaagtaaggcagaagacttggtggcaaattttttcccaaagaagttattagaacttgatagttttctgaaggaaccaatcttaaacatccatgacctaactcagatccactctgacatgaatctcccagtccctgaccccattcttctcaccaatagccatgatggactggatggtcccacttataagaagcgaaggttggatgagtgtgaagaagccttccaaggaaccaaggtgtttgtgatgcccaatgggatgctgaaaagcaaccagcagctggtggacattattgagaaagtgaaacctgagatccggctgttgattgagaaatgtaacacgccttcaggcaaaggtcctcatatatgttttgacctccaggtcaaaatgtgggtacagctcctgattcccaggatagaagatggaaacaactttggggtgtccattcaggaggaaacagttgcagagctaagaactgttgagagtgaagctgcatcttatctggaccagatttctagatattatattacaagagccaaattggtttctaaaatagctaaatatccccatgtggaggactatcgccgcaccgtgacagagattgatgagaaagaatatatcagccttcggctcatcatatcagagctgaggaatcaatatgtcactctacatgacatgatcctgaaaaatatcgagaagatcaaacggccccggagcagcaatgcagagactctgtactgaggccagggccagggccaggggactctgtgagtctggctcaagaccgacattgccttggtttgttacatgactatcgtgatggggaaactggctggaaatagtaatcacacctctctgtttttagttagagtctaatgaaactctcatctagttctgtgatgtgtttacctcttttttcaggcctcaggaactcttctatttccttccctaataccccacacccaacctgtcgtaatttctggagaactccaggtttgtgtgtgcaggatgttggcacaaaaatacctgtgttttcattctccccctctctccctcctgtgtctggcgctttatgttttcttccgtttgataattagttggttaaaagctgagggaaccggaaggaaagtgctaggtgttttttaggaactagggtggaggggggacgaacttctcttcctcacatgaggttactgtttctttcctctgtggggcattggatcctcccacagttgccctggtgatgacttaggacttcccatctgtgacatcccactttgaatcttgatcgtgacaagaaataccttaggccttcagtcaattccgaagctccttcagttgtttttataatgggcgtttcacatgcacatatgtgtatgcatgtatacgcccatacagacatgcacacacagactcctactccattagctaacataccctccctctccacaacccgtgtcacatacctttcaggaggtgacagttgtcttagttgtcatctacccagacaaacgtcctgggcccgtcctccctcctgatactgtagcctcttggtacccagggtgagttggtggagaacagagagatgagaagcagagggcttggggaaagcctgttcctctctgactcagccctttttggcattattgcaagagcttgactcctggttgccttttcccagccagttttcagttggggtgaaggtttctgcaagtgtgaggtccagatgctgctgctcatgttgggctttccttttgggaactatttctctttatttatagtgtcgggcttccggggaaagcaatcattggtgtgtatgtgtatgtgccatgcacacacgtgcatatatacacatttgtgtatgtggaaatgtgctgggcaagtcaaaactatagaagagttgcctcctgtctctcgaatcttccagagatatcacttaattgttaacagcttttgtgttaatccccttcatcccctagcacttttattctaccacggctggagagttgananctacagtcagcctgccagtgactcttagtgtctgtttctgacttatttttcctgtctctgtcttccaacccccaataatatttcccaccggggatgcatcatttttactcccaatattctgtagagagggagtcaggatgctgtcttcccacgaatagtactcagtaacaaaccaattgcattttagttgggcagtgctcccacccaccctgcagatccctccagctaaaacccttcccccttccctccatgtgtttctcagtttcccgttcgtttgttggactgttccactgcccctcctcctcaccctatcacccatggatcgtaatgtaaaattcttttaccatgtcaagaaattattaaaaatacaggtactttgacctctttctaaagccgcagaccctggtgcaatgctctggtggctagggatgtactcatgctcatatgtgtgcacgcttggacacccacctccatggacacctagccaccctgttgtgtgnccttatgccagttgagctgaatcttttccccagtatagtggaaagactgaggcttctgcctactgagcaaggttgggtgcttcatttgtgttcagtctgaattatgggaaagttagctcttcccagacctaagctgccttctctccctactttcag

SEQ ID NO: 2126 - protein, 267 aa, Homo sapien [sequence omitted]

SEQ ID NO: 2127 - DNA, 1908 bp, Homo sapien
ctctgtctcattccctcgcgctctctcgggcaacatggcgggtgtggaggaggtagcggcctccgggagccacctgaatggcgacctggatccagacgacagggaagaaggagctgcctctacggctgaggaagcagccaagaaaaaaagacgaaagaagaagaagagcaaagggccttctgcagcaggggaacaggaacctgataaagaatcaggagcctcagtggatgaagtagcaagacagttggaaagatcagcattggaagataaagaaagagatgaagatgatgaagatggagatggcgatggagatggagcaactggaaagaagaagaaaaagaagaagaagaagagaggaccaaaagttcaaacagaccctccctcagttccaatatgtgacctgtatcctaatggtgtatttcccaaaggacaagaatgcgaatacccacccacacaagatgggcgaacagctgcttggagaactacaagtgaagaaaagaaagcattagatcaggcaagtgaagagatttggaatgattttcgagaagctgcagaagcacatcgacaagttagaaaatacgtaatgagctggatcaagcctgggatgacaatgatagaaatctgtgaaaagttggaagactgttcacgcaagttaataaaagagaatggattaaatgcaggcctggcatttcctactggatgttctctcaataattgtgctgcccattatactcccaatgccggtgacacaacagtattacagtatgatgacatctgtaaaatagactttggaacacatataagtggtaggattattgactgtgcttttactgtcacttttaatcccaaatatgatacgttattaaaagctgtaaaagatgctactaacactggaataaagtgtgctggaattgatgttcgtctgtgtgatgttggtgaggccatccaagaagttatggagtcctatgaagttgaaatagatgggaagacatatcaagtgaaaccaatccgtaatctaaatggacattcaattgggcaatatagaatacatgctggaaaaacagtgccgattgtgaaaggaggggaggcaacaagaatggaggaaggagaagtatatgcaattgaaacctttggtagtacaggaaaaggtgttgttcatgatgatatggaatgttcacattacatgaaaaattttgatgttggacatgtgccaataaggcttccaagaacaaaacacttgttaaatgtcatcaatgaaaactttggaacccttgccttctgccgcagatggctggatcgcttgggagaaagtaaatacttgatggctctgaagaatctgtgtgacttgggcattgtagatccatatccaccattatgtgacattaaaggatcatatacagcgcaatttgaacataccatcctgttgcgtccaacatgtaaagaagttgtcagcagaggagatgactattaaacttagtccaaagccacctcaacacctttattttctgagctttgttggaaaacatgataccagaattaatttgccacatgttgtctgttttaacagtggacccatgtaatacttttatccatgtttaaaaagaaggaatttggacaaaggcaaaccgtctaatgtaattaaccaacgaaaaagctttccggacttttaaatgctaactgtttttccccttcctgtctaggaaaatgctataaagctcaaattagttaggaatgacttatacgttttgttttgaatacctaagagatactttttggatatttatattgccatattcttacttgaatgctttgaatgactacatccagttctgcacctataccctctggtgttgctttttaaccttcctggaatccatttctaaaaaataaagacattttcagatctga

SEQ ID NO: 2128 - protein, 478 aa, Homo sapien
MAGVEEVAASGSHLNGDLDPDDREEGAASTAEEAAKKKRRKKKKSKGPSAAGEQEPDKESGASVDEVARQLERSALEDKERDEDDEDGDGDGDGATGKKKKKKKKKRGPKVQTDPPSVPICDLYPNGVFPKGQECEYPPTQDGRTAAWRTTSEEKKALDQASEEIWNDFREAAEAHRQVRKYVMSWIKPGMTMIEICEKLEDCSRKLIKENGLNAGLAFPTGCSLNNCAAHYTPNAGDTTVLQYDDICKIDFGTHISGRIIDCAFTVTFNPKYDTLLKAVKDATNTGIKCAGIDVRLCDVGEAIQEVMESYEVEIDGKTYQVKPIRNLNGHSIGQYRIHAGKTVPIVKGGEATRMEEGEVYAIETFGSTGKGVVHDDMECSHYMKNFDVGHVPIRLPRTKHLLNVINENFGTLAFCRRWLDRLGESKYLMALKNLCDLGIVDPYPPLCDIKGSYTAQFEHTILLRPTCKEVVSRGDDY

SEQ ID NO: 2129 - DNA, 5525 bp, Homo sapien
gaagcgccgccgccaccgccgcctttgctgtcccccggcctctagttccccgcaggtgggaggtgggagccatgtcgaaacggctccggagcagcgaggtgtgcgctgactgcagcgggccggatccttcctgggcatcagtaaataggggaacgtttttatgtgatgagtgctgcagtgtccatcggagtctagggcgccatatctcccaagtgaggcatctgaaacacacaccgtggcctccaacactgcttcagatggttgagaccttgtataataacggtgctaactctatatgggagcattctttgctggaccctgcgtctattatgagtggaagacgtaaagctaatccacaggataaagtacatcccaataaagcggaattcatcagagccaagtatcagatgttagcgttcgtccatcgcttgccctgccgggatgacgatagtgtgactgccaaagatcttagcaagcaactccattcgagcgtgagaacagggaatcttgaaacctgtttgagactgttatctttaggagcacaagccaacttctttcatcctgaaaaaggaaacaccccactccatgttgcctccaaagcagggcagattttacaggctgaattattggcagtatatggagcagacccaggcacacaggattctagtgggaaaactcccgttgattatgcaaggcaaggagggcaccatgagctggcagagcgcctcgtggaaatacagtatgagctaacggacagactagccttctatctctgtggcaggaaaccagatcacaaaaatggacagcactttataatacctcaaatggcagacagcagcctggatttgtctgaattggcaaaagctgctaagaagaaacttcaatctctaagtaatcatttgtttgaagaacttgccatggatgtgtacgatgaagttgacaggcgagagacggatgcagtctggcttgccacgcaaaaccacagcgccctggtaaccgagacaacggtcgtcccctttcttccggtcaatcctgagtactcatcaacacgaaatcagggcagacagaagttagctcggttcaacgcccatgagtttgccacgctggtcattgacattctcagtgacgccaagaggagacagcagggcagttctctctcgggttcaaaagacaatgtggagctcatactgaaaaccatcaataaccagcacagcgttgagagtcaagacaacgatcagcccgactatgacagcgtggcatcagacgaagacacagatttggaaaccactgcaagcaaaacaaaccggcagaagagcctagattcagatttatcagatggaccagtcactgtacaggaatttatggaggtcaaaaacgctctagtggcttctgaggccaagatacagcagctaatgaaggtgaataacaacttgagtgacgagctgagaattatgcagaaaaagcttcaaacactccagagtgaaaattcgaacctcaggaaacaggccacaaccaatgtatatcaggtgcaaactggttctgagtacacagacacttccaaccactcttccttaaagagacgtccgtctgcccggggcagtaggcccatgtccatgtacgagaccggatcaggtcagaaaccatatctcccaatgggagaagcgagccgccccgaagagagcaggatgagactccagcccttccccgcgcacatcgggaggagtgcacttgtgacctcctcttcatctctgccttccttcccctccacactttcctggtcgagggacgaaagcgcccgaagggcatccaggctggagaagcagaacagcacacctgagagtgactacgacaacactcccaacgacatggagccagatggcatggggtcaagccgaaagggacggcaaagaagtatggtgtggccaggggatggcttggtaccagacacagcagaaccccatgtggccccaagccccactctccctagcaccgaagatgtcatcaggaagactgaacagatcaccaaaaacatacaggagctcttaagagcagcccaagaaaataaacatgacagttatattccctgctcagagaggatacacgtagctgttacagaaatggcagcattattccccaaaaaacccaagtctgatatggtgaggacttcccttcgtttactgacgtccagtgcctaccgactgcagtcagagtgcaagaagaccctcccaggggaccccggctcacccacagacgttcagctggtcacgcagcaggtcatccagtgtgcgtacgacatcgccaaggctgccaagcagctggttaccatcaccaccaaagagaacaacaactgacaagggcagggcaccgcctcctctgttttctaggctttataaagtccaatttcaaattcagacgcagaactcttcagatttctacaaaaagaaacatttaatgacggtttaaaactttttaaaagaaaactcagtattatttttgcatgttttctaaccaattttcaactatttaacccacttgccttattttgtgcctatttgctggtttagtttctgatgttcggttgtgttgtcaacaactgttgagttgatcacatacatccaaaagtatagtttcattgtctaaagtttgtgaaaacttttccatcccttaaaactccctgcctatggctgaaactataaatgaaatttttcataaaacattttcttgagagagttcagttaaaaaagaaaaaatcagcgtcatttgttccctgccaagcatcgtgcaataagtgaatttcctggcctacttcataatctctaagtttggggtatctccaagcatgtatgtagagaaaggactttgccgctttttaaaactagtgtcacagtctctcttgggaggaaacaatgaattggttcatttcttctcagtgttttaccctgttacatgttctgttatttaatgttgttatctcaagctcctatctcttgatgttttcttgtcatcttgaaggctccatggaatgagataaagcattgacccaccacaggacatctcatgaagccatgttcagggtaggagctccacgcacatcaccacccattgtcaggtgctctccctcacccctgtaagccagacagtttgttcaaaacctgcagcaaagagaagcatcagtctaacaagccagaactcattttgtgccacccatttaggtatcactaccatgaactatagggaaaagaaatcacctactccctgacactgtgttgtacccttcatccaaaagtcagcttgcttctctgaccacttacagctttctcacatgagttgcttcacatttttcatcatctttaaggacttcttataaggaaagatgtatcgtatcgcagtcatctgagttagtttctcctccatcacctcatgagtacttaaaaattagacatcaactttcaagagttccttagagagtgtgctctagctggctgcctgctaccccaaagctctgaaagagtaaggttgaagtgctggaacatgctcagattgttttttagttactcaaaagccccttcttgttctgaatgtgaaagctcttcccgttcctgcttactgcagccattctgtgtgtgtggttcagaccctggcctagggccggtgatgtggatgagtgaagggagccaggtacacggcagcagggcagaggagactatggggagcccaccgcctacacagtaggggcagtagcccccagctccacgcctgttgccatgtggaaaagtgggcctagggtggccacagctttgatttttcaagagacaagaaacctagatgttttttggtgccatctctccatttataaatgttggcaaccaatttgaacactttcagagaccatgtgcaggtgagctgtgtcctctaggctgccagctcacagcccccaccccagggccctgtaagctgtgcagtgtgagggcctggcttccccggacacacctggagcagcctctgagtcttacccgtaatggagccggccaaccctgtgtgttatgttgctgtcgctcctgtttttaaccatatgttctgtcccatagcagtcattcacacatgtgaagaagacacaagaatcaaagtacaagttgcctcaatacatgctaataactaagcttctattttcacaggactgatcgatgcacacctttatagcttgaccatatgctgtcatgaaagtagcaccccgacggtgcttgctttactaagtcaccgtgtgtggatgcttttgtcgcattttgcttcactgtgagtagcatgggaaaagggtccacgtctccaaaagactcttccacttgtttgtcccacagccctaagtgccacattgctgttggatgctcccgggatgccttctagaagggggcctcccaccttaagttcaggcgccatctgatagccttttctgcaggcttcatgtccttagctgaccctcctttatcttgcaaacccctgcccctgctgtcccagggaggacgggcttctgtagaggcttctgggaaatgagctgtctgcaggaggtgaagcagtgttttccttggaatgtttgaggacctgcaatagaagatgttgcctttatggccctagagaaagtcaaggaacatggggaccaacaaagcatttccagttgtaagaatatgtcagaagagtgctcggttagcccacggtgccaaaactccaaacaagttccccggtggaatgacgtggccattggagggctgcaggtcgtcctctctgtatgtgccccgcgcatttccttggcctcatctgagatctggtgtcagagttctctgctcctgttggcaaatcgcaccttatctgaacatttgttccagccaccttttgcacatggattccgtaccttgcactagcaatgtctaccttcagtaacgtcgttctttttcaccctgtattctcaatgatcccttcctccccatatgccacccttcccccaaagctgatagggcagaggtgcactttatgaaactggcacttgactgaacagaaggaaacagctgtacctctaagctcctttcacagaaatcgtcatctgccttggaatgcaaatagttcttatttgccaaagaacagtgaattgggcccaaagatcaaacacagcatttcatgtaatcagaattctaaacgcacaactcgggagctgtgcacggcttctcaagtgattcagttgcagaaccaagagcaaaactcgcctgtttttgtcctcaatggcacccatgagctttccaatagtatagttttctttctttccttgtcctggttgaaggtaacgtgttcctagaaaagaaaatgctgcataggaaaactgagatgccttttattccaacgtgtttgatccctgtcactcattattctgtactttttattgtacattctattcctgtaattattgtgccctttaagtgttgtaaaatcgttttggaatttgtgcctgctagttatgcaataaacaggctctacaagtg

SEQ ID NO: 2130 - protein, 759 aa, Homo sapien
MSKRLRSSEVCADCSGPDPSWASVNRGTFLCDECCSVHRSLGRHISQVRHLKHTPWPPTLLQMVETLYNNGANSIWEHSLLDPASIMSGRRKANPQDKVHPNKAEFIRAKYQMLAFVHRLPCRDDDSVTAKDLSKQLHSSVRTGNLETCLRLLSLGAQANFFHPEKGNTPLHVASKAGQILQAELLAVYGADPGTQDSSGKTPVDYARQGGHHELAERLVEIQYELTDRLAFYLCGRKPDHKNGQHFIIPQMADSSLDLSELAKAAKKKLQSLSNHLFEELAMDVYDEVDRRETDAVWLATQNHSALVTETTVVPFLPVNPEYSSTRNQGRQKLARFNAHEFATLVIDILSDAKRRQQGSSLSGSKDNVELILKTINNQHSVESQDNDQPDYDSVASDEDTDLETTASKTNRQKSLDSDLSDGPVTVQEFMEVKNALVASEAKIQQLMKVNNNLSDELRIMQKKLQTLQSENSNLRKQATTNVYQVQTGSEYTDTSNHSSLKRRPSARGSRPMSMYETGSGQKPYLPMGEASRPEESRMRLQPFPAHIGRSALVTSSSSLPSFPSTLSWSRDESARRASRLEKQNSTPESDYDNTPNDMEPDGMGSSRKGRQRSMVWPGDGLVPDTAEPHVAPSPTLPSTEDVIRKTEQITKNIQELLRAAQENKHDSYIPCSERIHVAVTEMAALFPKKPKSDMVRTSLRLLTSSAYRLQSECKKTLPGDPGSPTDVQLVTQQVIQCAYDIAKAAKQLVTITTKENNN

SEQ ID NO: 2131 - DNA, 2041 bp, Homo sapien
gccacttcttctgggcccacgaggcagctgtcccatgctctgctgagcacggtggtgccatgcctctgcaactcctcctgttgctgatcctactgggccctggcaacagcttgcagctgtgggacacctgggcagatgaagccgagaaagccttgggtcccctgcttgcccgggaccggagacaggccaccgaatatgagtacctagattatgatttcctgccagaaacggagcctccagaaatgctgaggaacagcactgacaccactcctctgactgggcctggaacccctgagtctaccactgtggagcctgctgcaaggcgttctactggcctggatgcaggaggggcagtcacagagctgaccacggagctggccaacatggggaacctgtccacggattcagcagctatggagatacagaccactcaaccagcagccacggaggcacagaccactccactggcagccacagaggcacagacaactcgactgacggccacggaggcacagaccactccactggcagccacagaggcacagaccactccaccagcagccacggaagcacagaccactcaacccacaggcctggaggcacagaccactgcaccagcagccatggaggcacagaccactgcaccagcagccatggaagcacagaccactccaccagcagccatggaggcacagaccactcaaaccacagccatggaggcacagaccactgcaccagaagccacggaggcacagaccactcaacccacagccacggaggcacagaccactccactggcagccatggaggccctgtccacagaacccagtgccacagaggccctgtccatggaacctactaccaaaagaggtctgttcatacccttttctgtgtcctctgttactcacaagggcattcccatggcagccagcaatttgtccgtcaactacccagtgggggccccagaccacatctctgtgaagcagtgcctgctggccatcctaatcttggcgctggtggccactatcttcttcgtgtgcactgtggtgctggcggtccgcctctcccgcaagggccacatgtaccccgtgcgtaattactcccccaccgagatggtctgcatctcatccctgttgcctgatgggggtgaggggccctctgccacagccaatgggggcctgtccaaggccaagagcccgggcctgacgccagagcccagggaggaccgtgagggggatgacctcaccctgcacagcttcctcccttagctcactctgccatctgttttggcaagaccccacctccacgggctctcctgggccacccctgagtgcccagaccccaatccacagctctgggcttcctcggagacccctggggatggggatcttcagggaaggaactctggccacccaaacaggacaagagcagcctggggccaagcagacgggcaagtggagccacctctttcctccctccgcggatgaagcccagccacatttcagccgaggtccaaggcaggaggccatttacttgagacagattctctcctttttcctgtcccccatcttctctgggtccctctaacatctcccatggctctccccgcttctcctggtcactggagtctcctccccatgtacccaaggaagatggagctcccccatcccacacgcactgcactgccattgtcttttggttgccatggtcaccaaacaggaagtggacattctaagggaggagtactgaagagtgacggacttctgaggctgtttcctgctgctcctctgacttggggcagcttgggtcttcttgggcacctctctgggaaaacccagggtgaggttcagcctgtgagggctgggatgggtttcgtgggcccaaagggcagacctttctttgggactgtgtggaccaaggagcttccatctagtgacaagtgacccccagctatcgcctcttgccttcccctgtggccactttccagggtggactctgtcttgttcactgcagtatcccaactgcaggtccagtgcaggca

SEQ ID NO: 2132 - protein, 402 aa, Homo sapien
MPLQLLLLLILLGPGNSLQLWDTWADEAEKALGPLLARDRRQATEYEYLDYDFLPETEPPEMLRNSTDTTPLTGPGTPESTTVEPAARRSTGLDAGGAVTELTTELANMGNLSTDSAAMEIQTTQPAATEAQTTPLAATEAQTTRLTATEAQTTPLAATEAQTTPPAATEAQTTQPTGLEAQTTAPAAMEAQTTAPAAMEAQTTPPAAMEAQTTQTTAMEAQTTAPEATEAQTTQPTATEAQTTPLAAMEALSTEPSATEALSMEPTTKRGLFIPFSVSSVTHKGIPMAASNLSVNYPVGAPDHISVKQCLLAILILALVATIFFVCTVVLAVRLSRKGHMYPVRNYSPTEMVCISSLLPDGGEGPSATANGGLSKAKSPGLTPEPREDREGDDLTLHSFLP

SEQ ID NO: 2133 - DNA, 7785 bp, Homo sapien
ctcactgtccctggaatcttcaagggagttactgcattacatcatcagaaacaaggcatttctatattactatggaaagatttcgtctggagaagaagttacctggtcctgatgaagaagctgttgtggatcttggcaaaactagctcaactgtgaacaccaagtttgaaaaagaagaactagaaagtcatagagctgtatatattggtgttcacgtcccgtttagtaaagagagtcgtcggcgtcataggcatcgcggacacaaacatcaccaccggaggagaaaagataaagaatcagataaagaagatggacgggaatctccttcttatgatacaccatcccagagagttcagtttatccttggtactgaagatgatgatgaagaacatattccccatgatctcttcacggaaatggatgaactgtgttacagagatggagaagaatatgaatggaaagaaactgctagatggctgaaatttgaagaggatgttgaagatggcggtgaccgatggagtaaaccttatgtggcaactctctctttgcacagtctttttgaactaaggagttgcatcctcaatggaacagtcatgctggatatgagagcaagcactctagatgaaatagcagatatggtattagacaacatgatagcttctggccaattagacgagtccatacgagagaatgtcagagaagctcttctgaagagacatcatcatcagaatgagaaaagattcaccagtcggattcctcttgttcgatcttttgcagatataggcaagaaacattctgaccctcacttgcttgaaaggaatggggaaggcctttcagcctcccgccactctttgcgaacaggtctgtctgcctcaaacctttccttgagaggagaatcacctttatctcttcttctcggtcatcttcttccttcttcaagagctggaacccctgcaggctcaaggtgtacaaccccagtacccacccctcaaaacagtcctccttctagccctagcatcagccgcctgacctccagaagttcccaaaagagtcagcgtcaggccccagaactactggtttcacctgccagtgatgatattcccacagtagtaattcatccgcctgaggaagacttagaagcagcgctgaaaggcgaggagcagaagaatgaggaaaatgttgacttaactccaggtattttggcctctccccagtctgctcctggaaacttggacaatagtaaaagtggagaaattaaaggtaatggaagtggtggaagcagagaaaatagtactgttgacttcagcaaggttgatatgaatttcatgagaaaaattcctacgggtgctgaggcatccaacgtcctggtgggcgaagtagactttttggaaaggccaataattgcatttgtgagactggctcctgctgtcctccttacagggttgactgaggtccctgttccaaccaggtttttgtttttgttattgggtccagcgggcaaggcaccacagtaccatgaaattggacgatcaatagccactctcatgacagatgagattttccatgatgtagcttataaagcaaaagacagaaatgacctcttatctggaattgatgaatttttagatcaagtaactgtcctacctccaggagagtgggatccttctatacgcatagaaccaccaaaaagtgtcccttctcaggaaaagagaaagattcctgtgtttcacaatggatctacccccacactgggtgagactcctaaagaggccgctcatcatgctgggcctgagctacagaggactggacggctttttggtggtttgatacttgacatcaaaaggaaagcaccttttttcttgagtgacttcaaggatgcattaagcctgcagtgcctggcctcgattcttttcctatactgtgcctgtatgtctcctgtaatcacttttggagggctgcttggagaagctacagaaggcagaataagtgcaatagagtctctttttggagcatcattaactgggattgcctattcattgtttgctgggcaacctctaacaatattggggagcacaggtccagttctagtgtttgaaaaaattttatataaattctgcagagattatcaactttcttatctgtctttaagaaccagtattggtctgtggacttcttttttgtgcattgttttggttgcaacagatgcaagcagccttgtgtgttatattactcgatttacagaagaggcttttgcagcccttatttgcatcatattcatctacgaggctttggagaagctctttgatttaggagaaacatatgcatttaatatgcacaacaacttagataaactgaccagctactcatgtgtatgtactgaacctccaaatcccagcaatgaaactctagcacaatggaagaaagataatataacagcacacaatatttcctggagaaatcttactgtttctgaatgtaaaaaacttcgtggtgtattcttggggtcagcttgtggtcatcatggaccttatattccagatgtgctcttttggtgtgtcatcttgtttttcacaacattttttctgtcttcattcctcaagcaatttaagaccaagcgttactttcctaccaaggtgcgatcgacaatcagtgattttgctgtatttctcacaatagtaataatggttacaattgactaccttgtaggagttccatctcctaaacttcatgttcctgaaaaatttgagcctactcatccagagagagggtggatcataagcccactgggagataatccttggtggaccttattaatagctgctattcctgctttgctttgtaccattctcatctttatggatcaacaaatcacagctgtaattataaacagaaaggaacacaaattgaagaaaggagctggctatcaccttgatttgctcatggttggcgttatgttgggagtttgctctgtcatgggacttccatggtttgtggctgcaacagtgttgtcaataagtcatgtcaacagcttaaaagttgaatctgaatgttctgctccaggggaacaacccaagtttttgggaattcgtgaacagcgggttacagggctaatgatttttattctaatgggcctctctgtgttcatgacttcagtcctaaagtttattccaatgcctgttctgtatggtgttttcctttatatgggagtttcctcattaaaaggaatccagttatttgaccgtataaaattatttggaatgcctgctaagcatcagcctgatttgatatacctccgttatgtgccgctctggaaggtccatattttcacagtcattcagcttacttgtttggtccttttatgggtgataaaagtttcagctgctgcagtggtttttcccatgatggttcttgcattagtgtttgtgcgcaaactcatggacctgtgtttcacgaagagagaacttagttggcttgatgatcttatgccagaaagtaagaaaaagaaagaagatgacaaaaagaaaaaagagaaagaggaagctgaacggatgcttcaagacgatgatgatactgtgcaccttccatttgaagggggaagtctcttgcaaattccagtcaaggccctaaaatatagtcctgataaacctgtgagtgtgaaaataagttttgaagatgaaccaagaaagaaatacgtggatgctgaaacttcattatagaattgaaccaagaggcattatacatatagatatatacatatgtaatgtgtgcgtatcatgtcactatatataagaatattgtatgtcatgctgtttatgtgtgactaccgggtttttaaaagtagtgtctggagtttgtaatgagcaccgtggagactatgtatttaatgaaatgctctctttgaagtgaggtacatggttcttaactattcaaatatttattctgttagaaaaaaaaaattttctgttttgcaatagaaggatgtggagaaatgctttcagtctacttttcttaaatctctgttcatcagtggcaattcgtaaaaaccttaagtgatactttgtttatatgtttataatttttaggtgtttcctgaaattttcacatattatttcacttttgttagtgctttatgggaagaatagggagtctataccagtgctgtgggaaaaatggtaacatttcagggcttctctatttgtgtttcatttctgtagatgtccatcgtgtttcactaactggcgttttcttagccatagagatgactgtagaacaatagaaactttaataatgatagtttttaacttttatgtttaaattttttttaaatcttaaaaccttcatatctaggtatccattgtgacagacaagtaaaattgcaggtgatttgataattaagcacccataccatttataacttctgaatttaaaaagttatacaatgccagtttgcaatagttgattttgatgcctttgtagaatattttttctgaatccttatgctcttttaaagccaatgattcccactctgttctctgccttgtctctctttgtcttaaaatgctttagtttccatcaggttcaagttcttgactattattctcttataagtagtaggcgtaaataatcaggagttagaattctctcagaagggtctatgatcagtattactttattaagaattacctttcattttctctttatgttattctttcacttttgtagattacatttaatagcttgttacctgtgattttattttaaaatatttattttgatatgatgcttaaatattatataaacatttggaaaagtaacaaatagagtaaattgttaatgtaaatagttggtgcttactttcatttatgtttattatcttaaagcaattgatagattttacatctttgatataaagcactgccatatttatattttaaaaggaaattagacattttatatgtagctcagattaatgacatttttattttgtgtattagtttttgcttttctgagctttttaaagtctaacaaatctttttagtcatcttttatatacttttagttccacatgaaataaatgttgttaagcctgtaggactggatgaatggggttgtgaaactgatttgacaagagaataatttacaaaaatcaaatgagtattgagaagccacagaaatatcaaaaatggtgacatcactattaggatgaaaattttatgaaattccaatgctccctttaaccatataattaaattacaaaggtatacataattaatctaataaaggatcatgaggaatgccaaaagctgaaattttagcaagtctggtgttttaaattcattataaactatttattaactaatgtaatgtcctcctctaagaccatattgtaagagtcttgttaaaatgatggattcaacttctgcctcggatgagaggttggaaatgtagctgcttttctttagaaaatatgtagctgtcatcatttggtactgcctaaaaagagttagactctattggcaattgatagagtattacccacggtgcttattattgtttatgagcttccattgtaatgattcctttttatttgtagcagcataattatttccaaagaccccagtatttgctgctatttttaaaactcccctgatgtacctgaacaagaggatttcctcacatcatttccttgtgtctggacatcaggggtaacaactgtacttactttacaggaagaaattttaaaactgaaaactacctgggatcatagtgtttctgtgattttatttaattgtgtatagtaattatccagtgccagaaaaaccgtcacttgcaaaatactttgcactcaaaatgtttttacaatgcttctaaatgttactggtttctgctttcttttgactacttgactgacaaaatgatctgactactccatttaagagcaaaggtaactcatgtttaagtaattaactgcttgttttaagtgattatatttcttccactgtttttgaaaaataatcaaagatagcattcattgagagacagtgacagatataatttactacatatattgatttttaaataaagttgccttaaataagtgtatgtaagcagtagtagttgctatgtactgatttacctcaaggtgcaaaataattaaacctgtacatattccatttacaaaataaattcagccctgcactttctttagatgccttgatttccagaatggagcttagtgctactgaataccctggccacagagccacctcaggatattcttttctccaccctagtttatttatttatagatatctgtttacaaagtctgtagtaaatcctgatgctgaccatctgaaatgtactttttttctgaatgctgtttcaatctaaaatagcagcttttgagaaaacaatgatgtaaattccttatgataaaaggatgattctatatattctttaatgatattaaatatgccgaagccaagcacacagtctttctaaagtgtgtgtatgtttgtgtgaatgtgaatgatactgatcttatatctgttaaaagttgttttaaaaagctgtggcatcccattgttcatatttgccaagtcttctgtaaagatgtctaggacgaaatattttatgtgctaatgcatgtatttgtaaaccagatttgtttaccactcaaaattaacttgttttcttcatccaaaaaagtttatgtcttccacgtacttaaattttctgtgtgggtataatatagctttctaatttttttctttcacaaaggcaggttcaaaattctgttgaaagaaaaatgctttctgaaactgaggtataacaccagagcttgctgtttaaaggattatatgatgtacatcagttctataaatgtgctcagcagtttaacatgtgaatcctgttttaaagtgctcagatttcaactgtgtaagccattgatataacgctgtaattaaaaatgtttatatgaaataacttaatgttttaaatttatttatgtagatcacatcatttttatcagtatgcagtgcaaatatgtgaaatgtcttttggtttattccaacaattatttattttagaaagtaagtttaaagactttaaggacattcaaagtttaaaatagtgttcaaattgcaaaatttggcaatcttcatataaattggtttcttttctaacttttcaaaaactaacattaaatgtcaattataggaaaacatagttggaaatgtaatcatcccaaagatcatttttaaaatgaaatttaattagcacatattgaacatttgacttaattgttaaaccccagttttgttttgtttttttaatcagatttttgcacactgattagtttttgtgttgtggcttttgttgctttattattcaaggtttttttttttctttccccatgggggagattgtcttccaatgtttaactacgtttaaataaataaaaattgaattttattgttcatttatataaaatctgataccttgatgtaatttcacaatacagttccaatttttatggcttttataattacaatgatattttcttctataataaaatccaaagtaaacatttaaattgtagaactgatatttttcatttatatgaagtataagcctctactgggtctatattgtgaatcatcctgcctttcaaatttgtttcataattgttagatgaaaactatttttttggagatgttactgaagttgattgagcaataaaagtctacttaattaaaaaaaaaaaaaaaaaaaaaaaaaaaa

SEQ ID NO: 2134 - protein, 1214 aa, Homo sapien
MERFRLEKKLPGPDEEAVVDLGKTSSTVNTKFEKEELESHRAVYIGVHVPFSKESRRRHRHRGHKHHHRRRKDKESDKEDGRESPSYDTPSQRVQFILGTEDDDEEHIPHDLFTEMDELCYRDGEEYEWKETARWLKFEEDVEDGGDRWSKPYVATLSLHSLFELRSCILNGTVMLDMRASTLDEIADMVLDNMIASGQLDESIRENVREALLKRHHHQNEKRFTSRIPLVRSFADIGKKHSDPHLLERNGEGLSASRHSLRTGLSASNLSLRGESPLSLLLGHLLPSSRAGTPAGSRCTTPVPTPQNSPPSSPSISRLTSRSSQKSQRQAPELLVSPASDDIPTVVIHPPEEDLEAALKGEEQKNEENVDLTPGILASPQSAPGNLDNSKSGEIKGNGSGGSRENSTVDFSKVDMNFMRKIPTGAEASNVLVGEVDFLERPIIAFVRLAPAVLLTGLTEVPVPTRFLFLLLGPAGKAPQYHEIGRSIATLMTDEIFHDVAYKAKDRNDLLSGIDEFLDQVTVLPPGEWDPSIRIEPPKSVPSQEKRKIPVFHNGSTPTLGETPKEAAHHAGPELQRTGRLFGGLILDIKRKAPFFLSDFKDALSLQCLASILFLYCACMSPVITFGGLLGEATEGRISAIESLFGASLTGIAYSLFAGQPLTILGSTGPVLVFEKILYKFCRDYQLSYLSLRTSIGLWTSFLCIVLVATDASSLVCYITRFTEEAFAALICIIFIYEALEKLFDLGETYAFNMHNNLDKLTSYSCVCTEPPNPSNETLAQWKKDNITAHNISWRNLTVSECKKLRGVFLGSACGHHGPYIPDVLFWCVILFFTTFFLSSFLKQFKTKRYFPTKVRSTISDFAVFLTIVIMVTIDYLVGVPSPKLHVPEKFEPTHPERGWIISPLGDNPWWTLLIAAIPALLCTILIFMDQQITAVIINRKEHKLKKGAGYHLDLLMVGVMLGVCSVMGLPWFVAATVLSISHVNSLKVESECSAPGEQPKFLGIREQRVTGLMIFILMGLSVFMTSVLKFIPMPVLYGVFLYMGVSSLKGIQLFDRIKLFGMPAKHQPDLIYLRYVPLWKVHIFTVIQLTCLVLLWVIKVSAAAVVFPMMVLALVFVRKLMDLCFTKRELSWLDDLMPESKKKKEDDKKKKEKEEAERMLQDDDDTVHLPFEGGSLLQIPVKALKYSPDKPVSVKISFEDEPRKKYVDAETSL

SEQ ID NO: 2135 - DNA, 4649 bp, Homo sapien
gaggagcggctccggccgccgcgcctgacccttgtccggggtcttccgcacagtgggctgagggccatgtcagttttctgccacctacaggatagaccatgaagctgaaggaacttgagcggccagctgtccaggcatggagcccagccagccaataccctttgtatctggccacaggaacatctgcccaacagctagattcctccttcagcacaaatggcacattggaaatatttgaggttgatttcagggacccttctctggacttgaaacacagaggagtcctttctgccttgagcaggtttcacaagctggtctgggggagctttggcagtgggcttctggaaagctccggggttattgttggcggcggggacaatggcatgcttattctatacaatgtgacccacatcctgtcttcggggaaggagcctgtgattgctcagaaacagaagcacacgggggctgtcagagccctcgacttgaatcctttccagggcaacctcctggcttcaggggccagcgattctgaaatcttcatttgggatctgaataacttgaatgtgccaatgaccctgggatccaagtcacagcagcctccagaggacatcaaggcactgtcttggaaccggcaagcccaacacattctgtcttctgctcaccccagtggcaaggcagttgtgtgggatctcaggaagaatgaacctatcatcaaagtcagtgatcacagcaacaggatgcactgctcaggcctggcctggcatcctgacatagccacccagttagtgctgtgctcagaggatgatcgacttcccgtgattcagctgtgggacttgcgctttgcctcctcgcccttgaaggtgctggagagccacagcagggggatcttgtcagtgtcatggagccaggctgatgctgagctgctgctcactagtgctaaggacagccagatcttgtgccggaacctggggagcagtgaggtggtatataagctaccaacacagagcagctggtgctttgatgtgcagtggtgccctcgggacccttcagtgttctctgctgcctccttcaacggctggatcagtttgtactctgtgatgggtaggagctgggaagtccagcatatgagacaggctgacaagatctcctcttccttcagcaaaggccagcctctcccaccactgcaggtgccagagcaagtggcacaagcaccactgatacctcccctgaaaaaaccccccaaatggattagaagaccaacaggtgtttcatttgcttttggagggaagctggttacttttggcctccccagcacccctgcccatctggtgccacagccttgcccccgcctagtcttcatcagtcaagtcaccacagaatctgaattcctgatgcgatcagctgagctgcaggaggccttgggatcaggaaatctactgaattactgtcagaacaagagccagcaagctttactgcaaagtgaaaagatgctgtggcagttcctgaaggtgaccttagagcaagactccagaatgaaattcctaaagcttttaggatacagtaaagatgagcttcagaagaaggtggccacatggttgaagagtgacgtggggctaggtgagagtcctcagcccaagggaaatgacctcaacagtgacagacaacaggccttctgcagccaggcctccaaacacaccacaaaggaagcctctgcttcctcagccttctttgatgagctggtccctcagaacatgactccttgggagatccccatcacaaaagatattgatggactcctaagccaggctctcctgcttggggaactgggtccggccgtggagctgtgtctgaaggaggagcgctttgctgatgccattatcctggcccaggctgggggtacagatctgctgaagcaaacacaggagcgctacttggccaagaagaaaaccaaaatctcctcgcttctagcctgtgttgtgcaaaagaattggaaggatgtggtgtgtacctgtagcctgaagaactggagagaggcactggctttgctactgacatactcaggcacagagaaatttcccgagctctgtgacatgctgggaactcgcatggaacaggagggcagcagggcactaacctccgaagccagactctgttatgtgtgctcagggagtgtggagcggctggtggagtgctgggcaaaatgccaccaggctttgtcccccatggctctgcaggacctgatggagaaggtgatggttcttaacaggagcttggagcaactgcggggtcctcatggggtgagcccaggccctgccacaacctacagggtcactcagtatgccaacctcctggcagcccagggcagcctggccactgccatgagctttctacccagggactgtgctcagccaccagttcagcagctaagagatcggctttttcatgctcaaggttctgctgtcttgggccaacagtctccccctttccccttcccccggattgttgtgggagctaccctccactctaaagagacatcatcttacagattgggatcccagccttctcaccaggtcccaactccatctccaaggccaagggttttcacccctcagtcatcaccagcgatgcccttggcaccttcccatcctagcccttatcagggtcccaggacacagaatataagtgactacagggcacctgggccccaggccatccagcctttgcctttgagccctggggtaaggcctgcttcatctcagccacagctattaggagggcaaagggtgcaagttcctaacccggtgggattccctgggacatggcctcttcctggttcccctctacccatggcatgcccaggcatcatgcgacctggctctacctccctgcctgagactcctagactgttccctctgcttcctctgagaccactaggtcccggccgcatggtctcccacaccccagcccctcctgcaagcttccctgtgccataccttccaggggacccaggtgccccatgctctagtgtcctcccaaccactggcatcttgactcctcacccaggacctcaagattcctggaaagaagccccagcccccaggggaaacctccagaggaacaagctgccagagacatttatgcccccagcaccaattactgctccagttatgagcctcacccctgagctacaagggattcttccctcacagccccctgtctccagtgtgagtcatgctcccccaggagttccaggagaactcagcctgcagcttcagcacctgccacctgagaagatggaaaggaaggagctgcccccagagcatcagtccttgaagagcagctttgaggcgcttctccaacgctgctccctgtctgcaactgacttaaagacaaaaaggaagctggaagaggcagcccagcgtctggagtatctatatgagaagctctgtgaggggacactctcacctcatgtcgtggctgggctccatgaggttgcccgatgtgtggatgcaggaagctttgagcagggccttgcagtgcatgcccaggtggcgggctgtagcagcttcagcgaggtgtccagcttcatgcctatcctgaaggctgtcctcatcatcgctcataagctgctggtctaaaccaggcagcctctcttgctaggaggccacttctgctgttacataactcctccctgcagaagaggggacttctgcaacagattctgtttctttttcccgactcttttccttgctgccaggtatgtgatgctgtaggcttggctccaaaccagctgagtgcctgctttttactcctttatgtctggccttctaggatctgtccaagacactctcaggcctggaggcagggcatagaatcagttcttcactctccctaatactacactctgtaaggacctggggcaggatatcttctcccccagggatcttctatttaagtggcttctgagagggtgaacaggattgttacttttaagcctacctctgctgtgacccatcatgtgggtcttttgtttctcccttctgtggtttatgagcctgcccttaccttttccctgcctctgacttggtatttccaggtccgtatttctctgtagcccagggtctggggtagagctgactgctgttcaccctttgaacaactcatggacgtgagggatgggtgctgagcagaaccaagagaggaaactttggcgctgttaaaatggaatttctcatctgccggcattattaagggtgggctaggttggatggaaggtgaaagggatgaactgccttttgctggaagctgtcttaggctgtgagacaggagcaggggaaccacagcctatggggaactgcccttgactccacctatgttggagccttagcccaaggccattccttctgtgatgataaagcccagttctggaattggagccatattaaggaatgattctcttccagcgctgctcctcaagggttgggggtccttctccctcgcagccaccacatgtctcagggctaccttctccgattggatttgcatttgtggcactgtctttgatgcagtgatgtacttaatggtgcaataaagctgcttcgatttggtaaaaaaaaaaaaaaaaaaaaaaaaaaaaaaaaaaaaaaaaa

SEQ ID NO: 2136 - protein, 1179 aa, Homo sapien
MKLKELERPAVQAWSPASQYPLYLATGTSAQQLDSSFSTNGTLEIFEVDFRDPSLDLKHRGVLSALSRFHKLVWGSFGSGLLESSGVIVGGGDNGMLILYNVTHILSSGKEPVIAQKQKHTGAVRALDLNPFQGNLLASGASDSEIFIWDLNNLNVPMTLGSKSQQPPEDIKALSWNRQAQHILSSAHPSGKAVVWDLRKNEPIIKVSDHSNRMHCSGLAWHPDIATQLVLCSEDDRLPVIQLWDLRFASSPLKVLESHSRGILSVSWSQADAELLLTSAKDSQILCRNLGSSEVVYKLPTQSSWCFDVQWCPRDPSVFSAASFNGWISLYSVMGRSWEVQHMRQADKISSSFSKGQPLPPLQVPEQVAQAPLIPPLKKPPKWIRRPTGVSFAFGGKLVTFGLPSTPAHLVPQPCPRLVFISQVTTESEFLMRSAELQEALGSGNLLNYCQNKSQQALLQSEKMLWQFLKVTLEQDSRMKFLKLLGYSKDELQKKVATWLKSDVGLGESPQPKGNDLNSDRQQAFCSQASKHTTKEASASSAFFDELVPQNMTPWEIPITKDIDGLLSQALLLGELGPAVELCLKEERFADAIILAQAGGTDLLKQTQERYLAKKKTKISSLLACVVQKNWKDVVCTCSLKNWREALALLLTYSGTEKFPELCDMLGTRMEQEGSRALTSEARLCYVCSGSVERLVECWAKCHQALSPMALQDLMEKVMVLNRSLEQLRGPHGVSPGPATTYRVTQYANLLAAQGSLATAMSFLPRDCAQPPVQQLRDRLFHAQGSAVLGQQSPPFPFPRIVVGATLHSKETSSYRLGSQPSHQVPTPSPRPRVFTPQSSPAMPLAPSHPSPYQGPRTQNISDYRAPGPQAIQPLPLSPGVRPASSQPQLLGGQRVQVPNPVGFPGTWPLPGSPLPMACPGIMRPGSTSLPETPRLFPLLPLRPLGPGRMVSHTPAPPASFPVPYLPGDPGAPCSSVLPTTGILTPHPGPQDSWKEAPAPRGNLQRNKLPETFMPPAPITAPVMSLTPELQGILPSQPPVSSVSHAPPGVPGELSLQLQHLPPEKMERKELPPEHQSLKSSFEALLQRCSLSATDLKTKRKLEEAAQRLEYLYEKLCEGTLSPHVVAGLHEVARCVDAGSFEQGLAVHAQVAGCSSFSEVSSFMPILKAVLIIAHKLLV

SEQ ID NO: 2137 - DNA, 1375 bp, Homo sapien
gtttgaaatcggaaagttggcggggctgcgggagctgagcctagagtccggctgttggctagagtgggcgcggatctggtgtggggaaggcggcgggactcaggcctgcctgcgaagcattgtcctacataatggtagaggacgaactggcacttttcgataaaagcataaatgaattttggaataaattcaaaagtacggacacctcctgtcagatggcgggactaagagatacctacaaggattccatcaaagcatttgcagaaaagctgtctgtgaaattaaaggaagaagaacgaatggttgagatgtttctggaatatcaaaatcagatcagcaggcaaaataagctcattcaagaaaaaaaggataacttgttaaaattgattgctgaagtaaaaggcaaaaagcaggaattggaagtactgactgcaaatatccaggatcttaaggaagaatattctaggaagaaggaaactatttctactgctaataaagcgaatgcagagaggttgaaaaggctgcagaaatctgcagacttgtataaagatcgacttggactagaaattcgaaaaatttatggtgagaaattgcagtttattttcactaatattgaccctaagaatcctgagagcccatttatgttttccttacatctcaatgaagcaagggactatgaagtgtcagatagtgcccctcatcttgagggcctagcagaatttcaagagaatgtaaggaagaccaacaatttttcagcttttcttgccaatgttcggaaagcttttactgccacggtttataattaacatacaaatagtgtatataaaaacggtttatttttcttctctattacatatctctttttttcttgtttttattattattatactttaagttttagggtacatgtgcacaatgtgcaggtttgttacatatgtatacatgtgccatattggtgtgctgcacccattaactcgtcatttcattaggtatatctcctaatgctatccctcccccctcccccaacccacaacagtccccgttgtgtgatgttccccttcctgtgtccatgtgttctcattgttcaattcccacctaggagtgagaatatgtggtgtttggttttttgtcctttcgatagtttgctgagaatgatggtttccagcttcatccatgttcctacaaaggacatgaactcatccttttttatggctgcatagtattccatggtgtatatgtgccacattttcttaatccagtctatcattgttggacatttgggttggttccaagtctttgctattgtgaatagtgccgaaataaacatacgtgtgcatgtgtctttaaaaaaaaaaaaaaaaaaaaaaaaaaaaaa

SEQ ID NO: 2138 - protein, 224 aa, Homo sapien
MVEDELALFDKSINEFWNKFKSTDTSCQMAGLRDTYKDSIKAFAEKLSVKLKEEERMVEMFLEYQNQISRQNKLIQEKKDNLLKLIAEVKGKKQELEVLTANIQDLKEEYSRKKETISTANKANAERLKRLQKSADLYKDRLGLEIRKIYGEKLQFIFTNIDPKNPESPFMFSLHLNEARDYEVSDSAPHLEGLAEFQENVRKTNNFSAFLANVRKAFTATVYN

SEQ ID NO: 2139 - DNA, 855 bp, Homo sapien
gcctgcgcggtagtgggacccgaccctgtctccagtgggcgtcttgggccccggctctattctgggctgcgggcctgggaagggctcgccgggtgccaaatgagctgtcctaactctgcggggctgcagcttcctgcatgatgctggggagcttggcgcctgacccaggatctagaaggcactctgggcaggccgcgctccgcccacgaaggtacccaaccctctgggatagatgcaggaagcgatggttaagacccattttcacccaacttctcgccgcaggtctggcttaccacacgctcctccccattcccagtgagccgctttttgcagcaccaggcgaacacttacaccagtgctttgtaaaggaatcttattgtccaccccgtgtcttggcaaaagaacagtgatcacacagattcctacttgggctctttcctttaatcttcggaggctgagtttgcccaactcaggtttaaccaccaaggactctgagagctggcaggtctgagtaaccctggtaacaattctcttcaccttatcaaaacctgagctaaaaccaatgcatcagctgatgatgacagcagagagtggcagggctgaggacccaaagtcatttcccaggctggcggagaataaactgccagggagaagaatgagaagacaggagacaaactgtttggaaagctaaatcttccctcttaatgaataaaggtttttgccttgtcttaaagtttctgagtcctaattttggcaaaataaataacttatggtaatctggaattgtattttgtaatattaagtgttttgaacctctaacatttacttcccaaaatcaaacttcagtttcaaaat

SEQ ID NO: 2140 - protein, 90 aa, Homo sapien
MMLGSLAPDPGSRRHSGQAALRPRRYPTLWDRCRKRWLRPIFTQLLAAGLAYHTLLPIPSEPLFAAPGEHLHQCFVKESYCPPRVLAKEQ

SEQ ID NO: 2141 - DNA, 2000 bp, Homo sapien
cctgtgaacactatagcgctgagagagacagtctgaaagcagaggaagacatcgatcagtaacaccaagagacaccaaagttgaaagttttgttttctttccctctgttttatttttcccccgtgtgtccctactatggtcagaaagcctgttgtgtccaccatctccaaaggaggttacctgcagggaaatgttaacgggaggctgccttccctgggcaacaaggagccacctgggcaggagaaagtgcagctgaagaggaaagtcactttactgaggggagtctccattatcattggcaccatcattggagcaggaatcttcatctctcctaagggcgtgctccagaacacgggcagcgtgggcatgtctctgaccatctggacggtgtgtggggtcctgtcactatttggagctttgtcttatgctgaattgggaacaactataaagaaatctggaggtcattacacatatattttggaagtctttggtccattaccagcttttgtacgagtctgggtggaactcctcataatacgccctgcagctactgctgtgatatccctggcatttggacgctacattctggaaccattttttattcaatgtgaaatccctgaacttgcgatcaagctcattacagctgtgggcataactgtagtgatggtcctaaatagcatgagtgtcagctggagcgcccggatccagattttcttaaccttttgcaagctcacagcaattctgataattatagtccctggagttatgcagctaattaaaggtcaaacgcagaactttaaagacgccttttcaggaagagattcaagtattacgcggttgccactggctttttattatggaatgtatgcatatgctggctggttttacctcaactttgttactgaagaagtagaaaaccctgaaaaaaccattccccttgcaatatgtatatccatggccattgtcaccattggctatgtgctgacaaatgtggcctactttacgaccattaatgctgaggagctgctgctttcaaatgcagtggcagtgaccttttctgagcggctactgggaaatttctcattagcagttccgatctttgttgccctctcctgctttggctccatgaacggtggtgtgtttgctgtctccaggttattctatgttgcgtctcgagagggtcaccttccagaaatcctctccatgattcatgtccgcaagcacactcctctaccagctgttattgttttgcaccctttgacaatgataatgctcttctctggagacctcgacagtcttttgaatttcctcagttttgccaggtggctttttattgggctggcagttgctgggctgatttatcttcgatacaaatgcccagatatgcatcgtcctttcaaggtgccactgttcatcccagctttgttttccttcacatgcctcttcatggttgccctttccctctattcggacccatttagtacagggattggcttcgtcatcactctgactggagtccctgcgtattatctctttattatatgggacaagaaacccaggtggtttagaataatgtcagggttcctagcactgatgcctgcacaagcatgtgatatgtgaaataaaatggattcttctatagctaaatgagttccctctggggagagttctggtactgcaatcacaatgccagatggtgtttatgggctatttgtgtaagtaagtggtaagatgctatgaagtaagtgtgtttgttttcatcttatggaaactcttgatgcatgtgcttttgtatggaataaattttggtgcaatatgatgtcattcaactttgcattgaattgaattttggttgtatttatatgtattatacctgtcacgcttctagttgcttcaaccattttataaccatttttgtacatattttacttgaaaatattttaaatggaaatttaaataaacatttgatagtttacataataaaaaaaaaaaaaaaaaaa

SEQ ID NO: 2142 - protein, 494 aa, Homo sapien
MVRKPVVSTISKGGYLQGNVNGRLPSLGNKEPPGQEKVQLKRKVTLLRGVSIIIGTIIGAGIFISPKGVLQNTGSVGMSLTIWTVCGVLSLFGALSYAELGTTIKKSGGHYTYILEVFGPLPAFVRVWVELLIIRPAATAVISLAFGRYILEPFFIQCEIPELAIKLITAVGITVVMVLNSMSVSWSARIQIFLTFCKLTAILIIIVPGVMQLIKGQTQNFKDAFSGRDSSITRLPLAFYYGMYAYAGWFYLNFVTEEVENPEKTIPLAICISMAIVTIGYVLTNVAYFTTINAEELLLSNAVAVTFSERLLGNFSLAVPIFVALSCFGSMNGGVFAVSRLFYVASREGHLPEILSMIHVRKHTPLPAVIVLHPLTMIMLFSGDLDSLLNFLSFARWLFIGLAVAGLIYLRYKCPDMHRPFKVPLFIPALFSFTCLFMVALSLYSDPFSTGIGFVITLTGVPAYYLFIIWDKKPRWFRIMSGFLALMPAQACDM

SEQ ID NO: 2143 - DNA, 2648 bp, Homo sapien
gcctctctccatcagacaccccaaggttccatccgaagcaggcggagcaccgaacgcaccccggggtggtcagggacccccatccgtgctgccccctaggagcccgcgcctctcctctgcgccccgcctctcgggccgcaacatcgcgcggttcctttaacagcgcgctggcagggtgtgggaagcaggaccgcgtcctcccgccccctcccatccgagtttcaggtgaattggtcaccgagggaggaggccgacacaccacacctacactcccgcgtccacctctccctccctgcttcctctggcggaggcggcaggaaccgagagccaggtccagagcgccgaggagccggtctaggacgcagcagattggtttatcttggaagctaaagggcattgctcatcctgaagatcagctgaccattgacaatcagccatgtcatccaggcctcttgaaagtccacctccttacaggcctgatgaattcaaaccgaatcattatgcaccaagcaatgacatatatggtggagagatgcatgttcgaccaatgctctctcagccagcctactctttttacccagaagatgaaattcttcacttctacaaatggacctctcctccaggagtgattcggatcctgtctatgctcattattgtgatgtgcattgccatctttgcctgtgtggcctccacgcttgcctgggacagaggctatggaacttcccttttaggaggtagtgtaggctacccttatggaggaagtggctttggtagctacggaagtggctatggctatggctatggttatggctatggctacggaggctatacagacccaagagcagcaaagggcttcatgttggccatggctgccttttgtttcattgccgcgttggtgatctttgttaccagtgttataagatctgaaatgtccagaacaagaagatactacttaagtgtgataatagtgagtgctatcctgggcatcatggtgtttattgccacaattgtctatataatgggagtgaacccaactgctcagtcttctggatctctatatggttcacaaatatatgccctctgcaaccaattttatacacctgcagctactggactctacgtggatcagtatttgtatcactactgtgttgtggatccccaggaggccattgccattgtactggggttcatgattattgtggcttttgctttaataattttctttgctgtgaaaactcgaagaaagatggacaggtatgacaagtccaatattttgtgggacaaggaacacatttatgatgagcagccccccaatgtcgaggagtgggttaaaaatgtgtctgcaggcacacaggacgtgccttcacccccatctgactatgtggaaagagttgacagtcccatggcatactcttccaatggcaaagtgaatgacaagcggttttatccagagtcttcctataaatccacgccggttcctgaagtggttcaggagcttccattaacttcgcctgtggatgacttcaggcagcctcgttacagcagcggtggtaactttgagacaccttcaaaaagagcacctgcaaagggaagagcaggaaggtcaaagagaacagagcaagatcactatgagacagactacacaactggcggcgagtcctgtgatgagctggaggaggactggatcagggaatatccacctatcacttcagatcaacaaagacaactgtacaagaggaattttgacactggcctacaggaatacaagagcttacaatcagaacttgatgagatcaataaagaactctcccgtttggataaagaattggatgactatagagaagaaagtgaagagtacatggctgctgctgatgaatacaatagactgaagcaagtgaagggatctgcagattacaaaagtaagaagaatcattgcaagcagttaaagagcaaattgtcacacatcaagaagatggttggagactatgatagacagaaaacatagaaggctgatgccaagttgtttgagaaattaagtatctgacatctctgcaatcttctcagaaggcaaatgactttggaccataaccccggaagccaaacctctgtgagcatcacaaagttttggttgctttaacatcatcagtattgaagcattttataaatcgcttttgataatcaactgggctgaacactccaattaaggattttatgctttaaacattggttcttgtattaagaatgaaatactgtttgaggtttttaagccttaaaggaaggttctggtgtgaactaaactttcacaccccagacgatgtcttcatacctacatgtatttgtttgcataggtgatctcatttaatcctctcaaccacctttcagataactgttatttataatcacttttttccacataaggaaactgggttcctgcaatgaagtctctgaagtgaaactgcttgtttcctagcacacacttttggttaagtctgttttatgacttcattaataataaattccctggcctttcatattttagctactatatatgtgatgatctaccagcctccctattttttttctgttatataaatggttaaaagaggtttttcttaaataataaagatcatgtaaaagtaaaaaaaaaa

SEQ ID NO: 2144 - protein, 522 aa, Homo sapien
MSSRPLESPPPYRPDEFKPNHYAPSNDIYGGEMHVRPMLSQPAYSFYPEDEILHFYKWTSPPGVIRILSMLIIVMCIAIFACVASTLAWDRGYGTSLLGGSVGYPYGGSGFGSYGSGYGYGYGYGYGYGGYTDPRAAKGFMLAMAAFCFIAALVIFVTSVIRSEMSRTRRYYLSVIIVSAILGIMVFIATIVYIMGVNPTAQSSGSLYGSQIYALCNQFYTPAATGLYVDQYLYHYCVVDPQEAIAIVLGFMIIVAFALIIFFAVKTRRKMDRYDKSNILWDKEHIYDEQPPNVEEWVKNVSAGTQDVPSPPSDYVERVDSPMAYSSNGKVNDKRFYPESSYKSTPVPEVVQELPLTSPVDDFRQPRYSSGGNFETPSKRAPAKGRAGRSKRTEQDHYETDYTTGGESCDELEEDWIREYPPITSDQQRQLYKRNFDTGLQEYKSLQSELDEINKELSRLDKELDDYREESEEYMAAADEYNRLKQVKGSADYKSKKNHCKQLKSKLSHIKKMVGDYDRQKT

SEQ ID NO: 2145 - DNA, 1637 bp, Homo sapien
  Unsure 1315, 1498-1499: Unknown base
cgggggaggcgtgactttcccctcgggtccaggtagggcctggagctgctgcaagtgccgcctgtgctggggaagggaccatgtggctgccttgggctctgttgcttctctgggtcccaggatgttttgctctgagcaaatgcaggaccgtggcgggcccgtggggatccctgagtgtgcagtgtccctatgagaaggaacacaggaccctcaacaaatactggtgcagaccaccacagattttcctatgtgacaagattgtggagaccaaagggtcagcaggaaaaaggaacggccgagtgtccatcagggacagtcctgcaaacctcagcttcacagtgaccctggagaatctcacagaggaggatgcaggcacctactggtgtggggtggatacaccatggctccgagactttcatgatcccgttgtcgaggttgaggtgtccgtgttcccggcatcaacgtcaatgacacctgcaagtatcactgcggccaagacctcaacaatcacaactgcatttccacctgtatcatccactaccctgtttgcagtgggtgccacccacagtgccagcatccaggaggaaactgaggaggtggtgaactcacagctcccgctgctcctctccctgctggcattgttgctgcttctgttggtgggggcctccctgctagcctggaggatgtttcagaaatggatcaaatggatcaaagctggtgaccattcagagctgtcccagaaccccaagcaggctgccacgcagagtgagctgcactacgcaaatctggagctgctgatgtggcctctgcaggaaaagccagcaccaccaagggaggtggaggtggaatacagcactgtggcctcccccagggaagaacttcactatgcctcggtggtgtttgattctaacaccaacaggatagctgctcagaggcctcgggaggaggaaccagattcagattacagtgtgataaggaagacataggtcctgcctcgccatcggagctctcatgggccccaggaagtcagggacagctcccttatacctggcccacgtccttctcagcctgccctcgacaacagtgaccaacagacaggcagctgggtttccaggccatccctctgttgccatcagcttgattggcttccccgagggccagcagggctggggctccggagagcagcaggaagcactcccagccaccagtgcctgtcacctctttcccctttgcccctgcttcatcccagctctgtgtgtggaggacaaagcttcttcctgcgtggctccaggaaaagatgtggctcacgtaggtngcacctgccaatagctttgtcaatcacagccccataggaacgtctggaattgcttgggagttggggagaactgtcaagaagagtgaagagagtgccaaagcggagatctgttcacctgggtggaggggaccactaagatcaagatcaaagattctccccatctcacagacaaggaaactgagnnagagggaggagagaattgctcatggctccagaactggtggcaagtttctctggactcttaggtttatttttaatatgaaatataaaaacagtttcaaatatcttattgagggagaagtaaaaacttatttaaaccccg

SEQ ID NO: 2146 - protein, 301 aa, Homo sapien
  Unsure 1315, 1498-1499: Unknown amino acid
MWLPWALLLLWVPGCFALSKCRTVAGPWGSLSVQCPYEKEHRTLNKYWCRPPQIFLCDKIVETKGSAGKRNGRVSIRDSPANLSFTVTLENLTEEDAGTYWCGVDTPWLRDFHDPVVEVEVSVFPASTSMTPASITAAKTSTITTAFPPVSSTTLFAVGATHSASIQEETEEVVNSQLPLLLSLLALLLLLLVGASLLAWRMFQKWIKWIKAGDHSELSQNPKQAATQSELHYANLELLMWPLQEKPAPPREVEVEYSTVASPREELHYASVVFDSNTNRIAAQRPREEEPDSDYSVIRKT

SEQ ID NO: 2147 - DNA, 834 bp, Homo sapien
atgtctgctgaagtcatccatcaggttgaagaagcacttgatacagatgagaaggagatgctgctctttttgtgccgggatgttgctatagatgtggttccacctaatgtcagggaccttctggatattttacgggaaagaggtaagctgtctgtcggggacttggctgaactgctctacagagtgaggcgatttgacctgctcaaacgtatcttgaagatggacagaaaagctgtggagacccacctgctcaggaaccctcaccttgtttcggactatagagtgctgatggcagagattggtgaggatttggataaatctgatgtgtcctcattaattttcctcatgaaggattacatgggccgaggcaagataagcaaggagaagatttcttgggaccttgtggttgagttggagaaactaaatctggttgccccagatcaactggatttattagaaaaatgcctaaagaacatccacagaatagacctgaagacaaaaatccagaagtacaagcagtctgttcaaggagcagggacaagttacaggaatgttctccaagcagcaatccaaaagagtctcaaggatccttcaaataacttcaggatgataacaccctatgcccattgtcctgatctgaaaattcttggaaattgttccatgtgattaacatggaactgcctctacttaatcattctgaatgattaaatcgtttcattttctaaatgtgttataatgtgtttagccctttcttgttgctgtatgtttagatgctttccaatcttttgttactactaataatgctataaaataaatatccttgtacttctttga

SEQ ID NO: 2148 - protein, 221 aa, Homo sapien [sequence omitted]

SEQ ID NO: 2149 - DNA, 2762 bp, Homo sapien
agcggggcggggcgccagcgctgccttttctcctgccgggtagtttcgctttcctgcgcagagtctgcggaggggctcggctgcaccggggggatcgcgcctggcagaccccagaccgagcagaggcgacccagcgcgctcgggagaggctgcaccgccgcgcccccgcctagcccttccggatcctgcgcgcagaaaagtttcatttgctgtatgccatcctcgagagctgtctaggttaacgttcgcactctgtgtatataacctcgacagtcttggcacctaacgtgctgtgcgtagctgctcctttggttgaatccccaggcccttgttggggcacaaggtggcaggatgtctcagtggtacgaacttcagcagcttgactcaaaattcctggagcaggttcaccagctttatgatgacagttttcccatggaaatcagacagtacctggcacagtggttagaaaagcaagactgggagcacgctgccaatgatgtttcatttgccaccatccgttttcatgacctcctgtcacagctggatgatcaatatagtcgcttttctttggagaataacttcttgctacagcataacataaggaaaagcaagcgtaatcttcaggataattttcaggaagacccaatccagatgtctatgatcatttacagctgtctgaaggaagaaaggaaaattctggaaaacgcccagagatttaatcaggctcagtcggggaatattcagagcacagtgatgttagacaaacagaaagagcttgacagtaaagtcagaaatgtgaaggacaaggttatgtgtatagagcatgaaatcaagagcctggaagatttacaagatgaatatgacttcaaatgcaaaaccttgcagaacagagaacacgagaccaatggtgtggcaaagagtgatcagaaacaagaacagctgttactcaagaagatgtatttaatgcttgacaataagagaaaggaagtagttcacaaaataatagagttgctgaatgtcactgaacttacccagaatgccctgattaatgatgaactagtggagtggaagcggagacagcagagcgcctgtattggggggccgcccaatgcttgcttggatcagctgcagaactggttcactatagttgcggagagtctgcagcaagttcggcagcagcttaaaaagttggaggaattggaacagaaatacacctacgaacatgaccctatcacaaaaaacaaacaagtgttatgggaccgcaccttcagtcttttccagcagctcattcagagctcgtttgtggtggaaagacagccctgcatgccaacgcaccctcagaggccgctggtcttgaagacaggggtccagttcactgtgaagttgagactgttggtgaaattgcaagagctgaattataatttgaaagtcaaagtcttatttgataaagatgtgaatgagagaaatacagtaaaaggatttaggaagttcaacattttgggcacgcacacaaaagtgatgaacatggaggagtccaccaatggcagtctggcggctgaatttcggcacctgcaattgaaagaacagaaaaatgctggcaccagaacgaatgagggtcctctcatcgttactgaagagcttcactcccttagttttgaaacccaattgtgccagcctggtttggtaattgacctcgagacgacctctctgcccgttgtggtgatctccaacgtcagccagctcccgagcggttgggcctccatcctttggtacaacatgctggtggcggaacccaggaatctgtccttcttcctgactccaccatgtgcacgatgggctcagctttcagaagtgctgagttggcagttttcttctgtcaccaaaagaggtctcaatgtggaccagctgaacatgttgggagagaagcttcttggtcctaacgccagccccgatggtctcattccgtggacgaggttttgtaaggaaaatataaatgataaaaattttcccttctggctttggattgaaagcatcctagaactcattaaaaaacacctgctccctctctggaatgatgggtgcatcatgggcttcatcagcaaggagcgagagcgtgccctgttgaaggaccagcagccggggaccttcctgctgcggttcagtgagagctcccgggaaggggccatcacattcacatgggtggagcggtcccagaacggaggcgaacctgacttccatgcggttgaaccctacacgaagaaagaactttctgctgttactttccctgacatcattcgcaattacaaagtcatggctgctgagaatattcctgagaatcccctgaagtatctgtatccaaatattgacaaagaccatgcctttggaaagtattactccaggccaaaggaagcaccagagccaatggaacttgatggccctaaaggaactggatatatcaagactgagttgatttctgtgtctgaagtgtaagtgaacacagaagagtgacatgtttacaaacctcaagccagccttgctcctggctggggcctgttgaagatgcttgtattttacttttccattgtaattgctatcgccatcacagctgaacttgttgagatccccgtgttactgcctatcagcattttactactttaaaaaaaaaaaaaaaagccaaaaaccaaatttgtatttaaggtatataaattttcccaaaactgataccctttgaaaaagtataaataaaatgagcaaaagttgaa

SEQ ID NO: 2150 - protein, 712 aa, Homo sapien
MSQWYELQQLDSKFLEQVHQLYDDSFPMEIRQYLAQWLEKQDWEHAANDVSFATIRFHDLLSQLDDQYSRFSLENNFLLQHNIRKSKRNLQDNFQEDPIQMSMIIYSCLKEERKILENAQRFNQAQSGNIQSTVMLDKQKELDSKVRNVKDKVMCIEHEIKSLEDLQDEYDFKCKTLQNREHETNGVAKSDQKQEQLLLKKMYLMLDNKRKEVVHKIIELLNVTELTQNALINDELVEWKRRQQSACIGGPPNACLDQLQNWFTIVAESLQQVRQQLKKLEELEQKYTYEHDPITKNKQVLWDRTFSLFQQLIQSSFVVERQPCMPTHPQRPLVLKTGVQFTVKLRLLVKLQELNYNLKVKVLFDKDVNERNTVKGFRKFNILGTHTKVMNMEESTNGSLAAEFRHLQLKEQKNAGTRTNEGPLIVTEELHSLSFETQLCQPGLVIDLETTSLPVVVISNVSQLPSGWASILWYNMLVAEPRNLSFFLTPPCARWAQLSEVLSWQFSSVTKRGLNVDQLNMLGEKLLGPNASPDGLIPWTRFCKENINDKNFPFWLWIESILELIKKHLLPLWNDGCIMGFISKERERALLKDQQPGTFLLRFSESSREGAITFTWVERSQNGGEPDFHAVEPYTKKELSAVTFPDIIRNYKVMAAENIPENPLKYLYPNIDKDHAFGKYYSRPKEAPEPMELDGPKGTGYIKTELISVSEV

SEQ ID NO: 2151 - DNA, 2224 bp, Homo sapien
aaacttggacctcatcctcaattattttctcctttcaactctgttgaccctctgtctggtcttcctctagaaggttctaccgcagaaattgatgtgtgctccctgccctcgtcactgcccaagcccgggcctgcacatactcactggactgttccagttttgacagctgccagtcttcctgcccctttcacactgcagctgaagttcattacctgaaggacgcctcatcatttcattccttggctccaaaccttctgctgcctctaagataaaagctcaacttcttaacagtgtacagtgtgcaacttccaacctttttatctgttctctccaccttcagtttagcgtcattccaaaaccacacccttgcaaagctttgtactccgcaccccagatgatctccaggcagctcagatctctttcctgcctttgccctgcactgttccccggtacttcctcctttattgtagcactcagctccccagccaatctgtacatccctcagaggcagcgatctgatgaattggtttttgaatcccagaaagggtctgccatggagttggcagtcatcacggtagatggcgtatgattttgctgaattttaaataaaatgaaaaccataaattacatgatgcttttattgacacttgacaactggcctaaataaaaagactctgactctaatacaagtccccttactgataataggcatgaaagagcaccattcttaaaatctaaaccctttaaaatcagttacggcaattcacttaaggagcttgagggccgtgttaaaaggagccaggttttcacaagacctcatccacctctgcacattggctggcactgtcacactgcagcctccgatctgctggagtacagaccacagcaccacgtctgctacggtgagttcattcccagcgagccaagggctcttcccaagagcagagttcatggagcggaaaacagcggctttttctttactgcttccctcttttaactgaaaaatcgcaatatctacccagctatctataagggttgcgttgacagcattatgcttctggccaaacagagagaacaagaaacgtgcaatgttcccttcgccttcgatggggcacatcgtctggatgctgaatttcatctgcgtcttcggcactgaaaagaaaaaacacgccaggtagcatcaccagagcagccctgagggaagtactcgcacagtggggaaggggacagtcaccaaacaccacagactgatgacatgggaaagggtgttttcaagaagaacatcacattttcagtctgtctctaagatgcttactactgaaaagggtttaagtgcaaactatgttaaaaagtaaccaaagagtcattcctggtatttgattatgacacttctgaagctagaagggacctcagaccacctgctccaatccctgctgcctaaggttttgggggctgagggctggaaacccaggagctgcatctcccaggctcttggcctcataatcgccttctgtgagactgagggcaattaagatatgaatgacatgaactcgcttctctccatatcaacataaaccagaagaggcatacatctgtgggatagtcaatacataacatcctatctttatatggccatatgagaagataacttcagtgtccctatgatggtaagttcttgaatgtgagggcaagatggctgtgatagccatgactccccgctttgcctggttggacagaacccccttccccaaatgctcacagtcccccccttgagctgtgtctcactcagagaccctaaattttgcagacgaacaagggcatctttgcgttgcttcatctctgctcctcctctagaactatcccacaggctttctagacttagaatatctgacctgatgcaaatcgctatgtggccagtatgccacagaatgtcctaaacccttgctgcctcttatcaaaaccatgttgcacatctcatcatatagtacagctaacccttgaacagtgggggggttagggacactgacccccgactgctgtgcagtcgaaaatccacataaaacttctgactccttcaaaacttaagcactaatagcctactattcatgggaagccttacccatcacagttgattaacacgttttgtatggtctgtatattatatgctatattcttacaataaacttgagaaaatgttaagaaaaaaaaaaaaaaaaaaaaaaaa

SEQ ID NO: 2152 - DNA, 1216 bp, Homo sapien
ggcagctgcacggctcctggccccggagcatgcgcgagagccgccccggagcgccccggagccccccgccgtcccgcccgcggcgtcccgcgccccgccgccagcgcacccccggacgctatggcccacccctccggctggccccttctgtaggatggtagcacacaaccaggtggcagccgacaatgcagtctccacagcagcagagccccgacggcggccagaaccttcctcctcttcctcctcctcgcccgcggcccccgcgcgcccgcggccgtgccccgcggtcccggccccggcccccggcgacacgcacttccgcacattccgttcgcacgccgattaccggcgcatcacgcgcgccagcgcgctcctggacgcctgcggattctactgggggcccctgagcgtgcacggggcgcacgagcggctgcgcgccgagcccgtgggcaccttcctggtgcgcgacagccgccagcggaactgctttttcgcccttagcgtgaagatggcctcgggacccacgagcatccgcgtgcactttcaggccggccgctttcacctggatggcagccgcgagagcttcgactgcctcttcgagctgctggagcactacgtggcggcgccgcgccgcatgctgggggccccgctgcgccagcgccgcgtgcggccgctgcaggagctgtgccgccagcgcatcgtggccaccgtgggccgcgagaacctggctcgcatccccctcaaccccgtcctccgcgactacctgagctccttccccttccagatttgaccggcagcgcccgccgtgcacgcagcattaactgggatgccgtgttattttgttattacttgcctggaaccatgtgggtaccctccccggcctgggttggagggagcggatgggtgtaggggcgaggcgcctcccgccctcggctggagacgaggccgcagaccccttctcacctcttgagggggtcctccccctcctggtgctccctctgggtccccctggttgttgtagcagcttaactgtatctggagccaggacctgaactcgcacctcctacctcttcatgtttacatatacccagtatctttgcacaaaccaggggttgggggagggtctctggctttatttttctgctgtgcagaatcctattttatattttttaaagtcagtttaggtaataaactttattatgaaagtttttttttt

SEQ ID NO: 2153 - protein, 211 aa, Homo sapien
MVAHNQVAADNAVSTAAEPRRRPEPSSSSSSSPAAPARPRPCPAVPAPAPGDTHFRTFRSHADYRRITRASALLDACGFYWGPLSVHGAHERLRAEPVGTFLVRDSRQRNCFFALSVKMASGPTSIRVHFQAGRFHLDGSRESFDCLFELLEHYVAAPRRMLGAPLRQRRVRPLQELCRQRIVATVGRENLARIPLNPVLRDYLSSFPFQI

SEQ ID NO: 2154 - DNA, 1216 bp, Homo sapien; identical to SEQ ID NO: 2152

SEQ ID NO: 2155 - protein, 211 aa, Homo sapien; identical to SEQ ID NO: 2153

SEQ ID NO: 2156 - DNA, 4996 bp, Homo sapien
cgaggctccgtgccccgccccccgggtgccccgcccctttgcgcggctggcgcggccagccggccaggctcccctcggcaaacctgtctaattggggcggggagcggagcttcctcctctgagggccgtgccgcgctgccagatttgttcttccgcccctgcctccgcggctcggaggcgagcggaaggtgccccggggccgaggcccgtgacggggcgggcgggagccccggcagtccggggtcgccggcgagggccatgtcgctgttgggggacccgctacaggccctgccgccctcggccgcccccacggggccgctgctcgcccctccggccggcgcgaccctcaaccgcctgcgggagccgctgctgcggaggctcagcgagctcctggatcaggcgcccgagggccggggctggaggagactggcggagctggcggggagtcgcgggcgcctccgcctcagttgcctagacctggagcagtgttctcttaaggtactggagcctgaaggaagccccagcctgtgtctgctgaagttaatgggtgaaaaaggttgcacagtcacagaattgagtgatttcctgcaggctatggaacacactgaagttcttcagcttctcagccccccaggaataaagattactgtaaacccagagtcaaaggcagtcttggctggacagtttgtgaaactgtgttgccgggcaactggacatccttttgttcaatatcagtggttcaaaatgaataaagagattccaaatggaaatacatcagagcttatttttaatgcagtgcatgtaaaagatgcaggcttttatgtctgtcgagttaataacaatttcacctttgaattcagccagtggtcacagctggatgtttgcgacatcccagagagcttccagagaagtgttgatggcgtctctgaatccaagttgcaaatctgtgttgaaccaacttcccaaaagctgatgccaggcagcacattggttttacagtgtgttgctgttggaagccctattcctcactaccagtggttcaaaaatgaattaccattaacacatgagaccaaaaagctatacatggtgccttatgtggatttggaacaccaaggaacctactggtgtcatgtatataatgatcgagacagtcaagatagcaagaaggtagaaatcatcatagatgaattaaataatcttggtcatcctgataataaagagcaaacaactgaccagcctttggcgaaggacaaggttgcccttttgataggaaatatgaattaccgggagcaccccaagctcaaagctcctttggtggatgtgtacgaattgactaacttactgagacagctggacttcaaagtggtttcactgttggatcttactgaatatgagatgcgtaatgctgtggatgagtttttactccttttagacaagggagtatatgggttattatattatgcaggacatggttatgaaaattttgggaacagcttcatggtccccgttgatgctccaaatccatataggtctgaaaattgtctgtgtgtacaaaatatactgaaattgatgcaagaaaaagaaactggacttaatgtgttcttattggatatgtgtaggaaaagaaatgactacgatgataccattccaatcttggatgcactaaaagtcaccgccaatattgtgtttggatatgccacgtgtcaaggagcagaagcttttgaaatccagcattctggattggcaaatggaatctttatgaaatttttaaaagacagattattagaagataagaaaatcactgtgttactggatgaagttgcagaagatatgggtaagtgtcaccttaccaaaggcaaacaggctctagagattcgaagtagtttatctgagaagagagcacttactgatccaatacagggaacagaatattctgctgaatctcttgtgcggaatctacagtgggccaaggctcatgaacttccagaaagtatgtgtcttaagtttgactgtggtgttcagattcaattaggatttgcagctgagttttccaatgtcatgatcatctatacaagtatagtttacaaaccaccggagataataatgtgtgatgcctacgttactgattttccacttgatctagatattgatccaaaagatgcaaataaaggcacacctgaagaaactggcagctacttggtatcaaaggatcttcccaagcattgcctctataccagactcagttcactgcaaaaattaaaggaacatctagtcttcacagtatgtttatcatatcagtactcaggattggaagatactgtagaggacaagcaggaagtgaatgttgggaaacctctcattgctaaattagacatgcatcgaggtttgggaaggaagacttgctttcaaacttgtcttatgtctaatggtccttaccagagttctgcagccacctcaggaggagcagggcattatcactcattgcaagacccattccatggtgtttaccattcacatcctggtaatccaagtaatgttacaccagcagatagctgtcattgcagccggactccagatgcatttatttcaagtttcgctcaccatgcttcatgtcattttagtagaagtaatgtgccagtagagacaactgatgaaataccatttagtttctctgacaggctcagaatttctgaaaaatgacctccttgtttttgaaagttagcataattttagatgcctgtgaaatagtactgcacttacataaagtgagacattgtgaaaaggcaaatttgtatatgtagagaaagaatagtagtaactgtttcatagcaaacttcaggactttgagatgttgaaattacattatttaattacagacttcctctttctaagattttgtgaattggttgaatagttctatacaaatgaagtatggaggtgtgtatgtttatatgtatataacaaaatattttcattgtgaccactctgaagtaagagcaatgggaatggcattattgtagaataagtcattgtatttttaacaccagaaagaaccttgccgatcaccaggcataacctaattttatccatggaagaaacacagaaaggcatctaagttagagctggcaccagaactgagacctccagaaatctattccagtattttttccactacacaactgccttcctgacaggttctgagataagtgttatgtttgtagatagagtgaaatatatttatatatatataaatatatacagatacatatctgtgtattatctcaaggaatgtacaaactttagtttttgattataaggacttcactgcaagttttagttaagaggtttgtatataaatctgttatagaacaggctgaaatttcttgttcataagattatgaaaccacatgagaagtgataaaatgtttgttaaagctagatagaggttaagaatcaagatataatggataattttcatagctgcctatcagaatttcccaaatatttagcatcttccttgataatatgtattttcttcttgaatttcactggcctaatgagataatactcttatctttggctctacctaaaagttggttaaaaatgcaattggcattaacaaggaaaaatactgaattagtaattttaaaagtctcacaaagaaaatcccaggcctagatggctgcattgttgaattctgccaaacattaaaattagcactaattttttgcacactgtttctaaaagtaggagaggaaagaacacttcccaacttactctaggtcagtattaccctgatactagactagacatcacaagaaaactataagccaatattccttattaatacaaacacaaaaatcattaacaaaaatattagcaaactgaatccagcaacctataaaaaggattctatatcatgaccaagtggaatttatcccaggaattcaaggttggttcaacatctaaaaatcaaataagctaatatacagtcagttctcattattcacagtaattatgttctacagaatattctcccataaacactgaattaaatatggaacaactgcttttaggagaaagtgtatttgtgtatatgtgtgtatacatatgtttatctcacacacattatgagcttgaattcttaattcatcctagcaaattctaccttattttacagaagtgaaagtgaggtatcagaagtgttaagtgacatgcctgaggcacccccctaacaggtgtcagagctgaaattcaaaccccatccagctggccccggagccagagcttcttgtactacacagaattgcccctgccatttccaccctccagtcatttctctatgagactgaagcaggaaggcagagcatcatcttgttcagcctcagctgggaacatgtgtactgggtgactcaaatttttcacccatttacacatatccacaaatgactgcaaaagtgccacggatatcaatttgagggttataaattttagcaagttggtaaattcacaaatacataaccttgaataatgaggatcaactgtaccatatttaataaagcacaaaacccacacagattgtcttattacagcatttgataaaatccaaaactctttcataaaaacactcaacaaacttaggaataaaaggaatcttcctagatatgataaatataacatctatgaaaagcccacacctaacattatacttcatggtgatagactgaaggctgaatgttttccccttaagattgggaagaaggacaaggatgttcactcggcactacttctattcagcattgtacttgaagttctagccacagcagttaggttaggaattcaaggtttgttcaacatctaaaaatcaaataagctaataaagaaaagaggtttatactgcaaaagaagtgaaactatatgtattcacagttgatacatagttgtatatagaaaatgctaaagaatccataaaaagtaataaatgagttcaacaggt

SEQ ID NO: 2157 - protein, 813 aa, Homo sapien
MSLLGDPLQALPPSAAPTGPLLAPPAGATLNRLREPLLRRLSELLDQAPEGRGWRRLAELAGSRGRLRLSCLDLEQCSLKVLEPEGSPSLCLLKLMGEKGCTVTELSDFLQAMEHTEVLQLLSPPGIKITVNPESKAVLAGQFVKLCCRATGHPFVQYQWFKMNKEIPNGNTSELIFNAVHVKDAGFYVCRVNNNFTFEFSQWSQLDVCDIPESFQRSVDGVSESKLQICVEPTSQKLMPGSTLVLQCVAVGSPIPHYQWFKNELPLTHETKKLYMVPYVDLEHQGTYWCHVYNDRDSQDSKKVEIIIDELNNLGHPDNKEQTTDQPLAKDKVALLIGNMNYREHPKLKAPLVDVYELTNLLRQLDFKVVSLLDLTEYEMRNAVDEFLLLLDKGVYGLLYYAGHGYENFGNSFMVPVDAPNPYRSENCLCVQNILKLMQEKETGLNVFLLDMCRKRNDYDDTIPILDALKVTANIVFGYATCQGAEAFEIQHSGLANGIFMKFLKDRLLEDKKITVLLDEVAEDMGKCHLTKGKQALEIRSSLSEKRALTDPIQGTEYSAESLVRNLQWAKAHELPESMCLKFDCGVQIQLGFAAEFSNVMIIYTSIVYKPPEIIMCDAYVTDFPLDLDIDPKDANKGTPEETGSYLVSKDLPKHCLYTRLSSLQKLKEHLVFTVCLSYQYSGLEDTVEDKQEVNVGKPLIAKLDMHRGLGRKTCFQTCLMSNGPYQSSAATSGGAGHYHSLQDPFHGVYHSHPGNPSNVTPADSCHCSRTPDAFISSFAHHASCHFSRSNVPVETTDEIPFSFSDRLRISEK

SEQ ID NO: 2158 - DNA, 5029 bp, Homo sapien; identical to SEQ ID NO: 1743

SEQ ID NO: 2159 - protein, 824 aa, Homo sapien; identical to SEQ ID NO: 1744

SEQ ID NO: 2160 - DNA, 1723 bp, Homo sapien
gggggagtgcgaatttcttggcctgtcggcaggtgctttctcaaaggccccacagtcctccacttcctggggaggtagctgcagaataaaaccagcagagactccttttctcctaaccgtcccggccaccgctgcctcagcctctgcctcccagcctctttctgagggaaaggacaagatgaagtggaaggcgcttttcaccgcggccatcctgcaggcacagttgccgattacagaggcacagagctttggcctgctggatcccaaactctgctacctgctggatggaatcctcttcatctatggtgtcattctcactgccttgttcctgagagtgaagttcagcaggagcgcagacgcccccgcgtaccagcagggccagaaccagctctataacgagctcaatctaggacgaagagaggagtacgatgttttggacaagagacgtggccgggaccctgagatggggggaaagccgagaaggaagaaccctcaggaaggcctgtacaatgaactgcagaaagataagatggcggaggcctacagtgagattgggatgaaaggcgagcgccggaggggcaaggggcacgatggcctttaccagggtctcagtacagccaccaaggacacctacgacgcccttcacatgcaggccctgccccctcgctaacagccaggggatttcaccactcaaaggccagacctgcagacgcccagattatgagacacaggatgaagcatttacaacccggttcactcttctcagccactgaagtattcccctttatgtacaggatgctttggttatatttagctccaaaccttcacacacagactgttgtccctgcactctttaagggagtgtactcccagggcttacggccctgccttgggccctctggtttgccggtggtgcaggtagacctgtctcctggcggttcctcgttctccctgggaggcgggcgcactgcctctcacagctgagttgttgagtctgttttgtaaagtccccagagaaagcgcagatgctagcacatgccctaatgtctgtatcactctgtgtctgagtggcttcactcctgctgtaaatttggcttctgttgtcaccttcacctcctttcaaggtaactgtactgggccatgttgtgcctccctggtgagagggccgggcagaggggcagatggaaaggagcctaggccaggtgcaaccagggagctgcaggggcatgggaaggtgggcgggcaggggagggtcagccagggcctgcgagggcagcgggagcctccctgcctcaggcctctgtgccgcaccattgaactgtaccatgtgctacaggggccagaagatgaacagactgaccttgatgagctgtgcacaaagtggcataaaaaacagtgtggttacacagtgtgaataaagtgctgcggagcaagaggaggccgttgattcacttcacgctttcagcgaatgacaaaatcatctttgtgaaggcctcgcaggaagacgcaacacatgggacctataactgcccagcggacagtggcaggacaggaaaaacccgtcaatgtactagggtactgctgcgtcattacagggcacaggccatggatggaaaacgctctctgctctgctttttttctactgttttaatttatactggcatgctattgccttcctattttgcataataaatgcttcagtgaaaatgcagctttactctaa

SEQ ID NO: 2161 - protein, 163 aa, Homo sapien
MKWKALFTAAILQAQLPITEAQSFGLLDPKLCYLLDGILFIYGVILTALFLRVKFSRSADAPAYQQGQNQLYNELNLGRREEYDVLDKRRGRDPEMGGKPRRKNPQEGLYNELQKDKMAEAYSEIGMKGERRRGKGHDGLYQGLSTATKDTYDALHMQALPPR

SEQ ID NO: 2162 - DNA, 1740 bp, Homo sapien
ccagcgttagcccgcggccaggcagccgggaggagcggcgcgcgctcggacctctcccgccctgctcgttcgctctccagcttgggatggccggctacctgcgggtcgtgcgctcgctctgcagagcctcaggctcgcggccggcctgggcgccggcggccctgacagcccccacctcgcaagagcagccgcggcgccactatgccgacaaaaggatcaaggtggcgaagcccgtggtggagatggatggtgatgagatgacccgtattatctggcagttcatcaaggagaagctcatcctgccccacgtggacatccagctaaagtattttgacctcgggctcccaaaccgtgaccagactgatgaccaggtcaccattgactctgcactggccacccagaagtacagtgtggctgtcaagtgtgccaccatcacccctgatgaggcccgtgtggaagagttcaagctgaagaagatgtggaaaagtcccaatggaactatccggaacatcctgggggggactgtcttccgggagcccatcatctgcaaaaacatcccacgcctagtccctggctggaccaagcccatcaccattggcaggcacgcccatggcgaccagtacaaggccacagactttgtggcagaccgggccggcactttcaaaatggtcttcaccccaaaagatggcagtggtgtcaaggagtgggaagtgtacaacttccccgcaggcggcgtgggcatgggcatgtacaacaccgacgagtccatctcaggttttgcgcacagctgcttccagtatgccatccagaagaaatggccgctgtacatgagcaccaagaacaccatactgaaagcctacgatgggcgtttcaaggacatcttccaggagatctttgacaagcactataagaccgacttcgacaagaataagatctggtatgagcaccggctcattgatgacatggtggctcaggtcctcaagtcttcgggtggctttgtgtgggcctgcaagaactatgacggagatgtgcagtcagacatcctggcccagggctttggctcccttggcctgatgacgtccgtcctggtctgccctgatgggaagacgattgaggctgaggccgctcatgggaccgtcacccgccactatcgggagcaccagaagggccggcccaccagcaccaaccccatcgccagcatctttgcctggacacgtggcctggagcaccgggggaagctggatgggaaccaagacctcatcaggtttgcccagatgctggagaaggtgtgcgtggagacggtggagagtggagccatgaccaaggacctggcgggctgcattcacggcctcagcaatgtgaagctgaacgagcacttcctgaacaccacggacttcctcgacaccatcaagagcaacctggacagagccctgggcaggcagtagggggaggcgccacccatggctgcagtggaggggccagggctgagccggcgggtcctcctgagcgcggcagagggtgagcctcacagcccctctctggaggcctttctaggggatgtttttttataagccagatgtttttaaaagcatatgtgtgtttcccctcatggtgacgtgaggcaggagcagtgcgttttacctcagccagtcagtatgttttgcatactgtaatttatattgcccttggaacacatggtgccatatttagctactaaaaagctcttcacaaaaaaaaaaa

SEQ ID NO: 2163 - protein, 452 aa, Homo sapien [sequence omitted]

SEQ ID NO: 2164 - DNA, 3415 bp, Homo sapien
gggagcagctagggcgcgggtctccctcctcccggagtttggaacggctgaagttcaccttccagcccctagcgccgttcgcgccgctaggcctggcttctgaggcggttgcggtgctcggtcgccgcctaggcggggcagggtgcgagcaggggcttcgggccacgcttctcttggcgacaggattttgctgaagtccgtccgggaaacggaggaaaaaaagagttgcgggaggctgtcggctaataacggttcttgatacatatttgccagacttcaagatttcagaaaaggggtgaaagagaagattgcaactttgagtcagacctgtaggcctgatagactgattaaaccacagaaggtgacctgctgagaaaagtggtacaaatactgggaaaaacctgctcttctgcgttaagtgggagacaatgtcacaagttaaaagctcttattcctatgatgccccctcggatttcatcaatttttcatccttggatgatgaaggagatactcaaaacatagattcatggtttgaggagaaggccaatttggagaataagttactggggaagaatggaactggagggctttttcagggcaaaactcctttgagaaaggctaatcttcagcaagctattgtcacacctttgaaaccagttgacaacacttactacaaagaggcagaaaaagaaaatcttgtggaacaatccattccgtcaaatgcttgttcttccctggaagttgaggcagccatatcaagaaaaactccagcccagcctcagagaagatctcttaggctttctgctcagaaggatttggaacagaaagaaaagcatcatgtaaaaatgaaagccaagagatgtgccactcctgtaatcatcgatgaaattctaccctctaagaaaatgaaagtttctaacaacaaaaagaagccagaggaagaaggcagtgctcatcaagatactgctgaaaagaatgcatcttccccagagaaagccaagggtagacatactgtgccttgtatgccacctgcaaagcagaagtttctaaaaagtactgaggagcaagagctggagaagagtatgaaaatgcagcaagaggtggtggagatgcggaaaaagaatgaagaattcaagaaacttgctctggctggaatagggcaacctgtgaagaaatcagtgagccaggtcaccaaatcagttgacttccacttccgcacagatgagcgaatcaaacaacatcctaagaaccaggaggaatataaggaagtgaactttacatctgaactacgaaagcatccttcatctcctgcccgagtgactaagggatgtaccattgttaagcctttcaacctgtcccaaggaaagaaaagaacatttgatgaaacagtttctacatatgtgccccttgcacagcaagttgaagacttccataaacgaacccctaacagatatcatttgaggagcaagaaggatgatattaacctgttaccctccaaatcttctgtgaccaagatttgcagagacccacagactcctgtactgcaaaccaaacaccgtgcacgggctgtgacctgcaaaagtacagcagagctggaggctgaggagctcgagaaattgcaacaatacaaattcaaagcacgtgaacttgatcccagaatacttgaaggtgggcccatcttgcccaagaaaccacctgtgaaaccacccaccgagcctattggctttgatttggaaattgagaaaagaatccaggagcgagaatcaaagaagaaaacagaggatgaacactttgaatttcattccagaccttgccctactaagattttggaagatgttgtgggtgttcctgaaaagaaggtacttccaatcaccgtccccaagtcaccagcctttgcattgaagaacagaattcgaatgcccaccaaagaagatgaggaagaggacgaaccggtagtgataaaagctcaacctgtgccacattatggggtgccttttaagccccaaatcccagaggcaagaactgtggaaatatgccctttctcgtttgattctcgagacaaagaacgtcagttacagaaggagaagaaaataaaagaactgcagaaaggggaggtgcccaagttcaaggcacttcccttgcctcattttgacaccattaacctgccagagaagaaggtaaagaatgtgacccagattgaacctttctgcttggagactgacagaagaggtgctctgaaggcacagacttggaagcaccagctggaagaagaactgagacagcagaaagaagcagcttgtttcaaggctcgtccaaacaccgtcatctctcaggagccctttgttcccaagaaagagaagaaatcagttgctgagggcctttctggttctctagttcaggaaccttttcagctggctactgagaagagagccaaagagcggcaggagctggagaagagaatggctgaggtagaagcccagaaagcccagcagttggaggaggccagactacaggaggaagagcagaaaaaagaggagctggccaggctacggagagaactggtgcataaggcaaatccaatacgcaagtaccagggtctggagataaagtcaagtgaccagcctctgactgtgcctgtatctcccaaattctccactcgattccactgctaaactcagctgtgagctgcggataccgcccggcaatgggacctgctcttaacctcaaacctaggaccgtcttgctttgtcattgggcatggagagaacccatttctccagacttttacctacccgtgcctgagaaagcatacttgacaactgtggactccagttttgttgagaattgttttcttacattactaaggctaataatgagatgtaactcatgaatgtctcgattagactccatgtagttacttcctttaaaccatcagccggccttttatatgggtcttcactctgactagaatttagtctctgtgtcagcacagtgtaatctctattgctattgccccttacgactctcaccctctccccactttttttaaaaattttaaccagaaaataaagatagttaaatcctaagatagagattaagtcatggtttaaatgaggaacaatcagtaaatcagattctgtcctcttctctgcataccgtgaatttatagttaaggatccctttgctgtgagggtagaaaacctcaccaactgcaccagtgaggaagaagactgcgtggattcatggggagcctcacagcagccacgcagcaggctctgggtggggctgccgttaaggcacgttctttccttactggtgctgataacaacagggaaccgtgcagtgtgcattttaagacctggcctggaataaatacgttttgtctttccctcaaaaaaaaaaaaaaaaaaaaaaa

SEQ ID NO: 2165 - protein, 747 aa, Homo sapien
MSQVKSSYSYDAPSDFINFSSLDDEGDTQNIDSWFEEKANLENKLLGKNGTGGLFQGKTPLRKANLQQAIVTPLKPVDNTYYKEAEKENLVEQSIPSNACSSLEVEAAISRKTPAQPQRRSLRLSAQKDLEQKEKHHVKMKAKRCATPVIIDEILPSKKMKVSNNKKKPEEEGSAHQDTAEKNASSPEKAKGRHTVPCMPPAKQKFLKSTEEQELEKSMKMQQEVVEMRKKNEEFKKLALAGIGQPVKKSVSQVTKSVDFHFRTDERIKQHPKNQEEYKEVNFTSELRKHPSSPARVTKGCTIVKPFNLSQGKKRTFDETVSTYVPLAQQVEDFHKRTPNRYHLRSKKDDINLLPSKSSVTKICRDPQTPVLQTKHRARAVTCKSTAELEAEELEKLQQYKFKARELDPRILEGGPILPKKPPVKPPTEPIGFDLEIEKRIQERESKKKTEDEHFEFHSRPCPTKILEDVVGVPEKKVLPITVPKSPAFALKNRIRMPTKEDEEEDEPVVIKAQPVPHYGVPFKPQIPEARTVEICPFSFDSRDKERQLQKEKKIKELQKGEVPKFKALPLPHFDTINLPEKKVKNVTQIEPFCLETDRRGALKAQTWKHQLEEELRQQKEAACFKARPNTVISQEPFVPKKEKKSVAEGLSGSLVQEPFQLATEKRAKERQELEKRMAEVEAQKAQQLEEARLQEEEQKKEELARLRRELVHKANPIRKYQGLEIKSSDQPLTVPVSPKFSTRFHC

SEQ ID NO: 2166 - DNA, 1888 bp, Homo sapien
gcggcgcggggcgggcgcagcgggggtcggggcgctgggagcccgttgggccgcgaacgcagccgccacgccggggccgccgagatcgggtgcccgggatgagcctcatccggaaaaagggcttctacaagcaggacgtcaacaagaccgcctgggagctgcccaagacctacgtgtccccgacgcacgtcggcagcggggcctatggctccgtgtgctcggccatcgacaagcggtcaggggagaaggtggccatcaagaagctgagccgaccctttcagtccgagatcttcgccaagcgcgcctaccgggagctgctgctgctgaagcacatgcagcatgagaacgtcattgggctcctggatgtcttcaccccagcctcctccctgcgcaacttctatgacttctacctggtgatgcccttcatgcagacggatctgcagaagatcatggggatggagttcagtgaggagaagatccagtacctggtgtatcagatgctcaaaggccttaagtacatccactctgctggggtcgtgcacagggacctgaagccaggcaacctggctgtgaatgaggactgtgaactgaagattctggattttgggctggcgcgacatgcagacgccgagatgactggctacgtggtgacccgctggtaccgagcccccgaggtgatcctcagctggatgcactacaaccagacagtggacatctggtctgtgggctgtatcatggcagagatgctgacagggaaaactctgttcaaggggaaagattacctggaccagctgacccagatcctgaaagtgaccggggtgcctggcacggagtttgtgcagaagctgaacgacaaagcggccaaatcctacatccagtccctgccacagacccccaggaaggatttcactcagctgttcccacgggccagcccccaggctgcggacctgctggagaagatgctggagctagacgtggacaagcgcctgacggccgcgcaggccctcacccatcccttctttgaacccttccgggaccctgaggaagagacggaggcccagcagccgtttgatgattccttagaacacgagaaactcacagtggatgaatggaagcagcacatctacaaggagattgtgaacttcagccccattgcccggaaggactcacggcgccggagtggcatgaagctgtagggactcatcttgcatggcaccaccggccagacactgcccaaggaccagtatttgtcactaccaaactcagcccttcttggaatacagcctttcaagcagaggacagaagggtccttctccttatgtgggaaatgggcctagtagatgcagaattcaaagatgtcggttgggagaaactagctctgatcctaacaggccacgttaaactgcccatctggagaatcgcctgcaggtggggccctttccttcccgccagagtggggctgagtgggcgctgagccaggccgggggcctatggcagtgatgctgtgttggtttcctagggatgctctaacgaattaccacaaacctggtggattgaaacagcagaacttgattcccttacagttctggaggctggaaatctgggatggaggtgttggcagggctgtggtccctttgaaggctctggggaagaatccttccttggctctttttagcttgtggcggcagtgggcagtccgtggcattccccagcttattgctgcatcactccagtctctgtctcttctgttctctcctcttttaacaacagtcattggatttagggcccaccctaatcctgtgtgatcttatcttgatccttattaattaaacctgcaaatactctagttccaaataaagtcacattctcaggttccaggtggacatga

SEQ ID NO: 2167 - protein, 365 aa, Homo sapien
MSLIRKKGFYKQDVNKTAWELPKTYVSPTHVGSGAYGSVCSAIDKRSGEKVAIKKLSRPFQSEIFAKRAYRELLLLKHMQHENVIGLLDVFTPASSLRNFYDFYLVMPFMQTDLQKIMGMEFSEEKIQYLVYQMLKGLKYIHSAGVVHRDLKPGNLAVNEDCELKILDFGLARHADAEMTGYVVTRWYRAPEVILSWMHYNQTVDIWSVGCIMAEMLTGKTLFKGKDYLDQLTQILKVTGVPGTEFVQKLNDKAAKSYIQSLPQTPRKDFTQLFPRASPQAADLLEKMLELDVDKRLTAAQALTHPFFEPFRDPEEETEAQQPFDDSLEHEKLTVDEWKQHIYKEIVNFSPIARKDSRRRSGMKL

SEQ ID NO: 2168 - DNA, 1614 bp, Homo sapien
gcggccgcccggcccggccgcggatcagagactggagactgggtcttgctctgttacccaggctggagtgcagtggtgtgatcatagctcactacagccttgaactcctgggctcaagaggttgaggctccctcctcagcctcccaagtagctgggactacaggctttcagcaccatgcctggctaattcaaaaaaaccttcagagagatagggtctctctatgttgccctagctcgtctcaaactcctggcctcaagtgatcctcctgcttggacctcccaaagcgctgggattacaggctcctggaaccatgggcctcaggccctgaggatacggggctcccggtggccatgacgacgggtgactgctgccacctccccggctccctgtgtgactgctccggcagccctgccttctccaaggtcgtggaggctacgggcctcggaccgccccagtatgtggcacaggtgacttcaagggatggccggctcctctccaccgtcatccgtgccttggacacaccgagtgatggtcctttctgccggatctgccatgagggagcgaacggggagtgcttgctgtccccgtgtggctgcaccggcacgctgggtgccgtgcataagagctgtctggagaagtggctttcctcatctaacaccagctactgcgagctgtgccacacggagtttgcagtggagaaacggcctcgacccctcacagagtggctgaaggacccggggccgcggacggagaagcggacactgtgctgcgacatggtgtgtttcctgttcatcacaccgctggccgccatctcaggctggttgtgcctgcgcggggcccaggaccacctccggctccacagccagctggaggccgtgggtctcattgccctcaccatcgccctcttcaccatctatgtcctctggacgctggtctccttccgctaccactgccagctgtactccgagtggagaaagaccaaccagaaagttcgcctgaagatccgggaggcggacagccccgagggcccccagcattctccactggcagctggactcctgaagaaggtggcagaggagacaccagtatgaatgctgggctctccggaccctgcagcagagaggccagaggtagctggtgataccctgtcctgtggaaggacttccacttcaacacttccacttcaacagttcccgcacggcctgaacgcttcttaggccaagagacaccatgcggagcctagtctgtgatcctgtgtgaagatattttcagggtttttttttttttttttttgcatatggaggacaggtggacatggtcctgagctctggacggagcaggcaccctgatctcattctgaggtccacatggcaccttctgggccagcagctgtggccggtgtatcaagggcgcccttaaagctggaacattccagcaagcttcttgcgcttctctgcacccggcaggcccactttcctggcaccctcgactttatataaaagttgcactgcgtttcaaaaacccaccctgaatgaataaaaggagccctggctggacgtaaaaaaaaaaaaaaaaaaaaaaaaaaaaaaaaaaaaaaaaaaaaaaaaaaaaaa

SEQ ID NO: 2169 - protein, 246 aa, Homo sapien
MTTGDCCHLPGSLCDCSGSPAFSKVVEATGLGPPQYVAQVTSRDGRLLSTVIRALDTPSDGPFCRICHEGANGECLLSPCGCTGTLGAVHKSCLEKWLSSSNTSYCELCHTEFAVEKRPRPLTEWLKDPGPRTEKRTLCCDMVCFLFITPLAAISGWLCLRGAQDHLRLHSQLEAVGLIALTIALFTIYVLWTLVSFRYHCQLYSEWRKTNQKVRLKIREADSPEGPQHSPLAAGLLKKVAEETPV

SEQ ID NO: 2170 - DNA, 2650 bp, Homo sapien
gccgcgctggtggcggcggcgcgtcgttgcagttgcgccatctgtcaggagcggagccggcgaggagggggctgccgcgggcgaggaggaggggtcgccgcgagccgaaggccttcgagacccgcccgccgcccggcggcgagagtagaggcgaggttgttgtgcgagcggcgcgtcctctcccgcccgggcgcgccgcgcttctcccagcgcaccgaggaccgcccgggcgcacacaaagccgccgcccgcgccgcaccgcccggcggccgccgcccgcgccagggagggattcggccgccgggccggggacaccccggcgccgccccctcggtgctctcggaaggcccaccggctcccgggcccgccggggaccccccggagccgcctcggccgcgccggaggagggcggggagaggaccatgtgagtgggctccggagcctcagcgccgcgcagtttttttgaagaagcaggatgctgatctaaacgtggaaaaagaccagtcctgcctctgttgtagaagacatgtggtgtatataaagtttgtgatcgttggcggacattttggaatttagataatgggctgtgtgcaatgtaaggataaagaagcaacaaaactgacggaggagagggacggcagcctgaaccagagctctgggtaccgctatggcacagaccccacccctcagcactaccccagcttcggtgtgacctccatccccaactacaacaacttccacgcagccgggggccaaggactcaccgtctttggaggtgtgaactcttcgtctcatacggggaccttgcgtacgagaggaggaacaggagtgacactctttgtggccctttatgactatgaagcacggacagaagatgacctgagttttcacaaaggagaaaaatttcaaatattgaacagctcggaaggagattggtgggaagcccgctccttgacaactggagagacaggttacattcccagcaattatgtggctccagttgactctatccaggcagaagagtggtactttggaaaacttggccgaaaagatgctgagcgacagctattgtcctttggaaacccaagaggtacctttcttatccgcgagagtgaaaccaccaaaggtgcctattcactttctatccgtgattgggatgatatgaaaggagaccatgtcaaacattataaaattcgcaaacttgacaatggtggatactacattaccacccgggcccagtttgaaacacttcagcagcttgtacaacattactcagagagagctgcaggtctctgctgccgcctagtagttccctgtcacaaagggatgccaaggcttaccgatctgtctgtcaaaaccaaagatgtctgggaaatccctcgagaatccctgcagttgatcaagagactgggaaatgggcagtttggggaagtatggatgggtacctggaatggaaacacaaaagtagccataaagactcttaaaccaggcacaatgtcccccgaatcattccttgaggaagcgcagatcatgaagaagctgaagcacgacaagctggtccagctctatgcagtggtgtctgaggagcccatctacatcgtcaccgagtatatgaacaaaggaagtttactggatttcttaaaagatggagaaggaagagctctgaaattaccaaatcttgtggacatggcagcacaggtggctgcaggaatggcttacatcgagcgcatgaattatatccatagagatctgcgatcagcaaacattctagtggggaatggactcatatgcaagattgctgacttcggattggcccgattgatagaagacaatgagtacacagcaagacaaggtgcaaagttccccatcaagtggacggcccccgaggcagccctgtacgggaggttcacaatcaagtctgacgtgtggtcttttggaatcttactcacagagctggtcaccaaaggaagagtgccatacccaggcatgaacaaccgggaggtgctggagcaggtggagcgaggctacaggatgccctgcccgcaggactgccccatctctctgcatgagctcatgatccactgctggaaaaaggaccctgaagaacgccccacttttgagtacttgcagagcttcctggaagactactttaccgcgacagagccccagtaccaacctggtgaaaacctgtaaggcccgggtctgcggagagaggccttgtcccagaggctgccccacccctccccattagctttcaattccgtagccagctgctccccagcagcggaaccgcccaggatcagattgcatgtgactctgaagctgacgaacttccatggccctcattaatgacacttgtccccaaatccgaacctcctctgtgaagcattcgagacagaaccttgttatttctcagactttggaaaatgcattgtatcgatgttatgtaaaaggccaaacctctgttcagtgtaaatagttactccagtgccaacaatcctagtgctttccttttttaaaaatgcaaatcctatgtgattttaactctgtcttcacctgattcaactaaaaaaaaaaaagtattattttccaaaagtggcctctttgtctaaaacaataaaattttttttcatgttttaacaaaaaccaa

SEQ ID NO: 2171 - protein, 537 aa, Homo sapien
MGCVQCKDKEATKLTEERDGSLNQSSGYRYGTDPTPQHYPSFGVTSIPNYNNFHAAGGQGLTVFGGVNSSSHTGTLRTRGGTGVTLFVALYDYEARTEDDLSFHKGEKFQILNSSEGDWWEARSLTTGETGYIPSNYVAPVDSIQAEEWYFGKLGRKDAERQLLSFGNPRGTFLIRESETTKGAYSLSIRDWDDMKGDHVKHYKIRKLDNGGYYITTRAQFETLQQLVQHYSERAAGLCCRLVVPCHKGMPRLTDLSVKTKDVWEIPRESLQLIKRLGNGQFGEVWMGTWNGNTKVAIKTLKPGTMSPESFLEEAQIMKKLKHDKLVQLYAVVSEEPIYIVTEYMNKGSLLDFLKDGEGRALKLPNLVDMAAQVAAGMAYIERMNYIHRDLRSANILVGNGLICKIADFGLARLIEDNEYTARQGAKFPIKWTAPEAALYGRFTIKSDVWSFGILLTELVTKGRVPYPGMNNREVLEQVERGYRMPCPQDCPISLHELMIHCWKKDPEERPTFEYLQSFLEDYFTATEPQYQPGENL

SEQ ID NO: 2172 - DNA, 7905 bp, Homo sapien
  Unsure 2521-2545: Unknown base
aaaaaatgcagcatcaacggcagcagcaagcggaccacgcgaacgaggcaaactatgcaagaggcaccagacttcctctttctggtgaaggaccaacttctcagccgaatagctccaagcaaactgtcctgtcttggcaagctgcaatcgatgctgctagacaggccaaggctgcccaaactatgagcacctctgcacccccacctgtaggatctctctcccaaagaaaacgtcagcaatacgccaagagcaaaaaacagggtaactcgtccaacagccgacctgcccgcgcccttttctgtttatcactcaataaccccatccgaagagcctgcattagtatagtggaatggaaaccatttgacatatttatattattggctatttttgccaattgtgtggccttagctatttacatcccattccctgaagatgattctaattcaacaaatcataacttggaaaaagtagaatatgccttcctgattatttttacagtcgagacatttttgaagattatagcgtatggattattgctacatcctaatgcttatgttaggaatggatggaatttactggattttgttatagtaatagtaggattgtttagtgtaattttggaacaattaaccaaagaaacagaaggcgggaaccactcaagcggcaaatctggaggctttgatgtcaaagccctccgtgcctttcgagtgttgcgaccacttcgactagtgtcaggagtgcccagtttacaagttgtcctgaactccattataaaagccatggttcccctccttcacatagcccttttggtattatttgtaatcataatctatgctattataggattggaactttttattggaaaaatgcacaaaacatgtttttttgctgactcagatatcgtagctgaagaggacccagctccatgtgcgttctcagggaatggacgccagtgtactgccaatggcacggaatgtaggagtggctgggttggcccgaacggaggcatcaccaactttgataactttgcctttgccatgcttactgtgtttcagtgcatcaccatggagggctggacagacgtgctctactgggtaaatgatgcgataggatgggaatggccatgggtgtattttgttagtctgatcatccttggctcatttttcgtccttaacctggttcttggtgtccttagtggagaattctcaaaggaaagagagaaggcaaaagcacggggagatttccagaagctccgggagaagcagcagctggaggaggatctaaagggctacttggattggatcacccaagctgaggacatcgatccggagaatgaggaagaaggaggagaggaaggcaaacgaaatactagcatgcccaccagcgagactgagtctgtgaacacagagaacgtcagcggtgaaggcgagaaccgaggctgctgtggaagtctctggtgctggtggagacggagaggcgcggccaaggcggggccctctgggtgtcggcggtggggtcaagccatctcaaaatccaaactcagccgacgctggcgtcgctggaaccgattcaatcgcagaagatgtagggccgccgtgaagtctgtcacgttttactggctggttatcgtcctggtgtttctgaacaccttaaccatttcctctgagcactacaatcagccagattggttgacacagattcaagatattgccaacaaagtcctcttggctctgttcacctgcgagatgctggtaaaaatgtacagcttgggcctccaagcatatttcgtctctcttttcaaccggtttgattgcttcgtggtgtgtggtggaatcactgagacgatcctggtggaactggaaatcatgtctcccctggggatctctgtgtttcggtgtgtgcgcctcttaagaatcttcaaagtgaccaggcactggacttccctgagcaacttagtggcatccttattaaactccatgaagtccatcgcttcgctgttgcttctgctttttctcttcattatcatcttttccttgcttgggatgcagctgtttggcggcaagtttaattttgatgaaacgcaaaccaagcggagcacctttgacaatttccctcaagcacttctcacagtgttccagatcctgacaggcgaagactggaatgctgtgatgtacgatggcatcatggcttacgggggcccatcctcttcaggaatgatcgtctgcatctacttcatcatcctcttcatttgtggtaactatattctactgaatgtcttcttggccatcgctgtagacaatttggctgatgctgaaagtctgaacactgctcagaaagaagaagcggaagaaaaggagaggaaaaagattgccagaaaagagagcctagaaaataaaaagaacaacaaaccagaagtcaaccagatagccaacagtgacaacaaggttacaattgatgactatagagaagaggatgaagacaaggacccctatccgccttgcgatgtgccagtaggggaagnnnnnnnnnnnnnnnnnnnnnnnnnacctgaggttcctgccggaccccgtcctcgaaggatctcggagttgaacatgaaggaaaaaattgcccccatccctgaagggagcgctttcttcattcttagcaagaccaacccgatccgcgtaggctgccacaagctcatcaaccaccacatcttcaccaacctcatccttgtcttcatcatgctgagcagcgctgccctggccgcagaggaccccatccgcagccactccttccggaacacgatactgggttactttgactatgccttcacagccatctttactgttgagatcctgttgaagatgacaacttttggagctttcctccacaaaggggccttctgcaggaactacttcaatttgctggatatgctggtggttggggtgtctctggtgtcatttgggattcaatccagtgccatctccgttgtgaagattctgagggtcttaagggtcctgcgtcccctcagggccatcaacagagcaaaaggacttaagcacgtggtccagtgcgtcttcgtggccatccggaccatcggcaacatcatgatcgtcactaccctcctgcagttcatgtttgcctgtatcggggtccagttgttcaaggggaagttctatcgctgtacggatgaagccaaaagtaaccctgaagaatgcaggggacttttcatcctctacaaggatggggatgttgacagtcctgtggtccgtgaacggatctggcaaaacagtgatttcaacttcgacaacgtcctctctgctatgatggcgctcttcacagtctccacgtttgagggctggcctgcgttgctgtataaagccatcgactcgaatggagagaacatcggcccaatctacaaccaccgcgtggagatctccatcttcttcatcatctacatcatcattgtagctttcttcatgatgaacatctttgtgggctttgtcatcgttacatttcaggaacaaggagaaaaagagtataagaactgtgagctggacaaaaatcagcgtcagtgtgttgaatacgccttgaaagcacgtcccttgcggagatacatccccaaaaacccctaccagtacaagttctggtacgtggtgaactcttcgcctttcgaatacatgatgtttgtcctcatcatgctcaacacactctgcttggccatgcagcactacgagcagtccaagatgttcaatgatgccatggacattctgaacatggtcttcaccggggtgttcaccgtcgagatggttttgaaagtcatcgcatttaagcctaaggggtattttagtgacgcctggaacacgtttgactccctcatcgtaatcggcagcattatagacgtggccctcagcgaagcggacccaactgaaagtgaaaatgtccctgtcccaactgctacacctgggaactctgaagagagcaatagaatctccatcacctttttccgtcttttccgagtgatgcgattggtgaagcttctcagcaggggggaaggcatccggacattgctgtggacttttattaagtcctttcaggcgctcccgtatgtggccctcctcatagccatgctgttcttcatctatgcggtcattggcatgcagatgtttgggaaagttgccatgagagataacaaccagatcaataggaacaataacttccagacgtttccccaggcggtgctgctgctcttcaggtgtgcaacaggtgaggcctggcaggagatcatgctggcctgtctcccagggaagctctgtgaccctgagtcagattacaaccccggggaggagtatacatgtgggagcaactttgccattgtctatttcatcagtttttacatgctctgtgcatttctgatcatcaatctgtttgtggctgtcatcatggataatttcgactatctgacccgggactggtctattttggggcctcaccatttagatgaattcaaaagaatatggtcagaatatgaccctgaggcaaagggaaggataaaacaccttgatgtggtcactctgcttcgacgcatccagcctcccctggggtttgggaagttatgtccacacagggtagcgtgcaagagattagttgccatgaacatgcctctcaacagtgacgggacagtcatgtttaatgcaaccctgtttgctttggttcgaacggctcttaagatcaagaccgaagggaacctggagcaagctaatgaagaacttcgggctgtgataaagaaaatttggaagaaaaccagcatgaaattacttgaccaagttgtccctccagctggtgatgatgaggtaaccgtggggaagttctatgccactttcctgatacaggactactttaggaaattcaagaaacggaaagaacaaggactggtgggaaagtaccctgcgaagaacaccacaattgccctacaggcgggattaaggacactgcatgacattgggccagaaatccggcgtgctatatcgtgtgatttgcaagatgacgagcctgaggaaacaaaacgagaagaagaagatgatgtgttcaaaagaaatggtgccctgcttggaaaccatgtcaatcatgttaatagtgataggagagattcccttcagcagaccaataccacccaccgtcccctgcatgtccaaaggccttcaattccacctgcaagtgatactgagaaaccgctgtttcctccagcaggaaattcggtgtgtcataaccatcataaccataattccataggaaagcaagttcccacctcaacaaatgccaatctcaataatgccaatatgtccaaagctgcccatggaaagcggcccagcattgggaaccttgagcatgtgtctgaaaatgggcatcattcttcccacaagcatgaccgggagcctcagagaaggtccagtgtgaaaagaacccgctattatgaaacttacattaggtccgactcaggagatgaacagctcccaactatttgccgggaagacccagagatacatggctatttcagggacccccactgcttgggggagcaggagtatttcagtagtgaggaatgctacgaggatgacagctcgcccacctggagcaggcaaaactatggctactacagcagatacccaggcagaaacatcgactctgagaggccccgaggctaccatcatccccaaggattcttggaggacgatgactcgcccgtttgctatgattcacggagatctccaaggagacgcctactacctcccaccccagcatcccaccggagatcctccttcaactttgagtgcctgcgccggcagagcagccaggaagaggtcccgtcgtctcccatcttcccccatcgcacggccctgcctctgcatctaatgcagcaacagatcatggcagttgccggcctagattcaagtaaagcccagaagtactcaccgagtcactcgacccggtcgtggggccacccctccagcaacccctccctaccgggactggacaccgtgctacacccccctgatccaagtggagcagtcagaggccctggaccaggtgaacggcagcctgccgtccctgcaccgcagctcctggtacacagacgagcccgacatctcctaccggactttcacaccagccagcctgactgtccccagcagcttccggaacaaaaacagcgacaagcagaggagtgcggacagcttggtggaggcagtcctgatatccgaaggcttgggacgctatgcaagggacccaaaatttgtgtcagcaacaaaacacgaaatcgctgatgcctgtgacctcaccatcgacgagatggagagtgcagccagcaccctgcttaatgggaacgtgcgtccccgagccaacggggatgtgggcccccctctcacaccggcaggactatgagctacaggactttggtcctggctacagcgacgaagagccagaccctgggagggatgaggaggacctggcggatgaaatgatatgcatcaccaccttgtagcccccagcgaggggcagactggctctggcctcaggtggggcgcaggagagccaggggaaaagtgcctcatagttaggaaagtttaggcactagttgggagtaatattcaattaattagacttttgtataagagatgtcatgcctcaagaaagccataaacctggtaggaacaggtcccaagcggttgagcctggcagagtaccatgcgctcggccccagctgcaggaaacagcaggccccgccctctcacagaggatgggtgaggaggccagacctgccctgccccattgtccagatgggcactgctgtggagtctgcttctcccatgtaccagggcaccaggcccacccaactgaaggcatggcggcggggtgcaggggaaagttaaaggtgatgacgatcatcacacctgtgtcgttacctcagccatcggtctagcatatcagtcactgggcccaacatatccatttttaaaccctttcccccaaatacactgcgtcctggttcctgtttagctgttctgaaatacggtgtgtaagtaagtcagaacccagctaccagtgattattgcgagggcaatgggacctcataaataaggttttctgtgatgtgacgccagtttacataagagaatatcactccgatggtcggtttctgactgtcacgctaagggcaactgtaaactggaataataatgcactcgcaaccaggtaaacttagatacactagtttgtttaaaattatagatttactgtacatgacttgtaatatactataatttgtatttgtaaagagatggtctatattttgtaattactgtattgtatttgaactgcagcaatatccatgggtcctaataattgtagttccccactaaaatctagaaattattagtatttttactcgggctatccagaagtagaagaaatagagccaattctcatttattcagcgaaaatcctctggggttaaaattttaagtttgaaagaacttgacactacagaaatttttctaaaatattttgagtcactataaacctatcatctttccacaagatataccagatgactatttgcagtcttttctttgggcaagagttccatgattttgatactgtacctttggatccaccatgggttgcaactgtctttggttttgtttgtttgacttgaaccaccctctggtaagtaagtgaattacagagcaggtccagctggctgctctgccccttgggtatccatagttacggttttctctgtggcccacccagggtgttttttgcatcgctggtgcagaaatgcacaggtggatgagatatagctgctcttgtcctctggggactggtggtgctgcttaagaaataaggggtgctggggac

SEQ ID NO: 2173 - protein, 2101 aa, Homo sapien
  unsure 840-848: unknown amino acid
  Unsure 2521-2545: Unknown amino acid
KMQHQRQQQADHANEANYARGTRLPLSGEGPTSQPNSSKQTVLSWQAAIDAARQAKAAQTMSTSAPPPVGSLSQRKRQQYAKSKKQGNSSNSRPARALFCLSLNNPIRRACISIVEWKPFDIFILLAIFANCVALAIYIPFPEDDSNSTNHNLEKVEYAFLIIFTVETFLKIIAYGLLLHPNAYVRNGWNLLDFVIVIVGLFSVILEQLTKETEGGNHSSGKSGGFDVKALRAFRVLRPLRLVSGVPSLQVVLNSIIKAMVPLLHIALLVLFVIIIYAIIGLELFIGKMHKTCFFADSDIVAEEDPAPCAFSGNGRQCTANGTECRSGWVGPNGGITNFDNFAFAMLTVFQCITMEGWTDVLYWVNDAIGWEWPWVYFVSLIILGSFFVLNLVLGVLSGEFSKEREKAKARGDFQKLREKQQLEEDLKGYLDWITQAEDIDPENEEEGGEEGKRNTSMPTSETESVNTENVSGEGENRGCCGSLWCWWRRRGAAKAGPSGCRRWGQAISKSKLSRRWRRWNRFNRRRCRAAVKSVTFYWLVIVLVFLNTLTISSEHYNQPDWLTQIQDIANKVLLALFTCEMLVKMYSLGLQAYFVSLFNRFDCFVVCGGITETILVELEIMSPLGISVFRCVRLLRIFKVTRHWTSLSNLVASLLNSMKSIASLLLLLFLFIIIFSLLGMQLFGGKFNFDETQTKRSTFDNFPQALLTVFQILTGEDWNAVMYDGIMAYGGPSSSGMIVCIYFIILFICGNYILLNVFLAIAVDNLADAESLNTAQKEEAEEKERKKIARKESLENKKNNKPEVNQIANSDNKVTIDDYREEDEDKDPYPPCDVPVGEXXXXXXXXXPEVPAGPRPRRISELNMKEKIAPIPEGSAFFILSKTNPIRVGCHKLINHHIFTNLILVFIMLSSAALAAEDPIRSHSFRNTILGYFDYAFTAIFTVEILLKMTTFGAFLHKGAFCRNYFNLLDMLVVGVSLVSFGIQSSAISVVKILRVLRVLRPLRAINRAKGLKHVVQCVFVAIRTIGNIMIVTTLLQFMFACIGVQLFKGKFYRCTDEAKSNPEECRGLFILYKDGDVDSPVVRERIWQNSDFNFDNVLSAMMALFTVSTFEGWPALLYKAIDSNGENIGPIYNHRVEISIFFIIYIIIVAFFMMNIFVGFVIVTFQEQGEKEYKNCELDKNQRQCVEYALKARPLRRYIPKNPYQYKFWYVVNSSPFEYMMFVLIMLNTLCLAMQHYEQSKMFNDAMDILNMVFTGVFTVEMVLKVIAFKPKGYFSDAWNTFDSLIVIGSIIDVALSEADPTESENVPVPTATPGNSEESNRISITFFRLFRVMRLVKLLSRGEGIRTLLWTFIKSFQALPYVALLIAMLFFIYAVIGMQMFGKVAMRDNNQINRNNNFQTFPQAVLLLFRCATGEAWQEIMLACLPGKLCDPESDYNPGEEYTCGSNFAIVYFISFYMLCAFLIINLFVAVIMDNFDYLTRDWSILGPHHLDEFKRIWSEYDPEAKGRIKHLDVVTLLRRIQPPLGFGKLCPHRVACKRLVAMNMPLNSDGTVMFNATLFALVRTALKIKTEGNLEQANEELRAVIKKIWKKTSMKLLDQVVPPAGDDEVTVGKFYATFLIQDYFRKFKKRKEQGLVGKYPAKNTTIALQAGLRTLHDIGPEIRRAISCDLQDDEPEETKREEEDDVFKRNGALLGNHVNHVNSDRRDSLQQTNTTHRPLHVQRPSIPPASDTEKPLFPPAGNSVCHNHHNHNSIGKQVPTSTNANLNNANMSKAAHGKRPSIGNLEHVSENGHHSSHKHDREPQRRSSVKRTRYYETYIRSDSGDEQLPTICREDPEIHGYFRDPHCLGEQEYFSSEECYEDDSSPTWSRQNYGYYSRYPGRNIDSERPRGYHHPQGFLEDDDSPVCYDSRRSPRRRLLPPTPASHRRSSFNFECLRRQSSQEEVPSSPIFPHRTALPLHLMQQQIMAVAGLDSSKAQKYSPSHSTRSWGHPSSNPSLPGLDTVLHPPDPSGAVRGPGPGERQPAVPAPQLLVHRRARHLLPDFHTSQPDCPQQLPEQKQRQAEECGQLGGGSPDIRRLGTLCKGPKICVSNKTRNR

SEQ ID NO: 2174 - DNA, 1897 bp, Homo sapien
gtttgatttttgtgggccttacttttcccatttgctcatgtatgtctatattcctatatctaatgtttcttaaaagacaaatctgactgtgtaggtgcatttgtttaaaaaatataactccccattgcctctgggataaagtcttatctcagtttacatatattcttgataacctctccaactttatgtctcaccacccccactcacttcgtaattcgtgccttatcagaatggacctgttatactggcagttcaccatatataccattacattttgtttctcccatctctcaggtagacttacactttcggcccagcacatcagtcatcgcccttgcttgctttcctattcactcctgttctggaaggtgcaccaccttttcttggaaggcttcccttgctctcccaggctagatgagatgtccttccatcagttcccacagcaccctgtgcatgtatctgttgtgcacttaccaatagtatacaagggatctatgacccaagtctctccccactagcttgtaagctcctcacagacaggaaccatgttttgtctttgtactccagtgcctagtatataagagatactcaataaataaatatttgtcaaatcaactaattgattccttgtgacctaattctagagaatgggaagaaggcctgttattttgttgtcctttatggttctttaggaaagctctccaagcttggcatttgtcagggtgggaggaaaactgttgaagtattaagactggacacatggctgctaattcatcagcttatcattgaaaaagtccatagccaaaacctgactgtgcacttactataggaccctgacctgcctgggtctccctgtctctccagccagtatatttaaaggtaatgagataatgatgagtgttttgaaaaatgtttagtgttcaaatagaaaccattcgtgtcccttcactctctgaacatagtctgcaaatctctccctctctggtatgtttctgttttgtggattagactgctaaataagcgaagagttaattttgaagttcaggtcaacaaattcctgtttggagacgggctgttcctgaataccaggttgttatctgtctattacagccccttcacttctgggctcctggccctttgcgaagtacttcagaaagcctagagagaagagagggccctcaaatcccattccagcccctaaatgaaagtggcatcacaaggagaaaagtggaggtagaaatgtaccatgggggacgttgccccattgcctttcttcccctgactactgggcttcctctatcagcttttaacgcctggaagtagctgagtctccagtcactggtggccttccccaagtgagctcagcagcatgtgctaataggtgccaatactgtgctggctccagtgggattcctctctgcaaagctgctggcttagcttgactgtttccctattcctctccttagaactttcatagccagtcaagcatagaattgcatccattcttctgaaataggtactgtgcctaatttttcattggcttggccaagattctgttacctgtaattatgtcatatgggctgactggtgtaggtttggtaggcctcactgctctccagaggctagtgttcctatcccaggatggctgttgggattaggagtggaatgaggaatagtttaggaccacaagagatttggcctccttggaacatgtaggaaggcctcaaggatgtaattctagcccagggaagaaaatccttttcagcagacgcttcccttcccttcccctagggaatgtgtccctactatagtaaactcttccttaagagagttttatgttttctctgtcagatcaatttgtttttcttaatgttgttcctatcaaaaaaaaaaaaaa

SEQ ID NO: 2175 - protein, 110 aa, Homo sapien
MSHHPHSLRNSCLIRMDLLYWQFTIYTITFCFSHLSGRLTLSAQHISHRPCLLSYSLLFWKVHHLFLEGFPCSPRLDEMSFHQFPQHPVHVSVVHLPIVYKGSMTQVSPH

SEQ ID NO: 2176 - DNA, 2530 bp, Homo sapien
aaatccttcttccaatgttcctcccctctctgtatgaaccctgtgttggggggcagaagatggaagcccttggcaagctcgatcgaaccaagctactaaattgctgagctcgttttaactgaagtgtgagaaggaggtttaaggcaagtagacaacatcctgttgttggggtgcttctctcttttttgcacatctggctgaactgggagtcaggtggttgacttgtgcctggctgcagtagcagcggcatctcccttgcacagttctcctcctcggcctgcccaagagtccaccaggccatggacgcagtggctgtgtatcatggcaaaatcagcagggaaaccggcgagaagctcctgcttgccactgggctggatggcagctatttgctgagggacagcgagagcgtgccaggcgtgtactgcctatgtgtgctgtatcacggttacatttatacataccgagtgtcccagacagaaacaggttcttggagtgctgagacagcacctggggtacataaaagatatttccggaaaataaaaaatctcatttcagcatttcagaagccagatcaaggcattgtaatacctctgcagtatccagttgagaagaagtcctcagctagaagtacacaaggtactacagggataagagaagatcctgatgtctgcctgaaagccccatgaagaaaaataaaacaccttgtactttattttctataatttaaatatatgctaagtcttatatattgtagataatacagttcggtgagctacaaatgcatttctaaagccattgtagtcctgtaatggaagcatctagcatgtcgtcaaagctgaaatggacttttgtacatagtgaggagctttgaaacgaggattgggaaaaagtaattccgtaggttattttcagttattatatttacaaatgggaaacaaaaggataatgaatactttataaaggattaatgtcaattcttgccaaatataaataaaaataatcctcagtttttgtgaaaagctccatttttagtgaaatattattttatagctactaattttaaaatgtcttgcttgattgtatggtgggaagttggctggtgtcccttgtctttgccaagttctccactagctatggtgtcataggctcttttgggatttttgaagctgtatactgtgtgctaaaacaagcactaaacaaagagtgaaggatttatgtttaattctgaaagcaaccttcttgcctagtgttctgatattggacagtaaaatccacagaccaacctggagttgaaaatcttataatttaaaatatgctctaaacatgtttatcgtatttgatgctacaggatttgaaattgtattacaaatccaatgaaatgagtttttcttttcatttacctctgccccagttgtttctactacatggaagacctcattttgaagggaaatttcagcagctgcagctcatgagtaactgatttgtaacaagcctccttttaaagtaaccctacaaaaccactggaaagtttatggttgtattattttttaaaaaaattccaagtgattgaaacctacacgagatacagaattttatgcggcattttcttctcacatttatatttttgtgattttgtgattgattatatgtcactttgctacagggctcacagaattcattcactcaacaaacataatagggcgctgagggcatagaagtaaaaacacctggtccctgctctcagttcactgtcttgttggacgagaaaagaaacaataacgataaaagacagtgaaagaaaataacgataaaagacagtgaaagaaaataacaataaaagacaaggaaaaaataacaatgaaagttgataagtacatgataagcgaggttccccgtgtgtaggtagatctggtctttagaggcagatagataggtcagtgcaaatactctggtccatgggccatatgaaaaggctaagcttcactgtaaaataataactgggaattctggattgtgtatgggtgttggtgaacttggttttaattagtgaactgctgagagacagagctattctccatgtactggcaagacctgatttctgagcatttaatatggatgccgtgggagtacaaaagtggagtgtggcctgagtaatgcattatgggtggtttaccatttcttgaggtaaaagcatcacatgaacttgtaaaggaatttaaaaatcctactttcataataagttgcataggtttaataatttttaattatatggcttgagtttaaattgtaataggcgtaactaattttaactctataatgtgttcattctggaataatcctaaacatatgaattatgtttgcatgttcacttccaagagcctttttttgaaaaaaagctttttttgaatcatcaagtctttcacatttaaataaagtgtttgaaagctttatttaaaaaaaaaaaaaaaaaaaaaaaaaaaaaaaaaaaaaaaaaaaaaaaaaaaaaaaaaaaaaaaaaaaaagaaaaaaa

SEQ ID NO: 2177 - protein, 128 aa, Homo sapien
MDAVAVYHGKISRETGEKLLLATGLDGSYLLRDSESVPGVYCLCVLYHGYIYTYRVSQTETGSWSAETAPGVHKRYFRKIKNLISAFQKPDQGIVIPLQYPVEKKSSARSTQGTTGIREDPDVCLKAP

SEQ ID NO: 2178 - DNA, 2086 bp, Homo sapien
ccgccgccgcgcgccagagagaagcagcctccggccgcggcggcccctgtctcccgaccccggaaggcgaagcaggctgcccggggaccccgcgcgtgggcgcttgaagccgagaccagcctgcccgggcctgggcaggcggagcagggccttggaccccgcggcgcccctcggcctcggagcaacgagcgcagcgccgcctctgaagagccaatccattcaggatgggaaaccacgcaggcaaacgagaattaaatgccgagaaggccagtacgaatagtgaaactaacagaggagaatctgaaaaaaagagaaacctgggtgaactttcacggacaacctcagaggacaacgaagtgttcggagaggcagatgcgaaccagaacaatgggacctcctctcaggacacagcggtgactgactccaagcgcacagcggacccgaagaatgcctggcaggatgcccacccagctgacccagggagccgcccccacttgatccgcctcttttcccgagatgccccggggagggaggacaacaccttcaaagacaggccctctgagtccgacgagctccagaccatccaagaagacagtgcagccacctccgagagcctggatgtgatggcgtcacagaagagaccctcccagaggcacggatccaagtacctggccacagcaagtaccatggaccatgccaggcatggcttcctcccaaggcacagagacacgggcatccttgactccatcgggcgcttctttggcggtgacaggggtgcgcccaagcggggctctggcaaggtgagctctgaggagtagaggagttttagtttaaatggaaaaagcaaaggagaaatcagtaggtgaactcagccattagaggaagaactggcacgtagcctcttgctgtctaaggtctcgttccgtgctggagaatgcatatgagcccaagagtgtgggcctgagtggctgcttaggacgttttcgtttaactcaccccctcttttcctcacaagggatggtggccggggtgtggctcaggaatgtaaggacatgctgaattctggatctctaagggtgcctggacatgggcgttgcagaaagagagccacattctcagggtctctggtggtgtgtgcttgcggacttgatgactgatgttgcctctgcagcccacacgctggggttcaacactgggttatgctcgttttttcctggagtcagtgctgctagcttcatgttgctctgcgacaatcataggattgaggtcgaggaagacttttgaacaaactcctcaatttaaatccgccttgagcaaacgttctctgtggtctgagaagtggaaggggggagggataaatgagtgtctatgaatcaaagctttattatcttgtgattccattaatttgcatacagagtcttagaagtttctttattcaaaagcaaatgtggataaaaatgtattacaaaaaaaaaaaaactctgctatggggtccagagtctaggaggggttcctgcagttgattggtcagtggagaacctgtggctgctggttcatcaaagcgctggtccctgagtgccattcagattgcagatgcagtatttaacgtgatgtttagagtgttggggggtggtgtaatttgggagagaaagaagtttttcccaaaaaagtccctagtttatggggtgttctcacacaacctgtaagatgaagctgtttttctgcctgtgtgcagggctgattctggaattccagaaggccttgtgggagcgtaaaaggctttggaataacgtgtggaacagagcgcctcattctgataacatgcaatcataaaaaccatagggcaactgggagttaaggagtttctagaattggctttagtctccaactgcaattctttattgatcatgaaattgttgaagagaaacacaaatgtcagttttacctttcctgtgggcgtgaaagcacatcgaagtttcaggcaactgttaacatctctaccatctgtctgagttgagatttcaggttgtgacacttgccgtgacttatttgtaaatgacattttgtgtgtcttagatactaatgg

SEQ ID NO: 2179 - protein, 197 aa, Homo sapien
MGNHAGKRELNAEKASTNSETNRGESEKKRNLGELSRTTSEDNEVFGEADANQNNGTSSQDTAVTDSKRTADPKNAWQDAHPADPGSRPHLIRLFSRDAPGREDNTFKDRPSESDELQTIQEDSAATSESLDVMASQKRPSQRHGSKYLATASTMDHARHGFLPRHRDTGILDSIGRFFGGDRGAPKRGSGKVSSEE

SEQ ID NO: 2180 - DNA, 928 bp, Homo sapien
gctgtggccctggcacctgcccctgggctgggacagcccactgttccatgctgcccaagaaggctcagcacaggcacaaaccattgcccggcactggcccgtgctgcctgagaaggattggcacgggcacagaccactgcccccacctgccctgcgccatctacccaagaaggctcggcacgggcaccaaccactgcctccaactgccccatgctgcctgagaaggcactgcacggccacccccaactgccccgcactgtccctacccgggcagccatgcgagcggctggaactctgctggccttctgctgcctggtcttgagcaccactgggggcccttccccagatacttgttcccaggaccttaactcacgtgtgaagccaggatttcctaaaacaataaagaccaatgacccaggagtcctccaagcagccagatacagtgttgaaaagttcaacaactgcacgaacgacatgttcttgttcaaggagtcccgcatcacaagggccctagttcagatagtgaaaggcctgaaatatatgctggaggtggaaattggcagaactacctgcaagaaaaaccagcacctgcgtctggatgactgtgacttccaaaccaaccacaccttgaagcagactctgagctgctactctgaagtctgggtcgtgccctggctccagcacttcgaggtgcctgttctccgttgtcactgacccccgcctcttcagcaagaccacagccatgacaaacaccaggatgcatgctccttgtcccctcccacccgcctcatgacccagcctcacagaccctctcaggcctctgacgagtgagcgggtgaagtgccactgggtcaccgcagggcagctggaatggcagcatggtagcacctcctaacagattaaatagatcacatttgcttctaaaatt

SEQ ID NO: 2181 - protein, 167 aa, Homo sapien
MLPEKALHGHPQLPRTVPTRAAMRAAGTLLAFCCLVLSTTGGPSPDTCSQDLNSRVKPGFPKTIKTNDPGVLQAARYSVEKFNNCTNDMFLFKESRITRALVQIVKGLKYMLEVEIGRTTCKKNQHLRLDDCDFQTNHTLKQTLSCYSEVWVVPWLQHFEVPVLRCH

SEQ ID NO: 2182 - DNA, 1424 bp, Homo sapien
gaaggactggggaagactggatgagaagggtagaagagggtgggtgtgggatggggaggggagagtggaaaggccctgggcagaccctggcagaaggggcacggggcagggtgtgagttccccactagcagggccaggtgagctatggtgctgcacctactgctcttcttgctgctgaccccacagggtgggcacagctgccaggggctggagctggcccgggaacttgttctggccaaggtgagggccctgttcttggatgccttggggccccccgcggtgaccagggaaggtggggaccctggagtcaggcggctgccccgaagacatgccctggggggcttcacacacaggggctctgagcccgaggaagaggaggatgtctcccaagccatccttttcccagccacagatgccagctgtgaggacaagtcagctgccagagggctggcccaggaggctgaggagggcctcttcagatacatgttccggccatcccagcatacacgcagccgccaggtgacttcagcccagctgtggttccacaccgggctggacaggcagggcacagcagcctccaatagctctgagcccctgctaggcctgctggcactgtcaccgggaggacccgtggctgtgcccatgtctttgggccatgctccccctcactgggccgtgctgcacctggccacctctgctctctctctgctgacccaccccgtcctggtgctgctgctgcgctgtcccctctgtacctgctcagcccggcctgaggccacgcccttcctggtggcccacactcggaccagaccacccagtggaggggagagagcccgacgctcaactcccctgatgtcctggccttggtctccctctgctctgcgcctgctgcagaggcctccggaggaaccggctgcccatgccaactgccacagagtagcactgaacatctccttccaggagctgggctgggaacggtggatcgtgtaccctcccagtttcatcttccactactgtcatggtggttgtgggctgcacatcccaccaaacctgtcccttccagtccctggggctccccctaccccagcccagccctactccttgctgccaggggcccagccctgctgtgctgctctcccagggaccatgaggcccctacatgtccgcaccacctcggatggaggttactctttcaagtatgagacagtgcccaaccttctcacgcagcactgtgcttgtatctaagggtggggggtcttccttcttaatcccatggctggtggccacgcccccaccatcatcagctgggaggaaaggcagagttgggaaatagatggctcccactcctccctcctttcacttctctgcctatgggctaccctccccaccccacttctatctcaataaagaacacagtgcatatg

SEQ ID NO: 2183 - protein, 366 aa, Homo sapien
MVLHLLLFLLLTPQGGHSCQGLELARELVLAKVRALFLDALGPPAVTREGGDPGVRRLPRRHALGGFTHRGSEPEEEEDVSQAILFPATDASCEDKSAARGLAQEAEEGLFRYMFRPSQHTRSRQVTSAQLWFHTGLDRQGTAASNSSEPLLGLLALSPGGPVAVPMSLGHAPPHWAVLHLATSALSLLTHPVLVLLLRCPLCTCSARPEATPFLVAHTRTRPPSGGERARRSTPLMSWPWSPSALRLLQRPPEEPAAHANCHRVALNISFQELGWERWIVYPPSFIFHYCHGGCGLHIPPNLSLPVPGAPPTPAQPYSLLPGAQPCCAALPGTMRPLHVRTTSDGGYSFKYETVPNLLTQHCACI

SEQ ID NO: 2184 - DNA, 2875 bp, Homo sapien
gaattctccggagctgaaaaaggatcctgactgaaagctagaggcattgaggagcctgaagattctcaggttttaaagacgctagagtgccaaagaagactttgaagtgtgaaaacatttcctgtaattgaaaccaaaatgtcatttatagatccttaccagcacattatagtggagcaccagtattcccacaagtttacggtagtggtgttacgtgccaccaaagtgacaaagggggcctttggtgacatgcttgatactccagatccctatgtggaactttttatctctacaacccctgacagcaggaagagaacaagacatttcaataatgacataaaccctgtgtggaatgagacctttgaatttattttggatcctaatcaggaaaatgttttggagattacgttaatggatgccaattatgtcatggatgaaactctagggacagcaacatttactgtatcttctatgaaggtgggagaaaagaaagaagttccttttattttcaaccaagtcactgaaatggttctagaaatgtctcttgaagtttgctcatgcccagacctacgatttagtatggctctgtgtgatcaggagaagactttcagacaacagagaaaagaacacataagggagagcatgaagaaactcttgggtccaaagaatagtgaaggattgcattctgcacgtgatgtgcctgtggtagccatattgggttcaggtgggggtttccgagccatggtgggattctctggtgtgatgaaggcattatacgaatcaggaattctggattgtgctacctacgttgctggtctttctggctccacctggtatatgtcaaccttgtattctcaccctgattttccagagaaagggccagaggagattaatgaagaactaatgaaaaatgttagccacaatccccttttacttctcacaccacagaaagttaaaagatatgttgagtctttatggaagaagaaaagctctggacaacctgtcacctttactgacatctttgggatgttaataggagaaacactaattcataatagaatgaatactactctgagcagtttgaaggaaaaagttaatactgcacaatgccctttacctcttttcacctgtcttcatgtcaaacctgacgtttcagagctgatgtttgcagattgggttgaatttagtccatacgaaattggcatggctaaatatggtacttttatggctcccgacttatttggaagcaaattttttatgggaacagtcgttaagaagtatgaagaaaaccccttgcatttcttaatgggtgtctggggcagtgccttttccatattgttcaacagagttttgggcgtttctggttcacaaagcagaggctccacaatggaggaagaattagaaaatattaccacaaagcatattgtgagtaatgatagctcggacagtgatgatgaatcacacgaacccaaaggcactgaaaatgaagatgctggaagtgactatcaaagtgataatcaagcaagttggattcatcgtatgataatggccttggtgagtgattcagctttattcaataccagagaaggacgtgctgggaaggtacacaacttcatgctgggcttgaatctcaatacatcttatccactgtctcctttgagtgactttgccacacaggactcctttgatgatgatgaactggatgcagctgtagcagatcctgatgaatttgagcgaatatatgagcctctggatgtcaaaagtaaaaagattcatgtagtggacagtgggctcacatttaacctgccgtatcccttgatactgagacctcagagaggggttgatctcataatctcctttgacttttctgcaaggccaagtgactctagtcctccgttcaaggaacttctacttgcagaaaagtgggctaaaatgaacaagctcccctttccaaagattgatccttatgtgtttgatcgggaagggctgaaggagtgctatgtctttaaacccaagaatcctgatatggagaaagattgcccaaccatcatccactttgttctggccaacatcaacttcagaaagtacaaggctccaggtgttccaagggaaactgaggaagagaaagaaatcgctgactttgatatttttgatgacccagaatcaccattttcaaccttcaattttcaatatccaaatcaagcattcaaaagactacatgatcttatgcacttcaatactctgaacaacattgatgtgataaaagaagccatggttgaaagcattgaatatagaagacagaatccatctcgttgctctgtttcccttagtaatgttgaggcaagaagatttttcaacaaggagtttctaagtaaacccaaagcatagttcatgtactggaaatggcagcagtttctgatgctgaggcagtttgcaatcccatgacaactggatttaaaagtacagtacagatagtcgtactgatcatgagagactggctgatactcaaagttgcagttacttagctgcatgagaataatactattataagttaggtgacaaatgatgttgattatgtaaggatatacttagctacattttcagtcagtatgaacttcctgatacaaatgtagggatatatactgtatttttaaacatttctcaccaactttcttatgtgtgttctttttaaaaattttttttcttttaaaatatttaacagttcaatctcaataagacctcgcattatgtatgaatgttattcactgactagatttattcataccatgagacaacactatttttatttatatatgcatatatatacatacatgaaataaatacatcaatataaaaataaaaaaaaacggaattc

SEQ ID NO: 2185 - protein, 749 aa, Homo sapien
MSFIDPYQHIIVEHQYSHKFTVVVLRATKVTKGAFGDMLDTPDPYVELFISTTPDSRKRTRHFNNDINPVWNETFEFILDPNQENVLEITLMDANYVMDETLGTATFTVSSMKVGEKKEVPFIFNQVTEMVLEMSLEVCSCPDLRFSMALCDQEKTFRQQRKEHIRESMKKLLGPKNSEGLHSARDVPVVAILGSGGGFRAMVGFSGVMKALYESGILDCATYVAGLSGSTWYMSTLYSHPDFPEKGPEEINEELMKNVSHNPLLLLTPQKVKRYVESLWKKKSSGQPVTFTDIFGMLIGETLIHNRMNTTLSSLKEKVNTAQCPLPLFTCLHVKPDVSELMFADWVEFSPYEIGMAKYGTFMAPDLFGSKFFMGTVVKKYEENPLHFLMGVWGSAFSILFNRVLGVSGSQSRGSTMEEELENITTKHIVSNDSSDSDDESHEPKGTENEDAGSDYQSDNQASWIHRMIMALVSDSALFNTREGRAGKVHNFMLGLNLNTSYPLSPLSDFATQDSFDDDELDAAVADPDEFERIYEPLDVKSKKIHVVDSGLTFNLPYPLILRPQRGVDLIISFDFSARPSDSSPPFKELLLAEKWAKMNKLPFPKIDPYVFDREGLKECYVFKPKNPDMEKDCPTIIHFVLANINFRKYKAPGVPRETEEEKEIADFDIFDDPESPFSTFNFQYPNQAFKRLHDLMHFNTLNNIDVIKEAMVESIEYRRQNPSRCSVSLSNVEARRFFNKEFLSKPKA

SEQ ID NO: 2186 - DNA, 3140 bp, Homo sapien
ggcgggcgctcggcgactcgtccccggggccccgcgcgggcccgggcagcaggggcgtgatgtcacggcagggagggggcgcgggagccgccgggccggcggggaggcgggggaggtgttttccagctttaaaaaggcaggaggcagagcgcggccctgcgtcagagcgagactcagaggctccgaactcgccggcggagtcgccgcgccagatcccagcagcagggcgcgggcaccggggcgcgggcagggctcggagccaccgcgcaggtcctagggccgcggccgggccccgccacgcgcgcacacgcccctcgatgactttcctccggggcgcgcggcgctgagcccggggcgagggctgtcttcccggagacccgaccccggcagcgcggggcggccgcttctcctgtgcctccgcccgccgctccactccccgccgccgccgcgcggatgccaagcaccagctttccagtcccttccaagtttccacttggccctgcggctgcggtcttcgggagaggagaaactttggggcccgcgccgcgcgccggcggcaccatgaagtcagcggaggaagaacactatggctatgcatcctccaacgtcagccccgccctgccgctccccacggcgcactccaccctgccggccccgtgccacaaccttcagacctccacaccgggcatcatcccgccggcggatcacccctcggggtacggagcagctttggacggtgggcccgcgggctacttcctctcctccggccacaccaggcctgatggggcccctgccctggagagtcctcgcatcgagataacctcgtgcttgggcctgtaccacaacaataaccagtttttccacgatgtggaggtggaagacgtcctccctagctccaaacggtccccctccacggccacgctgagtctgcccagcctggaggcctacagagacccctcgtgcctgagcccggccagcagcctgtcctcccggagctgcaactcagaggcctcctcctacgagtccaactactcgtacccgtacgcgtccccccagacgtcgccatggcagtctccctgcgtgtctcccaagaccacggaccccgaggagggctttccccgcgggctgggggcctgcacactgctgggttccccgcggcactccccctccacctcgccccgcgccagcgtcactgaggagagctggctgggtgcccgctcctccagacccgcgtccccttgcaacaagaggaagtacagcctcaacggccggcagccgccctactcaccccaccactcgcccacgccgtccccgcacggctccccgcgggtcagcgtgaccgacgactcgtggttgggcaacaccacccagtacaccagctcggccatcgtggccgccatcaacgcgctgaccaccgacagcagcctggacctgggagatggcgtccctgtcaagtcccgcaagaccaccctggagcagccgccctcagtggcgctcaaggtggagcccgtcggggaggacctgggcagccccccgcccccggccgacttcgcgcccgaagactactcctctttccagcacatcaggaagggcggcttctgcgaccagtacctggcggtgccgcagcacccctaccagtgggcgaagcccaagcccctgtcccctacgtcctacatgagcccgaccctgcccgccctggactggcagctgccgtcccactcaggcccgtatgagcttcggattgaggtgcagcccaagtcccaccaccgagcccactacgagacggagggcagccggggggccgtgaaggcgtcggccggaggacaccccatcgtgcagctgcatggctacttggagaatgagccgctgatgctgcagcttttcattgggacggcggacgaccgcctgctgcgcccgcacgccttctaccaggtgcaccgcatcacagggaagaccgtgtccaccaccagccacgaggccatcctctccaacaccaaagtcctggagatcccactcctgccggagaacagcatgcgagccgtcattgactgtgccggaatcctgaaactcagaaactccgacattgaacttcggaaaggagagacggacatcgggaggaagaacacacgggtacggctggtgttccgcgttcacgtcccgcaacccagcggccgcacgctgtccctgcaggtggcctccaaccccatcgaatgctcccagcgctcagctcaggagctgcctctggtggagaagcagagcacggacagctatccggtcgtgggcgggaagaagatggtcctgtctggccacaacttcctgcaggactccaaggtcattttcgtggagaaagccccagatggccaccatgtctgggagatggaagcgaaaactgaccgggacctgtgcaagccgaattctctggtggttgagatcccgccatttcggaatcagaggataaccagccccgttcacgtcagtttctacgtctgcaacgggaagagaaagcgaagccagtaccagcgtttcacctaccttcccgccaacggtaacgccatctttctaaccgtaagccgtgaacatgagcgcgtggggtgctttttctaaagacgcagaaacgacgtcgccgtaaagcagcgtggcgtgttgcacatttaactgtgtgatgtcccgttagtgagaccgagccatcgatgccctgaaaaggaaaggaaaagggaagcttcggatgcattttccttgatccctgttgggggtggggggcgggggttgcatactcagatagtcacggttattttgcttcttgcgaatgtataacagccaaggggaaaacatggctcttctgctccaaaaaactgagggggtcctggtgtgcatttgcaccctaaagctgcttacggtgaaaaggcaaataggtatagctattttgcaggcacctttaggaataaactttgcttttaagcctgtagtcctgatgtggtctttaaggatggtgaatgagctttgtgctgggcggacgtccccgagacacttctccaggggtaacttcatctcctgggaccacgggcatccaggctggggcaccttctcctcaacctgcctgcccctcacccgccgtgggaatggctccttttcactcatac

SEQ ID NO: 2187 - protein, 716 aa, Homo sapien
MPSTSFPVPSKFPLGPAAAVFGRGETLGPAPRAGGTMKSAEEEHYGYASSNVSPALPLPTAHSTLPAPCHNLQTSTPGIIPPADHPSGYGAALDGGPAGYFLSSGHTRPDGAPALESPRIEITSCLGLYHNNNQFFHDVEVEDVLPSSKRSPSTATLSLPSLEAYRDPSCLSPASSLSSRSCNSEASSYESNYSYPYASPQTSPWQSPCVSPKTTDPEEGFPRGLGACTLLGSPRHSPSTSPRASVTEESWLGARSSRPASPCNKRKYSLNGRQPPYSPHHSPTPSPHGSPRVSVTDDSWLGNTTQYTSSAIVAAINALTTDSSLDLGDGVPVKSRKTTLEQPPSVALKVEPVGEDLGSPPPPADFAPEDYSSFQHIRKGGFCDQYLAVPQHPYQWAKPKPLSPTSYMSPTLPALDWQLPSHSGPYELRIEVQPKSHHRAHYETEGSRGAVKASAGGHPIVQLHGYLENEPLMLQLFIGTADDRLLRPHAFYQVHRITGKTVSTTSHEAILSNTKVLEIPLLPENSMRAVIDCAGILKLRNSDIELRKGETDIGRKNTRVRLVFRVHVPQPSGRTLSLQVASNPIECSQRSAQELPLVEKQSTDSYPVVGGKKMVLSGHNFLQDSKVIFVEKAPDGHHVWEMEAKTDRDLCKPNSLVVEIPPFRNQRITSPVHVSFYVCNGKRKRSQYQRFTYLPANGNAIFLTVSREHERVGCFF

SEQ ID NO: 2188 - DNA, 1493 bp, Homo sapien
ttcctttcatgttcagcatttctactccttccaagaagagcagcaaagctgaagtagcagcaacagcaccagcagcaacagcaaaaaacaaacatgagtgtgaagggcatggctatagccttggctgtgatattgtgtgctacagttgttcaaggcttccccatgttcaaaagaggacgctgtctttgcataggccctggggtaaaagcagtgaaagtggcagatattgagaaagcctccataatgtacccaagtaacaactgtgacaaaatagaagtgattattaccctgaaagaaaataaaggacaacgatgcctaaatcccaaatcgaagcaagcaaggcttataatcaaaaaagttgaaagaaagaatttttaaaaatatcaaaacatatgaagtcctggaaaagggcatctgaaaaacctagaacaagtttaactgtgactactgaaatgacaagaattctacagtaggaaactgagacttttctatggttttgtgactttcaacttttgtacagttatgtgaaggatgaaaggtgggtgaaaggaccaaaaacagaaatacagtcttcctgaatgaatgacaatcagaattccactgcccaaaggagtccagcaattaaatggatttctaggaaaagctaccttaagaaaggctggttaccatcggagtttacaaagtgctttcacgttcttacttgttgtattatacattcatgcatttctaggctagagaaccttctagatttgatgcttacaactattctgttgtgactatgagaacatttctgtctctagaagttatctgtctgtattgatctttatgctatattactatctgtggttacagtggagacattgacattattactggagtcaagcccttataagtcaaaagcatctatgtgtcgtaaagcattcctcaaacattttttcatgcaaatacacacttctttccccaaatatcatgtagcacatcaatatgtagggaaacattcttatgcatcatttggtttgttttataaccaattcattaaatgtaattcataaaatgtactatgaaaaaaattatacgctatgggatactggcaacagtgcacatatttcataaccaaattagcagcaccggtcttaatttgatgtttttcaacttttattcattgagatgttttgaagcaattaggatatgtgtgtttactgtactttttgttttgatccgtttgtataaatgatagcaatatcttggacacatttgaaatacaaaatgtttttgtctaccaaagaaaaatgttgaaaaataagcaaatgtatacctagcaatcacttttactttttgtaattctgtctcttagaaaaatacataatctaatcaatttctttgttcatgcctatatactgtaaaatttaggtatactcaagactagtttaaagaatcaaagtcatttttttctctaataaactaccacaacctttcttttttaaaaaaaaaaa

SEQ ID NO: 2189 - protein, 94 aa, Homo sapien
MSVKGMAIALAVILCATVVQGFPMFKRGRCLCIGPGVKAVKVADIEKASIMYPSNNCDKIEVIITLKENKGQRCLNPKSKQARLIIKKVERKNF

SEQ ID NO: 2190 - DNA, 960 bp, Homo sapien
agcagctccaaccagggcagccttcctgagaagatgcaaccaatcctgcttctgctggccttcctcctgctgcccagggcagatgcaggggagatcatcgggggacatgaggccaagccccactcccgcccctacatggcttatcttatgatctgggatcagaagtctctgaagaggtgcggtggcttcctgatacaagacgacttcgtgctgacagctgctcactgttggggaagctccataaatgtcaccttgggggcccacaatatcaaagaacaggagccgacccagcagtttatccctgtgaaaagacccatcccccatccagcctataatcctaagaacttctccaacgacatcatgctactgcagctggagagaaaggccaagcggaccagagctgtgcagcccctcaggctacctagcaacaaggcccaggtgaagccagggcagacatgcagtgtggccggctgggggcagacggcccccctgggaaaacactcacacacactacaagaggtgaagatgacagtgcaggaagatcgaaagtgcgaatctgacttacgccattattacgacagtaccattgagttgtgcgtgggggacccagagattaaaaagacttcctttaagggggactctggaggccctcttgtgtgtaacaaggtggcccagggcattgtctcctatggacgaaacaatggcatgcctccacgagcctgcaccaaagtctcaagctttgtacactggataaagaaaaccatgaaacgctactaactacaggaagcaaactaagcccccgctgtaatgaaacaccttctctggagccaagtccagatttacactgggagaggtgccagcaactgaataaatacctctcccagtgtaaatctggagccaagtccagatttacactgggagaggtgccagcaactgaataaatacctcttagctgagtgg

SEQ ID NO: 2191 - protein, 247 aa, Homo sapien
MQPILLLLAFLLLPRADAGEIIGGHEAKPHSRPYMAYLMIWDQKSLKRCGGFLIQDDFVLTAAHCWGSSINVTLGAHNIKEQEPTQQFIPVKRPIPHPAYNPKNFSNDIMLLQLERKAKRTRAVQPLRLPSNKAQVKPGQTCSVAGWGQTAPLGKHSHTLQEVKMTVQEDRKCESDLRHYYDSTIELCVGDPEIKKTSFKGDSGGPLVCNKVAQGIVSYGRNNGMPPRACTKVSSFVHWIKKTMKRY

SEQ ID NO: 2192 - DNA, 581 bp, Homo sapien
gatacagtgctccccactgaaaattaaacctaaaaaatgtcacatattggtatgttgttaacctggtagattaaatcatgagaatgattagaaagacgggcaacacagcgggttacatccacactgctgatcacaccaacgacaggagctgataagcaagaaagcgtcacagccagcgtctgttcacccaaggttgacaagtgaagtttctctaatgttgattgttagccgatttgtaacctggcatttacttagcaactgccttatcaattacaggatttgccggtaaaagcagactcaaatataaaggtttttggcttaacttggtttattatagttgctctatgtttgtaaacagacaatctctaatgtctgattatttgtatcacagatctgcagctgccttggacttgaatccatgcaatgtttagagtgtgaagtcagttacttgttgatgttttcttactgtatcaatgaaatacatattgtcatgtcagttcttgccaggaacttctcaacaaaatggaattttttttttcagtatttcaataaatattgatatgcccagcctgataattttt

SEQ ID NO: 2193 - protein, 35 aa, Homo sapien
MKYILSCQFLPGTSQQNGIFFFSISINIDMPSLII

SEQ ID NO: 2194 - DNA, 1280 bp, Homo sapien
cgcggcggcgcggagctcgggcggccgtggaggaactcagcctcggccgcaggaggcgccgggagcggagccgccgggagtcgcgcaacaggtttccttctccatccgtgcgcccacaggggacgcgcgccctgccgggagaggggcttctcggttcgcactctcgctcccagtccaggcaaaatgaaagaccggctagcagaacttctggacttgtccaagcaatatgaccagcagttcccagacggggacgatgagtttgactcgccccacgaggacatcgtgttcgagacggaccacatcctggagtccctgtaccgagacatccgggacattcaggatgaaaaccagctgctggtggccgacgtgaagcggctgggaaagcagaacgcccgcttcctcacgtccatgcggcgcctcagcagcatcaagcgcgacaccaactccatcgccaaggccttcagggcccggggcgaggtcatccactgcaagctgcgcgccatgaaggagctgagcgaggcggctgaggcccagcacggcccgcactcggcagtggcgcgcatttcgcgggcgcagtacaacgcgctcaccctcaccttccagcgcgccatgcacgactacaaccaggccgagatgaagcagcgcgacaactgcaagatccgcatccagcgccagctggagatcatgggcaaggaagtctcgggcgaccagatcgaggacatgttcgagcagggtaagtgggacgtgttttccgagaacttgctggccgacgtgaagggccgcgggccgcccacaacgagatcgagagccgccaccgcgaactgctgcgcctggagagccgccatccgcgacgtacacgagctcttcttgcagatggcggtgctggtggagaagcaggccgacaccctgaacgtcatcgagctcaacgtacaaaagacggtcgactacaccggccaggccaaggcgcaggtgcggaaggccgtgcagtacgaggagaagaacccctgccggaccctctgctgcttctgctgtccctgcctcaagtagcaggccggcccgggccgccaccgcccatcccagaccatggagcgcgctgggaaggacgcaccaaagccgggagctctgccctgcagggagttgccccaaccctttccggaactcagtctttagaaaagaaacgccaggttcaagaattgcaaaccagcctgtgcttggaaagatggttagttgataccgtccgatgattcttcagtaaagatagattcccacctcgtgccgaa

SEQ ID NO: 2195 - protein, 287 aa, Homo sapien
MKDRLAELLDLSKQYDQQFPDGDDEFDSPHEDIVFETDHILESLYRDIRDIQDENQLLVADVKRLGKQNARFLTSMRRLSSIKRDTNSIAKAFRARGEVIHCKLRAMKELSEAAEAQHGPHSAVARISRAQYNALTLTFQRAMHDYNQAEMKQRDNCKIRIQRQLEIMGKEVSGDQIEDMFEQGKWDVFSENLLADVKGRGPPTTRSRAATANCCAWRAAIRDVHELFLQMAVLVEKQADTLNVIELNVQKTVDYTGQAKAQVRKAVQYEEKNPCRTLCCFCCPCLK

SEQ ID NO: 2196 - DNA, 2806 bp, Homo sapien
gtgaaatcccattctctggctggagacacagatggcctcaaatgagagagatgctatatcgtggtaccaaaagaagattggagcctacgatcagcagatatgggaaaagtcaatcgaacagactcagattaagggtttgaaaaacaaaccgaaaaagatgggccacataaagccagacttgattgacgttgacttaatcagagggtcaacatttgccaaagcaaaacctgaaattccatggacatctctgactcggaaggggcttgttcgagttgtattttttccattgttcagcaattggtggattcaggttacctctttaagaatctttgtttggctgttactactttatttcatgcaagttatagcaattgtcttatatttgatgatgcctattgtgaacataagtgaagtacttggacccttgtgccttatgctactcatgggaactgtccactgtcaaattgtgtctactcagataacaagaccatcaggaaacaatggaaatcgaagaagaagaaaattacgaaaaactgtaaatggtgatgggagccgagaaaatggaaataactcctctgataaagtcagaggaatagaaactttggaatctgtacccattattggtggtttttgggagactatctttggcaacaggattaaaagagtaaaattaatatctaacaaagggactgaaactgacaatgacccaagttgtgtccatcctatcattaagaggagacaatgtcgaccagagattagaatgtgccaaacaagagagaaaccaaaattttcagatggagaaaagtgccgtagggaggcttttaggcgtttgggtaatggggtgtctgatgacctgtcaagtgaagaagatggtgaagcacggacacagatgatattattgcgtaggagtgtggaaggggcctcaagtgacaatggttgtgaagttaagaatagaaaatcaatactttcaaggcacctaaactctcaggtaaagaaaaccactacaaggtggtgtcatattgtgcgggattcagatagtctggctgaatcagaatttgaatcagcagccttcagccagggctctagatcgggtgtgagtggtggctctcgaagcctcaacatgtcaagaagagactcagaaagcacccgccatgactcggagactgaggacatgttatgggacgacctgctacatggcccagagtgccggtcatctgtcaccagtgacagtgagggggcccatgtgaatacccttcactcagggaccaaacgtgaccccaaagaggatgtttttcagcagaatcatttattctggcttcagaattcaagtccttcctctgatcgagttagtgcaataatctgggaggggaatgagtgcaaaaagatggatatgtctgtgttggaaataagtggcatcatcatgagcagggtcaatgcctatcagcaaggagtaggttatcagatgctgggaaatgttgtcactattggattagcattttttccattcttacatcgacttttccgtgagaagagccttgaccaactaaagtccatttcagctgaggagatcttgactctctttggtggggcaccacctgttacacctattattgtttggtcgataattaatttttttgaaagattgtgtcttacttggatgttttttttcatgatgtgtgtggcagagagaacatataaacagagatttttatttgcaaaactcttcagccatattacttctgccaggaaagctaggaaatatgaaatacctcatttcagacttaagaaggtggagaatattaaaatatggttatcactgcgttcctatctaaagagacgggggccacagcgttcagttgatgtggttgtatcctcggttttcctactgacactttcgattgctttcatttgttgtgctcaggttctccaaggacataaaacttccctgaatgatgcttataactgggagtttttgatctgggaaacagctttactactttttttattgcgtctggcctcactggggtctgaaaccaataagaaatacagcaatgtttcaatattacttacagaacagattaatttatatcttaagatggaaaaaaagccaaataagaaagaacagcttactctagtaaacaatgtattaaagctgtccaccaagttgttgaaagagctggacacaccatttagactctatggactgacaatgaatcccttaatctacaatatcacaagagtagttatcctttctgctgtctcaggtgttataagtgatcttctaggatttaatataagactgtggaaaattaaatcataagctgagttaaatgcctggactctcccctggctggtatcaaaacttacctatcaaggaaagtgatgactgcagaaaccagtgagatacccacctgcttgttcacatgcacaggtgctctcagctctgcaaagcgaatgaatggtgtttccggaggagcaagtccttttccaactgggtgtgcatgctaaaaacctgtattttcatgcttttcaaacaacatgaatagtcagctgactaaagactgtgtgtgttgtggtaacaccaaagacaattttgatagtttagcttcagtactgtgacagttatgtttactggacatagtctttttggcaactatgatagatgcccaaagcatgaagcaaagctattttatggaaatatgcaaattcaatacttttcattatagtctatagaactggagatttcatttctctatcaaagagagatcaagcgaactatttaggtaaatccgaataaaagactttt

SEQ ID NO: 2197 - protein, 762 aa, Homo sapien
MASNERDAISWYQKKIGAYDQQIWEKSIEQTQIKGLKNKPKKMGHIKPDLIDVDLIRGSTFAKAKPEIPWTSLTRKGLVRVVFFPLFSNWWIQVTSLRIFVWLLLLYFMQVIAIVLYLMMPIVNISEVLGPLCLMLLMGTVHCQIVSTQITRPSGNNGNRRRRKLRKTVNGDGSRENGNNSSDKVRGIETLESVPIIGGFWETIFGNRIKRVKLISNKGTETDNDPSCVHPIIKRRQCRPEIRMCQTREKPKFSDGEKCRREAFRRLGNGVSDDLSSEEDGEARTQMILLRRSVEGASSDNGCEVKNRKSILSRHLNSQVKKTTTRWCHIVRDSDSLAESEFESAAFSQGSRSGVSGGSRSLNMSRRDSESTRHDSETEDMLWDDLLHGPECRSSVTSDSEGAHVNTLHSGTKRDPKEDVFQQNHLFWLQNSSPSSDRVSAIIWEGNECKKMDMSVLEISGIIMSRVNAYQQGVGYQMLGNVVTIGLAFFPFLHRLFREKSLDQLKSISAEEILTLFGGAPPVTPIIVWSIINFFERLCLTWMFFFMMCVAERTYKQRFLFAKLFSHITSARKARKYEIPHFRLKKVENIKIWLSLRSYLKRRGPQRSVDVVVSSVFLLTLSIAFICCAQVLQGHKTSLNDAYNWEFLIWETALLLFLLRLASLGSETNKKYSNVSILLTEQINLYLKMEKKPNKKEQLTLVNNVLKLSTKLLKELDTPFRLYGLTMNPLIYNITRVVILSAVSGVISDLLGFNIRLWKIKS

SEQ ID NO: 2198 - DNA, 1672 bp, Homo sapien
gatctctagaatagtcttaagtctatgtggcggcgaggccgcggcgacaaggtagccacccccgcagcatgcctcgaccgcggtccgcagctgcaccgcctctccccgccccccagggtgcgctggtcccggtcgcgcgctcagacctccgcatcccgggcgtggtcggttaagtccccggccgtgacccaggcccggggagctagtctccgcccttcgctcttacggatcccctcggagtacgccgcaccatgcagctcaggctcttccggcgcctccttctcgccgctttgctgctggtgatcgtctggaccctcttcgggccttcggggttgggggaggagctgctgagcctctcactagcctccctgctcccagcccccgcctcaccggggccgcccctggccctgccccgcctcttgatccccaaccaggaagcttgcagtggtcccggggcccctcccttcctgctcatcctggtgtgcacggctccggagaacctgaaccagagaaacgccattcgggcttcgtggggcgggctgcgcgaggcccgggggctcagggtacagacgctattcttgctgggagagccgaacgcacagcaccccgtgtggggttcccaggggagtgacctggcctcggagtcagcagcccagggggatatcttgcaggccgccttccaggactcctaccgcaacctcaccctaaagaccctcagcgggctgaactgggctgagaaacactgccccatggcccgatacgtcctcaagacggacgatgatgtgtatgtcaacgtccctgaactggtatcagagctggtcttgcgagggggccgttgggggcaatgggagagaagcacggaaccccagagagaggctgagcaggaaggaggccaggttttgcacagcgaggaagtgcctcttctgtacttgggccgggtgcactggcgcgtgaacccctctcggacaccggggggcaggcaccgcgtatcagaggagcagtggcctcacacctggggcccctttccaccctatgcctcaggcacggggtatgtgctgtcagcgtctgctgtgcagctcattctcaaggtggccagccgggcaccccttctcccattagaggatgtctttgtgggggtaagtgcccgacgaggaggcctcgccccaacacagtgtgtcaagctggctggtgccacccactacccgctagaccggtgctgctatgggaaattcctgctgacgtcccacaggctggacccctggaagatgcaggaagcctggaagctggtgggtggctctgacggggaaaggactgcgcccttttgctcctggttccagggagtcctgggcatcctgcggtgtcgagcaatagcctggcttcagagctgagagtgcctggggccacaggaaaggcaggaacaggaccttctctctcccaggcccaacgcaggggccctcactggctgcagctgatctgtttccttataccagatcctcagtctcactaaagacagcgatatgggagacacccaggggcctggcccgccagcccaaaagatggtcatcgggaagagaaaaagaaaaaaatgctgcagttgttctctcaagctagggcagaagagggtgtcaagctcctcaataaacttgtctccacttaaaaaaaaaaaaaaaaa

SEQ ID NO: 2199 - protein, 378 aa, Homo sapien
MQLRLFRRLLLAALLLVIVWTLFGPSGLGEELLSLSLASLLPAPASPGPPLALPRLLIPNQEACSGPGAPPFLLILVCTAPENLNQRNAIRASWGGLREARGLRVQTLFLLGEPNAQHPVWGSQGSDLASESAAQGDILQAAFQDSYRNLTLKTLSGLNWAEKHCPMARYVLKTDDDVYVNVPELVSELVLRGGRWGQWERSTEPQREAEQEGGQVLHSEEVPLLYLGRVHWRVNPSRTPGGRHRVSEEQWPHTWGPFPPYASGTGYVLSASAVQLILKVASRAPLLPLEDVFVGVSARRGGLAPTQCVKLAGATHYPLDRCCYGKFLLTSHRLDPWKMQEAWKLVGGSDGERTAPFCSWFQGVLGILRCRAIAWLQS

SEQ ID NO: 2200 - DNA, 781 bp, Homo sapien
acacagagagaaaggctaaagttctctggaggatgtggctgcagagcctgctgctcttgggcactgtggcctgcagcatctctgcacccgcccgctcgcccagccccagcacgcagccctgggagcatgtgaatgccatccaggaggcccggcgtctcctgaacctgagtagagacactgctgctgagatgaatgaaacagtagaagtcatctcagaaatgtttgacctccaggagccgacctgcctacagacccgcctggagctgtacaagcagggcctgcggggcagcctcaccaagctcaagggccccttgaccatgatggccagccactacaagcagcactgccctccaaccccggaaacttcctgtgcaacccagattatcacctttgaaagtttcaaagagaacctgaaggactttctgcttgtcatcccctttgactgctgggagccagtccaggagtgagaccggccagatgaggctggccaagccggggagctgctctctcatgaaacaagagctagaaactcaggatggtcatcttggagggaccaaggggtgggccacagccatggtgggagtggcctggacctgccctgggccacactgaccctgatacaggcatggcagaagaatgggaatattttatactgacagaaatcagtaatatttatatatttatatttttaaaatatttatttatttatttatttaagttcatattccatatttattcaagatgttttaccgtaataattattattaaaaatatgcttcta

SEQ ID NO: 2201 - protein, 144 aa, Homo sapien
MWLQSLLLLGTVACSISAPARSPSPSTQPWEHVNAIQEARRLLNLSRDTAAEMNETVEVISEMFDLQEPTCLQTRLELYKQGLRGSLTKLKGPLTMMASHYKQHCPPTPETSCATQIITFESFKENLKDFLLVIPFDCWEPVQE

SEQ ID NO: 2202 - DNA, 2063 bp, Homo sapien
tgccgggatccaggtctccggggtccgctttggccagaggcgcggaaggaagcagtgcccggcgacactgcacccatcccggctgcttttgctgcgccctctcagcttcccaagaaaggcatcgtcatgtgatcatcacctaagaactagaacatcagcaggccctagaagcctcactcttgcccctccctttaatatctcaaaggatgacacttctgtggtgtgtagtgagtctctacttttatggaatcctgcaaagtgatgcctcagaacgctgcgatgactggggactagacaccatgaggcaaatccaagtgtttgaagatgagccagctcgcatcaagtgcccactctttgaacacttcttgaaattcaactacagcacagcccattcagctggccttactctgatctggtattggactaggcaggaccgggaccttgaggagccaattaacttccgcctccccgagaaccgcattagtaaggagaaagatgtgctgtggttccggcccactctcctcaatgacactggcaactatacctgcatgttaaggaacactacatattgcagcaaagttgcatttcccttggaagttgttcaaaaagacagctgtttcaattcccccatgaaactcccagtgcataaactgtatatagaatatggcattcagaggatcacttgtccaaatgtagatggatattttccttccagtgtcaaaccgactatcacttggtatatgggctgttataaaatacagaattttaataatgtaatacccgaaggtatgaacttgagtttcctcattgccttaatttcaaataatggaaattacacatgtgttgttacatatccagaaaatggacgtacgtttcatctcaccaggactctgactgtaaaggtagtaggctctccaaaaaatgcagtgccccctgtgatccattcacctaatgatcatgtggtctatgagaaagaaccaggagaggagctactcattccctgtacggtctattttagttttctgatggattctcgcaatgaggtttggtggaccattgatggaaaaaaacctgatgacatcactattgatgtcaccattaacgaaagtataagtcatagtagaacagaagatgaaacaagaactcagattttgagcatcaagaaagttacctctgaggatctcaagcgcagctatgtctgtcatgctagaagtgccaaaggcgaagttgccaaagcagccaaggtgaagcagaaaggtaatagatgcggtcagtgatgaatctctcagctccaaattaacattgtggtgaataaggacaaaaggagagattgagaacaagagagctccagcacctagcccgacggcatctaacccatagtaatgaatcaaacttaaatgaaaaatatgaaagttttcatctatgtaagatactcaaaatattgtttctgatattgttagtaccgtaatgcccaaatgtagctaaaaaaatcgacgtgagtacagtgagacacaattttgtgtctgtacaattatgaaaaattaaaaacaaagaaaatattcaaagctaccaaagatagaaaaaactggtagagccacatattgttggtgaattattaagacccttttaaaaatcattcatggtagagtttaagagtcataaaaaagattgcatcatctgacctaagactttcggaatttttcctgaacaaataacagaaagggaattatataccttttaatattattagaagcattatctgtagttgtaaaacattattaatagcagccatccaattgtatgcaactaattaaggtattgaatgtttattttccaaaaatgcataattataatattattttaaacactatgtatcaatatttaagcaggtttataatataccagcagccacaattgctaaaatgaaaatcatttaaattatgattttaaatggtataaacatgatttctatgttgatagtactatattattctacaataaatggaaattataaagccttcttgtcagaagtgctgctcctaaaaaaaaaaaaaaaaaaaaaa

SEQ ID NO: 2203 - protein, 356 aa, Homo sapien
MTLLWCVVSLYFYGILQSDASERCDDWGLDTMRQIQVFEDEPARIKCPLFEHFLKFNYSTAHSAGLTLIWYWTRQDRDLEEPINFRLPENRISKEKDVLWFRPTLLNDTGNYTCMLRNTTYCSKVAFPLEVVQKDSCFNSPMKLPVHKLYIEYGIQRITCPNVDGYFPSSVKPTITWYMGCYKIQNFNNVIPEGMNLSFLIALISNNGNYTCVVTYPENGRTFHLTRTLTVKVVGSPKNAVPPVIHSPNDHVVYEKEPGEELLIPCTVYFSFLMDSRNEVWWTIDGKKPDDITIDVTINESISHSRTEDETRTQILSIKKVTSEDLKRSYVCHARSAKGEVAKAAKVKQKGNRCGQ

SEQ ID NO: 2204 - DNA, 1242 bp, Homo sapien
agttacgttcggggcgtggccgggagcacgttggctccgccccctggcggctgcctcagcggcggcggcggcgcaggctcagagcagaccccgcccggcgaggaggagggagggccgccagtgtcgacatgctgctggaggaggttcgcgccggcgaccggctgagtggggcggcggcccggggcgacgtgcaggaggtgcgccgccttctgcaccgcgagctggtgcatcccgacgccctcaaccgcttcggcaagacggcgctgcaggtcatgatgtttggcagcaccgccatcgccctggagctgctgaagcaaggtgccagccccaatgtccaggacacctccggtaccagtccagtccatgacgcagcccgcactggattcctggacaccctgaaggtcctagtggagcacggggctgatgtcaacgtgcctgatggcaccggggcacttccaatccatctggcagttcaagagggtcacactgctgtggtcagctttctggcagctgaatctgatctccatcgcagggacgccaggggtctcacacccttggagctggcactgcagagaggggctcaggacctcgtggacatcctgcagggccacatggtggccccgctgtgatctggggtcaccctctccagcaagagaaccccgtggggttatgtatcagaagagaggggaagaaacactttctcttcttgtttctcctgcccactgctgcagtaggggaggagcacagtttgtggcttataggtgttggttttgggggtgtgagtgtttgggggacgtttctcatttgtttttctcactccttttggtgtgttggacagagaagggctcctgcaggccacagccacctaaacggttcagtttcttctgcgcctcaggctgctggggcctcagacgagacccaagggcagagcatttaagagtgaagtcatgacctccagggagcctagaagctggtggccttggccggctgtgctcagagacctgaagtgtgcacgttgcttcaggcatggggggtggggggagcgtcccaaatcaataagaaggtagaatgagttatgagttattcatattctgttggaagcttgttttccagtctcttgtacagcgttttaaaagaaatggattctatttattatgctttattggaaaaaatgttgtaataatttaatgtttttacccattaaattaagacttgtgcatgatcaaaaaaaaaaaaaaaaaa

SEQ ID NO: 2205 - protein, 166 aa, Homo sapien
MLLEEVRAGDRLSGAAARGDVQEVRRLLHRELVHPDALNRFGKTALQVMMFGSTAIALELLKQGASPNVQDTSGTSPVHDAARTGFLDTLKVLVEHGADVNVPDGTGALPIHLAVQEGHTAVVSFLAAESDLHRRDARGLTPLELALQRGAQDLVDILQGHMVAPL

SEQ ID NO: 2206 - DNA, 1409 bp, Homo sapien
gaaagagacaaagcagcaattaaagtcagcccagcaccaactccgacgccaagcgttacactggaaactactttttaaagcaacaaaagagtctaaaacaaaatacaacatttcttaaatacactgtttccagaaagagctattttaacagaagcaactcaaagatatcccttcgacagaagtggaagtgctgaaaaatgctcatctctcacacagacttttgatggacaggagtttctaagtatcatgcctaccaacaagctgtaaaatgatcaccctgaacaatcaagatcaacctgtcccttttaacagctcacatccagatgaatacaaaattgcagcccttgtcttctatagctgtatcttcataattggattatttgttaacatcactgcattatgggttttcagttgtaccaccaagaagagaaccacggtaaccatctatatgatgaatgtggcattagtggacttgatatttataatgactttaccctttcgaatgttttattatgcaaaagatgaatggccatttggagagtacttctgccagattcttggagctctcacagtgttttacccaagcattgctttatggcttcttgcctttattagtgctgacagatacatggccattgtacagccgaagtacgccaaagaacttaaaaacacgtgcaaagccgtgctggcgtgtgtgggagtctggataatgaccctgaccacgaccacccctctgctactgctctataaagacccagataaagactccactcccgccacctgcctcaagatttctgacatcatctatctaaaagctgtgaacgtgctgaacctcactcgactgacattttttttcttgattcctttgttcatcatgattgggtgctacttggtcattattcataatctccttcacggcaggacgtctaagctgaaacccaaagtcaaggagaagtccataaggatcatcatcacgctgctggtgcaggtgctcgtctgctttatgcccttccacatctgtttcgctttcctgatgctgggaacgggggagaacagttacaatccctggggagcctttaccaccttcctcatgaacctcagcacgtgtctggatgtgattctctactacatcgtttcaaaacaatttcaggctcgagtcattagtgtcatgctataccgtaattaccttcgaagcatgcgcagaaaaagtttccgatctggtagtctacggtcactaagcaatataaacagtgaaatgttatgaataataaggttctttcatttcaatcccatcaaaattcacttcactaactactctggcgtcaatggatattctgtataatactatcaagtcccttttctcttgaaaaaataaattcattatcttcattttaaaaaaaaaaaaaaaa

SEQ ID NO: 2207 - protein, 331 aa, Homo sapien
MITLNNQDQPVPFNSSHPDEYKIAALVFYSCIFIIGLFVNITALWVFSCTTKKRTTVTIYMMNVALVDLIFIMTLPFRMFYYAKDEWPFGEYFCQILGALTVFYPSIALWLLAFISADRYMAIVQPKYAKELKNTCKAVLACVGVWIMTLTTTTPLLLLYKDPDKDSTPATCLKISDIIYLKAVNVLNLTRLTFFFLIPLFIMIGCYLVIIHNLLHGRTSKLKPKVKEKSIRIIITLLVQVLVCFMPFHICFAFLMLGTGENSYNPWGAFTTFLMNLSTCLDVILYYIVSKQFQARVISVMLYRNYLRSMRRKSFRSGSLRSLSNINSEML

SEQ ID NO: 2208 - DNA, 5050 bp, Homo sapien
cgaaggggggtgggccgggggaggggaggttcgttccgcggagcgcagccagaaccgggaccaagaatcgccttcagccctgtctggtgcatccttggcagaaagtgaggaggaaaacacccccattgttagatgaggtcttaatcatggaacatttgaagtcacgtaaagaaggttctttggcatggacacaagttcagtgggaggattagaattgactgatcagactcctgttttattagggagtacggccatggcaactagtctcacgaatgtaggaaactcatttagtggtccagctaatcctttagtgtctagatctaataagtttcagaactcgtcagtggaagatgatgatgatgttgtttttatcgaacctgtacaacctcccccaccttctgtaccagtggtagctgatcaaagaaccataacatttacatcatcaaaaaatgaagaactacaaggaaatgattccaaaattactccttcctcaaaagagttggcatctcagaagggaagtgtaagtgagacaattgtcattgatgatgaagaggacatggaaacaaatcaagggcaagagaaaaattcctccaattttattgaacgaagacctcctgagactaaaaacagaaccaatgatgtggatttctccacttccagtttttcaagaagtaaggtaaatgcaggaatgggtaatagtggtatcaccacagaaccagactctgaaattcagattgctaatgttacaactttagaaacaggtgtaagctctgtgaatgatggccaattagaaaatactgacgggcgagatatgaacttaatgattacacatgtaacatcactgcagaataccaacttgggagatgtctctaacggactgcagtcaagtaattttggtgttaatatacaaacatacaccccatctttaacttcacagaccaagactggagtaggaccttttaatcctggtagaatgaatgtggcaggagacgtttttcagaatggagaatctgcaactcatcataatcctgattcttggatctcccagtcagcttcatttccccgtaatcagaaacaaccaggggtggactctttatcaccagtggcctcacttcctaaacagattttccagccgtctgtccaacagcagcctactaaaccagttaaagtcacttgtgcaaactgcaaaaaacctttacagaagggccagacagcttatcaacgaaaaggatcagctcacctcttttgttctaccacctgcctttcttccttctcccacaagcctgctccaaagaaactctgtgttatgtgtaaaaaagatataactacaatgaaaggaaccattgttgctcaagtggattcaagtgagtccttccaggaattctgtagtacatcttgtttatctctctatgaagacaaacagaatcctactaaaggagctctaaataaatcaagatgtacaatctgtggtaaactaactgagattcgccatgaagtcagctttaaaaatatgactcataagctgtgcagtgaccactgctttaatagatatagaatggccaatggtttaataatgaattgctgtgaacagtgtggagagtacttgcccagtaaaggtgctggaaataatgttctggtgattgatggtcaacagaaaagattttgctgtcaaagttgtgtcagtgaatacaaacaggtaggtagccatccaagcttcctgaaggaggttcgagatcacatgcaggactctttcttaatgcagcctgagaaatatggaaaactgacaacttgtactggttgccgaacacagtgcaggttttttgatatgactcagtgtataggtcctaatggatatatggagccatattgttcaactgcttgtatgaacagtcacaagacaaaatatgcaaaatcacaaagtttgggaattatttgccatttttgtaagcgaaactctttacctcaataccaagccacaatgcctgatggaaaactgtacaacttttgcaattccagttgtgtggctaaatttcaggctctaagtatgcagtcatctccaaatggccagtttgtagcgccaagtgatattcagttgaaatgcaactactgcaaaaattccttttgttcaaaaccagaaatcctggaatgggagaacaaagtgcatcagttctgcagcaaaacttgttcagatgactataagaagttgcattgcatagttacatattgcgaatactgtcaagaggagaagactcttcatgaaacagtaaatttctctggcgttaagagacctttctgtagtgaaggctgcaaattattatacaaacaggattttgccagacgtttaggattgagatgtgttacttgcaactattgttctcagctatgtaagaagggagcaactaaagaactcgatggtgttgtgagagatttctgcagtgaagattgctgtaaaaaatttcaggattggtactacaaggctgcaaggtgtgactgttgtaaatctcaaggaactcttaaagagcgagttcagtggcgtggggaaatgaaacatttctgtgatcaacattgcttactgcgtttctactgtcaacaaaatgagcccaacatgacaactcagaaaggacctgaaaacttacattatgatcagggttgtcagacatctcgaaccaaaatgacaggttcagcaccacccccttctccaacacctaacaaagagatgaagaacaaagcagttctttgcaaacctttaacaatgacaaaagctacttactgtaaacctcacatgcagaccaaatcttgtcagacagatgatacttggaggacagaatatgttccagtgcctatccctgtgcctgtgtatatcccagttcctatgcacatgtacagtcagaatattcctgttcctactacagttcctgttcctgtgccagttcctgtttttctgcctgctccattggacagcagtgagaagattcctgcagcaattgaggagctaaaaagcaaggtttcttcagatgctcttgatacagagttgcttacaatgacggatatgatgagtgaagacgaggggaaaacagagacaaccaacatcaacagtgtaattattgaaacagatataattggttcagaccttttgaagaactctgacccagagacacagtccagcatgcctgatgtaccatatgaaccagatttggatatcgaaatagattttcccagagctgctgaggagcttgatatggaaaatgaatttttattaccacctgtttttggcgaagaatatgaggaacagcccagacctcgatctaaaaaaaagggagccaagagaaaggctgtatcaggataccagtctcatgatgatagttctgacaattcagaatgcagctttcctttcaaatatacgtatggcgtaaatgcatggaaacactgggtcaaaactaggcaacttgatgaagatcttctggtattagatgagttaaaatcttctaaatcagtaaagttaaaagaggatctactctctcacaccacagctgagcttaactatgggttagctcattttgtcaatgagatccgacggccaaatggagagaattatgcacctgacagcatctattacctttgccttggaatacaggagtatttgtgtggaagtaatcgaaaagacaacatatttattgatcctggataccaaacatttgagcaagaattgaataaaatactgcgaagctggcaaccaagcatacttccagatgggtcaatattctctcgagttgaagaagactatctctggaggataaaacaactaggatcacactctccagtagctcttctgaatacactgttctactttaacactaagtattttggcctgaaaacagtggaacaacacttaagactttcctttggcactgtgtttaggcattggaaaaaaaatcctttaacgatggaaaacaaagcgtgtcttcgataccaagtgtcttccttgtgtggaacagataatgaagataaaattactactggaaaaagaaaacatgaagatgatgagccagtatttgaacaaattgaaaacacagccaatccttccagatgtcctgtgaaaatgtttgaatgctacttgtctaaaagtccacagaatcttaatcagaggatggatgttttttatttgcaaccagaatgctctagttctacagatagccctgtctggtatacgtctacttcactggaccgaaacaccttggaaaatatgcttgtacgggttcttctagtaaaagatatttatgataaagacaattatgaactggatgaagacacagactaaaaaggaacgttgcagaagcaatcgggataaaacagcattagatagtcatgctgctagatctttattatggaaaacatttcaagtttactccttctgttttgagttttgtagcagtgtacccacgctgggtattaccatgtaaataatctgtgagtgaaagttgccattattctatgtagtggttttaggatacttaacaaatacattcaaattctttttttattattatttatttgattaggtatgtttgtaactttttacattacagaatatgaatgagaatgtgccatgtataatttttttcttgtagtaagaaacatccatattgcacaactctactgttgcaaagcttccttggaagggggctcttttactgggttcttaaccagatggttgtgtatgggtagcactactaaaagtttagaacttgcagtgtctttcggaatttttaaaataaactgtaaactaataggctggggtttttgttttgttttggggttttgttttgtttggttttacattttagttactgaagccttacaaggttatgtagagagataccatcttctgtaccaaaaatagacaagagaatgctgtcaatattggtgtactgtaatgtgaatctatgctggtgaaaacaattttttgttccccttattaaaaccttagtgtccttttctcatttgtggctttctgcatcacccaatcaataaaaaacaaatatatatatgt

SEQ ID NO: 2209 - protein, 1377 aa, Homo sapien
MDTSSVGGLELTDQTPVLLGSTAMATSLTNVGNSFSGPANPLVSRSNKFQNSSVEDDDDVVFIEPVQPPPPSVPVVADQRTITFTSSKNEELQGNDSKITPSSKELASQKGSVSETIVIDDEEDMETNQGQEKNSSNFIERRPPETKNRTNDVDFSTSSFSRSKVNAGMGNSGITTEPDSEIQIANVTTLETGVSSVNDGQLENTDGRDMNLMITHVTSLQNTNLGDVSNGLQSSNFGVNIQTYTPSLTSQTKTGVGPFNPGRMNVAGDVFQNGESATHHNPDSWISQSASFPRNQKQPGVDSLSPVASLPKQIFQPSVQQQPTKPVKVTCANCKKPLQKGQTAYQRKGSAHLFCSTTCLSSFSHKPAPKKLCVMCKKDITTMKGTIVAQVDSSESFQEFCSTSCLSLYEDKQNPTKGALNKSRCTICGKLTEIRHEVSFKNMTHKLCSDHCFNRYRMANGLIMNCCEQCGEYLPSKGAGNNVLVIDGQQKRFCCQSCVSEYKQVGSHPSFLKEVRDHMQDSFLMQPEKYGKLTTCTGCRTQCRFFDMTQCIGPNGYMEPYCSTACMNSHKTKYAKSQSLGIICHFCKRNSLPQYQATMPDGKLYNFCNSSCVAKFQALSMQSSPNGQFVAPSDIQLKCNYCKNSFCSKPEILEWENKVHQFCSKTCSDDYKKLHCIVTYCEYCQEEKTLHETVNFSGVKRPFCSEGCKLLYKQDFARRLGLRCVTCNYCSQLCKKGATKELDGVVRDFCSEDCCKKFQDWYYKAARCDCCKSQGTLKERVQWRGEMKHFCDQHCLLRFYCQQNEPNMTTQKGPENLHYDQGCQTSRTKMTGSAPPPSPTPNKEMKNKAVLCKPLTMTKATYCKPHMQTKSCQTDDTWRTEYVPVPIPVPVYIPVPMHMYSQNIPVPTTVPVPVPVPVFLPAPLDSSEKIPAAIEELKSKVSSDALDTELLTMTDMMSEDEGKTETTNINSVIIETDIIGSDLLKNSDPETQSSMPDVPYEPDLDIEIDFPRAAEELDMENEFLLPPVFGEEYEEQPRPRSKKKGAKRKAVSGYQSHDDSSDNSECSFPFKYTYGVNAWKHWVKTRQLDEDLLVLDELKSSKSVKLKEDLLSHTTAELNYGLAHFVNEIRRPNGENYAPDSIYYLCLGIQEYLCGSNRKDNIFIDPGYQTFEQELNKILRSWQPSILPDGSIFSRVEEDYLWRIKQLGSHSPVALLNTLFYFNTKYFGLKTVEQHLRLSFGTVFRHWKKNPLTMENKACLRYQVSSLCGTDNEDKITTGKRKHEDDEPVFEQIENTANPSRCPVKMFECYLSKSPQNLNQRMDVFYLQPECSSSTDSPVWYTSTSLDRNTLENMLVRVLLVKDIYDKDNYELDEDTD

SEQ ID NO: 2210 - DNA, 7785 bp, Homo sapien; identical to SEQ ID NO: 2133

SEQ ID NO: 2211 - protein, 1214 aa, Homo sapien; identical to SEQ ID NO: 2134

SEQ ID NO: 2212 - DNA, 1630 bp, Homo sapien
ccatccagtgccttccgcagcgccgctaaagcgcagttctcgttggtgtaactttttcttttttttttcagccacttccggctcctgcgtcgctccggaagcctgcgagttccggaagccttggtaatccagattcggctaggaaaagacaagctttccagagaatgtttcagagaaagttacgtggagcgtgggcgtttcgcagactcctaagtggtctggaacctaacctgcagtgtctctgagcttctggcaagtatgaggcaaggatttcacagaagaacttggagcaaaaattcccactgtcatagctataggctgtccagtcttgagggagctgcaggaacaggaaaaagagaccttcagagaagacatggcttccagaaaagagaatgcgaagagtgcaaacagagtgctaagaataagccagttggatgcacttgaactaaacaaggccctggagcagctagtttggtcccagtttactcagtgctttcatggatttaaacctgggctgttagctcgctttgagccagaggtgaaagcgtgcttatgggttttcttgtggagattcaccatctactccaaaaatgccacagtgggacagtcagttttgaatattaagtacaaaaatgatttttcccctaacctgagatatcagccacccagtaaaaatcaaaaaatctggtatgctgtttgtacaattggtggcaggtggttagaagaacgatgctatgatttgtttcgaaaccatcatttagcatcatttgggaaagtcaagcagtgtgtgaattttgtgattggacttttgaaattaggtgggctgattaattttttgattttccttcagaggggaaagtttgcaactttgacagaacgtctcctaggtattcattctgtattttgcaagcctcaaaacatacgtgaagttggctttgaatacatgaatagggaacttctctggcatggttttgctgaatttctgatttttctcttaccacttatcaatgtccagaagttgaaagccaagctgtcttcatggtgtattcctcttactggtgcacctaatagtgacaatacattagccaccagtggcaaagaatgcgctctatgtggagagtggcccaccatgcctcacaccataggatgtgagcatattttctgttatttctgtgctaagagtagtttcttatttgacgtgtactttacttgtcctaagtgtggcacagaagtacacagtctgcagccactgaaatcaggaatcgagatgtcagaagtaaatgctctttagaaactaaaattgcttcctttgaggaaaaaaatgcaccgtgtttaaattcttaatattagtcatcctaagtataccatttatgtatcctttataaggaatgtgctcctagccactgtcttctcctttccaggcatgactgaaatctaatcactggaaaccatgtgattctaaatatattatgtaaatgttaatgtattatgttttttaaatcattgcattcaatttttaatgtcaagaataatggacagcttttgtcaggtgactactaacaatgctccttcattttactacttcttaaaacaaggttggattctaaagataaagattttggagactctg

SEQ ID NO: 2213 - protein, 305 aa, Homo sapien
MASRKENAKSANRVLRISQLDALELNKALEQLVWSQFTQCFHGFKPGLLARFEPEVKACLWVFLWRFTIYSKNATVGQSVLNIKYKNDFSPNLRYQPPSKNQKIWYAVCTIGGRWLEERCYDLFRNHHLASFGKVKQCVNFVIGLLKLGGLINFLIFLQRGKFATLTERLLGIHSVFCKPQNIREVGFEYMNRELLWHGFAEFLIFLLPLINVQKLKAKLSSWCIPLTGAPNSDNTLATSGKECALCGEWPTMPHTIGCEHIFCYFCAKSSFLFDVYFTCPKCGTEVHSLQPLKSGIEMSEVNAL

SEQ ID NO: 2214 - DNA, 4450 bp, Homo sapien
acccacgcgcagcggccggagatgcagcggggcgccgcgctgtgcctgcgactgtggctctgcctgggactcctggacggcctggtgagtgactactccatgacccccccgaccttgaacatcacggaggagtcacacgtcatcgacaccggtgacagcctgtccatctcctgcaggggacagcaccccctcgagtgggcttggccaggagctcaggaggcgccagccaccggagacaaggacagcgaggacacgggggtggtgcgagactgcgagggcacagacgccaggccctactgcaaggtgttgctgctgcacgaggtacatgccaacgacacaggcagctacgtctgctactacaagtacatcaaggcacgcatcgagggcaccacggccgccagctcctacgtgttcgtgagagactttgagcagccattcatcaacaagcctgacacgctcttggtcaacaggaaggacgccatgtgggtgccctgtctggtgtccatccccggcctcaatgtcacgctgcgctcgcaaagctcggtgctgtggccagacgggcaggaggtggtgtgggatgaccggcggggcatgctcgtgtccacgccactgctgcacgatgccctgtacctgcagtgcgagaccacctggggagaccaggacttcctttccaaccccttcctggtgcacatcacaggcaacgagctctatgacatccagctgttgcccaggaagtcgctggagctgctggtaggggagaagctggtcctcaactgcaccgtgtgggctgagtttaactcaggtgtcacctttgactgggactacccagggaagcaggcagagcggggtaagtgggtgcccgagcgacgctcccaacagacccacacagaactctccagcatcctgaccatccacaacgtcagccagcacgacctgggctcgtatgtgtgcaaggccaacaacggcatccagcgatttcgggagagcaccgaggtcattgtgcatgaaaatcccttcatcagcgtcgagtggctcaaaggacccatcctggaggccacggcaggagacgagctggtgaagctgcccgtgaagctggcagcgtaccccccgcccgagttccagtggtacaaggatggaaaggcactgtccgggcgccacagtccacatgccctggtgctcaaggaggtgacagaggccagcacaggcacctacaccctcgccctgtggaactccgctgctggcctgaggcgcaacatcagcctggagctggtggtgaatgtgcccccccagatacatgagaaggaggcctcctcccccagcatctactcgcgtcacagccgccaggccctcacctgcacggcctacggggtgcccctgcctctcagcatccagtggcactggcggccctggacaccctgcaagatgtttgcccagcgtagtctccggcggcggcagcagcaagacctcatgccacagtgccgtgactggagggcggtgaccacgcaggatgccgtgaaccccatcgagagcctggacacctggaccgagtttgtggagggaaagaataagactgtgagcaagctggtgatccagaatgccaacgtgtctgccatgtacaagtgtgtggtctccaacaaggtgggccaggatgagcggctcatctacttctatgtgaccaccatccccgacggcttcaccatcgaatccaagccatccgaggagctactagagggccagccggtgctcctgagctgccaagccgacagctacaagtacgagcatctgcgctggtaccgcctcaacctgtccacgctgcacgatgcgcacgggaacccgcttctgctcgactgcaagaacgtgcatctgttcgccacccctctggccgccagcctggaggaggtggcacctggggcgcgccacgccacgctcagcctgagtatcccccgcgtcgcgcccgagcacgagggccactatgtgtgcgaagtgcaagaccggcgcagccatgacaagcactgccacaagaagtacctgtcggtgcaggccctggaagcccctcggctcacgcagaacttgaccgacctcctggtgaacgtgagcgactcgctggagatgcagtgcttggtggccggagcgcacgcgcccagcatcgtgtggtacaaagacgagaggctgctggaggaaaagtctggagtcgacttggcggactccaaccagaagctgagcatccagcgcgtgcgcgaggaggatgcgggaccgtatctgtgcagcgtgtgcagacccaagggctgcgtcaactcctccgccagcgtggccgtggaaggctccgaggataagggcagcatggagatcgtgatccttgtcggtaccggcgtcatcgctgtcttcttctgggtcctcctcctcctcatcttctgtaacatgaggaggccggcccacgcagacatcaagacgggctacctgtccatcatcatggaccccggggaggtgcctctggaggagcaatgcgaatacctgtcctacgatgccagccagtgggaattcccccgagagcggctgcacctggggagagtgctcggctacggcgccttcgggaaggtggtggaagcctccgctttcggcatccacaagggcagcagctgtgacaccgtggccgtgaaaatgctgaaagagggcgccacggccagcgagcagcgcgcgctgatgtcggagctcaagatcctcattcacatcggcaaccacctcaacgtggtcaacctcctcggggcgtgcaccaagccgcagggccccctcatggtgatcgtggagttctgcaagtacggcaacctctccaacttcctgcgcgccaagcgggacgccttcagcccctgcgcggagaagtctcccgagcagcgcggacgcttccgcgccatggtggagctcgccaggctggatcggaggcggccggggagcagcgacagggtcctcttcgcgcggttctcgaagaccgagggcggagcgaggcgggcttctccagaccaagaagctgaggacctgtggctgagcccgctgaccatggaagatcttgtctgctacagcttccaggtggccagagggatggagttcctggcttcccgaaagtgcatccacagagacctggctgctcggaacattctgctgtcggaaagcgacgtggtgaagatctgtgactttggccttgcccgggacatctacaaagaccccgactacgtccgcaagggcagtgcccggctgcccctgaagtggatggcccctgaaagcatcttcgacaaggtgtacaccacgcagagtgacgtgtggtcctttggggtgcttctctgggagatcttctctctgggggcctccccgtaccctggggtgcagatcaatgaggagttctgccagcgcgtgagagacggcacaaggatgagggccccggagctggccactcccgccatacgccacatcatgctgaactgctggtccggagaccccaaggcgagacctgcattctcggacctggtggagatcctgggggacctgctccagggcaggggcctgcaagaggaagaggaggtctgcatggccccgcgcagctctcagagctcagaagagggcagcttctcgcaggtgtccaccatggccctacacatcgcccaggctgacgctgaggacagcccgccaagcctgcagcgccacagcctggccgccaggtattacaactgggtgtcctttcccgggtgcctggccagaggggctgagacccgtggttcctccaggatgaagacatttgaggaattccccatgaccccaacgacctacaaaggctctgtggacaaccagacagacagtgggatggtgctggcctcggaggagtttgagcagatagagagcaggcatagacaagaaagcggcttcaggtagctgaagcagagagagagaaggcagcatacgtcagcattttcttctctgcacttataagaaagatcaaagactttaagactttcgctatttcttctactgctatctactacaaacttcaaagaggaaccaggaggacaagaggagcatgaaagtggacaaggagtgtgaccactgaagcaccacagggaggggttaggcctccggatgactgcgggcaggcctggataatatccagcctcccacaagaagctggtggagcagagtgttccctgactcctccaaggaaagggagacgccctttcatggtctgctgagtaacaggtgccttcccagacactggcgttactgcttgaccaaagagccctcaagcggcccttatgccagcgtgacagagggctcacctcttgccttctaggtcacttctcacaatgtcccttcagcacctgaccctgtgcccgccgattattccttggtaatatgagtaatacatcaaagagtagtattaaaagctaattaatcatgtttataaaaa

SEQ ID NO: 2215 - protein, 1298 aa, Homo sapien
MQRGAALCLRLWLCLGLLDGLVSDYSMTPPTLNITEESHVIDTGDSLSISCRGQHPLEWAWPGAQEAPATGDKDSEDTGVVRDCEGTDARPYCKVLLLHEVHANDTGSYVCYYKYIKARIEGTTAASSYVFVRDFEQPFINKPDTLLVNRKDAMWVPCLVSIPGLNVTLRSQSSVLWPDGQEVVWDDRRGMLVSTPLLHDALYLQCETTWGDQDFLSNPFLVHITGNELYDIQLLPRKSLELLVGEKLVLNCTVWAEFNSGVTFDWDYPGKQAERGKWVPERRSQQTHTELSSILTIHNVSQHDLGSYVCKANNGIQRFRESTEVIVHENPFISVEWLKGPILEATAGDELVKLPVKLAAYPPPEFQWYKDGKALSGRHSPHALVLKEVTEASTGTYTLALWNSAAGLRRNISLELVVNVPPQIHEKEASSPSIYSRHSRQALTCTAYGVPLPLSIQWHWRPWTPCKMFAQRSLRRRQQQDLMPQCRDWRAVTTQDAVNPIESLDTWTEFVEGKNKTVSKLVIQNANVSAMYKCVVSNKVGQDERLIYFYVTTIPDGFTIESKPSEELLEGQPVLLSCQADSYKYEHLRWYRLNLSTLHDAHGNPLLLDCKNVHLFATPLAASLEEVAPGARHATLSLSIPRVAPEHEGHYVCEVQDRRSHDKHCHKKYLSVQALEAPRLTQNLTDLLVNVSDSLEMQCLVAGAHAPSIVWYKDERLLEEKSGVDLADSNQKLSIQRVREEDAGPYLCSVCRPKGCVNSSASVAVEGSEDKGSMEIVILVGTGVIAVFFWVLLLLIFCNMRRPAHADIKTGYLSIIMDPGEVPLEEQCEYLSYDASQWEFPRERLHLGRVLGYGAFGKVVEASAFGIHKGSSCDTVAVKMLKEGATASEQRALMSELKILIHIGNHLNVVNLLGACTKPQGPLMVIVEFCKYGNLSNFLRAKRDAFSPCAEKSPEQRGRFRAMVELARLDRRRPGSSDRVLFARFSKTEGGARRASPDQEAEDLWLSPLTMEDLVCYSFQVARGMEFLASRKCIHRDLAARNILLSESDVVKICDFGLARDIYKDPDYVRKGSARLPLKWMAPESIFDKVYTTQSDVWSFGVLLWEIFSLGASPYPGVQINEEFCQRVRDGTRMRAPELATPAIRHIMLNCWSGDPKARPAFSDLVEILGDLLQGRGLQEEEEVCMAPRSSQSSEEGSFSQVSTMALHIAQADAEDSPPSLQRHSLAARYYNWVSFPGCLARGAETRGSSRMKTFEEFPMTPTTYKGSVDNQTDSGMVLASEEFEQIESRHRQESGFR

SEQ ID NO: 2216 - DNA, 988 bp, Homo sapien
aggggacaagtctaggaggtctctgaggttactgtacccatccctccttcatctccctccagcatttgtttctggaaggagtcaacaccaacagctctgacctgggcagccttcctgagaaaatgcagccattcctcctcctgttggcctttcttctgacccctggggctgggacagaggagatcatcgggggccatgaggccaagccccactcccgcccctacatggcctttgttcagtttctgcaagagaagagtcggaagaggtgtggcggcatcctagtgagaaaggactttgtgctgacagctgctcactgccagggaagctccataaatgtcaccttgggggcccacaatatcaaggaacaggagcggacccagcagtttatccctgtgaaaagacccatcccccatccagcctataatcctaagaacttctccaacgacatcatgctactgcagctggagagaaaggccaagtggaccacagctgtgcggcctctcaggctacctagcagcaaggcccaggtgaagccagggcagctgtgcagtgtggctggctggggttatgtctcaatgagcactttagcaaccacactgcaggaagtgttgctgacagtgcagaaggactgccagtgtgaacgtctcttccatggcaattacagcagagccactgagatttgtgtgggggatccaaagaagacacagaccggtttcaagggggactccggggggcccctcgtgtgtaaggacgtagcccaaggtattctctcctatggaaacaaaaaagggacacctccaggagtctacatcaaggtctcacacttcctgccctggataaagagaacaatgaagcgcctctaacagcaggcatgagactaaccttcctctgggcctgaccatctctgggacagaggcaagaatcccaaggggtgggcagtcggggttgcaggactgtaataaatggatctctggtgtaaatatgactg

SEQ ID NO: 2217 - protein, 246 aa, Homo sapien
MQPFLLLLAFLLTPGAGTEEIIGGHEAKPHSRPYMAFVQFLQEKSRKRCGGILVRKDFVLTAAHCQGSSINVTLGAHNIKEQERTQQFIPVKRPIPHPAYNPKNFSNDIMLLQLERKAKWTTAVRPLRLPSSKAQVKPGQLCSVAGWGYVSMSTLATTLQEVLLTVQKDCQCERLFHGNYSRATEICVGDPKKTQTGFKGDSGGPLVCKDVAQGILSYGNKKGTPPGVYIKVSHFLPWIKRTMKRL

SEQ ID NO: 2218 - DNA, 1193 bp, Homo sapien
tgaagatcagctattagaagagaaagatcagttaagtcctttggacctgatcagcttgatacaagaactactgatttcaacttctttggcttaattctctcggaaacgatgaaatatacaagttatatcttggcttttcagctctgcatcgttttgggttctcttggctgttactgccaggacccatatgtaaaagaagcagaaaaccttaagaaatattttaatgcaggtcattcagatgtagcggataatggaactcttttcttaggcattttgaagaattggaaagaggagagtgacagaaaaataatgcagagccaaattgtctccttttacttcaaactttttaaaaactttaaagatgaccagagcatccaaaagagtgtggagaccatcaaggaagacatgaatgtcaagtttttcaatagcaacaaaaagaaacgagatgacttcgaaaagctgactaattattcggtaactgacttgaatgtccaacgcaaagcaatacatgaactcatccaagtgatggctgaactgtcgccagcagctaaaacagggaagcgaaaaaggagtcagatgctgtttcaaggtcgaagagcatcccagtaatggttgtcctgcctgcaatatttgaattttaaatctaaatctatttattaatatttaacattatttatatggggaatatatttttagactcatcaatcaaataagtatttataatagcaacttttgtgtaatgaaaatgaatatctattaatatatgtattatttataattcctatatcctgtgactgtctcacttaatcctttgttttctgactaattaggcaaggctatgtgattacaaggctttatctcaggggccaactaggcagccaacctaagcaagatcccatgggttgtgtgtttatttcacttgatgatacaatgaacacttataagtgaagtgatactatccagttactgccggtttgaaaatatgcctgcaatctgagccagtgctttaatggcatgtcagacagaacttgaatgtgtcaggtgaccctgatgaaaacatagcatctcaggagatttcatgcctggtgcttccaaatattgttgacaactgtgactgtacccaaatggaaagtaactcatttgttaaaattatcaatatctaatatatatgaataaagtgtaagttcacaact

SEQ ID NO: 2219 - protein, 166 aa, Homo sapien
MKYTSYILAFQLCIVLGSLGCYCQDPYVKEAENLKKYFNAGHSDVADNGTLFLGILKNWKEESDRKIMQSQIVSFYFKLFKNFKDDQSIQKSVETIKEDMNVKFFNSNKKKRDDFEKLTNYSVTDLNVQRKAIHELIQVMAELSPAAKTGKRKRSQMLFQGRRASQ

SEQ ID NO: 2220 - DNA, 1522 bp, Homo sapien
ggcacgaggctcactgctgttattgttttctgacagcatgcctgaaccagctaagtcagctcctgctccgaagaagggttccaagaaggctgtgaccaaggcgcagaagaaggatggcaagaagcgcaagcgcagtcgtaaggagagctactccgtgtatgtgtacaaggtgctaaaacaggttcaccccgatactggcatctcatccaaggccatgggcatcatgaattccttcgttaacgacatcttcgaacgcatcgcaggcgaggcttcccgtctggcccactacaacaagcgctcgaccattacctccagggagatccagaccgccgtgcgtctgctgcttcccggagagctggccaagcacgcagtgtccgaaggtaccaaggctgtcaccaagtatacaagctccaagtaaatgtgtgcttaggtgctttaaaactcaaaggctcttttcagagccactcaagtctcacataaagagctttaatattgaatttcaccgttttctagggaataatttttccgattttgtaatcccagcactttgggaggccgaggcgtgcggatcgagaccagtttggctaacgtggttaaatctcgtttctactaaaaatacaaatattagccgggcgtggggcagtcgcgtgtcatcccagagactcgggaggctgccgcaggagaatcacttaaacccagcaagcaaaggttgcagtgaaaagacatggcgcttttgcattctagcctgggcgacaaaggcgaggcttcgtctcaaaaaaaattgatcaggagatactcctgttctgtgttggcaagatcctgtaatcctagcactttgggaggtcgatgcatgaggctttcttcagctcaggagttaacagatttgcctgggcaacatagaactcgtctctgcaaaaaaatgaagctaaccaggtgtgacggcttgcgtctgtactatcatttactcggtaggctgaggtggtaggatagcttaaactctcgggctagagactgcaggaacatgtgaatacgctagtgcaattccagcctgggcaacactggaaagggtaggaagagtagtctttgggtccctaaagatcacctgataacaagtttgacttttctgagcactcttgtggagtttgttgtggagggaataccatgggcattggcaatgtaaagttgatctaaaaaatctcgttttccgccgtgcgcggtggctcacgcctctaatcccatcactttgggaggccgagacgggcggatcacgaggtcaggaggtcgagaccatcctggctaacactgtgaaaccctgtctctactaaaaaaatacaaacaaaattagccgggcgtggtggcactcacctgtagtttcagctactctggaagctgaggctggagagtcacttgaacccgggaggcggaggttgcagtgatcagagatcgcgccactgcactccatcctgggcgaaagagctagattccatctcataaaaaaaaaaaaaaaaaaaaaaaaaaaaaa

SEQ ID NO: 2221 - protein, 126 aa, Homo sapien
MPEPAKSAPAPKKGSKKAVTKAQKKDGKKRKRSRKESYSVYVYKVLKQVHPDTGISSKAMGIMNSFVNDIFERIAGEASRLAHYNKRSTITSREIQTAVRLLLPGELAKHAVSEGTKAVTKYTSSK

SEQ ID NO: 2222 - DNA, 4371 bp, Homo sapien
gggtggattaattttttttttttgacgttcttagaacagtgcctgacttaattctacttcatagggttgatgtaattttgagacttaaataagttgatactaaaataccacttagtgtcccgaacactgtttgacattttagtatcaaccaagtctcaaggttacttcaatcctgtgaactagagccaaggcacctccagtggcctttcagaagttccatttccactcccgcctcatctcctaattctatctccccgttctctttactcgagccctcctggccttgcccttccttaggcctgatacgcacctatctgaagacctttgcactgcactccagcctggaaggcagagagagactccgtttcaaaaaagaaaagaattctgggtttgaatcctgcctctccgtctgctagggatatgatttagggcaagttgcttgagctctttgggcctctgttttcacgtctgtatgatagaggtggtattgtttgacttgtatttgtgaagtttcaatgagattgataattgtcgattttatgttaatccctagtacatggcctgctgtcaacacccaggacacccaggatatggtctttgctgtttgattttcctcatccccagtctcaaggggaagccaggacaatgagaacagccacttcccatcaggagtcactgcaaggcccccagggtgggatggtggggagataagaaccgtgagagaagttggcacaaaggagttatgggacaaagggtccaagataggcagaaaagaaaatgttgccagttgatggggaagaaaggaagtcggagggctcagacactgagggggacagaacatctccatgtgcagtctcatctcttatagtcagcaacaggtatccacggggagggccctacatcatctgctaccctgaaggatctggaggtaggaggctctgggcggaggtgcagtgaccccgcaggccagccctccaacctcctcccgcagcggggactgggtgcccctctgccagctgagacagcccacacacaacccagccctaatgatcgttctctctacctctcccccaagtcctcctccgcctcctcctctctgcatgcgcctcagagcccgtgccaagaacaagcagcagtcctgaactcgaggtccataaaaatcagtcgactgaatgacaccatcaaatctttgaaacaacagaagaaacaagtggaacatcagctggaagaagaaaagaaagcaaacaatgagaaacagaaagctgaaagggagctagagggtcaaatccagagattgaacacagagaaaaagaaactaaatacggacctgtatcacatgaaacattctctcagatactttgaagaagagtccaaggatctggccggccgcctgcaacgttcatcgcagcgtataggagagttagagtggtctctctgtgctgtcgccgccacacagaagaagaagccggatgggttctcgagccgcagtaaagcacttctcaagcggcagttagagcagtccatacgggagcagatactgctgaaaggacacgtgacacagttgaaggagtcgcttaaagaagtccagctggagagagatcaatatgctgaacaaataaaaggagagagggcccagtggcagcagaggatgaggaaaatgtcgcaggaggtttgcacattgaaggaggagaagaagcatgatacgcatcgggtagaggagctggagaggagcttgtccagactcaaaaaccagatggctgagccactgcccccggatgccccagcagtgtcctctgaggtggagctgcaagacctgaggaaggagctggagagagtggcaggagagctccaggctcaggtggaaaacaatcagtgcatcagtctcctgaaccgtgggcaaaaggagaggcttcgcgagcaggaggagaggcttcaggagcagcaggagaggcttcgggaacaggagaagaggcttcagcagctgtccgagccacagagcgacttggaggagctgcacgagaacaagagcgcactgcagttggagcagcaagtaaaggagctgcaggagaagctgggccaggtgacggagacgctcacctcggctgagaaggagccagaggcagcagtcccagcctcagggactgggggcgagtctagcggccttatggacctcctggaggagaaggtggacctgagggagcatgtggagaaactggaacttggattcatccagtaccggagagagagatgccatcagaaagtacatcgccttctaacagagccaggggacagtgccaaagatgcgtcaccgggaggaggccatcatcaggctggcccaggacgaggaggagaggaaggtgaagctgttggagctgcaggagatggtgttgcggcttgtggcagctatagcgaggggcacggcaaattcctggccgctgcccggaaccctgctgctgaacccagtccaggagccccagccccccaggagctcggggctgccgacaagcatggtgatctttgtgaggcgagcctcaccaacagcgtggagcctgcacaaggagaagccagggagggttcttcccaggacaaccctactgcacagccagtcgtgcagctccttggtgagatgcaggaccaccaggagcacccaggcttgggcagcaactgctgtgtgccatgcttttgctgggcttggctgccgagaagaaggagataaacaccaccatcatcaaagagctgctcaagaaatttttaaaaacgaaacaaagttatggggttaatctcctacacaattcatttacttcatttgaatgttagagctactcatgattatttgtgtttctaatttatagtttaagtttatttgtaaaaagttaaaagagagtgggtctctgtgcctctcactgatgttcactctggcatcctttagcatttttcttttttcatttcataattgtaggtcattagcatgcatatcgagtttgcccttacgtggtgggagttcaaacacacaaagacccactctttgcacaaaactgttctcgctggtttggaataggctcccgtgcttttttaatgttattgcagcatggatgttcattacagaattcagataaaatttgctaatgttctgctatgatgtttgatctcatcttaatcacagtgagctcttccatagctcaatatgcggtttgccctcaagtgtgcactgtttattactttgtaatatgccactatgagtactgacacttagagctgtttaaaggccgagaactggaaacagcctttcctccattttctgtgtattggtgatgggagtgataaccttttgggggagctttctaaatctcgcagaagaggaaagtggcctgctctggcaggtatgtgcaggatacagtgtgtttcatctgttccggtgccaagaatgagcactgtactgtggcagttccctttggatttgtatgtgctctgggctcatgaagatattgcatcgtgagctgcagcagttgcactctttttcagtgacctaaaaatggcttatttccgaggaatgaaaggctgccatcgttggctgtggatgtggaaaacctttcctagcttagagcatttgtatctacaatacattttaaagtcagagttcgtgttccctgttttaatcacatgactacctgtgccagtacacgaaagggcgctggttggcattcttcttaatgtatttagtaaagatcataagacatcctttaagagtttaaatgtctctgaaacaggcatacaggctctagtcaagaatgaattagagtgaaggaaagctgtgtgacacctggcattcctctctgttcatggagcttctttgaggcttgaagtttgattttactatctagacctctctggctaatacctattctccaaccacctcggttactctgacataggaatttacttcttttccttgagtggaaaacactttagaaaataataacaaacattattataaactaatatatgtgagagtacttagttgaaacaaaaaggaattttagtagacagtattatattatctttgaaaatcaaggagaagtttatgcaactgaaaatgtttacacactgtgctgcaatctactgtttgtgaatgtcaatgtattatcaggaaacatggctatacgatcgcagagttgtatttcctcacaaacttctttacgaagagtgaaatatgtttttgtacctctcagtttcagtcagggacatattttgtgcaatatttctgtgattgtgcctatgcgtgatgagtgaatgcatttcaatcatacattgcctaaatcataacttgatgatgcttgggaaagaatcaacagttaaaacttcatgaagttc

SEQ ID NO: 2223 - protein, 459 aa, Homo sapien
MKHSLRYFEEESKDLAGRLQRSSQRIGELEWSLCAVAATQKKKPDGFSSRSKALLKRQLEQSIREQILLKGHVTQLKESLKEVQLERDQYAEQIKGERAQWQQRMRKMSQEVCTLKEEKKHDTHRVEELERSLSRLKNQMAEPLPPDAPAVSSEVELQDLRKELERVAGELQAQVENNQCISLLNRGQKERLREQEERLQEQQERLREQEKRLQQLSEPQSDLEELHENKSALQLEQQVKELQEKLGQVTETLTSAEKEPEAAVPASGTGGESSGLMDLLEEKVDLREHVEKLELGFIQYRRERCHQKVHRLLTEPGDSAKDASPGGGHHQAGPGRGGEEGEAVGAAGDGVAACGSYSEGHGKFLAAARNPAAEPSPGAPAPQELGAADKHGDLCEASLTNSVEPAQGEAREGSSQDNPTAQPVVQLLGEMQDHQEHPGLGSNCCVPCFCWAWLPRRRR

SEQ ID NO: 2224 - DNA, 2020 bp, Homo sapien
gcagattcacagggcctctgagcattatcccccatactcctccccatcattctccacccagctgttggagccatctgtctgatcaccttggactccatagtacactggggcaaagcacagccccagtttctggaggcagatgggtaaccaggaaaaggcatgaatgagggggccccaggagacagtgacttagagactgaggcaagagtgccgtggtcaatcatgggtcattgtcttcgaactggacaggccagaatgtctgccacacccacacctgcaggtgaaggagccagaagggatgaactttttgggattctccaaatactccatcagtgtatcctgtcttcaggtgatgcttttgttcttactggcgtctgttgttcctggaggcagaatggcaagccaccatattcacaaaaggaagataaggaagtacaaactggatacatgaatgctcaaattgaaattattccatgcaagatctgtggagacaaatcatcaggaatccattatggtgtcattacatgtgaaggctgcaagggctttttcaggagaagtcagcaaagcaatgccacctactcctgtcctcgtcagaagaactgtttgattgatcgaaccagtagaaaccgctgccaacactgtcgattacagaaatgccttgccgtagggatgtctcgagatgctgtaaaatttggccgaatgtcaaaaaagcagagagacagcttgtatgcagaagtacagaaacaccggatgcagcagcagcagcgcgaccaccagcagcagcctggagaggctgagccgctgacgcccacctacaacatctcggccaacgggctgacggaacttcacgacgacctcagtaactacattgacgggcacacccctgaggggagtaaggcagactccgccgtcagcagcttctacctggacatacagccttccccagaccagtcaggtcttgatatcaatggaatcaaaccagaaccaatatgtgactacacaccagcatcaggcttctttccctactgttcgttcaccaacggcgagacttccccaactgtgtccatggcagaattagaacaccttgcacagaatatatctaaatcgcatctggaaacctgccaatacttgagagaagagctccagcagataacgtggcagacctttttacaggaagaaattgagaactatcaaaacaagcagcgggaggtgatgtggcaattgtgtgccatcaaaattacagaagctatacagtatgtggtggagtttgccaaacgcattgatggatttatggaactgtgtcaaaatgatcaaattgtgcttctaaaagcaggttctctagaggtggtgtttatcagaatgtgccgtgcctttgactctcagaacaacaccgtgtactttgatgggaagtatgccagccccgacgtcttcaaatccttaggttgtgaagactttattagctttgtgtttgaatttggaaagagtttatgttctatgcacctgactgaagatgaaattgcattattttctgcatttgtactgatgtcagcagatcgctcatggctgcaagaaaaggtaaaaattgaaaaactgcaacagaaaattcagctagctcttcaacacgtcctacagaagaatcaccgagaagatggaatactaacaaagttaatatgcaaggtgtctacattaagagccttatgtggacgacatacagaaaagctaatggcatttaaagcaatatacccagacattgtgcgacttcattttcctccattatacaaggagttgttcacttcagaatttgagccagcaatgcaaattgatgggtaaatgttatcacctaagcacttctagaatgtctgaagtacaaacatgaaaaacaaacaaaaaaattaaccgagacactttatatggccctgcacagacctggagcgccacacactgcacatcttttggtgatcggggtcaggcaaaggaggggaaacaatgaaaacaaataaagttgaacttgtttttctca

SEQ ID NO: 2225 - protein, 556 aa, Homo sapien
MNEGAPGDSDLETEARVPWSIMGHCLRTGQARMSATPTPAGEGARRDELFGILQILHQCILSSGDAFVLTGVCCSWRQNGKPPYSQKEDKEVQTGYMNAQIEIIPCKICGDKSSGIHYGVITCEGCKGFFRRSQQSNATYSCPRQKNCLIDRTSRNRCQHCRLQKCLAVGMSRDAVKFGRMSKKQRDSLYAEVQKHRMQQQQRDHQQQPGEAEPLTPTYNISANGLTELHDDLSNYIDGHTPEGSKADSAVSSFYLDIQPSPDQSGLDINGIKPEPICDYTPASGFFPYCSFTNGETSPTVSMAELEHLAQNISKSHLETCQYLREELQQITWQTFLQEEIENYQNKQREVMWQLCAIKITEAIQYVVEFAKRIDGFMELCQNDQIVLLKAGSLEVVFIRMCRAFDSQNNTVYFDGKYASPDVFKSLGCEDFISFVFEFGKSLCSMHLTEDEIALFSAFVLMSADRSWLQEKVKIEKLQQKIQLALQHVLQKNHREDGILTKLICKVSTLRALCGRHTEKLMAFKAIYPDIVRLHFPPLYKELFTSEFEPAMQIDG

SEQ ID NO: 2226 - DNA, 2610 bp, Homo sapien
ggactgttaactgtttctggcaaacatgaagtcaggcctctggtatttctttctcttctgcttgcgcattaaagttttaacaggagaaatcaatggttctgccaattatgagatgtttatatttcacaacggaggtgtacaaattttatgcaaatatcctgacattgtccagcaatttaaaatgcagttgctgaaaggggggcaaatactctgcgatctcactaagacaaaaggaagtggaaacacagtgtccattaagagtctgaaattctgccattctcagttatccaacaacagtgtctctttttttctatacaacttggaccattctcatgccaactattacttctgcaacctatcaatttttgatcctcctccttttaaagtaactcttacaggaggatatttgcatatttatgaatcacaactttgttgccagctgaagttctggttacccataggatgtgcagcctttgttgtagtctgcattttgggatgcatacttatttgttggcttacaaaaaagaagtattcatccagtgtgcacgaccctaacggtgaatacatgttcatgagagcagtgaacacagccaaaaaatctagactcacagatgtgaccctataatatggaactctggcacccaggcatgaagcacgttggccagttttcctcaacttgaagtgcaagattctcttatttccgggaccacggagagtctgacttaactacatacatcttctgctggtgttttgttcaatctggaagaatgactgtatcagtcaatggggattttaacagactgccttggtactgccgagtcctctcaaaacaaacaccctcttgcaaccagctttggagaaagcccagctcctgtgtgctcactgggagtggaatccctgtctccacatctgctcctagcagtgcatcagccagtaaaacaaacacatttacaagaaaaatgttttaaagatgccaggggtactgaatctgcaaagcaaatgagcagccaaggaccagcatctgtccgcatttcactatcatactacctcttctttctgtagggatgagaattcctcttttaatcagtcaagggagatgcttcaaagctggagctattttatttctgagatgttgatgtgaactgtacattagtacatactcagtactctccttcaattgctgaaccccagttgaccattttaccaagactttagatgctttcttgtgccctcaattttctttttaaaaatacttctacatgactgcttgacagcccaacagccactctcaatagagagctatgtcttacattctttcctctgctgctcaatagttttatatatctatgcatacatatatacacacatatgtatataaaattcataatgaatatatttgcctatattctccctacaagaatatttttgctccagaaagacatgttcttttctcaaattcagttaaaatggtttactttgttcaagttagtggtaggaaacattgcccggaattgaaagcaaatttattttattatcctattttctaccattatctatgttttcatggtgctattaattacaagtttagttctttttgtagatcatattaaaattgcaaacaaaatcatctttaatgggccagcattctcatggggtagagcagaatattcatttagcctgaaagctgcagttactataggttgctgtcagactatacccatggtgcctctgggcttgacaggtcaaaatggtccccatcagcctggagcagccctccagacctgggtggaattccagggttgagagactcccctgagccagaggccactaggtattcttgctcccagaggctgaagtcaccctgggaatcacagtggtctacctgcattcataattccaggatctgtgaagagcacatatgtgtcagggcacaattccctctcataaaaaccacacagcctggaaattggccctggcccttcaagatagccttctttagaatatgatttggctagaaagattcttaaatatgtggaatatgattattcttagctggaatattttctctacttcctgtctgcatgcccaaggcttctgaagcagccaatgtcgatgcaacaacatttgtaactttaggtaaactgggattatgttgtagtttaacattttgtaactgtgtgcttatagtttacaagtgagacccgatatgtcattatgcatacttatattatcttaagcatgtgtaatgctggatgtgtacagtacagtacttaacttgtaatttgaatctagtatggtgttctgttttcagctgacttggacaacctgactggctttgcacaggtgttccctgagttgtttgcaggtttctgtgtgtggggtggggtatggggaggagaaccttcatggtggcccacctggcctggttgtccaagctgtgcctcgacacatcctcatcccaagcatgggacacctcaagatgaataataattcacaaaatttctgtgaaatcaaatccagttttaagaggagccacttatcaaagagattttaacagtagtaagaaggcaaagaataaacatttgatattcagcaactgaaaaaaaaaaa

SEQ ID NO: 2227 - protein, 199 aa, Homo sapien
MKSGLWYFFLFCLRIKVLTGEINGSANYEMFIFHNGGVQILCKYPDIVQQFKMQLLKGGQILCDLTKTKGSGNTVSIKSLKFCHSQLSNNSVSFFLYNLDHSHANYYFCNLSIFDPPPFKVTLTGGYLHIYESQLCCQLKFWLPIGCAAFVVVCILGCILICWLTKKKYSSSVHDPNGEYMFMRAVNTAKKSRLTDVTL

SEQ ID NO: 2228 - DNA, 2206 bp, Homo sapien
ggaggaggaggaggaggaggaagaagaggtagcggcaaggtcgcggtctgaggttccggtgctcgccgccgcccagctcccagccgaggctttctcaaccgcgtcaataaaaggccgccccgacccgcccccgcgccccgcagccctgccggacaccccgggctgcagctgagcgggcgcagacgggccgaggcgggcgccgggcgcgcagggaccgagggaccgagtgctccccatgagcgcacgtgggccgggcggtccgcaagcccggctgagagcgcgccatggggcaggcgggctgcaaggggctctgcctgtcgctgttcgactacaagaccgagaagtatgtcatcgccaagaacaagaaggtgggcctgctgtaccggctgctgcaggcctccatcctggcgtacctggtcgtatgggtgttcctgataaagaagggttaccaagacgtcgacacctccctgcagagtgctgtcatcaccaaagtcaagggcgtggccttcaccaacacctcggatcttgggcagcggatctgggatgtcgccgactacgtcattccagcccagggagagaacgtcttttttgtggtcaccaacctgattgtgacccccaaccagcggcagaacgtctgtgctgagaatgaaggcattcctgatggcgcgtgctccaaggacagcgactgccacgctggggaagcggttacagctggaaacggagtgaagaccggccgctgcctgcggagagagaacttggccaggggcacctgtgagatctttgcctggtgcccgttggagacaagctccaggccggaggagccattcctgaaggaggccgaagacttcaccattttcataaagaaccacatccgtttccccaaattcaacttctccaaaagcaatgtgatggacgtcaaggacagatctttcctgaaatcatgccactttggccccaagaaccactactgccccatcttccgactgggctccgtgatccgctgggccgggagcgacttccaggatatagccctggagggtggcgtgataggaattaatattgaatggaactgtgatcttgataaagctgcctctgagtgccaccctcactattcttttagccgtctggacaataaactttcaaagtctgtctcctccgggtacaacttcagatttgccagatattaccgagacgcagccggggtggagttccgcaccctgatgaaagcctacgggatccgctttgacgtgatggtgaacggcaagggtgctttcttctgcgacctggtactcatctacctcatcaaaaagagagagttttaccgtgacaagaagtacgaggaagtgaggggcctagaagacagttcccaggaggccgaggacgaggcatcggggctggggctatctgagcagctcacatctgggccagggctgctggggatgccggagcagcaggagctgcaggagccacccgaggcgaagcgtggaagcagcagtcagaaggggaacggatctgtgtgcccacagctcctggagccccacaggagcacgtgaattgcctctgcttacgttcaggccctgtcctaaacccagccgtctagcacccagtgatcccatgcctttgggaatcccaggatgctgcccaacgggaaatttgtacattgggtgctatcaatgccacatcacagggaccagccatcacagagcaaagtgacctccacgtctgatgctggggtcatcaggacggacccatcatggctgtctttttgccccaccccctgccgtcagttcttcctttctccgtggctggcttcccgcactagggaacgggttgtaaatggggaacatgacttccttccggagtccttgagcacctcagctaaggaccgcagtgccctgtagagttcctagattacctcactgggaatagcattgtgcgtgtccggaaaagggctccatttggttccagcccactcccctctgcaagtgccgcagcttccctcagagcatactctccagtggatccaagtactctctctcctaaagacaccaccttcctgccagctgtttgcccttaggccagtacacagaattaaagtgggggagatggcagacgctttctgggacctgcccaagatatgtattctctgacactcttatttggtcataaaacaataaatggtgtcaatttcaaaaaaaaaaaaaaa

SEQ ID NO: 2229 - protein, 422 aa, Homo sapien
MGQAGCKGLCLSLFDYKTEKYVIAKNKKVGLLYRLLQASILAYLVVWVFLIKKGYQDVDTSLQSAVITKVKGVAFTNTSDLGQRIWDVADYVIPAQGENVFFVVTNLIVTPNQRQNVCAENEGIPDGACSKDSDCHAGEAVTAGNGVKTGRCLRRENLARGTCEIFAWCPLETSSRPEEPFLKEAEDFTIFIKNHIRFPKFNFSKSNVMDVKDRSFLKSCHFGPKNHYCPIFRLGSVIRWAGSDFQDIALEGGVIGINIEWNCDLDKAASECHPHYSFSRLDNKLSKSVSSGYNFRFARYYRDAAGVEFRTLMKAYGIRFDVMVNGKGAFFCDLVLIYLIKKREFYRDKKYEEVRGLEDSSQEAEDEASGLGLSEQLTSGPGLLGMPEQQELQEPPEAKRGSSSQKGNGSVCPQLLEPHRST

SEQ ID NO: 2230 - DNA, 698 bp, Homo sapien
gtttgagcagcattgttagagcctgtggaaaacactttacaactgtgtaactgtcttcatctttacagaggaatagtctacaaaggaagacttgtaacctggagaagagacctgtcatttactccatcctttatagtgatgctacaggacgaagaggaatggataaaaacattggcgagcaactcaataaagcgtatgaagccttccggcaggcatgcatggatagagattctgcagtaaaagaattacagcaaaagactgagaactatgagcagagaatacgtgaacaacaggaacagctgtcacttcaacagactattattgacaagctaaaatctcagttacttcttgtgaattccactcaagataacaattatggctgtgttcctctgcttgaagacagtgaaacaagaaagaataatttgactcttgatcagccacaagataaagtgatttcaggaatagcaagagaaaaactaccaaaggtagacattgcttctgcagaaagcagcatttaaatgctgatgcgtgacatagcttcctcattttatttttctgaagtgatctgctggaattccaaacagaagttccatatatacaaatatgtggcttaaatatttctaaatagaagaactattttcaagtaaaataaaggctgaggttttgtatttaaaaaaaaaaaaaaaaaaaaaaaaaaa

SEQ ID NO: 2231 - protein, 119 aa, Homo sapien
MDKNIGEQLNKAYEAFRQACMDRDSAVKELQQKTENYEQRIREQQEQLSLQQTIIDKLKSQLLLVNSTQDNNYGCVPLLEDSETRKNNLTLDQPQDKVISGIAREKLPKVDIASAESSI

SEQ ID NO: 2232 - DNA, 2137 bp, Homo sapien
ctaattcgggaaacgtgcaccttgactaattcggttttctgtggctacgagagcaggcttggcgggcggaggcgccagcggatgtctcatgcaaggatcgtctctgtggctaagcctcactttccgctccgcccgggtgctctctagagcccggtttttcgagtggcagtctccagggctgccgaatacagcagcgatggagaacggcaccgggccctacggagaagaacgtccacgtgaagtccaggagacgacagtcaccgagggggctgccaaaatcgcctttcccagtgccaacgaggtcttttataacccggtgcaggaattcaatcgggacctgacatgtgctgtgatcaccgagtttgctcgcattcagcttggggccaaaggaatccagatcaaggttccaggagagaaggacacgcaaaaagtggtcgtggacttgtcagagcaagaggaggaaaaggttgaactgaaagagagtgaaaacctggcctcaggagaccaacctcgcacagcggccgtgggggagatctgtgaggaaggcctgcatgtgctggaaggcctggcagcttcaggcctacgttccattcgatttgccctagaggtgcctgggctcagatctgtggttgcaaacgatgcctccacccgggctgtggatctcatacgccggaatgtccagctcaatgacgtggcccacctggtacagccgagccaagcagatgcccggatgctgatgtaccagcaccagagggtgtcggagaggtttgacgtcatcgatctggacccctatggcagcccagccaccttcctggatgcagctgtgcaggctgtgagtgaaggagggttgctgtgtgtgacctgcacagacatggcggtgttggcggggaacagcggggagacgtgctacagcaagtacggggccatggccctcaagagccgggcctgccacgagatggccctgagaatcgtcctgcacagcctggacctccgcgccaactgctaccagcgcttcgtggtgccgctgctcagcatcagcgctgacttctacgtgcgtgtttttgtccgtgtcttcaccggccaggccaaggtcaaggcctcagccagcaagcaggcgctggtgttccagtgtgtgggctgcggggccttccaccttcagcgtctcggcaaagcgtcaggagtccccagcggccgggccaagttctctgcagcctgtggtccccctgtgacccccgagtgtgaacactgtgggcaacgacaccagcttggtggccccatgtgggcagagcccatccatgacctggattttgtgggccgtgtcctggaggctgtgagcgctaaccccggccgcttccacacctcggagcggatccgaggggtcctgagcgtcatcactgaggagctcccggacgtgcctctgtactacaccctggaccagctgagcagcaccatccactgcaacacaccaagcctcctgcagttgcggtcggccctcctccacgctgacttccgggtctcactctcccacgcctgtaagaacgctgtgaagacggatgcccctgcctctgccctctgggacatcatgcgttgctgggagaaggaatgtccggtgaaacgggagcgactatcagagactagcccagcgttccgcattctcagtgtggagcccaggctgcaggccaacttcaccatccgggaagatgccaaccccagctcccgacagcgaggactcaagcgcttccaggctaacccggaggccaactggggtccccggcctcgtgcccggccagggggcaaggcggccgacgaagctatggaggagagacgcaggctgcttcagaacaagcggaaggagccgccggaagatgtggcccagcgggctgcccggctcaagacatttccttgcaagaggtttaaggagggcacctgtcaacgcggggaccagtgctgctactcccacagccccccgacacccagggtttctgctgatgctgcccctgactgtccagagacctccaaccagaccccccctggacctggggctgccgctgggccaggcatagactgaaccaataaagagatgtcacgtcaccttcaaaaaaaaaaaaaaaaaaaaaaaaaaaaaaaaaaaaaaaaa

SEQ ID NO: 2233 - protein, 659 aa, Homo sapien
MQGSSLWLSLTFRSARVLSRARFFEWQSPGLPNTAAMENGTGPYGEERPREVQETTVTEGAAKIAFPSANEVFYNPVQEFNRDLTCAVITEFARIQLGAKGIQIKVPGEKDTQKVVVDLSEQEEEKVELKESENLASGDQPRTAAVGEICEEGLHVLEGLAASGLRSIRFALEVPGLRSVVANDASTRAVDLIRRNVQLNDVAHLVQPSQADARMLMYQHQRVSERFDVIDLDPYGSPATFLDAAVQAVSEGGLLCVTCTDMAVLAGNSGETCYSKYGAMALKSRACHEMALRIVLHSLDLRANCYQRFVVPLLSISADFYVRVFVRVFTGQAKVKASASKQALVFQCVGCGAFHLQRLGKASGVPSGRAKFSAACGPPVTPECEHCGQRHQLGGPMWAEPIHDLDFVGRVLEAVSANPGRFHTSERIRGVLSVITEELPDVPLYYTLDQLSSTIHCNTPSLLQLRSALLHADFRVSLSHACKNAVKTDAPASALWDIMRCWEKECPVKRERLSETSPAFRILSVEPRLQANFTIREDANPSSRQRGLKRFQANPEANWGPRPRARPGGKAADEAMEERRRLLQNKRKEPPEDVAQRAARLKTFPCKRFKEGTCQRGDQCCYSHSPPTPRVSADAAPDCPETSNQTPPGPGAAAGPGID

SEQ ID NO: 2234 - DNA, 2201 bp, Homo sapien; identical to SEQ ID NO: 2066

SEQ ID NO: 2235 - protein, 387 aa, Homo sapien; identical to SEQ ID NO: 2067

SEQ ID NO: 2236 - DNA, 3863 bp, Homo sapien
gagatggagactcgctctgtcacccaggctggagtgcaatggtgagatctcggctcactgcaacctccacctcctgggttcaggcgattctcctgcctcccaatcctagtagctgggagtatcaggtgagtcgcagccccaacgcacgcccggcataatttttttatttttagtcgagacgggtttcaccacgttggccaggatggtctcgaactcctgacctcaggtgatccacccgcctcggcctcccaaagcactgggattacaggcgtgagccaccgcgcccggcctccatatccattcttgggaacacttgttgcttagctgaacggagcccgcatcctgctgtggcggcactcgccccggtgctggtctgagcagacgcctcctttctcttgcagaagaagtaagtgaggaagaaatgagtgaagatgaagaacgagaaaatgaaaaccacctcttggttgttccagagtcacggttcgaccgagattccggggagagtgaagaagcagaggaagaagtgggtgagggaacgccgcagagcagcgccctgacagagggcgactatgtgcccgactcccctgccctgtcgcccatcgagctcaagcaggagctgcccaagtacctgccggccctgcagggctgccggagcgtcgaggagttccagtgcctgaacaggatcgaggagggcacctatggagtggtctacagagcaaaagacaagaaaacagatgaaattgtggctctaaagcggctgaagatggagaaggagaaggagggcttcccgatcacgtcgctgagggagatcaacaccatcctcaaggcccagcatcccaacatcgtcaccgttagagagattgtggtgggcagcaacatggacaagatctacatcgtgatgaactatgtggagcacgacctcaagagcctgatggagaccatgaaacagcccttcctgccaggggaggtgaagaccctgatgatccagctgctgcgtggggtgaaacacctgcacgacaactggatcctgcaccgtgacctcaagacgtccaacctgctgctgagccacgccggcatcctcaaggtgggtgacttcgggctggcgcgggagtacggatcccctctgaaggcctacaccccggtcgtggtgaccctgtggtaccgcgccccagagctgctgcttggtgccaaggaatactccacggccgtggacatgtggtcagtgggttgcatcttcggggagctgctgactcagaagcctctgttccccgggaagtcagaaatcgatcagatcaacaaggtgttcaaggatctggggacccctagtgagaaaatctggcccggctacagcgagctcccagcagtcaagaagatgaccttcagcgagcacccctacaacaacctccgcaagcgcttcggggctctgctctcagaccagggcttcgacctcatgaacaagttcctgacctacttccccgggaggaggatcagcgctgaggacggcctcaagcatgagtatttccgcgagacccccctccccatcgacccctccatgttccccacgtggcccgccaagagcgagcagcagcgtgtgaagcggggcaccagcccgaggccccctgagggaggcctgggctacagccagctgggtgacgacgacctgaaggagacgggcttccaccttaccaccacgaaccagggggcctctgccgcgggccccggcttcagcctcaagttctgaaggtcagagtggaccccgtcatggggagaactcagccgggaccacaggcgtggctactgcggctggagctgcgatgagactcggaactcctcgtcttactttgtgctccatgttttgtttttgtattttggtttgtaaatttgtagaattaaatcattttccttgtaaacccgaattcgggaccatcacagtttgattagcctcagcctcaagagctggcacatgcttgtgaacttgtgctttcatattttcctaacctgtgtgctctttgtgggaggaataacccagactaggaatgccagcatctgccaagcagttgggataattcttcactattccacccttgccacagtactatgggtaggagtgacagctcgaaatatctacaaacaagtcactaaaaaagctaaaagatgccaggatcctgatgaaccaccacctccaccaagaccaatgctcagattttacctgattggtggtggtatccccatcattgtttgcggcataactgcaggcagcgaacattaagaattacggcagtcggccaaacgcaccctattgctggatggcatgggaaccctccttgggagccttctatgggccagccagcttcagcacttttgtaaactgcatgtactttctgagcatatttattcagttgaaaagacaccctgagcgcaaatatgagcttaaggagcccactggccagcaacagagattggcatgccaatgaaaatggcgaaataaatcatcaggaaatcatttctttgtctctgatttctacatcagccttggaaaatgagcacacttttcattctcagctcttggggccagccttactttgctcttatatgttgcactgtggatgtttggggctttggctgtttctttgtattaccctttggacttggtttttagcttcgtttttggagccacaagtttaagcttcagtgcattcttcatggtccaccattgtgttaatagggaggatcttagacttgcgtggatcatgacttgctgcccaggacggagctcgtattcagtgcaagtcaacgtccagccccccaactctaatgggacgaatggagaggcacccaaatgccccaatagcagtgcggagtcttcatgcacaaacaaaagtgattcaagcttcaaaattcctcccagggctgcaaattaacaaacttgcaggcggctgcagctcagtgccatgccaattctttacctttgaactccacccctcagcttgataatagtctgacagaacattcaatggacaatgatattaaaatgcacgctggcgcctttagaagttcagtttcgaacaaatgtgcactcaagccgccaccataaaaacagaagtaaaggacaccgggcaagccgactcacagtcctgagagaatatgcctacgatgtcccaacgagcgtggaaggaagcgtgcagaacggcttacctaaaagccggctgggcaataacgaaggacactcgaggagccgaagagcttatttagcctacagagagagacagtacaacccaccccagcaagacagcagcgatgcttgtagcacacttcccaaaagtagcagaaattttgaaaagccagtttcaaccactagtaaaaagatgcgttaagggaagccagctgtggttgaacttcaaaatcagcaaaaatcttatggcctcaacttggccattcagaatggaccaattaaaagcaatgggcaggagggacccttgctcggtaccgatagcactggcaatgttaccactggattatggaaacacgaaactactgtgtaacattgctgggcttcctaggcagaaattcatataaactgtgatactcacattccttgaagctatgagcatttaaaaactgtttacagccaccatagggattcaaaagaatttggaataaactttgaagttttggattttacttatttttatccccaaattgttgctattttttaggatctgaaacaaaatctttctaaaacattgttttagttgtcaaagcaccaacaggacattttgggatgtgaaatgtaatttcttggaatctgtaatttgtacttaatatttcaggcttgtatttaatataataaataggtgtttgtt

SEQ ID NO: 2237 - protein, 439 aa, Homo sapien
MSEDEERENENHLLVVPESRFDRDSGESEEAEEEVGEGTPQSSALTEGDYVPDSPALSPIELKQELPKYLPALQGCRSVEEFQCLNRIEEGTYGVVYRAKDKKTDEIVALKRLKMEKEKEGFPITSLREINTILKAQHPNIVTVREIVVGSNMDKIYIVMNYVEHDLKSLMETMKQPFLPGEVKTLMIQLLRGVKHLHDNWILHRDLKTSNLLLSHAGILKVGDFGLAREYGSPLKAYTPVVVTLWYRAPELLLGAKEYSTAVDMWSVGCIFGELLTQKPLFPGKSEIDQINKVFKDLGTPSEKIWPGYSELPAVKKMTFSEHPYNNLRKRFGALLSDQGFDLMNKFLTYFPGRRISAEDGLKHEYFRETPLPIDPSMFPTWPAKSEQQRVKRGTSPRPPEGGLGYSQLGDDDLKETGFHLTTTNQGASAAGPGFSLKF

SEQ ID NO: 2238 - DNA, 1687 bp, Homo sapien
tgtggctcgggcggcggcggcgcggcggcggcagagggggctccggggtcggaccatccgctctccctgcgctctccgcaccgcgcttaaatgatgtattttgtgatcgcagcgatgaaagctcaaattgaaattattccatgcaagatctgtggagacaaatcatcaggaatccattatggtgtcattacatgtgaaggctgcaagggctttttcaggagaagtcagcaaagcaatgccacctactcctgtcctcgtcagaagaactgtttgattgatcgaaccagtagaaaccgctgccaacactgtcgattacagaaatgccttgccgtagggatgtctcgagatgctgtaaaatttggccgaatgtcaaaaaagcagagagacagcttgtatgcagaagtacagaaacaccggatgcagcagcagcagcgcgaccaccagcagcagcctggagaggctgagccgctgacgcccacctacaacatctcggccaacgggctgacggaacttcacgacgacctcagtaactacattgacgggcacacccctgaggggagtaaggcagactccgccgtcagcagcttctacctggacatacagccttccccagaccagtcaggtcttgatatcaatggaatcaaaccagaaccaatatgtgactacacaccagcatcaggcttctttccctactgttcgttcaccaacggcgagacttccccaactgtgtccatggcagaattagaacaccttgcacagaatatatctaaatcgcatctggaaacctgccaatacttgagagaagagctccagcagataacgtggcagacctttttacaggaagaaattgagaactatcaaaacaagcagcgggaggtgatgtggcaattgtgtgccatcaaaattacagaagctatacagtatgtggtggagtttgccaaacgcattgatggatttatggaactgtgtcaaaatgatcaaattgtgcttctaaaagcaggttctctagaggtggtgtttatcagaatgtgccgtgcctttgactctcagaacaacaccgtgtactttgatgggaagtatgccagccccgacgtcttcaaatccttaggttgtgaagactttattagctttgtgtttgaatttggaaagagtttatgttctatgcacctgactgaagatgaaattgcattattttctgcatttgtactgatgtcagcagatcgctcatggctgcaagaaaaggtaaaaattgaaaaactgcaacagaaaattcagctagctcttcaacacgtcctacagaagaatcaccgagaagatggaatactaacaaagttaatatgcaaggtgtctacattaagagccttatgtggacgacatacagaaaagctaatggcatttaaagcaatatacccagacattgtgcgacttcattttcctccattatacaaggagttgttcacttcagaatttgagccagcaatgcaaattgatgggtaaatgttatcacctaagcacttctagaatgtctgaagtacaaacatgaaaaacaaacaaaaaaattaaccgagacactttatatggccctgcacagacctggagcgccacacactgcacatcttttggtgatcggggtcaggcaaaggaggggaaacaatgaaaacaaataaagttgaacttgtttttctca

SEQ ID NO: 2239 - protein, 468 aa, Homo sapien
MMYFVIAAMKAQIEIIPCKICGDKSSGIHYGVITCEGCKGFFRRSQQSNATYSCPRQKNCLIDRTSRNRCQHCRLQKCLAVGMSRDAVKFGRMSKKQRDSLYAEVQKHRMQQQQRDHQQQPGEAEPLTPTYNISANGLTELHDDLSNYIDGHTPEGSKADSAVSSFYLDIQPSPDQSGLDINGIKPEPICDYTPASGFFPYCSFTNGETSPTVSMAELEHLAQNISKSHLETCQYLREELQQITWQTFLQEEIENYQNKQREVMWQLCAIKITEAIQYVVEFAKRIDGFMELCQNDQIVLLKAGSLEVVFIRMCRAFDSQNNTVYFDGKYASPDVFKSLGCEDFISFVFEFGKSLCSMHLTEDEIALFSAFVLMSADRSWLQEKVKIEKLQQKIQLALQHVLQKNHREDGILTKLICKVSTLRALCGRHTEKLMAFKAIYPDIVRLHFPPLYKELFTSEFEPAMQIDG

SEQ ID NO: 2240 - DNA, 1701 bp, Homo sapien
aaggagcacagttccaggcggggctgagctagggcgtagctgtgatttcaggggcacctctggcggctgccgtgatttgagaatctcgggtctcttggctgactgatcctgggagactgtggatgaataatgctgggcacggccccacccggaggctgcgaggcttgggggtcctggccggggtggctctgctcgctgccctctggctcctgtggctgctggggtcagcccctcggggtaccccggcaccccagcccacgatcaccatccttgtctggcactggcccttcactgaccagcccccagagctgcccagcgacacctgcacccgctacggcatcgcccgctgccacctgagtgccaaccgaagcctgctggccagcgccgacgccgtggtcttccaccaccgcgagctgcagacccggcggtcccacctgcccctggcccagcggccgcgagggcagccctgggtgtgggcctccatggagtctcctagccacacccacggcctcagccacctccgaggcatcttcaactgggtgctgagctaccggcgcgactcggacatctttgtgccctatggccgcctggagccccactgggggccctcgccaccgctgccagccaagagcagggtggccgcctgggtggtcagcaacttccaggagcggcagctgcgtgccaggctgtaccggcagctggcgcctcatctgcgggtggatgtctttggccgtgccaatggacggccactgtgcgccagctgcctggtgcccaccgtggcccagtaccgcttctacctgtcctttgagaactctcagcaccgcgactacattacggagaaattctggcgcaacgcactggtggctggcactgtgccagtggtgctggggcccccacgggccacctatgaggccttcgtgccggctgacgccttcgtgcatgtggatgactttggctcagcccgagagctggcggctttcctcactggcatgaatgagagccgataccaacgcttctttgcctggcgtgacaggctccgcgtgcgactgttcaccgactggcgggaacgtttctgtgccatctgtgaccgctacccacacctaccccgcagccaagtctatgaggaccttgagggttggtttcaggcctgagatccgctggccgggggaggtgggtgtgggtggaagggctgggtgtcgaaatcaaaccaccaggcatccggcccttaccggcaagcagcgggctaacgggaggctgggcacagaggtcaggaagcaggggtggggggtgcaggtgggcactggagcatgcagaggaggtgagagtgggagggaggtaacgggtgcctgctgcggcagacgggaggggaaaggctgccgaggaccctccccaccctgaacaaatcttgggtgggtgaaggcctggctggaagagggtgaaaggcagggcccttggggctggggggcaccccagcctgaagtttgtgggggccaaacctgggaccccgagcttcctcggtagcagaggccctgtggtccccgagacacaggcacgggtccctgccacgtccatagttctgaggtccctgtgtgtaggctggggcggggcccaggagaccacggggagcaaaccagcttgttctgggctcagggagggagggcggtggacaataaacgtctgagcagtgaaaaaaaaaaaaaa

SEQ ID NO: 2241 - protein, 342 aa, Homo sapien
MNNAGHGPTRRLRGLGVLAGVALLAALWLLWLLGSAPRGTPAPQPTITILVWHWPFTDQPPELPSDTCTRYGIARCHLSANRSLLASADAVVFHHRELQTRRSHLPLAQRPRGQPWVWASMESPSHTHGLSHLRGIFNWVLSYRRDSDIFVPYGRLEPHWGPSPPLPAKSRVAAWVVSNFQERQLRARLYRQLAPHLRVDVFGRANGRPLCASCLVPTVAQYRFYLSFENSQHRDYITEKFWRNALVAGTVPVVLGPPRATYEAFVPADAFVHVDDFGSARELAAFLTGMNESRYQRFFAWRDRLRVRLFTDWRERFCAICDRYPHLPRSQVYEDLEGWFQA

SEQ ID NO: 2242 - DNA, 1723 bp, Homo sapien
tcgcggaggcttggggcagccgggtagctcggaggtcgtggcgctgggggctagcaccagcgctctgtcgggaggcgcagcggttaggtggaccggtcagcggactcaccggccagggcgctcggtgctggaatttgatattcattgatccgggttttatccctcttcttttttcttaaacatttttttttaaaactgtattgtttctcgttttaatttatttttgcttgccattccccacttgaatcgggccgacggcttggggagattgctctacttccccaaatcactgtggattttggaaaccagcagaaagaggaaagaggtagcaagagctccagagagaagtcgaggaagagagagacggggtcagagagagcgcgcgggcgtgcgagcagcgaaagcgacaggggcaaagtgagtgacctgcttttgggggtgaccgccggagcgcggcgtgagccctcccccttgggatcccgcagctgaccagtcgcgctgacggacagacagacagacaccgcccccagccccagctaccacctcctccccggccggcggcggacagtggacgcggcggcgagccgcgggcaggggccggagcccgcgcccggaggcggggtggagggggtcggggctcgcggcgtcgcactgaaacttttcgtccaacttctgggctgttctcgcttcggaggagccgtggtccgcgcgggggaagccgagccgagcggagccgcgagaagtgctagctcgggccgggaggagccgcagccggaggagggggaggaggaagaagagaaggaagaggagagggggccgcagtggcgactcggcgctcggaagccgggctcatggacgggtgaggcggcggtgtgcgcagacagtgctccagccgcgcgcgctccccaggccctggcccgggcctcgggccggggaggaagagtagctcgccgaggcgccgaggagagcgggccgccccacagcccgagccggagagggagcgcgagccgcgccggccccggtcgggcctccgaaaccatgaactttctgctgtcttgggtgcattggagccttgccttgctgctctacctccaccatgccaagtggtcccaggctgcacccatggcagaaggaggagggcagaatcatcacgaagtggtgaagttcatggatgtctatcagcgcagctactgccatccaatcgagaccctggtggacatcttccaggagtaccctgatgagatcgagtacatcttcaagccatcctgtgtgcccctgatgcgatgcgggggctgctgcaatgacgagggcctggagtgtgtgcccactgaggagtccaacatcaccatgcagattatgcggatcaaacctcaccaaggccagcacataggagagatgagcttcctacagcacaacaaatgtgaatgcagaccaaagaaagatagagcaagacaagaaaaaaaatcagttcgaggaaagggaaaggggcaaaaacgaaagcgcaagaaatcccggtataagtcctggagcgttccctgtgggccttgctcagagcggagaaagcatttgtttgtacaagatccgcagacgtgtaaatgttcctgcaaaaacacagactcgcgttgcaaggcgaggcagcttgagttaaacgaacgtacttgcagatgtgacaagccgaggcggtgagccgggcaggaggaaggagcctccctcagggtttcgg

SEQ ID NO: 2243 - protein, 191 aa, Homo sapien
MNFLLSWVHWSLALLLYLHHAKWSQAAPMAEGGGQNHHEVVKFMDVYQRSYCHPIETLVDIFQEYPDEIEYIFKPSCVPLMRCGGCSNDEGLECVPTEESNITMQIMRIKPHQGQHIGEMSFLQHNKCECRPKKDRARQENPCGPCSERRKHLFVQDPQTCKCSCKNTHSRCKARQLELNERTCRCDKPRR

SEQ ID NO: 2244 - DNA, 1840 bp, Homo sapien
cccattaggtgacaggtttttagagaagccaatcacgtcgccgcggtcctggttctaaagtcctcgctcacccacccggactcattctccccagacgccaaggatggtggtcatggcgccccgaaccctcttcctgctgctctcgggggccctgaccctgaccgagacctgggcgggctcccactccatgaggtatttcagcgccgccgtgtcccggcccggccgcggggagccccgcttcatcgccatgggctacgtggacgacacgcagttcgtgcggttcgacagcgactcggcgtgtccgaggatggagccgcgggcgccgtgggtggagcaggaggggccggagtattgggaagaggagacacggaacaccaaggcccacgcacagactgacagaatgaacctgcagaccctgcgcggctactacaaccagagcgaggccagttctcacaccctccagtggatgattggctgcgacctggggtccgacggacgcctcctccgcgggtatgaacagtatgcctacgatggcaaggattacctcgccctgaacgaggacctgcgctcctggaccgcagcggacactgcggctcagatctccaagcgcaagtgtgaggcggccaatgtggctgaacaaaggagagcctacctggagggcacgtgcgtggagtggctccacagatacctggagaacgggaaggagatgctgcagcgcgcggacccccccaagacacacgtgacccaccaccctgtctttgactatgaggccaccctgaggtgctgggccctgggcttctaccctgcggagatcatactgacctggcagcgggatggggaggaccagacccaggacgtggagctcgtggagaccaggcctgcaggggatggaaccttccagaagtgggcagctgtggtggtgccttctggagaggagcagagatacacgtgccatgtgcagcatgaggggctgccggagcccctcatgctgagatggaagcagtcttccctgcccaccatccccatcatgggtatcgttgctggcctggttgtccttgcagctgtagtcactggagctgcggtcgctgctgtgctgtggagaaagaagagctcagattgaaaaggagggagctactctcaggctgcaagtaagtatgaaggaggctgatccctgagatccttgggatcttgtgtttgggagccatgggggagctcacccaccccacaattcctcctctggccacatctcctgtggtctctgaccaggtgctgtttttgttctactctaggcagtgacagtgcccagggctctaatgtgtctctcacggcttgtaaatgtgacaccccggggggcctgatgtgtgtgggttgttgaggggaacaggggacatagctgtgctatgaggtttctttgacttcaatgtattgagcatgtgatgggctgtttaaagtgtcacccctcactgtgactgatatgaatttgttcatgaatatttttctgtagtgtgaaacagctgccctgtgtgggactgagtggcaagtccctttgtgacttcaagaaccctgacttctctttgtgcagagaccagcccacccctgtgcccaccatgaccctcttcctcatgctgaactgcattccttccccaatcacctttcctgttccagaaaaggggctgggatgtctccgtctctgtctcaaatttgtggtccactgagctataacttacttctgtattaaaattagaatctgagtataaatttactttttcaaattatttccaagagagattgatgggttaattaaaggagaagattcctgaaatttgagagacaaaataaa

SEQ ID NO: 2245 - protein, 338 aa, Homo sapien
MVVMAPRTLFLLLSGALTLTETWAGSHSMRYFSAAVSRPGRGEPRFIAMGYVDDTQFVRFDSDSACPRMEPRAPWVEQEGPEYWEEETRNTKAHAQTDRMNLQTLRGYYNQSEASSHTLQWMIGCDLGSDGRLLRGYEQYAYDGKDYLALNEDLRSWTAADTAAQISKRKCEAANVAEQRRAYLEGTCVEWLHRYLENGKEMLQRADPPKTHVTHHPVFDYEATLRCWALGFYPAEIILTWQRDGEDQTQDVELVETRPAGDGTFQKWAAVVVPSGEEQRYTCHVQHEGLPEPLMLRWKQSSLPTIPIMGIVAGLVVLAAVVTGAAVAAVLWRKKSSD

SEQ ID NO: 2246 - DNA, 1071 bp, Homo sapien
gtccatcttgctgctgtccactttgggttccatcttgggctccatcttgctctcacgattaaaagcttctttcctgctttccccattccgaccatcatttgcaccccggttctccccatgccggcctgcgcttcctccatgtctgttctccccgtgccgatggccatcagtatgacggctgctgctttctggatggcggtatccatctccatggcgaccaccatctccgtgacgtggactatcgctatgccgattgccagtctctccgtgactgtgacggctgctgccccggttctcagtatatctctctcttttcccgttgctgcccccagtcccttctcggctgttattccctgaagctgtgttgttgactccttgggctccggcagacgggtaggtcacaggggcaccactgatgttgccagtattgccaaagcctgggatgcccttggcggcactggtgacggggctgtcaggactgttatggccctgttgtgctgagttagttggaacagaattcaagctccctgcactagtccacctgccccactgcttcttcgcttctctcttggaaagtccagtctctcctcggcttgcaatggaccccaactgctcctgcgccgctggtgtctcctgcacctgcgctggttcctgcaagtgcaaagagtgcaaatgcacctcctgcaagaagagctgctgctcctgctgccccgtgggctgtagcaagtgtgcccagggctgtgtttgcaaaggggcgtcagagaagtgcagctgctgcgactgatgccaggacaacctttctcccagatgtaaacagagagacatgtacaaacctggattttttttttataccaccttgacccatttgctacattccttttcctgtgaaatatgtgagtgataattaaacactttagacctgaaaaaaaaaaaaaaaaaaaaaaaaaaaaaaaaaaaaaaaaaaaaaaaaaaaaaaaaaaaaaaaaaaaaaaaaaaaaaaaaaaaaaaaaaaaaaaaaaaaaaaaaaaaaaaaaaaaaaaaaaaaaaaaaaaaaaaaaaaaaaaaaaaaaa

SEQ ID NO: 2247 - protein, 122 aa, Homo sapien
MLPVLPKPGMPLAALVTGLSGLLWPCCAELVGTEFKLPALVHLPHCFFASLLESPVSPRLAMDPNCSCAAGVSCTCAGSCKCKECKCTSCKKSCCSCCPVGCSKCAQGCVCKGASEKCSCCD

SEQ ID NO: 2248 - DNA, 1578 bp, Homo sapien
ggcgttcctgttacctctcatcattgtgttaatggtgaagcacagcgattcccggacgcactctctgagatattttcgcctgggcgtttcggatcccatccatggggtccctgaatttatttcggttgggtacgtggactcgcaccctatcaccacatatgacagtgtcactcggcagaaggagccacgggccccatggatggcagagaacctcgcgcctgatcactgggagaggtacactcagctgctgaggggctggcagcagatgttcaaggtggaactgaagcgcctacagaggcactacaatcactcagggtctcacacttaccagagaatgattggctgtgagctgctggaggatggaagcaccacaggatttctgcagtatgcatatgacgggcaggatttcctgatcttcaataaagacaccctctcctggctggctgtagataatgtggctcacaccatcaagcaggcatgggaggccaatcagcatgagttgctgtatcaaaagaattggctggaagaagaatgtattgcctggctaaagagattcctggagtatgggaaagacaccctacaaagaacaggtaaagagaaagagaaggcctcattcccacattgcctgaacaactgtttttatacgtaactcttttaatctaggttatatccactgtatcctgaaagccatctctttagttggcctattgtgatctcatggctagagcccccacgaaaactttccctggttacttttgagcagcatcttgacaagatttgacagttccccttgtcttgacagagtggagtacctccaagggcaccttgtttttagggatctattgaggcaaattcttccattccgtcaatgataagctgggaaattctttgggagatagagcaattcttacaaactgtttagttaacaaagggctcacacaccaccagtaggagtaaaaatctggatttaccaagacaaacagaaggtctctgctttactaaaggattaatgaggttgggcatgatggctcatgcctgtaatcctagcactttgggaggctgaggcaggaggattgcttaaggccaggagtttaagactggcctgggtaacattgtgagaccctgtctctattaaaaaaaaaattagctgagcatggtggcacatgactgtagtcccagatactcaggaggctgaggtgggaggatctcttgagcctggaaggtcaaggctgcagtgagccatgatcatgatcagcctgggtcacagagcaagaccctatttaaaaaaaaaaaaaagtattaatgataagattcctttcagcaaagagctcctcttataccttaaagatatgattcagttggtcaacttttagttcatatagaacttttcatgtatgatcttgttattcaaaattaatcacacctgtatgatgctacaggaaactcctagatacaatgtgtgtgggaagagtatgggaagctcccctctccaggcctctgtctacattcagtgtcctaatggattttcaaccttttggtcaaaacacactcctaaaaaaacaaacaaaaaaaaaaaaa

SEQ ID NO: 2249 - protein, 205 aa, Homo sapien
MVKHSDSRTHSLRYFRLGVSDPIHGVPEFISVGYVDSHPITTYDSVTRQKEPRAPWMAENLAPDHWERYTQLLRGWQQMFKVELKRLQRHYNHSGSHTYQRMIGCELLEDGSTTGFLQYAYDGQDFLIFNKDTLSWLAVDNVAHTIKQAWEANQHELLYQKNWLEEECIAWLKRFLEYGKDTLQRTGKEKEKASFPHCLNNCFYT

SEQ ID NO: 2250 - DNA, 2167 bp, Homo sapien
actgtgttccaatgtgccacggaactcacgcagtggcactttgtggcttcatgaaggaagaggcaggccacgcaacacttcctccccaagccaaggagaagtatcacttttagaggcagaggagcggaaggcagtgggtgtgaccaaaagtgccatttgttaaagactgttggagcagaactactgagaaaaaccaggcattgtatcttcagttgtcatcaagttcgcaatcagattggaaaagctcaacttgaagctttcttgcctgcagtgaagcagagagatagatattattcacgtaataaaaaacatgggcttcaacctgactttccacctttcctacaaattccgattactgttgctgttgactttgtgcctgacagtggttgggtgggccaccagtaactacttcgtgggtgccattcaagagattcctaaagcaaaggagttcatggctaatttccataagaccctcattttggggaagggaaaaactctgactaatgaagcatccacgaagaaggtagaacttgacaactgcccttctgtgtctccttacctcagaggccagagcaagctcattttcaaaccagatctcactttggaagaggtacaggcagaaaatcccaaagtgtccagaggccggtatcgccctcaggaatgtaaagctttacagagggtcgccatcctcgttccccaccggaacagagagaaacacctgatgtacctgctggaacatctgcatcccttcctgcagaggcagcagctggattatggcatctacgtcatccaccaggctgaaggtaaaaagtttaatcgagccaaactcttgaatgtgggctatctagaagccctcaaggaagaaaattgggactgctttatattccacgatgtggacctggtacccgagaatgactttaacctttacaagtgtgaggagcatcccaagcatctggtggttggcaggaacagcactgggtacaggttacgttacagtggatattttgggggtgttactgccctaagcagagagcagtttttcaaggtgaatggattctctaacaactactggggatggggaggcgaagacgatgacctcagactcagggttgagctccaaagaatgaaaatttcccggcccctgcctgaagtgggtaaatatacaatggtcttccacactagagacaaaggcaatgaggtgaacgcagaacggatgaagctcttacaccaagtgtcacgagtctggagaacagatgggttgagtagttgttcttataaattagtatctgtggaacacaatcctttatatatcaacatcacagtggatttctggtttggtgcatgaccctggatcttttggtgatgtttggaagactgattctttgtttgcaataattttggcctagagacttcaaatagtagcacacattaagaacctgttacagctcattgttgagctgaatttttcctttttgtattttcttagcagagctcctggtgatgtagagtataaaacagttgtaacaagacagctttcttagtcattttgatcatgagggttaaatattgtaatatggatacttgaaggactttatataaaaggatgactccaaaggataaaatgaacgctatttgaggactccggttgaaggagatttatttaaatttgaagtaatatattatgggataaaaggccacaggaaataagactgctgaatgtctgagagaaccagagttgttctcgtccaaggtagaaaggtacgaagatacaatactgttattcatttatcctgtacaatcatctgtgaagtggtggtgtcaggtgagaaggcgtccacaaaagaggggagaaaaggcgacgaatcaggacacagtgaacttgggaatgaagaggtagcaggagggtggagtgtcggctgcaaaggcagcagtagctgagctggttgcaggtgctgatagccttcaggggaggacctgcccaggtatgccttccagtgatgcccaccagagaatacattctctattagtttttaaagagtttttgtaaaatgattttgtacaagtaggatatgaattagcagtttacaagtttacatattaactaataataaatatgtctatcaaatacctctgtagtaaaatgtgaaaaagcaaaaaaaaaaaaaaa

SEQ ID NO: 2251 - protein, 344 aa, Homo sapien
MGFNLTFHLSYKFRLLLLLTLCLTVVGWATSNYFVGAIQEIPKAKEFMANFHKTLILGKGKTLTNEASTKKVELDNCPSVSPYLRGQSKLIFKPDLTLEEVQAENPKVSRGRYRPQECKALQRVAILVPHRNREKHLMYLLEHLHPFLQRQQLDYGIYVIHQAEGKKFNRAKLLNVGYLEALKEENWDCFIFHDVDLVPENDFNLYKCEEHPKHLVVGRNSTGYRLRYSGYFGGVTALSREQFFKVNGFSNNYWGWGGEDDDLRLRVELQRMKISRPLPEVGKYTMVFHTRDKGNEVNAERMKLLHQVSRVWRTDGLSSCSYKLVSVEHNPLYINITVDFWFGA

SEQ ID NO: 2252 - DNA, 4005 bp, Homo sapien
cggctgcggttcctggtgctgctcggcgcgcggccagctttcggaacggaacgctcggcgtcgcgggccccgcccggaaagtttgccgtggagtcgcgacctcttggcccgcgcggcccggcatgaagcggcgttgaggagctgctgccgccgcttgccgctgccgccgccgccgcctgaggaggagctgcagcaccctgggccacgccgatgactactgcaaactgtggcgcccacgacgagctcgacttcaaactcgtctttggcgaggacggggcgccggcgccgccgcccccgggctcgcggcctgcagatcttgagccagatgattgtgcatccatttacatctttaatgtagatccacctccatctactttaaccacaccactttgcttaccacatcatggattaccgtctcactcttctgttttgtcaccatcgtttcagctccaaagtcacaaaaactatgaaggaacttgtgagattcctgaatctaaatatagcccattaggtggtcccaaaccctttgagtgcccaagtattcaaattacatctatctctcctaactgtcatcaagaattagatgcacatgaagatgacctacagataaatgacccagaacgggaatttttggaaaggccttctagagatcatctctatcttcctcttgagccatcctaccgggagtcttctcttagtcctagtcctgccagcagcatctcttctaggagttggttctctgatgcatcttcttgtgaatcgctttcacatatttatgatgatgtggactcagagttgaatgaagctgcagcccgatttacccttggatcccctctgacttctcctggtggctctccagggggctgccctggagaagaaacttggcatcaacagtatggacttggacactcattatcacccaggcaatctccttgccactctcctagatccagtgtcactgatgagaattggctgagccccaggccagcctcaggaccctcatcaaggcccacatccccctgtgggaaacggaggcactccagtgctgaagtttgttatgctgggtccctttcaccccatcactcacctgttccttcacctggtcactcccccaggggaagtgtgacagaagatacgtggctcaatgcttctgtccatggtgggtcaggccttggccctgcagtttttccatttcagtactgtgtagagactgacatccctctcaaaacaaggaaaacttctgaagatcaagctgccatactaccaggaaaattagagctgtgttcagatgaccaagggagtttatcaccagcccgggagacttcaatagatgatggccttggatctcagtatcctttaaagaaagattcatgtggtgatcagtttctttcagttccttcaccctttacctggagcaaaccaaagcctggccacacccctatatttcgcacatcttcattacctccactagactggcctttaccagctcattttggacaatgtgaactgaaaatagaagtgcaacctaaaactcatcatcgagcccattatgaaactgaaggtagccgaggggcagtaaaagcatctactgggggacatcctgttgtgaagctcctgggctataacgaaaagccaataaatctacaaatgtttattgggacagcagatgatcgatatttacgacctcatgcattttaccaggtgcatcgaatcactgggaagacagtcgctactgcaagccaagagataataattgccagtacaaaagttctggaaattccacttcttcctgaaaataatatgtcagccagtattgattgtgcaggtattttgaaactccgcaattcagatatagaacttcgaaaaggagaaactgatattggcagaaagaatactagagtacgacttgtgtttcgtgtacacatcccacagcccagtggaaaagtcctttctctgcagatagcctctatacccgttgagtgctcccagcggtctgctcaagaacttcctcatattgagaagtacagtatcaacagttgttctgtaaatggaggtcatgaaatggttgtgactggatctaattttcttccagaatccaaaatcatttttcttgaaaaaggacaagatggacgacctcagtgggaggtagaagggaagataatcagggaaaaatgtcaaggggctcacattgtccttgaagttcctccatatcataacccagcagttacagctgcagtgcaggtgcacttttatctttgcaatggcaagaggaaaaaaagccagtctcaacgttttacttatacaccagttttgatgaagcaagaacacagagaagagattgatttgtcttcagttccatctttgcctgtgcctcatcctgctcagacccagaggccttcctctgattcagggtgttcacatgacagtgtactgtcaggacagagaagtttgatttgctccatcccacaaacatatgcatccatggtgacctcatcccatctgccacagttgcagtgtagagatgagagtgttagtaaagaacagcatatgattccttctccaattgtacaccagccttttcaagtcacaccaacacctcctgtggggtcttcctatcagcctatgcaaactaatgttgtgtacaatggaccaacttgtcttcctattaatgctgcctctagtcaagaatttgattcagttttgtttcagcaggatgcaactctttctggtttagtgaatcttggctgtcaaccactgtcatccataccatttcattcttcaaattcaggctcaacaggacatctcttagcccatacacctcattctgtgcataccctgcctcatctgcaatcaatgggatatcattgttcaaatacaggacaaagatctctttcttctccagtggctgaccagattacaggtcagccttcgtctcagttacaacctattacatatggtccttcacattcagggtctgctacaacagcttccccagcagcttctcatcccttggctagttcaccgctttctgggccaccatctcctcagcttcagcctatgccttaccaatctcctagctcaggaactgcctcatcaccgtctccagccaccagaatgcattctggacagcactcaactcaagcacaaagtacgggccaggggggtctttctgcaccttcatccttaatatgtcacagtttgtgtgatccagcgtcatttccacctgatggggcaactgtgagcattaaacctgaaccagaagatcgagagcctaactttgcaaccattggtctgcaggacatcactttagatgatgaccaatttatatctgacttggaacaccagccatcaggttcagcagagaaatggcctaaccacagtgtgctctcatgtccagctcctttctggagaatctagaggtgaacgagataattgggagagacatgtcccagatttctgtttcccaaggagcaggggtgagcaggcaggctcccctcccgagtcctgagtccctggatttaggaagatctgatgggctctaacagtgcttactgcagccttgtgtccaccaccaacttctcagcatgtttctctccttggaccttgggtttccaactctgcagccttcaggtctggggccaggagtgggacccaccatttgtggggaaagtagcattcctccacctcaggccttgggtagatttggcaaaagaacaggagcagcataggctgtttgagctttggggaaatgaactttgctttttatatttaactaggatacttttatatgatgggtgctttgagtgtgaatgcagcaggctctcttgtttccgaggtgctgcttttgcaggtgacctggttacttagctaggattggtgatttgtactgctttatggtcatttgaagggccctttagtttttatgataatttttaaaataggaacttttgataagaccttctagaagcaaaaaaaaaaaaaaaaaaaaaaaaaagaaaaaaaaag

SEQ ID NO: 2253 - protein, 1068 aa, Homo sapien
MTTANCGAHDELDFKLVFGEDGAPAPPPPGSRPADLEPDDCASIYIFNVDPPPSTLTTPLCLPHHGLPSHSSVLSPSFQLQSHKNYEGTCEIPESKYSPLGGPKPFECPSIQITSISPNCHQELDAHEDDLQINDPEREFLERPSRDHLYLPLEPSYRESSLSPSPASSISSRSWFSDASSCESLSHIYDDVDSELNEAAARFTLGSPLTSPGGSPGGCPGEETWHQQYGLGHSLSPRQSPCHSPRSSVTDENWLSPRPASGPSSRPTSPCGKRRHSSAEVCYAGSLSPHHSPVPSPGHSPRGSVTEDTWLNASVHGGSGLGPAVFPFQYCVETDIPLKTRKTSEDQAAILPGKLELCSDDQGSLSPARETSIDDGLGSQYPLKKDSCGDQFLSVPSPFTWSKPKPGHTPIFRTSSLPPLDWPLPAHFGQCELKIEVQPKTHHRAHYETEGSRGAVKASTGGHPVVKLLGYNEKPINLQMFIGTADDRYLRPHAFYQVHRITGKTVATASQEIIIASTKVLEIPLLPENNMSASIDCAGILKLRNSDIELRKGETDIGRKNTRVRLVFRVHIPQPSGKVLSLQIASIPVECSQRSAQELPHIEKYSINSCSVNGGHEMVVTGSNFLPESKIIFLEKGQDGRPQWEVEGKIIREKCQGAHIVLEVPPYHNPAVTAAVQVHFYLCNGKRKKSQSQRFTYTPVLMKQEHREEIDLSSVPSLPVPHPAQTQRPSSDSGCSHDSVLSGQRSLICSIPQTYASMVTSSHLPQLQCRDESVSKEQHMIPSPIVHQPFQVTPTPPVGSSYQPMQTNVVYNGPTCLPINAASSQEFDSVLFQQDATLSGLVNLGCQPLSSIPFHSSNSGSTGHLLAHTPHSVHTLPHLQSMGYHCSNTGQRSLSSPVADQITGQPSSQLQPITYGPSHSGSATTASPAASHPLASSPLSGPPSPQLQPMPYQSPSSGTASSPSPATRMHSGQHSTQAQSTGQGGLSAPSSLICHSLCDPASFPPDGATVSIKPEPEDREPNFATIGLQDITLDDDQFISDLEHQPSGSAEKWPNHSVLSCPAPFWRI

SEQ ID NO: 2254 - DNA, 3769 bp, Homo sapien
cggctgcggttcctggtgctgctcggcgcgcggccagctttcggaacggaacgctcggcgtcgcgggccccgcccggaaagtttgccgtggagtcgcgacctcttggcccgcgcggcccggcatgaagcggcgttgaggagctgctgccgccgcttgccgctgccgccgccgccgcctgaggaggagctgcagcaccctgggccacgccgatgactactgcaaactgtggcgcccacgacgagctcgacttcaaactcgtctttggcgaggacggggcgccggcgccgccgcccccgggctcgcggcctgcagatcttgagccagatgattgtgcatccatttacatctttaatgtagatccacctccatctactttaaccacaccactttgcttaccacatcatggattaccgtctcactcttctgttttgtcaccatcgtttcagctccaaagtcacaaaaactatgaaggaacttgtgagattcctgaatctaaatatagcccattaggtggtcccaaaccctttgagtgcccaagtattcaaattacatctatctctcctaactgtcatcaagaattagatgcacatgaagatgacctacagataaatgacccagaacgggaatttttggaaaggccttctagagatcatctctatcttcctcttgagccatcctaccgggagtcttctcttagtcctagtcctgccagcagcatctcttctaggagttggttctctgatgcatcttcttgtgaatcgctttcacatatttatgatgatgtggactcagagttgaatgaagctgcagcccgatttacccttggatcccctctgacttctcctggtggctctccagggggctgccctggagaagaaacttggcatcaacagtatggacttggacactcattatcacccaggcaatctccttgccactctcctagatccagtgtcactgatgagaattggctgagccccaggccagcctcaggaccctcatcaaggcccacatccccctgtgggaaacggaggcactccagtgctgaagtttgttatgctgggtccctttcaccccatcactcacctgttccttcacctggtcactcccccaggggaagtgtgacagaagatacgtggctcaatgcttctgtccatggtgggtcaggccttggccctgcagtttttccatttcagtactgtgtagagactgacatccctctcaaaacaaggaaaacttctgaagatcaagctgccatactaccaggaaaattagagctgtgttcagatgaccaagggagtttatcaccagcccgggagacttcaatagatgatggccttggatctcagtatcctttaaagaaagattcatgtggtgatcagtttctttcagttccttcaccctttacctggagcaaaccaaagcctggccacacccctatatttcgcacatcttcattacctccactagactggcctttaccagctcattttggacaatgtgaactgaaaatagaagtgcaacctaaaactcatcatcgagcccattatgaaactgaaggtagccgaggggcagtaaaagcatctactgggggacatcctgttgtgaagctcctgggctataacgaaaagccaataaatctacaaatgtttattgggacagcagatgatcgatatttacgacctcatgcattttaccaggtgcatcgaatcactgggaagacagtcgctactgcaagccaagagataataattgccagtacaaaagttctggaaattccacttcttcctgaaaataatatgtcagccagtattgattgtgcaggtattttgaaactccgcaattcagatatagaacttcgaaaaggagaaactgatattggcagaaagaatactagagtacgacttgtgtttcgtgtacacatcccacagcccagtggaaaagtcctttctctgcagatagcctctatacccgttgagtgctcccagcggtctgctcaagaacttcctcatattgagaagtacagtatcaacagttgttctgtaaatggaggtcatgaaatggttgtgactggatctaattttcttccagaatccaaaatcatttttcttgaaaaaggacaagatggacgacctcagtgggaggtagaagggaagataatcagggaaaaatgtcaaggggctcacattgtccttgaagttcctccatatcataacccagcagttacagctgcagtgcaggtgcacttttatctttgcaatggcaagaggaaaaaaagccagtctcaacgttttacttatacaccagttttgatgaagcaagaacacagagaagagattgatttgtcttcagttccatctttgcctgtgcctcatcctgctcagacccagaggccttcctctgattcagggtgttcacatgacagtgtactgtcaggacagagaagtttgatttgctccatcccacaaacatatgcatccatggtgacctcatcccatctgccacagttgcagtgtagagatgagagtgttagtaaagaacagcatatgattccttctccaattgtacaccagccttttcaagtcacaccaacacctcctgtggggtcttcctatcagcctatgcaaactaatgttgtgtacaatggaccaacttgtcttcctattaatgctgcctctagtcaagaatttgattcagttttgtttcagcaggatgcaactctttctggtttagtgaatcttggctgtcaaccactgtcatccataccatttcattcttcaaattcaggctcaacaggacatctcttagcccatacacctcattctgtgcataccctgcctcatctgcaatcaatgggatatcattgttcaaatacaggacaaagatctctttcttctccagtggctgaccagattacaggtcagccttcgtctcagttacaacctattacatatggtccttcacattcagggtctgctacaacagcttccccagcagcttctcatcccttggctagttcaccgctttctgggccaccatctcctcagcttcagcctatgccttaccaatctcctagctcaggaactgcctcatcaccgtctccagccaccagaatgcattctggacagcactcaactcaagcacaaagtacgggccaggggggtctttctgcaccttcatccttaatatgtcacagtttgtgtgatccagcgtcatttccacctgatggggcaactgtgagcattaaacctgaaccagaagatcgagagcctaactttgcaaccattggtctgcaggacatcactttagatgatggtaagttcatctctgatatgttcttgaagtagtgaagattcagggactttattctcccaagtgtcatgaaaaagtttctatggattgcttattggcatatggttgggcttttaaataagttgttattagaaatatatgttaatatataactttgccaggtaccacggctcacgcctgtatcccagcactttggaaggctgaggcgggtggatcacaaggtcaggagttcaagaccagcctggccaacatggtgtaacgctgtctctactaaaaatacaaaaaattagccaggcatggtggtgtgtgactataatcccagctactcgggaggctgagacaggagaatcacttgaacccgggaggtggcagttgcagggagctaagatcgcgccattgcactccagcctgggcggcagagcaagactccgtctcgggaaaaaaaaaaaaaaaaaa

SEQ ID NO: 2255 - protein, 1045 aa, Homo sapien
MTTANCGAHDELDFKLVFGEDGAPAPPPPGSRPADLEPDDCASIYIFNVDPPPSTLTTPLCLPHHGLPSHSSVLSPSFQLQSHKNYEGTCEIPESKYSPLGGPKPFECPSIQITSISPNCHQELDAHEDDLQINDPEREFLERPSRDHLYLPLEPSYRESSLSPSPASSISSRSWFSDASSCESLSHIYDDVDSELNEAAARFTLGSPLTSPGGSPGGCPGEETWHQQYGLGHSLSPRQSPCHSPRSSVTDENWLSPRPASGPSSRPTSPCGKRRHSSAEVCYAGSLSPHHSPVPSPGHSPRGSVTEDTWLNASVHGGSGLGPAVFPFQYCVETDIPLKTRKTSEDQAAILPGKLELCSDDQGSLSPARETSIDDGLGSQYPLKKDSCGDQFLSVPSPFTWSKPKPGHTPIFRTSSLPPLDWPLPAHFGQCELKIEVQPKTHHRAHYETEGSRGAVKASTGGHPVVKLLGYNEKPINLQMFIGTADDRYLRPHAFYQVHRITGKTVATASQEIIIASTKVLEIPLLPENNMSASIDCAGILKLRNSDIELRKGETDIGRKNTRVRLVFRVHIPQPSGKVLSLQIASIPVECSQRSAQELPHIEKYSINSCSVNGGHEMVVTGSNFLPESKIIFLEKGQDGRPQWEVEGKIIREKCQGAHIVLEVPPYHNPAVTAAVQVHFYLCNGKRKKSQSQRFTYTPVLMKQEHREEIDLSSVPSLPVPHPAQTQRPSSDSGCSHDSVLSGQRSLICSIPQTYASMVTSSHLPQLQCRDESVSKEQHMIPSPIVHQPFQVTPTPPVGSSYQPMQTNVVYNGPTCLPINAASSQEFDSVLFQQDATLSGLVNLGCQPLSSIPFHSSNSGSTGHLLAHTPHSVHTLPHLQSMGYHCSNTGQRSLSSPVADQITGQPSSQLQPITYGPSHSGSATTASPAASHPLASSPLSGPPSPQLQPMPYQSPSSGTASSPSPATRMHSGQHSTQAQSTGQGGLSAPSSLICHSLCDPASFPPDGATVSIKPEPEDREPNFATIGLQDITLDDGKFISDMFLK

SEQ ID NO: 2256 - DNA, 1855 bp, Homo sapien
gagggctggccagtgaggctcggcccggggaaagtgaaagtttgcctgggtcctctcggcgccagagccgctctccgcatcccaggacagcggtgcggccctcggccggggcgcccactccgcagcagccagcgagcgagcgagcgagcgagggcggccgacgcgcccggccgggacccagctgcccgtatgaccgcgccgggcgccgccgggcgctgccctcccacgacatggctgggctccctgctgttgttggtctgtctcctggcgagcaggagtatcaccgaggaggtgtcggagtactgtagccacatgattgggagtggacacctgcagtctctgcagcggctgattgacagtcagatggagacctcgtgccaaattacatttgagtttgtagaccaggaacagttgaaagatccagtgtgctaccttaagaaggcatttctcctggtacaagacataatggaggacaccatgcgcttcagagataacacccccaatgccatcgccattgtgcagctgcaggaactctctttgaggctgaagagctgcttcaccaaggattatgaagagcatgacaaggcctgcgtccgaactttctatgagacacctctccagttgctggagaaggtcaagaatgtctttaatgaaacaaagaatctccttgacaaggactggaatattttcagcaagaactgcaacaacagctttgctgaatgctccagccaaggccatgagaggcagtccgagggatcctccagcccgcagctccaggagtctgtcttccacctgctggtgcccagtgtcatcctggtcttgctggccgtcggaggcctcttgttctacaggtggaggcggcggagccatcaagagcctcagagagcggattctcccttggagcaaccagagggcagccccctgactcaggatgacagacaggtggaactgccagtgtagagggaattctaagctggacgcacagaacagtctctccgtgggaggagacattatggggcgtccaccaccacccctccctggccatcctcctggaatgtggtctgccctccaccagagctcctgcctgccaggactggaccagagcagccaggctggggcccctctgtctcaacccgcagacccttgactgaatgagagaggccagaggatgctccccatgctgccactatttattgtgagccctggaggctcccatgtgcttgaggaaggctggtgagcccggctcaggaccctcttccctcaggggctgcaccctcctctcactcccttccatgccggaacccaggccagggacccaccggcctgtggtttgtgggaaagcagggtggacgctgaggagtgaaagaaccctgcacccagagggcctgcctggtgccaaggtatcccagcctggacaggcatggacctgtctccagagagaggagcctgaagttcgtggggcgggacagcgtcggcctgatttcccgtaaaggtgtgcagcctgagagacgggaagaggaggcctctggacctgctggtctgcactgacagcctgaagggtctacaccctcggctcacctaagtgccctgtgctggttgccaggcgcagaggggaggccagccctgccctcaggacctgcctgacctgccagtgatgccaagagggggatcaagcactggcctctgcccctcctccttccagcacctgccagagcttctccaggaggccaagcagaggctcccctcatgaaggaagccattgcactgtgaacactgtacctgcctgctgaacagcctgcccccgtccatccatgagccagcatccgtccgtcctccactctccagcctctcccca

SEQ ID NO: 2257 - protein, 256 aa, Homo sapien
MTAPGAAGRCPPTTWLGSLLLLVCLLASRSITEEVSEYCSHMIGSGHLQSLQRLIDSQMETSCQITFEFVDQEQLKDPVCYLKKAFLLVQDIMEDTMRFRDNTPNAIAIVQLQELSLRLKSCFTKDYEEHDKACVRTFYETPLQLLEKVKNVFNETKNLLDKDWNIFSKNCNNSFAECSSQGHERQSEGSSSPQLQESVFHLLVPSVILVLLAVGGLLFYRWRRRSHQEPQRADSPLEQPEGSPLTQDDRQVELPV

SEQ ID NO: 2258 - DNA, 948 bp, Homo sapien
ccattgactaactatggaagattataccaaaatagagaaaattggagaaggtacctatggagttgtgtataagggtagacacaaaactacaggtcaagtggtagccatgaaaaaaatcagactagaaagtgaagaggaaggggttcctagtactgcaattcgggaaatttctctattaaaggaacttcgtcatccaaatatagtcagtcttcaggatgtgcttatgcaggattccaggttatatctcatctttgagtttctttccatggatctgaagaaatacttggattctatccctcctggtcagtacatggattcttcacttgttaaggtagtaacactctggtacagatctccagaagtattgctggggtcagctcgttactcaactccagttgacatttggagtataggcaccatatttgctgaactagcaactaagaaaccacttttccatggggattcagaaattgatcaactcttcaggattttcagagctttgggcactcccaataatgaagtgtggccagaagtggaatctttacaggactataagaatacatttcccaaatggaaaccaggaagcctagcatcccatgtcaaaaacttggatgaaaatggcttggatttgctctcgaaaatgttaatctatgatccagccaaacgaatttctggcaaaatggcactgaatcatccatattttaatgatttggacaatcagattaagaagatgtagctttctgacaaaaagtttccatatgttatgtcaacagatagttgtgtttttattgttaactcttgtctatttttgtcttatatatatttctttgttatcaaacttcagctgtacttcgtcttctaatttcaaaaatataacttaaaaatgtaaatattctatatgaatttaaatataattctgtaaatgtgaaaaaaaaaaaaaaaaaaaaa

SEQ ID NO: 2259 - protein, 240 aa, Homo sapien
MEDYTKIEKIGEGTYGVVYKGRHKTTGQVVAMKKIRLESEEEGVPSTAIREISLLKELRHPNIVSLQDVLMQDSRLYLIFEFLSMDLKKYLDSIPPGQYMDSSLVKVVTLWYRSPEVLLGSARYSTPVDIWSIGTIFAELATKKPLFHGDSEIDQLFRIFRALGTPNNEVWPEVESLQDYKNTFPKWKPGSLASHVKNLDENGLDLLSKMLIYDPAKRISGKMALNHPYFNDLDNQIKKM

SEQ ID NO: 2260 - DNA, 1062 bp, Homo sapien
gcacgagcggcacgagtagacttctatagatccctttctatagaacttaatctacttaagtcagggagaccacccagaaggaaagagcccatactttcaatcttaggcataagttagcttgataagattttcagaaaaattcccttttaaccacagaactcccccactggaaaggattctgaaagaaatgaagtcagccctcagaaatgaagttgactgcctgctggctttctgttgactggcccggagctgtactgcaagacccttgtgagcttccctagtctaagagtaggatgtctgctgaagtcatccatcaggttgaagaagcacttgatacagatgagaaggagatgctgctctttttgtgccgggatgttgctatagatgtggttccacctaatgtcagggaccttctggatattttacgggaaagaggtaagctgtctgtcggggacttggctgaactgctctacagagtgaggcgatttgacctgctcaaacgtatcttgaagatggacagaaaagctgtggagacccacctgctcaggaaccctcaccttgtttcggactatagagtgctgatggcagagattggtgaggatttggataaatctgatgtgtcctcattaattttcctcatgaaggattacatgggccgaggcaagataagcaaggagaagagtttcttggaccttgtggttgagttggagaaactaaatctggttgccccagatcaactggatttattagaaaaatgcctaaagaacatccacagaatagacctgaagacaaaaatccagaagtacaagcagtctgttcaaggagcagggacaagttacaggaatgttctccaagcagcaatccaaaagagtctcaaggatccttcaaataacttcaggatgataacaccctatgcccattgtcctgatctgaaaattcttggaaattgttccatgtgattaacatggaactgcctctacttaatcattctgaatgattaaatcgtttcattttctaaatgtgtaaaaaaaaaaaaaaaaaaaaaaactcgagggggggccc

SEQ ID NO: 2261 - protein, 221 aa, Homo sapien
MSAEVIHQVEEALDTDEKEMLLFLCRDVAIDVVPPNVRDLLDILRERGKLSVGDLAELLYRVRRFDLLKRILKMDRKAVETHLLRNPHLVSDYRVLMAEIGEDLDKSDVSSLIFLMKDYMGRGKISKEKSFLDLVVELEKLNLVAPDQLDLLEKCLKNIHRIDLKTKIQKYKQSVQGAGTSYRNVLQAAIQKSLKDPSNNFRMITPYAHCPDLKILGNCSM

SEQ ID NO: 2262 - DNA, 2662 bp, Homo sapien
gtctacaccagcggtgtcgctgcccgaaagtgagagaaggctgatattgctagctggaatccaggcctgggtgctgcatggtggcgcccctccccgtgaccaccgctgcgttttctcgggctttctctgaggagctgctcttgtgctgtttggcccctgcctactcggaatggaacaaagcatcgaacaaacaactgagatcctgttgtgcctatcacctgttgaagttgccagtcttaaggaaggaatcaatttctttcgcaataagagcactggcaaagactacgtcttgtacaagaataagagccgactgagggcatgcaagaatatgtgcaagcaccaaggaggcctgttcataaaagatatcgaggatttagccggaagttgttgaaatggatgaaaacaacggacttttgcttttagaactgaatcctcctaacccttgggacttacagcccagatctcctgaagagttggcttttggagaagtacagataacatatctcactcatgcctgcatggacctcaagttaggagacaagagaatggtgtttgacccttggttaatcggtcctgcttttgcccgtggatggtggttgctccatgagcctccatctgattggctggagaggctgtgccaggcagacctcatttacatcagtcatctgcactcagaccacctgagttaccccacactgaaaaagcttgctgggagaagaccagatattcccatttatgttggaaacacagaaaggcctgtattttggaatctgaatcagagcggtgtccagttgactaatatcaatgtcgtgccatttggaatatggcagcaggtggacaaaaatcttcgattcatgatcttgatggacggtgttcatcctgagatggacacttgcattattgtggagtacaaaggtcataaaatactcaatatagtagactgcaccagacccaatgggggaaggctgcctatgaaggttgctctaatgatgagtgattttgctggaggagcatcaggctttccaatgactttcagtggtggaaaatttacggaggaatggaaagcccaattcattaaaacagaaaggaagaagctcctgaactacaaggctcggctggtgaagaacctgcaaccccgaatttattgtccctttgctgggtattttgtggaatctcacccatcagacaagtacatcaaggaaacaaacaccaaaaatgacccaaatgaactcaacaatcttatcaagaaaaactctgatgtgataacatggacccctcgaccgggagccacccttgatctgggaagaatgctgaaggatcgaacagacagcaagggcatcatagagcctccagaggggacaaaaatttacaaggattcctgggattttgaaccttatttggaaatcttgaatgctgctctaggagatgaaatatttcttcactcatcctggataaaagaatacttcacttgggctggatttaaagattacaaccttgtggtcaggatgattgagacagatgaggacttcaatccttttcctggaggatatgactatttggttgactttttagatttatccttcccaaaagaaagaccacaacgagaacatccctatgaggaaatccatagccgggtggatgtcatcagacacgtggtgaagaatggtctactctgggatgagttgtatataggattccaaacacggctccagcgggatcctgacatataccatcacctgttttggaatcattttcaaataaaactccccctcacaccacccaactggaagtcattcctgatgtgctgtgagcagaatgggcctgcgattttgcaagaatgcaaaaccacatgaaaatttcaagaattcactgatctgatgcaaaataaaaatttatcattacatcttgaacccaggaagcttacagcaaagagactatgctttatgacgtcagcaatagataattccacgttgcctttgtgatttgtatatatagcttacatttgtggatcactacatagccagattcaaaaatattttacttgttccatccacagttctctacagaaagaaccaatgaacccaataggaacaaattctctgtggaaaacaaagcatagctgtagtagatacgaatccaatcacagaggaaacaggaagagaaaaacatccaagactacagtgaaaactggaaatggtctgttttcgtgatattcgtatgattaagatgcaaattttttcttaggaaaatgtgattgttaactagcattctgttttacatgttgacatttctaacacacacaccactgatttgaacttcaaaatttattttctgattatatatgctaggtctgattctgaagatacaagaattcaatggtggaatttgtctcctgaaatttctagattcataattagaagtgtttattaccaacttctcacttagattaacatcagtgatgtttgattattctggttaaccgctcacatgcataacaataatgctagaaattcaggaattataattttgtgatttatactgtgtggtaaattattcagttctcactgcaaataaatataatgtatatcaatgtaatgtaggtcagaatgtctatggtgagcaaataaaagattattttaaaatatgaaaaaaaaaaaaaaaa

SEQ ID NO: 2263 - protein, 486 aa, Homo sapien
MDENNGLLLLELNPPNPWDLQPRSPEELAFGEVQITYLTHACMDLKLGDKRMVFDPWLIGPAFARGWWLLHEPPSDWLERLCQADLIYISHLHSDHLSYPTLKKLAGRRPDIPIYVGNTERPVFWNLNQSGVQLTNINVVPFGIWQQVDKNLRFMILMDGVHPEMDTCIIVEYKGHKILNIVDCTRPNGGRLPMKVALMMSDFAGGASGFPMTFSGGKFTEEWKAQFIKTERKKLLNYKARLVKNLQPRIYCPFAGYFVESHPSDKYIKETNTKNDPNELNNLIKKNSDVITWTPRPGATLDLGRMLKDRTDSKGIIEPPEGTKIYKDSWDFEPYLEILNAALGDEIFLHSSWIKEYFTWAGFKDYNLVVRMIETDEDFNPFPGGYDYLVDFLDLSFPKERPQREHPYEEIHSRVDVIRHVVKNGLLWDELYIGFQTRLQRDPDIYHHLFWNHFQIKLPLTPPNWKSFLMCCEQNGPAILQECKTT

SEQ ID NO: 2264 - DNA, 1294 bp, Homo sapien
ccggcgcgacccgcaggagcgtagagagcgcgggactagagtgcagagctccgggacgtggatcggagccggcgcgatgggcggagagcaggaggaggagcggttcgacggcatgttgctggccatggctcagcagcacgagggcggcgtgcaggagctttgaacaccttcttcagcttccttcgacgcaaaacagactttttcattggaggagaagaagggatggcagagaagcttatcacacagactttcagccaccacaatcagctggcacagaagacccggcgggagaagagagcccggcaggaggccgagcggcgggagaaggcggagcgggcggccagactggccaaggaagccaagtcagagacctcagggccccagatcaaggagctaactgatgaagaggcagagaggctgcagctagagattgaccagaaaaaggatgcagagaatcatgaggcccagctcaagaacggcagccttgactccccagggaagcaggatactgaggaagatgaggaggaagatgagaaggacaaaggaaaactgaagcccaacctaggcaacggggcagacctgcccaattaccgctggacccagaccctstcggagctggacctggcggtccctttctgtgtgaacttccggctgaaagggaaggacatggtggtggacatccagcggcggcacctccgggtggggctcaaggggcagccagcgatcattgatggggagctctacaatgaagtgaaggttgaggagagctcgtggctcattgaggacggcaaggtggtgactgtgcatctggagaagatcaataagatggagtggtggagccgcttggtgtccaagtgaccactggagctccaaccgcggtggcgcgctctagaacctagtggatcccggcctgcaggaattcgcacgaggagactcgcagcatggtggaaaagatgatgtatgaccagcgacagaagtccatggggctgccaacttcagacgaacagaagaaacaggagattctgaagaagttcatggatcaacatccggagatggatttttccaaggctaaattcaactagcccctgttttttcctccctgaactcttggggctgagctgcaaccacccaactttctttcccactcttctctgggacttgtgggcctcagggcttggggcaggcatgggactggcccaggcacacaggtcccggggcatcaggagaaaggctgggtcttgggaccatgtcctccaagttggcctactgttacacattaaaacgatttgcccag

SEQ ID NO: 2265 - protein, 211 aa, Homo sapien [sequence omitted]

SEQ ID NO: 2266 - DNA, 1060 bp, Homo sapien; identical to SEQ ID NO: 887

SEQ ID NO: 2267 - protein, 171 aa, Homo sapien; identical to SEQ ID NO: 888

SEQ ID NO: 2268 - DNA, 1364 bp, Homo sapien; identical to SEQ ID NO: 1675

SEQ ID NO: 2269 - protein, 179 aa, Homo sapien; identical to SEQ ID NO: 1676

SEQ ID NO: 2270 - DNA, 1080 bp, Homo sapien
ccggggggcatgagggtccgagacttgttcttctgtcccttccaagacccggcgacaggaggcatgaggggcccccggccgaaatgacagtgctggcgccagcctggagcccaacaacctatctcctcctgctgctgctgctgagctcgggactcagtgggacccaggactgctccttccaacacagccccatctcctccgacttcgctgtcaaaatccgtgagctgtctgactacctgcttcaagattacccagtcaccgtggcctccaacctgcaggacgaggagctctgcgggggcctctggcggctggtcctggcacagcgctggatggagcggctcaagactgtcgctgggtccaagatgcaaggcttgctggagcgcgtgaacacggagatacactttgtcaccaaatgtgcctttcagcccccccccagctgtcttcgcttcgtccagaccaacatctcccgcctcctgcaggagacctccgagcagctggtggcgctgaagccctggatcactcgccagaacttctcccggtgcctggagctgcagtgtcagcccgactcctcaaccctgccacccccatggagtccccggcccctggaggccacagccccgacagccccgcagccccctctgctcctcctactgctgctgcccgtgggcctcctgctgctggccgctgcctggtgcctgcactggcagaggacgcggcggaggacaccccgccctggggagcaggtgccccccgtccccagtccccaggacctgctgcttgtggagcactgacctggccaaggcctcatcctgcggagccttaaacaacgcagtgagacagacatctatcatcccattttacaggggaggatactgaggcacacagaggggagtcaccagccagaggatgtatagcctggacacagaggaagttggctagaggccggtcccttccttgggcccctctcattccctccccagaatggaggcaacgccagaatccagcaccggccccatttacccaactctgaacaaagcccttgcccccatgaaattgtttataaatcatccttttctccca

SEQ ID NO: 2271 - protein, 235 aa, Homo sapien
MTVLAPAWSPTTYLLLLLLLSSGLSGTQDCSFQHSPISSDFAVKIRELSDYLLQDYPVTVASNLQDEELCGGLWRLVLAQRWMERLKTVAGSKMQGLLERVNTEIHFVTKCAFQPPPSCLRFVQTNISRLLQETSEQLVALKPWITRQNFSRCLELQCQPDSSTLPPPWSPRPLEATAPTAPQPPLLLLLLLPVGLLLLAAAWCLHWQRTRRRTPRPGEQVPPVPSPQDLLLVEH

SEQ ID NO: 2272 - DNA, 643 bp, Homo sapien
gggagaagttaaagccagaggaggggcaggaatgtctgaggtggcaacacttctcttcagccagacagcactggccagtttggagtctgtccatcctgcaggccacaagctctggatgaggaacttgaggcaagtcaccagcccctgatcatttcgcctaaaagagcaaggactagagttcctgacctccaggccagtccctgatccctgacctaatgttatcgcggaatgatgatatatgtatctacgggggcctggggctgggcgggctcctgcttctggcagtggtccttctgtccgcctgcctgtgttggctgcatcgaagagtaaagaggctggagaggagctggacccagggctcctcagagcaggaactccactatgcatctctgcagaggctgccagtgcccagcagtgagggacctgacctcaggggcagagacaagagaggcaccaaggaggatccaagagctgactatgcctgcattgctgagaacaaacccacctgagcaccccagacaccttcctcaacccaggcgggtggacagggtccccctgtggtccagccagtaaaaaccatggtccccccacttctgtgtctcagtcctctcagtccatctcgagcctccgttcaaattgatca

SEQ ID NO: 2273 - protein, 97 aa, Homo sapien [sequence omitted]

SEQ ID NO: 2274 - DNA, 2226 bp, Homo sapien
ctcgacccacgcgtccgcgcgccccaggagccaaagccgggctccaagtcggcgccccacgtcgaggctccgccgcagcctccggagttggccgcagacaagaaggggagggagcgggagagggaggagagctccgaagcgagagggccgagcgccatgcgccgcgccagcagagactacaccaagtacctgcgtggctcggaggagatgggcggcggccccggagccccgcacgagggccccctgcacgccccgccgccgcctgcgccgcaccagccccccgccgcctcccgctccatgttcgtggccctcctggggctggggctgggccaggttgtctgcagcgtcgccctgttcttctatttcagagcgcagatggatcctaatagaatatcagaagatggcactcactgcatttatagaattttgagactccatgaaaatgcagattttcaagacacaactctggagagtcaagatacaaaattaatacctgattcatgtaggagaattaaacaggcctttcaaggagctgtgcaaaaggaattacaacatatcgttggatcacagcacatcagagcagagaaagcgatggtggatggctcatggttagatctggccaagaggagcaagcttgaagctcagccttttgctcatctcactattaatgccaccgacatcccatctggttcccataaagtgagtctgtcctcttggtaccatgatcggggttgggccaagatctccaacatgacttttagcaatggaaaactaatagttaatcaggatggcttttattacctgtatgccaacatttgctttcgacatcatgaaacttcaggagacctagctacagagtatcttcaactaatggtgtacgtcactaaaaccagcatcaaaatcccaagttctcataccctgatgaaaggaggaagcaccaagtattggtcagggaattctgaattccatttttattccataaacgttggtggattttttaagttacggtctggagaggaaatcagcatcgaggtctccaacccctccttactggatccggatcaggatgcaacatactttggggcttttaaagttcgagatatagattgagccccagtttttggagtgttatgtatttcctggatgtttggaaacattttttaaaacaagccaagaaagatgtatataggtgtgtgagactactaagaggcatggccccaacggtacacgactcagtatccatgctcttgaccttgtagagaacacgcgtatttacagccagtgggagatgttagactcatggtgtgttacacaatggtttttaaattttgtaatgaattcctagaattaaaccagattggagcaattacgggttgaccttatgagaaactgcatgtgggctatgggaggggttggtccctggtcatgtgccccttcgcagctgaagtggagagggtgtcatctagcgcaattgaaggatcatctgaaggggcaaattcttttgaattgttacatcatgctggaacctgcaaaaaatactttttctaatgaggagagaaaatatatgtatttttatataatatctaaagttatatttcagatgtaatgttttctttgcaaagtattgtaaattatatttgtgctatagtatttgattcaaaatatttaaaaatgtcttgctgttgacatatttaatgttttaaatgtacagacatatttaactggtgcactttgtaaattccctggggaaaacttgcagctaaggaggggaaaaaaatgttgtttcctaatatcaaatgcagtatatttcttcgttctttttaagttaatagattttttcagacttgtcaagcctgtgcaaaaaaattaaaatggatgccttgaataataagcaggatgttggccaccaggtgcctttcaaatttagaaactaattgactttagaaagctgacattgccaaaaaggatacataatgggccactgaaatctgtcaagagtagttatataattgttgaacaggtgtttttccacaagtgccgcaaattgtacctttttttttttttcaaaatagaaaagttattagtggtttatcagcaaaaaagtccaattttaatttagtaaatgttatcttatactgtacaataaaaacattgcctttgaatgttaattttttggtacaaaaataaatttatatgaaaacctgaaaaaaaaaacaaaaaaaaaaa

SEQ ID NO: 2275 - protein, 317 aa, Homo sapien
MRRASRDYTKYLRGSEEMGGGPGAPHEGPLHAPPPPAPHQPPAASRSMFVALLGLGLGQVVCSVALFFYFRAQMDPNRISEDGTHCIYRILRLHENADFQDTTLESQDTKLIPDSCRRIKQAFQGAVQKELQHIVGSQHIRAEKAMVDGSWLDLAKRSKLEAQPFAHLTINATDIPSGSHKVSLSSWYHDRGWAKISNMTFSNGKLIVNQDGFYYLYANICFRHHETSGDLATEYLQLMVYVTKTSIKIPSSHTLMKGGSTKYWSGNSEFHFYSINVGGFFKLRSGEEISIEVSNPSLLDPDQDATYFGAFKVRDID

SEQ ID NO: 2276 - DNA, 1715 bp, Homo sapien
agttctgtccttgcattggtgcgcctcaggccaggctgcactgctgggacctgggccatgtctccccaccccaccgccctcctgggcctagtgctctgcctggcccagaccatccacacgcaggaggaagatctgcccagaccctccatctcggctgagccaggcaccgtgatccccctggggagccatgtgactttcgtgtgccggggcccggttggggttcaaacattccgcctggagagggagagtagatccacatacaatgatactgaagatgtgtctcaagctagtccatctgagtcagaggccagattccgcattgactcagtaagtgaaggaaatgccgggccttatcgctgcatctattataagccccctaaatggtctgagcagagtgactacctggagctgctggtgaaagaaacctctggaggcccggactccccggacacagagcccggctcctcagctggacccacgcagaggccgtcggacaacagtcacaatgagcatgcacctgcttcccaaggcctgaaagctgagcatctgtatattctcatcggggtctcagtggtcttcctcttctgtctcctcctcctggtcctcttctgcctccatcgccagaatcagataaagcaggggccccccagaagcaaggacgaggagcagaagccacagcagaggcctgacctggctgttgatgttctagagaggacagcagacaaggccacagtcaatggacttcctgagaaggacagagagacggacacctcggccctggctgcagggagttcccaggaggtgacgtatgctcagctggaccactgggccctcacacagaggacagcccgggctgtgtccccacagtccacaaagcccatggccgagtccatcacgtatgcagccgttgccagacactgaccccatacccacctggcctctgcacctgagggtagaaagtcactctaggaaaagcctgaagcagccatttggaaggcttcctgttggattcctcttcatctagaaagccagccaggcagctgtcctggagacaagagctggagactggaggtttctaaccagcatccagaaggttcgttagccaggtggtcccttctacaatcgagcagctccttggacagactgtttctcagttatttccagagacccagctacagttccctggctgtttctagagacccagctttattcacctgactgtttccagagacccagctaaagtcacctgcctgttctaaaggcccagctacagccaatcagccgatttcctgagcagtgatgccacctccaagcttgtcctaggtgtctgctgtgaacctccagtgaccccagagactttgctgtaattatctgccctgctgaccctaaagaccttcctagaagtcaagagctagccttgagactgtgctatacacacacagctgagagccaagcccagttctctgggttgtgctttactccacgcatcaataaataattttgaaggcctcacatctggcagccccaggcctggtcctgggtgcataggtctctcggacccactctctgccttcacagttgttcaaagctgagtgagggaaacaggacttacgaaaacgtgtcagcgttttctttttaaaatttaattgatcaggattgtacgtaaaaaaaaaaaaaaaaaaaaaaaaaaaaaaaaaaaaaaaaaaaaaaaaaaa

SEQ ID NO: 2277 - protein, 287 aa, Homo sapien
MSPHPTALLGLVLCLAQTIHTQEEDLPRPSISAEPGTVIPLGSHVTFVCRGPVGVQTFRLERESRSTYNDTEDVSQASPSESEARFRIDSVSEGNAGPYRCIYYKPPKWSEQSDYLELLVKETSGGPDSPDTEPGSSAGPTQRPSDNSHNEHAPASQGLKAEHLYILIGVSVVFLFCLLLLVLFCLHRQNQIKQGPPRSKDEEQKPQQRPDLAVDVLERTADKATVNGLPEKDRETDTSALAAGSSQEVTYAQLDHWALTQRTARAVSPQSTKPMAESITYAAVARH

SEQ ID NO: 2278 - DNA, 9009 bp, Homo sapien
cctaaagaaaagtattaagtaaatagcagtacagatggcaaatggattgcacaatatatcctctggatccatagtgaccctgcagagataaacctgtgatggtcaaacaatgtgaaaactgctgtcagagacatgggcagggtgctcttgtttacagagaagaggtgcaaaaatcaacttgatggtagtgggaagatcaggaaatgcttcctgaaattgagtattaagaactaatagacattaggtggttgcagaataagttttgtttaggaaggacaagcagttgggtatgactggcttctaggttgtgtgttgtggagtgactggggataaaagcaggagcaagatcacaaaaggtcttctatgcttatattagggaagttggactttattctcaagctgaagggaagctgttgcatggttttaagcagtaaagtgatatgatcagagttttagaggatgccaagattgaaggcaagtctgaccagttaggagactgcttgttaaattagttcagaggagaaacagtgaaggcagtggcactgggcatgaagaagtatatgtgtgctaattttagatttcttagggaagcagaaatgacaagagttagtggtccattggacagaaatattgaaggagactggggagtctaggttgactcccagggtttaggtttgggcagtaaaatgacatgtagaacaattaactgataaacagcatacagaaagaggaaagaacttcatttcatatgtttgtttttgaggaaaagatgtttgtttttgaacttcctgattcagaggggcttgtgggacatcttggttaagatcctgtagtagttctagtagggtctagaagtcaagagatacaaccccgcctggaaggatttgggagtcttcagcatttggaattttggaagccattgtttactgcagtgcatatgagataatttaaactggtacatagataaacacttgaaaaaattttaatagataggaatttaatgtgtatgagaaacataacttgcacatctaacctttgataatcatggacattatcacttaggccaagtgagctcaataaaagggaaatattaactaaaaatatatgtgatacatggaaatggcaaaaatcacggtgaagctatgcaaacgatgcaagttcagaaagtgctgtgttaagtcatgggtgtggtggataaattcacccaaggagagagtaagagtgagaagaaaagagagttgacattgggtggcggggaatggagaagaagaacccatgaaggaaactgaggaagagcagccagacgaataggaggaaaaccaggagaagatggtctttggagtccaaatgaagagttctgaggaggaagtggtccacagcgtcaaacttgtgcaccatggacaattttgctgagggagatttcactgtggcggattatgccttgttagaagattgccctcacgtggatgattgtgtctttgctgctgaatttatgagcaatgattatgttcgtgtgactcagctttactgtgatggggtgggtgtgcaatataaagattatatccaaagtgagaggaatttggaatttgacatctgcagtatatggtgtagtaaaccaatttctgtcctgcaagattattgcgatgccattaaaataaacatcttctggccacttctgtttcaacatcaaaacagttccgtaatatcacgattgcatccctgtgtggacgccaacaattcacgtgcttctgagataaatttgaagaaactacaacatcttgagttgatggaagatattgtggatttggcaaagaaagttgctaatgattcattccttattggaggcttattgagaattggttgtaaaatagaaaataaaatcttggcaatggaagaagctctgaattggataaaatatgcaggcgatgtaacaattctaactaaattaggatcaattgacaattgttggcctatgttaagtattttctttactgaatacaagtaccacataactaaaattgtaatggaagactgcaatttgcttgaagaacttaaaactcaaagttgtatggattgtatagaggaaggagaactaatgaaaatgaaaggaaatgaagagttttccaaagaaagatttgatatagctattatctattacaccagagccattgaatatagacctgaaaactaccttctttatggtaaccgagctctttgttttcttcgtactggacagtttagaaatgcactcggtgatggaaagagagccactattctgaagaacacttggccaaagggtcattatcgttattgtgatgctctttctatgctgggggaatatgactgggccctgcaagcaaacataaaagctcaaaaactctgtaaaaatgaccctgagggaatcaaggatctaattcagcagcatgtaaagttacaaaaacaaatagaagacctacaaggtcgaacagcaaataaggatccaattaaagccttttatgaaaacagggcctacacacctaggagtttatcagcacctatatttactacttcacttaactttgtggagaaggaaagagatttcagaaaaattaatcacgaaatggccaacggtggtaatcagaatctaaaggtggcggatgaggcgttgaaggtagatgattgtgactgtcatcctgaattttcaccaccatcaagtcagcctccaaaacataaaggaaaacaaaaatctcgaaacaatgaatcagaaaagttcagttctagttcaccattgactttaccagcagatttgaagaacatcttggagaaacagttttctaaatcttccagagctgcacaccaggattttgctaatataatgaaaatgctgagaagcttaattcaagatggctatatggccttattggagcagcgttgccgcagcgctgcacaggcctttacagagttgctgaacggtttagatcctcaaaaaataaagcaattgaacctggccatgattaactatgttttggtcgtctatggacttgccatttctctccttggaataggacagcctgaggaattatctgaagccgaaaaccagtttaagaggattattgaacactaccccagtgagggccttgattgcttggcctactgtggaattggaaaagtgtatttgaaaaaaaacagatttctagaagctctcaatcactttgagaaagcaagaaccttgatttatcgtcttcctggagtgttaacttggcccacgagtaatgtgattattgaagagtctcagccacaaaaaataaagatgctgttagagaaatttgttgaagaatgcaagttccctccagtgccagatgccatttgttgctatcagaagtgccatggatattctaagatccagatatacataactgatccagactttaagggttttatacgcatcagctgttgccagtactgtaaaatagaatttcacatgaattgctggaagaagttaaaaactacaacctttaatgataaaattgacaaggattttctacaaggaatatgtcttacccctgactgtgaaggtgtcatttctaagattatcatcttcagcagtggtggtgaagttaaatgtgaatttgaacacaaggtcataaaagaaaaggttcctccaagacctattctgaaacagaaatgttctagcctagagaaactaagactgaaagaagacaaaaaattgaagagaaagatccaaaaaaaagaagcaaaaaagttagcacaagaaagaatggaggaggacttaagagaaagtaatccacccaaaaatgaagagcagaaagaaactgtagacaatgttcagcgttgtcagttccttgatgacagaattctacagtgtataaagcagtatgctgacaagattaaatccggcatacagaatacagccatgcttctcaaagaattgctttcttggaaagttttgagcacagaagactatacaacctgtttttctagcagaaattttctaaatgaagcagtggactatgttattcgccacttgattcaagaaaataacagagtaaagacaagaatatttctgcatgttttgagtgagcttaaagaagtggagcccaaattagccgcctggatccaaaaacttaatagctttggcttagatgccacaggaactttcttttctcgttatggagcatctcttaaactgcttgattttagtatcatgactttcctctggaatgagaaatatggtcacaaactagactctatagaaggaaagcaacttgattatttctctgagccagcatcattgaaggaagcccgttgtttaatatggctgctagaagaacacagagacaagttcccagcattgcatagtgctttagatgaattctttgatataatggacagccgctgtactgtgttaaggaaacaagatagtggtgaagcaccgtttagttcaaccaaggtgaaaaacaaaagcaagaaaaagaagccaaaggattcaaagcctatgttagttgggtctggaacaacttcagtaacttcaaataatgagatcatcacttcaagtgaagaccatagcaatcgaaattcagattctgcaggcccatttgcagtgcctgaccatcttcggcaagatgtagaagaattcgaagctctctatgaccaacacagtaacgaatatgttgtccgcaataagaagctatgggacatgaacccaaaacaaaaatgttcaactctatatgattacttctctcagtttttggaggaacatggtcccttggacatgagtaacaagatgttctctgcagaatatgagtttttcccagaagaaactcgacagatactagaaaaagcaggaggtttaaaaccttttctcttgggatgccctcgttttgttgtgattgacaactgtattgcactgaagaaggttgcatcacggctcaagaaaaaaaggaagaagaaaaacattaaaacaaaagtagaagaaatttcaaaagcaggggagtatgtacgagttaaactacaactgaatccagctgctagggaatttaaaccagatgtaaagtctaaaccagtgtcagattcatcttcagcaccagcttttgaaaatgtgaaacccaaacctgtgtctgcaaattctcccaagccagcttgtgaagatgtgaaggccaaaccagtatccgacaattcttctagacaagtttctgaggatgggcaacccaaaggggtctcttctaattctcctaaaccaggctctgaggatgcaaattacaagcgagtctcctgtaattcccccaaaccggttcttgaggatgtgaaaccaacttattgggctcaatcccatttggtcacaggatactgtacgtatcttcctttccagagatttgatatcacccagacaccgccagcatacataaacgtgttaccaggtttgccccagtacaccagcatatatacacccttggccagcctttctcctgaatatcagctaccaagatcagtaccagtggtgccgtcttttgtagccaatgacagagcagataaaaatgctgctgcctattttgagggtcatcatttgaatgctgagaatgttgctggtcaccagattgcctctgaaacacagatccttgagggctctttgggaatatctgtaaagtcacactgcagcacaggtgatgctcatacagtcctgagtgagtctaacagaaatgatgagcactgtggaaattctaacaacaaatgtgaagtaattccagaaagcaccagtgcagtaacaaacattccacacgtgcagatggttgccatacaggtatcttggaacataatacaccaagaagtcaatactgagccatataatccttttgaggaacgacaaggggaaatttcacggattgaaaaggagcaccaagtattacaagaccaacttcaagaagtgtatgaaaattatgagcagataaaacttaagggcttagaagagaccagggacctggaagagaagttgaaaaggcacttagaagaaaacaagatctcaaagacggaattagattggttccttcaagatttggaaagagaaattaaaaaatggcaacaggaaaaaaaagaaatccaagaaagactaaaatcactgaagaagaaaattaaaaaggtttcaaatgccagtgaaatgtatacccagaaaaatgatggaaaggaaaaggaacatgaattacatctggatcagtcccttgaaatcagcaacacacttacaaatgagaaaatgaaaatagaagagtatataaagaaagggaaagaggattatgaagagagtcatcagagagctgtggctgcagaggtatccgtacttgaaaactggaaggagagtgaagtgtataagctacagatcatggagtcacaagcagaagcctttctgaagaagctggggctgattagccgtgatcctgcagcatatcctgacatggagtctgatatacgttcatgggaattgtttctttctaatgttacaaaagaaattgagaaagcaaagtctcagtttgaagaacaaattaaggcaattaaaaatggttctcggctcagtgaactttctaaagtgcagatttctgagctttcatttcctgcctgtaacacggttcatcccgagttactccctgagtcttcaggccacgatggccaagggcttgtgacttctgcaagcgacgtgactggaaaccacgcagcacttcacagggatcctagtgtgttctctgctggtgattccccaggggaggctccttctgcgctgttgccagggccaccccctggtcagcctgaagccactcagctgacagggccaaaacgggctggccaggcagctctgtcagaacgaagccctgtggctgatcggaagcagcctgttcctccaggacgtgctgcgcgttcaagccagtctccaaaaaagccgttcaatagtattattgagcacctgtcagtggtattcccatgttacaacagcactgagcttgctggttttattaaaaaagtgcgaagcaaaaacaagaactcactctcaggattgagtattgatgaaattgtccaaagagtgacagaacacattctagatgaacagaaaaagaaaaagccaaacccaggaaaggacaagaggacttatgagcccagctctgccacccccgtgaccaggtcctcccagggctcaccctcggtggttgttgcaccatcacccaaaaccaaggggcagaaagcagaagatgtccctgtgaggattgcactgggtgcaagttcctgtgaaatatgccacgaggtgttcaaatcaaaaaacgtgcgtgtgctcaaatgtgggcacaagtatcacaaagggtgctttaagcagtggcttaaagggcagagcgcttgcccggcctgccagggtcgtgatctcctgacagaagagtcaccttctggaagaggctggcccagtcagaatcaggagctgccttcctgctcttctaggtagtcacacttcactaaagtgtcatccaccagtgtgttgaatccgaagaatgacaattttctaccactggtgtaaaaaacaaacatttgaagacccttgtgcattgtgtgtcacaaagctaaatacatggaaatcgttaatatcgctgatattaagtaatttccccactctgagtgaatactttgatgattgccaacagtggctaataaaatgacggctaccacactcatgggtcactgggctgcgcagggctctttgaggtgggtggcttcttttggaaagtactatgaacgtctcgaagcagtattctagtgataagaattcttaacatagccaagcgccccacgtttgttccccacgtttgttccccttttctgtttgaaaaacctgttctggtagctccacaagagagatgatactgactttttaaattttttacaagagtctgtattcctgatatgcctatatttttcctcaaagattctgcattttaaggatgggcataagcaaactatattttaataatttatagttaatgttaaaatattggctgatttagaccaaaagattcaaatctcctctttgtgaaatcccatctgcatttgattttttattattttatgttcccccgttagattgttttaagtgtttgcttttcatcttttatagatgtaatctgattttcaaaaatcattaacactttttaattagtatcgactaagactttttccccctggaatcgaggctgtgtgtccgtcatcccagcccccggttggagcctgctctttgaactccgctgccttccttagcagcttctgtcctcttctgtgagtcagtcagcgagtgcttgggatccgcatccagccgtgctgagcacacaacaggctgtgtgtggaaatggccaccaccattctccttccccaccccaccacaaaaagagaagctgtgtctttagacaaccctgaggtatctgtgttacaatcgttctgtgtttgatatttgtgtaaagtatgcatgcagtcttgtactgtgacctaagaacaaaactgtaactgcattagaaaccatgaaaaaattagatattgttttgtgacttttagacagtggtaaatatagaaccatgaattctggtcacattccatttctctccaacatgaaggatcaaaaaatgtttttcaatgtgttctttgttccactgggaaacttagagtcatgagtttatgaggctggatttgggcacctttcctttgcctttggttcactgtgagttctgatgtcctagtgacttaggtcttagaagctcacgccttagtttgaaacagattctccacggtggtccccaaaacactgtctgcatatccataagaattgaacgctatgggtgttaacgtgcatgaggatcagtttgcagcagcaagtacaaaaggagaagaggaacatccgttgaatgagtgtgttttgtacataacttcagatacttgtgaacatgccttatatttgtccaacaactgtcagaataaagaacattctaaaatgag

SEQ ID NO: 2279 - protein, 2025 aa, Homo sapien
MDNFAEGDFTVADYALLEDCPHVDDCVFAAEFMSNDYVRVTQLYCDGVGVQYKDYIQSERNLEFDICSIWCSKPISVLQDYCDAIKINIFWPLLFQHQNSSVISRLHPCVDANNSRASEINLKKLQHLELMEDIVDLAKKVANDSFLIGGLLRIGCKIENKILAMEEALNWIKYAGDVTILTKLGSIDNCWPMLSIFFTEYKYHITKIVMEDCNLLEELKTQSCMDCIEEGELMKMKGNEEFSKERFDIAIIYYTRAIEYRPENYLLYGNRALCFLRTGQFRNALGDGKRATILKNTWPKGHYRYCDALSMLGEYDWALQANIKAQKLCKNDPEGIKDLIQQHVKLQKQIEDLQGRTANKDPIKAFYENRAYTPRSLSAPIFTTSLNFVEKERDFRKINHEMANGGNQNLKVADEALKVDDCDCHPEFSPPSSQPPKHKGKQKSRNNESEKFSSSSPLTLPADLKNILEKQFSKSSRAAHQDFANIMKMLRSLIQDGYMALLEQRCRSAAQAFTELLNGLDPQKIKQLNLAMINYVLVVYGLAISLLGIGQPEELSEAENQFKRIIEHYPSEGLDCLAYCGIGKVYLKKNRFLEALNHFEKARTLIYRLPGVLTWPTSNVIIEESQPQKIKMLLEKFVEECKFPPVPDAICCYQKCHGYSKIQIYITDPDFKGFIRISCCQYCKIEFHMNCWKKLKTTTFNDKIDKDFLQGICLTPDCEGVISKIIIFSSGGEVKCEFEHKVIKEKVPPRPILKQKCSSLEKLRLKEDKKLKRKIQKKEAKKLAQERMEEDLRESNPPKNEEQKETVDNVQRCQFLDDRILQCIKQYADKIKSGIQNTAMLLKELLSWKVLSTEDYTTCFSSRNFLNEAVDYVIRHLIQENNRVKTRIFLHVLSELKEVEPKLAAWIQKLNSFGLDATGTFFSRYGASLKLLDFSIMTFLWNEKYGHKLDSIEGKQLDYFSEPASLKEARCLIWLLEEHRDKFPALHSALDEFFDIMDSRCTVLRKQDSGEAPFSSTKVKNKSKKKKPKDSKPMLVGSGTTSVTSNNEIITSSEDHSNRNSDSAGPFAVPDHLRQDVEEFEALYDQHSNEYVVRNKKLWDMNPKQKCSTLYDYFSQFLEEHGPLDMSNKMFSAEYEFFPEETRQILEKAGGLKPFLLGCPRFVVIDNCIALKKVASRLKKKRKKKNIKTKVEEISKAGEYVRVKLQLNPAAREFKPDVKSKPVSDSSSAPAFENVKPKPVSANSPKPACEDVKAKPVSDNSSRQVSEDGQPKGVSSNSPKPGSEDANYKRVSCNSPKPVLEDVKPTYWAQSHLVTGYCTYLPFQRFDITQTPPAYINVLPGLPQYTSIYTPLASLSPEYQLPRSVPVVPSFVANDRADKNAAAYFEGHHLNAENVAGHQIASETQILEGSLGISVKSHCSTGDAHTVLSESNRNDEHCGNSNNKCEVIPESTSAVTNIPHVQMVAIQVSWNIIHQEVNTEPYNPFEERQGEISRIEKEHQVLQDQLQEVYENYEQIKLKGLEETRDLEEKLKRHLEENKISKTELDWFLQDLEREIKKWQQEKKEIQERLKSLKKKIKKVSNASEMYTQKNDGKEKEHELHLDQSLEISNTLTNEKMKIEEYIKKGKEDYEESHQRAVAAEVSVLENWKESEVYKLQIMESQAEAFLKKLGLISRDPAAYPDMESDIRSWELFLSNVTKEIEKAKSQFEEQIKAIKNGSRLSELSKVQISELSFPACNTVHPELLPESSGHDGQGLVTSASDVTGNHAALHRDPSVFSAGDSPGEAPSALLPGPPPGQPEATQLTGPKRAGQAALSERSPVADRKQPVPPGRAARSSQSPKKPFNSIIEHLSVVFPCYNSTELAGFIKKVRSKNKNSLSGLSIDEIVQRVTEHILDEQKKKKPNPGKDKRTYEPSSATPVTRSSQGSPSVVVAPSPKTKGQKAEDVPVRIALGASSCEICHEVFKSKNVRVLKCGHKYHKGCFKQWLKGQSACPACQGRDLLTEESPSGRGWPSQNQELPSCSSR

SEQ ID NO: 2280 - DNA, 1142 bp, Homo sapien
cttttccaagcggctgccgaagatggcggaggtgcaggtcctggtgcttgatggtcgaggccatctcctgggccgcctggcggccatcgtggctaaacaggtactgctgggccggaaggtggtggtcgtacgctgtgaaggcatcaacatttctggcaatttctacagaaacaagttgaagtacctggctttcctccgcaagcggatgaacaccaacccttcccgaggcccctaccacttccgggcccccagccgcatcttctggcggaccgtgcgaggtatgctgccccacaaaaccaagcgaggccaggccgctctggaccgtctcaaggtgtttgacggcatcccaccgccctacgacaagaaaaagcggatggtggttcctgctgccctcaaggtcgtgcgtctgaagcctacaagaaagtttgcctatctggggcgcctggctcacgaggttggctggaagtaccaggcagtgacagccaccctggaggagaagaggaaagagaaagccaagatccactaccggaagaagaaacagctcatgaggctacggaaacaggccgagaagaacgtggagaagaaaattgacaaatacacagaggtcctcaagacccacggactcctggtctgagcccaataaagactgttaattcctcatgcgttgcctgcccttcctccattgttgccctggaatgtacgggacccaggggcagcagcagtccaggtgccacaggcagccctgggacataggaagctgggagcaaggaaagggtcttagtcactgcctcccgaagttgcttgaaagcactcggagaattgtgcaggtgtcatttatctatgaccaataggaagagcaaccagttactatgagtgaaagggagccagaagactgattggagggccctatcttgtgagtggggcatctgttggactttccacctggtcatatactctgcagctgttagaatgtgcaagcacttggggacagcatgagcttgctgttgtacacagggtatttctagaagcagaaatagactgggaagatgcacaaccaaggggttacaggcatcgcccatgctcctcacctgtattttgtaatcagaaataaattgcttttaaagaaaaaaaaaaaaaaaaaa

SEQ ID NO: 2281 - protein, 203 aa, Homo sapien [sequence omitted]

SEQ ID NO: 2282 - DNA, 971 bp, Homo sapien
taaaactttaggaaattagtaccagacttttatattggtcaacagcaaaatgaacattactactcagcctccaacacatgcagtttgcctataccagggatcctgtcaaaatatacaccacttatagcttcttaagtgcagttatcatagagcacagtccctgacatcacacagctgcagagatgaataaacaaagaggaacctactcagaagtgagtctggcccaggacccaaagaggcagcaaaggaaacttaagggcaataaaatctccatttcaggaaccaaacaggaaatattccaagtagaattaaaccttcaaaatgcttcttcggatcatcaagggaatgacaagacatatcactgcaaaggtttactgccacctccagagaagctcactgctgaggtcctaggaatcatttgcattgtcctgatggccactgtgttaaaaacaatagttcttattccttgtattggagtactggagcagaacaatttttccctgaatagaagaatgcagaaagcacgtcattgtggccattgtcctgaggagtggattacatattccaacagttgttattacattggtaaggaaagaagaacttgggaagaaagagtttgctggcctgtgcttcgaagaactctgatctgctttctatagataatgaggaagaaatggtaagacgtaaatgtttcaacactttactaaaagcttatttctgtcaatatcatatttgtagaaatcatccatatgtttatacatatatttacttcatatatttttaagtctgtgtagtattcaactgacttcataatatttttatattcatatactgttaatgcacatttggttatttccagttttgcttttcatggaaacccatgcttctataaatgtttttatcacaaaataaatataaagaaaactaaaaaaaaaccaaaaaaaaaaaaaaaaaaggcggccgcgatatag

SEQ ID NO: 2283 - protein, 158 aa, Homo sapien
MNKQRGTYSEVSLAQDPKRQQRKLKGNKISISGTKQEIFQVELNLQNASSDHQGNDKTYHCKGLLPPPEKLTAEVLGIICIVLMATVLKTIVLIPCIGVLEQNNFSLNRRMQKARHCGHCPEEWITYSNSCYYIGKERRTWEERVCWPVLRRTLICFL

SEQ ID NO: 2284 - DNA, 2435 bp, Homo sapien; identical to SEQ ID NO: 309

SEQ ID NO: 2285 - protein, 228 aa, Homo sapien; identical to SEQ ID NO: 310

SEQ ID NO: 2286 - DNA, 5600 bp, Homo sapien; identical to SEQ ID NO: 1725

SEQ ID NO: 2287 - protein, 500 aa, Homo sapien; identical to SEQ ID NO: 1726

SEQ ID NO: 2288 - DNA, 1544 bp, Homo sapien
  Unsure 1358: Unknown base
gcacgagttgggaggtgtagcgcggctctgaacgcgctgagggccgttgagtgtcgcaggcggcgagggcgcgagtgaggagcagacccaggcatcgcgcgccgagaaggccgggcgtccccacactgaaggtccggaaaggcgacttccgggggctttggcacctggcggaccctcccggagcgtcggcacctgaacgcgaggcgctccattgcgcgtgcgcgttgaggggcttcccgcacctgatcgcgagaccccaacggctggtggcgtcgcctgcgcgtctcggctgagctggccatggcgcagctgtgcgggctgaggcggagccgggcgtttctcgccctgctgggatcgctgctcctctctggggtcctggcggccgaccgagaacgcagcatccacgacttctgcctggtgtcgaaggtggtgggcagatgccgggcctccatgcctaggtggtggtacaatgtcactgacggatcctgccagctgtttgtgtatgggggctgtgacggaaacagcaataattacctgaccaaggaggagtgcctcaagaaatgtgccactgtcacagagaatgccacgggtgacctggccaccagcaggaatgcagcggattcctctgtcccaagtgctcccagaaggcaggattctgaagaccactccagcgatatgttcaactatgaagaatactgcaccgccaacgcagtcactgggccttgccgtgcatccttcccacgctggtactttgacgtggagaggaactcctgcaataacttcatctatggaggctgccggggcaataagaacagctaccgctctgaggaggcctgcatgctccgctgcttccgccagcaggagaatcctcccctgccccttggctcaaaggtggtggttctggcggggctgttcgtgatggtgttgatcctcttcctgggagcctccatggtctacctgatccgggtggcacggaggaaccaggagcgtgccctgcgcaccgtctggagctccggagatgacaaggagcagctggtgaagaacacatatgtcctgtgaccgccctgtcgccaagaggactggggaagggaggggagactatgtgtgagctttttttaaatagagggattgactcggatttgagtgatcattagggctgaggtctgtttctctgggaggtaggacggctgcttcctggtctggcagggatgggtttgctttggaaatcctctaggaggctcctcctcgcatggcctgcagtctggcagcagccccgagttgtttcctcgctgatcgatttctttcctccaggtagagttttctttgcttatgttgaattccattgcctccttttctcnatcacagaagtgatgttggaatcgtttcttttgtttgtctgatttatggtttttttaagtataaacaaaagttttttattagcattctgaaagaaggaaagtaaaatgtacaagtttaataaaaaggggccttcccctttagaataaatttccagcatgttgctttcaaaaaaaaaaaaaaaaaaa

SEQ ID NO: 2289 - protein, 252 aa, Homo sapien
  Unsure 1358: Unknown amino acid
MAQLCGLRRSRAFLALLGSLLLSGVLAADRERSIHDFCLVSKVVGRCRASMPRWWYNVTDGSCQLFVYGGCDGNSNNYLTKEECLKKCATVTENATGDLATSRNAADSSVPSAPRRQDSEDHSSDMFNYEEYCTANAVTGPCRASFPRWYFDVERNSCNNFIYGGCRGNKNSYRSEEACMLRCFRQQENPPLPLGSKVVVLAGLFVMVLILFLGASMVYLIRVARRNQERALRTVWSSGDDKEQLVKNTYVL

SEQ ID NO: 2290 - DNA, 1320 bp, Homo sapien
ggggaaacaacctgctccgtggagcgcctgaaacaccagtctttggggccagtgcctcagtttcaatccaggtaacctttaaatgaaacttgcctaaaatcttaggtcatacacagaagagactccaatcgacaagaagctggaaaagaatgatgttgtccttaaacaacctacagaatatcatctataacccggtaatcccgtatgttggcaccattcccgatcagctggatcctggaactttgattgtgatatgtgggcatgttcctagtgacgcagacagattccaggtggatctgcagaatggcagcagtgtgaaacctcgagccgatgtggcctttcatttcaatcctcgtttcaaaagggccggctgcattgtttgcaatactttgataaatgaaaaatggggacgggaagagatcacctatgacacgcctttcaaaagagaaaagtcttttgagatcgtgattatggtgctaaaggacaaattccaggtggctgtaaatggaaaacatactctgctctatggccacaggatcggcccagagaaaatagacactctgggcatttatggcaaagtgaatattcactcaattggttttagcttcagctcggacttacaaagtacccaagcatctagtctggaactgacagagataagtagagaaaatgttccaaagtctggcacgccccagcttcctagtaatagaggaggagacatttctaaaatcgcacccagaactgtctacaccaagagcaaagattcgactgtcaatcacactttgacttgcaccaaaataccacctatgaactatgtgtcaaagagcctgccattcgctgcaaggttgaacacccccatgggccctggacgaactgtcgtcgttaaaggagaagtgaatgcaaatgccaaaagctttaatgttgacctactagcaggaaaatcaaaggatattgctctacacttgaacccacgcctgaatattaaagcatttgtaagaaattcttttcttcaggagtcctggggagaagaagagagaaatattacctctttcccatttagtcctgggatgtactttgagatgataatttactgtgatgttagagaattcaaggttgcagtaaatggcgtacacagcctggagtacaaacacagatttaaagagctcagcagtattgacacgctggaaattaatggagacatccacttactggaagtaaggagctggtagcctacctacacagctgctacaaaaaccaaaatacagaatggcttctgtgatactggccttgcaaaaaaaaaaaaaaaaaaaaaaaaaaaaa

SEQ ID NO: 2291 - protein, 358 aa, Homo sapien [sequence omitted]

SEQ ID NO: 2292 - DNA, 2298 bp, Homo sapien; identical to SEQ ID NO: 653

SEQ ID NO: 2293 - protein, 512 aa, Homo sapien; identical to SEQ ID NO: 654

SEQ ID NO: 2294 - DNA, 1061 bp, Homo sapien
ccacaagctggccccttggcctcctagagaccctgacatctcctccagcagcatctgtcctctctcctcagggaggcaagcatttgatgctcgaggtccctggcagttgtggtccttggcaagtgatgtgtgagtcccgtgtgtcataggaagctccccatccccatctggtgaccaaaggcctggctacaagtagtgagtccttcctcctccacccagacctcactgctcagatccccttcgccaactgggacatcttccgacatggcctggatgctgttgctcatcttgatcatggtccatccaggatcctgtgctctctgggtgtcccagccccctgagattcgtaccctggaaggatcctctgccttcctgccctgctccttcaatgccagccaagggagactggccattggctccgtcacgtggttccgagatgaggtggttccagggaaggaggtgaggaatggaaccccagagttcaggggccgcctggccccacttgcttcttcccgtttcctccatgaccaccaggctgagctgcacatccgggacgtgcgaggccatgacgccagcatctacgtgtgcagagtggaggtgctgggccttggtgtcgggacagggaatgggactcggctggtggtggagaaagaacatcctcagctaggggctggtacagtcctcctccttcgggctggattctatgctgtcagctttctctctgtggccgtgggcagcaccgtctattaccagggcaaatgtctgacctggaaaggtccaagaaggcagctgccggctgtggtcccagcgcccctcccaccaccatgtgggagctcagcacatctgcttcccccagtcccaggaggctgagcctgattgtcctgagaaatgggaaggatcagatatgactcctccttggcaactgccctttcctgccaggcccacacataccctcttctggctgttaggggagcttgggtccctgaacactgtcattcacccaataaattactatttgaccccagagtgggtggaagggtgaaaaaaaaaaaaaaaaaaaa

SEQ ID NO: 2295 - protein, 201 aa, Homo sapien
MAWMLLLILIMVHPGSCALWVSQPPEIRTLEGSSAFLPCSFNASQGRLAIGSVTWFRDEVVPGKEVRNGTPEFRGRLAPLASSRFLHDHQAELHIRDVRGHDASIYVCRVEVLGLGVGTGNGTRLVVEKEHPQLGAGTVLLLRAGFYAVSFLSVAVGSTVYYQGKCLTWKGPRRQLPAVVPAPLPPPCGSSAHLLPPVPGG

SEQ ID NO: 2296 - DNA, 3579 bp, Homo sapien
tcaggctcgctgtcgcgccattttgccggggtttgaatgtgaggcggagcggcggcaggagcgggtagtgccagctacggtccgcggctggggttccctcctccgtttctgtatccccacgagatcctatagcaatggaactcagcgatgcaaatctgcaaacactaacagaatatttaaagaaaacacttgatcctgatcctgccatccgacgtccagctgagaaatttcttgaatctgttgaaggaaatcagaattatccactgttgcttttgacattactggagaagtcccaggataatgttatcaaagtatgtgcttcagtaacattcaaaaactatattaaaaggaactggagaattgttgaagatgaaccaaacaaaatttgtgaagccgatcgagtggccattaaagccaacatagtgcacttgatgcttagcagcccagagcaaattcagaagcagttaagtgatgcaattagcattattggcagagaagattttccacagaaatggcctgacttgctgacagaaatggtgaatcgctttcagagtggagatttccatgttattaatggagtcctccgtacagcacattcattatttaaaagataccgtcatgaatttaagtcaaacgagttatggactgaaattaagcttgttctggatgcctttgctttgcctttgactaatctttttaaggccactattgaactctgcagtacccatgcaaatgatgcctctgccctgaggattctgttttcttccctgatcctgatctcaaaattgttctatagtttaaactttcaggatctccctgaattttttgaagataatatggaaacttggatgaataattttcatactctcttaacattggataataagcttttacaaactgatgatgaagaggaagccggcttattggagctcttaaaatcccagatttgtgataatgccgcactctatgcacaaaagtacgatgaagaattccagcgatacctgcctcgttttgttacagccatctggaatttactagttacaacgggtcaagaggttaaatatgatttgttggtaagtaatgcaattcaatttctggcttcagtttgtgagagacctcattataagaatctatttgaggaccagaacacgctgacaagtatctgtgaaaaggttattgtgcctaacatggaatttagagctgctgatgaagaagcatttgaagataattctgaggagtacataaggagagatttggaaggatctgatattgatactagacgcagggctgcttgtgatctggtacgaggattatgcaagttttttgagggacctgtgacaggaatcttctctggttatgttaattccatgctgcaggaatacgcaaaaaatccatctgtcaactggaaacacaaagatgcagccatctacctagtgacatctttggcatcaaaagcccaaacacagaagcatggaattacacaagcaaatgaacttgtaaacctaactgagttctttgtgaatcacatcctccctgatttaaaatcagctaatgtgaatgaatttcctgtccttaaagctgacggtatcaaatatattatgatttttagaaatcaagtgccaaaagaacatcttttagtctcgattcctctcttgattaatcatcttcaagctgaaagtattgttgttcatacttacgcagctcatgctcttgaacggctctttactatgcgagggcctaacaatgccactctctttacagctgcagaaatcgcaccgtttgttgagattctgctaacaaaccttttcaaagctctcacacttcctggctcttcagaaaatgaatatattatgaaagctatcatgagaagtttttctctcctacaagaagccataatcccctacatccctactctcatcactcagcttacacagaagctattagctgttagtaagaacccaagcaaacctcactttaatcactacatgtttgaagcaatatgtttatccataagaataacttgcaaagctaaccctgctgctgttgtaaattttgaggaggctttgtttttggtgtttactgaaatcttacaaaatgatgtgcaagaatttattccatacgtctttcaagtgatgtctttgcttctggaaacacacaaaaatgacatcccgtcttcctatatggccttatttcctcatctccttcagccagtgctttgggaaagaacaggaaatattcctgctctagtgaggcttcttcaagcattcttagaacgcggttcaaacacaatagcaagtgctgcagctgacaaaattcctgggttactaggtgtctttcagaagctgattgcatccaaagcaaatgaccaccaaggtttttatcttctaaacagtataatagagcacatgcctcctgaatcagttgaccaatataggaaacaaatcttcattctgctattccagagacttcagaattccaaaacaaccaagtttatcaagagttttttagtctttattaatttgtattgcataaaatatggggcactagcactacaagaaatatttgatggtatacaaccaaaaatgtttggaatggttttggaaaaaattattattcctgaaattcagaaggtatctggaaatgtagagaaaaagatctgtgcggttggcataaccaaattactaacagaatgtcccccaatgatggacactgagtataccaaactgtggactccattattacagtctttgattggtctttttgagttacccgaagatgataccattcctgatgaggaacattttattgacatagaagatacaccaggatatcagactgccttctcacagttggcatttgctgggaaaaaagagcatgatcctgtaggtcaaatggtgaataaccccaaaattcacctggcacagtcacttcacaagttgtctaccgcctgtccaggaagggttccatcaatggtgagcaccagcctgaatgcagaagcgctccagtatctccaagggtaccttcaggcagccagtgtgacactgctttaaactgcatttttctaatgggctaaacccagatggtttcctaggaaatcacaggcttctgagcacagctgcattaaaacaaaggaagttctccttttgaacttgtcacgaattccatcttgtaaaggatattaaatgttgctttaacctgaaccttgagcaaattagttggtttgtgtgatcatacagttatgtgggtggcttctagtttgcaacttcaagggacaagtattaatagttcagtgtatggcgttggtttgtgttgagcgtttgcacggtttggataatcttaaattttgacggacactgtggagactttctgttactaaatccttttgttttgaagctgttgctatttgtatttctcttgtcctttatattttttgtctgtttatttacgcttttattggaaatgtgaataagtaaagaattacttgtgttacttgccaagcagtgcacatttcatagtttcaaatctgtaatcagcaataaaaatcctaaaatatgtacctaaaaaaaaaaaaaaaaaaaa

SEQ ID NO: 2297 - protein, 971 aa, Homo sapien
MELSDANLQTLTEYLKKTLDPDPAIRRPAEKFLESVEGNQNYPLLLLTLLEKSQDNVIKVCASVTFKNYIKRNWRIVEDEPNKICEADRVAIKANIVHLMLSSPEQIQKQLSDAISIIGREDFPQKWPDLLTEMVNRFQSGDFHVINGVLRTAHSLFKRYRHEFKSNELWTEIKLVLDAFALPLTNLFKATIELCSTHANDASALRILFSSLILISKLFYSLNFQDLPEFFEDNMETWMNNFHTLLTLDNKLLQTDDEEEAGLLELLKSQICDNAALYAQKYDEEFQRYLPRFVTAIWNLLVTTGQEVKYDLLVSNAIQFLASVCERPHYKNLFEDQNTLTSICEKVIVPNMEFRAADEEAFEDNSEEYIRRDLEGSDIDTRRRAACDLVRGLCKFFEGPVTGIFSGYVNSMLQEYAKNPSVNWKHKDAAIYLVTSLASKAQTQKHGITQANELVNLTEFFVNHILPDLKSANVNEFPVLKADGIKYIMIFRNQVPKEHLLVSIPLLINHLQAESIVVHTYAAHALERLFTMRGPNNATLFTAAEIAPFVEILLTNLFKALTLPGSSENEYIMKAIMRSFSLLQEAIIPYIPTLITQLTQKLLAVSKNPSKPHFNHYMFEAICLSIRITCKANPAAVVNFEEALFLVFTEILQNDVQEFIPYVFQVMSLLLETHKNDIPSSYMALFPHLLQPVLWERTGNIPALVRLLQAFLERGSNTIASAAADKIPGLLGVFQKLIASKANDHQGFYLLNSIIEHMPPESVDQYRKQIFILLFQRLQNSKTTKFIKSFLVFINLYCIKYGALALQEIFDGIQPKMFGMVLEKIIIPEIQKVSGNVEKKICAVGITKLLTECPPMMDTEYTKLWTPLLQSLIGLFELPEDDTIPDEEHFIDIEDTPGYQTAFSQLAFAGKKEHDPVGQMVNNPKIHLAQSLHKLSTACPGRVPSMVSTSLNAEALQYLQGYLQAASVTLL

SEQ ID NO: 2298 - DNA, 3433 bp, Homo sapien
gtcctcctcctagccggactggagggagacaaagcagcgcccgtctgcttcgggcctctggaatttagcgctcgcccagctagccgcagaaatgactgctgtccatgcaggcaacataaacttcaagtgggatcctaaaagtctagagatcaggactctggcagttgagagactgttggagcctcttgttacacaggttacaacccttgtaaacaccaatagtaaagggccctctaataagaagagaggtcgttctaagaaggcccatgttttggctgcatctgttgaacaagcaactgagaatttcttggagaagggggataaaattgcgaaggagagccagtttctcaaggaggagcttgtggctgctgtagaagatgttcgaaaacaaggtgatttgatgaaggctgctgcaggagagttcgcagatgatccctgctcttctgtgaagcgaggcaacatggttcgggcagctcgagctttgctctctgctgttacccggttgctgattttggctgacatggcagatgtctacaaattacttgttcagctgaaagttgtggaagatggtatcttgaagttgaggaatgctggcaatgaacaagacttaggaatccagtataaagccctaaaacctgaagtggataagctgaacattatggcagccaaaagacaacaggaattgaaagatgttggccatcgtgatcagatggctgcagctagaggaatcctgcagaagaacgttccgatcctctatactgcatcccaggcatgcctacagcaccctgatgtcgcagcctataaggccaaccgggacctgatatacaagcagctgcagcaggcggtcacaggcatttccaatgcagcccaggccactgcctcagacgatgcctcacagcaccagggtggaggaggaggagaactggcatatgcactcaataactttgacaaacaaatcattgtggaccccttgagcttcagcgaggagcgctttaggccttccctggaggagcgtctggaaagcatcattagtggggctgccttgatggccgactcctcctgcacgcgtgatgaccgtcgtgagcgaattgtggcagagtgtaatgctgtccgcaaggccctgcaggacctgctttcggagtacatgggcaatgctggacgtaaagaaagaagtgatgcactcaattctgcaatagataaaatgaccaagaagaccagggacttgcgtagacagctccgcaaagctgtcatggaccacgtttcagattctttcctggaaaccaatgttccacttttggtattgattgaagctgcaaagaatggaaatgagaaagaagttaaggagtatgcccaagttttccgtgaacatgccaacaaattgattgaggttgccaacttggcctgttccatctcaaataatgaagaaggtgtaaagcttgttcgaatgtctgcaagccagttagaagccctctgtcctcaggttattaatgctgcactggctttagcagcaaaaccacagagtaaactggcccaagagaacatggatctttttaaagaacaatgggaaaaacaagtccgtgttctcacagatgctgtcgatgacattacttccattgatgacttcttggctgtctcagagaatcacattttggaagatgtgaacaaatgtgtcattgctctccaagagaaggatgtggatggcctggaccgcacagctggtgcaattcgaggccgggcagcccgggtcattcacgtagtcacctcagagatggacaactatgagccaggagtctacacagagaaggttctggaagccactaagctgctctccaacacagtcatgccacgttttactgagcaagtagaagcagccgtggaagccctcagctcggaccctgcccagcccatggatgagaatgagtttatcgatgcttcccgcctggtatatgatggcatccgggacatcaggaaagcagtgctgatgataaggacccctgaggagttggatgactctgactttgagacagaagattttgatgtcagaagcaggacgagcgtccagacagaagacgatcagctgatagctggccagagtgcccgggcgatcatggctcagcttccccaggagcaaaaagcgaagattgcggaacaggtggccagcttccaggaagaaaagagcaagctggatgctgaagtgtccaaatgggacgacagtggcaatgacatcattgtgctggccaagcagatgtgcatgattatgatggagatgacagactttacccgaggtaaaggaccactcaaaaatacatcggatgtcatcagtgctgccaagaaaattgctgaggcaggatccaggatggacaagcttggccgcaccattgcagaccattgccccgactcggcttgcaagcaggacctgctggcctacctgcaacgcatcgccctctactgccaccatctgaacatctgcagcaaggtcaaggccgaggtgcagaatctcggcggggagcttgttgtctctggggtggacagcgccatgtccctgatccaggcagccaagaacttgatgaatgctgtggtgcagacagtgaaggcatcctacgtcgcctctaccaaataccaaaagtcacagggtatggcttccctcaaccttcctgctgtgtcatggaagatgaaggcaccagagaaaaagccattggtgaagagagagaaacaggatgagacacagaccaagattaaacgggcatctcagaagaagcacgtgaacccggtgcaggccctcagcgagttcaaagctatggacagcatctaagtctgcccaggccggccgcccccacccctcggggctcctgaatatcagtcactgttcgtcactcaaatgaatttgctaaatacaacactgatactagattccacagggaaatgggcagactgaaccagtccaggtggtgaattttccaagaacatagtttaagttgattaaaaatgcttttagaatgcaggagcctacttctagctgtattttttgtatgcttaaataaaaataaaattcataaccaaagagaatcccacattagcttgttagtaagctctgaccaagccgagatgcccattctcttagtgatggcggcgttagggtttgagagaagggaatttggctcaacttcagttgagagggtgcagtccagacagcttgactgcttttaaatgaccaaagatgacctgtggtaagcaacctgggcatcttaggaagcagtccctggagaaggcatgttccccagaaaggtctctggagggacaaactcactcagtaaaacataatgtatcatgaagaaaactgattctctatgacatgaaatgaaaattttaatgcattgttataattactaatgtaccgctgctgcaggacattaataaagttgcttttttaggc

SEQ ID NO: 2299 - protein, 906 aa, Homo sapien [sequence omitted]

SEQ ID NO: 2300 - DNA, 1743 bp, Homo sapien
ctgaaggcggaaccacgacgggcagagagcacggagccgggaagcccctgggcgcccgtcggagggctatggagcagcggccgcggggctgcgcggcggtggcggcggcgctcctcctggtgctgctgggggcccgggcccagggcggcactcgtagccccaggtgtgactgtgccggtgacttccacaagaagattggtctgttttgttgcagaggctgcccagcggggcactacctgaaggccccttgcacggagccctgcggcaactccacctgccttgtgtgtccccaagacaccttcttggcctgggagaaccaccataattctgaatgtgcccgctgccaggcctgtgatgagcaggcctcccaggtggcgctggagaactgttcagcagtggccgacacccgctgtggctgtaagccaggctggtttgtggagtgccaggtcagccaatgtgtcagcagttcacccttctactgccaaccatgcctagactgcggggccctgcaccgccacacacggctactctgttcccgcagagatactgactgtgggacctgcctgcctggcttctatgaacatggcgatggctgcgtgtcctgccccacgagcaccctggggagctgtccagagcgctgtgccgctgtctgtggctggaggcagagtaggtggtgtgctgggaatgcgcgtgggagaactgggatggaccgaggggaggcgggtgaggaggggggcaaccacccaacacccaccagctgctttcagtgttctgggtccaggtgctcctggctggccttgtggtccccctcctgcttggggccaccctgacctacacataccgccactgctggcctcacaagcccctggttactgcagatgaagctgggatggaggctctgaccccaccaccggccacccatctgtcacccttggacagcgcccacacccttctagcacctcctgacagcagtgagaagatctgcaccgtccagttggtgggtaacagctggacccctggctaccccgagacccaggaggcgctctgcccgcaggtgacatggtcctgggaccagttgcccagcagagctcttggccccgctcgtgcgcccacactctcgccagagtccccagccggctcgccagccatgatgctgcagccgggcccgcagctctacgacgtgatggacgcggtcccagcgcggcgctggaaggagttcgtgcgcacgctggggctgcgcgaggcagagatcgaagccgtggaggtggagatcggtctcttccgagaccagcagtacgagatgctcaagcactggcgccagcagcagcccgcgggcctcggagccgtttacgcggccctggagcgcatggggctggacggctgcgtggaagacttgcgcagccgcctgcagcgtggcccgtgacacgcagcccacttgccacctaggcgctctggtggcccttgcagaagccctaagtacggttacttatgcgtgtagacattttatgtcacttattaagccgctggcacggccctgcgtaggcacaccagccggccccacccctgctcgcccctatcgctccagccaaggcgaagaagcacgaacgaatgtcgagagggggtgaagacatttctcaacttctcggccggagtttggctgagatcgcggtattaaatctgtgaaagaaataaagaaaaaaacaaaacaaaacaaaaaaaaaaaaaaaaaaaaaaaaaaaaaaa

SEQ ID NO: 2301 - DNA, 9886 bp, Homo sapien; identical to SEQ ID NO: 1767

SEQ ID NO: 2302 - protein, 3056 aa, Homo sapien
MSLVLNDLLICCRQLEHDRATERKKEVEKFKRLIRDPETIKHLDRHSDSKQGKYLNWDAVFRFLQKYIQKETECLRIAKPNVSASTQASRQKKMQEISSLVKYFIKCANRRAPRLKCQELLNYIMDTVKDSSNGAIYGADCSNILLKDILSVRKYWCEISQQQWLELFSVYFRLYLKPSQDVHRVLVARIIHAVTKGCCSQTDGLNSKFLDFFSKAIQCARQEKSSSGLNHILAALTIFLKTLAVNFRIRVCELGDEILPTLLYIWTQHRLNDSLKEVIIELFQLQIYIHHPKGAKTQEKGAYESTKWRSILYNLYDLLVNEISHIGSRGKYSSGFRNIAVKENLIELMADICHQVFNEDTRSLEISQSYTTTQRESSDYSVPCKRKKIELGWEVIKDHLQKSQNDFDLVPWLQIATQLISKYPASLPNCELSPLLMILSQLLPQQRHGERTPYVLRCLTEVALCQDKRSNLESSQKSDLLKLWNKIWCITFRGISSEQIQAENFGLLGAIIQGSLVEVDREFWKLFTGSACRPSCPAVCCLTLALTTSIVPGAVKMGIEQNMCEVNRSFSLKESIMKWLLFYQLEGDLENSTEVPPILHSNFPHLVLEKILVSLTMKNCKAAMNFFQSVPECEHHQKDKEELSFSEVEELFLQTTFDKMDFLTIVRECGIEKHQSSIGFSVHQNLKESLDRCLLGLSEQLLNNYSSEITNSETLVRCSRLLVGVLGCYCYMGVIAEEEAYKSELFQKANSLMQCAGESITLFKNKTNEEFRIGSLRNMMQLCTRCLSNCTKKSPNKIASGFFLRLLTSKLMNDIADICKSLASFIKKPFDRGEVESMEDDTNGNLMEVEDQSSMNLFNDYPDSSVSDANEPGESQSTIGAINPLAEEYLSKQDLLFLDMLKFLCLCVTTAQTNTVSFRAADIRRKLLMLIDSSTLEPTKSLHLHMYLMLLKELPGEEYPLPMEDVLELLKPLSNVCSLYRRDQDVCKTILNHVLHVVKNLGQSNMDSENTRDAQGQFLTVIGAFWHLTKERKYIFSVRMALVNCLKTLLEADPYSKWAILNVMGKDFPVNEVFTQFLADNHHQVRMLAAESINRLFQDTKGDSSRLLKALPLKLQQTAFENAYLKAQEGMREMSHSAENPETLDEIYNRKSVLLTLIAVVLSCSPICEKQALFALCKSVKENGLEPHLVKKVLEKVSETFGYRRLEDFMASHLDYLVLEWLNLQDTEYNLSSFPFILLNYTNIEDFYRSCYKVLIPHLVIRSHFDEVKSIANQIQEDWKSLLTDCFPKILVNILPYFAYEGTRDSGMAQQRETATKVYDMLKSENLLGKQIDHLFISNLPEIVVELLMTLHEPANSSASQSTDLCDFSGDLDPAPNPPHFPSHVIKATFAYISNCHKTKLKSILEILSKSPDSYQKILLAICEQAAETNNVYKKHRILKIYHLFVSLLLKDIKSGLGGAWAFVLRDVIYTLIHYINQRPSCIMDVSLRSFSLCCDLLSQVCQTAVTYCKDALENHLHVIVGTLIPLVYEQVEVQKQVLDLLKYLVIDNKDNENLYITIKLLDPFPDHVVFKDLRITQQKIKYSRGPFSLLEEINHFLSVSVYDALPLTRLEGLKDLRRQLELHKDQMVDIMRASQDNPQDGIMVKLVVNLLQLSKMAINHTGEKEVLEAVGSCLGEVGPIDFSTIAIQHSKDASYTKALKLFEDKELQWTFIMLTYLNNTLVEDCVKVRSAAVTCLKNILATKTGHSFWEIYKMTTDPMLAYLQPFRTSRKKFLEVPRFDKENPFEGLDDINLWIPLSENHDIWIKTLTCAFLDSGGTKCEILQLLKPMCEVKTDFCQTVLPYLIHDILLQDTNESWRNLLSTHVQGFFTSCLRHFSQTSRSTTPANLDSESEHFFRCCLDKKSQRTMLAVVDYMRRQKRPSSGTIFNDAFWLDLNYLEVAKVAQSCAAHFTALLYAEIYADKKSMDDQEKRSLAFEEGSQSTTISSLSEKSKEETGISLQDLLLEIYRSIGEPDSLYGCGGGKMLQPITRLRTYEHEAMWGKALVTYDLETAIPSSTRQAGIIQALQNLGLCHILSVYLKGLDYENKDWCPELEELHYQAAWRNMQWDHCTSVSKEVEGTSYHESLYNALQSLRDREFSTFYESLKYARVKEVEEMCKRSLESVYSLYPTLSRLQAIGELESIGELFSRSVTHRQLSEVYIKWQKHSQLLKDSDFSFQEPIMALRTVILEILMEKEMDNSQRECIKDILTKHLVELSILARTFKNTQLPERAIFQIKQYNSVSCGVSEWQLEEAQVFWAKKEQSLALSILKQMIKKLDASCAANNPSLKLTYTECLRVCGNWLAETCLENPAVIMQTYLEKAVEVAGNYDGESSDELRNGKMKAFLSLARFSDTQYQRIENYMKSSEFENKQALLKRAKEEVGLLREHKIQTNRYTVKVQRELELDELALRALKEDRKRFLCKAVENYINCLLSGEEHDMWVFRLCSLWLENSGVSEVNGMMKRDGMKIPTYKFLPLMYQLAARMGTKMMGGLGFHEVLNNLISRISMDHPHHTLFIILALANANRDEFLTKPEVARRSRITKNVPKQSSQLDEDRTEAANRIICTIRSRRPQMVRSVEALCDAYIILANLDATQWKTQRKGINIPADQPITKLKNLEDVVVPTMEIKVDHTGEYGNLVTIQSFKAEFRLAGGVNLPKIIDCVGSDGKERRQLVKGRDDLRQDAVMQQVFQMCNTLLQRNTETRKRKLTICTYKVVPLSQRSGVLEWCTGTVPIGEFLVNNEDGAHKRYRPNDFSAFQCQKKMMEVQKKSFEEKYEVFMDVCQNFQPVFRYFCMEKFLDPAIWFEKRLAYTRSVATSSIVGYILGLGDRHVQNILINEQSAELVHIDLGVAFEQGKILPTPETVPFRLTRDIVDGMGITGVEGVFRRCCEKTMEVMRNSQETLLTIVEVLLYDPLFDWTMNPLKALYLQQRPEDETELHPTLNADDQECKRNLSDIDQSFNKVAERVLMRLQEKLKGVEEGTVLSVGGQVNLLIQQAIDPKNLSRLFPGWKAWV

SEQ ID NO: 2303 - DNA, 1909 bp, Homo sapien
gaggtgtttcccttagctatggaaactctataagagagatccagcttgcctcctcttgagcagtcagcaacagggtcccgtccttgacacctcagcctctacaggactgagaagaagtaaaaccgtttgctggggctggcctgactcaccagctgccatgcagcagcccttcaattacccatatccccagatctactgggtggacagcagtgccagctctccctgggcccctccaggcacagttcttccctgtccaacctctgtgcccagaaggcctggtcaaaggaggccaccaccaccaccgccaccgccaccactaccacctccgccgccgccgccaccactgcctccactaccgctgccacccctgaagaagagagggaaccacagcacaggcctgtgtctccttgtgatgtttttcatggttctggttgccttggtaggattgggcctggggatgtttcagctcttccacctacagaaggagctggcagaactccgagagtctaccagccagatgcacacagcatcatctttggagaagcaaataggccaccccagtccaccccctgaaaaaaaggagctgaggaaagtggcccatttaacaggcaagtccaactcaaggtccatgcctctggaatgggaagacacctatggaattgtcctgctttctggagtgaagtataagaagggtggccttgtgatcaatgaaactgggctgtactttgtatattccaaagtatacttccggggtcaatcttgcaacaacctgcccctgagccacaaggtctacatgaggaactctaagtatccccaggatctggtgatgatggaggggaagatgatgagctactgcactactgggcagatgtgggcccgcagcagctacctgggggcagtgttcaatcttaccagtgctgatcatttatatgtcaacgtatctgagctctctctggtcaattttgaggaatctcagacgtttttcggcttatataagctctaagagaagcactttgggattctttccattatgattctttgttacaggcaccgagaatgttgtattcagtgagggtcttcttacatgcatttgaggtcaagtaagaagacatgaaccaagtggaccttgagaccacagggttcaaaatgtctgtagctcctcaactcacctaatgtttatgagccagacaaatggaggaatatgacggaagaacatagaactctgggctgccatgtgaagagggagaagcatgaaaaagcagctaccaggtgttctacactcatcttagtgcctgagagtatttaggcagattgaaaaggacaccttttaactcacctctcaaggtgggccttgctacctcaagggggactgtctttcagatacatggttgtgacctgaggatttaagggatggaaaaggaagactagaggcttgcataataagctaaagaggctgaaagaggccaatgccccactggcagcatcttcacttctaaatgcatatcctgagccatcggtgaaactaacagataagcaagagagatgttttggggactcatttcattcctaacacagcatgtgtatttccagtgcaattgtaggggtgtgtgtgtgtgtgtgtgtgtgtgtgtgtgtatgactaaagagagaatgtagatattgtgaagtacatattaggaaaatatgggttgcatttggtcaagattttgaatgcttcctgacaatcaactctaatagtgcttaaaaatcattgattgtcagctactaatgatgttttcctataatataataaatatttatgtagatgtgcatttttgtgaaatgaaaacatgtaataaaaagtatatgttaggatacaaaaaaaaaaaaaaaaaaaaaaaaaaaaaaaaaaaaaaaaaaaaaaaaaaaa

SEQ ID NO: 2304 - protein, 281 aa, Homo sapien
MQQPFNYPYPQIYWVDSSASSPWAPPGTVLPCPTSVPRRPGQRRPPPPPPPPPLPPPPPPPPLPPLPLPPLKKRGNHSTGLCLLVMFFMVLVALVGLGLGMFQLFHLQKELAELRESTSQMHTASSLEKQIGHPSPPPEKKELRKVAHLTGKSNSRSMPLEWEDTYGIVLLSGVKYKKGGLVINETGLYFVYSKVYFRGQSCNNLPLSHKVYMRNSKYPQDLVMMEGKMMSYCTTGQMWARSSYLGAVFNLTSADHLYVNVSELSLVNFEESQTFFGLYKL

SEQ ID NO: 2305 - DNA, 3045 bp, Homo sapien; identical to SEQ ID NO: 1107

SEQ ID NO: 2306 - protein, 265 aa, Homo sapien; identical to SEQ ID NO: 1108

SEQ ID NO: 2307 - DNA, 484 bp, Homo sapien
ccgttcgctccggacaccatggacaagttttggtggcacgcagcctggggactctgcctcgtgccgctgagcctggcgcagatcgatttgaatataacctgccgctttgcaggtgtattccacgtggagaaaaatggtcgctacagcatctctcggacggaggccgctgacctctgcaaggctttcaatagcaccttgcccacaatggcccagatggagaaagctctgagcatcggatttgagacctgcagtttgcattgcagtcaacagtcgaagaaggtgtgggcagaagaaaaagctagtgatcaacagtggcaatggagctgtggaggacagaaagccaagtggactcaacggagaggccagcaagtctcaggaaatggtgcatttggtgaacaaggagtcgtcagaaactccagaccagtttatgacagctgatgagacaaggaacctgcagaatgtggacatgaagattggggtgtaa

SEQ ID NO: 2308 - protein, 139 aa, Homo sapien
MDKFWWHAAWGLCLVPLSLAQIDLNITCRFAGVFHVEKNGRYSISRTEAADLCKAFNSTLPTMAQMEKALSIGFETCSLHCSQQSKKVWAEEKASDQQWQWSCGGQKAKWTQRRGQQVSGNGAFGEQGVVRNSRPVYDS

SEQ ID NO: 2309 - DNA, 3316 bp, Homo sapien
cactctctttctctctccctctggcatgcatgctgctggtaggagacccccaagtcaacattgcttcagaaatcctttagcactcatttctcaggagaacttatggcttcagaatcacagctcggtttttaagatggacataacctgtacgaccttctgatgggctttcaactttgaactggatgtggacacttttctctcagatgacagaattactccaacttcccctttgcagttgcttcctttccttgaaggtagctgtatcttattttctttaaaaagctttttcttccaaagccacttgccatgccgaccgtcattagcgcatctgtggctccaaggacagcggctgagccccggtccccagggccagttcctcacccggcccagagcaaggccactgaggctgggggtggaaacccaagtggcatctattcagccatcatcagccgcaattttcctattatcggagtgaaagagaagacattcgagcaacttcacaagaaatgtctagaaaagaaagttctttatgtggaccctgagttcccaccggatgagacctctctcttttatagccagaagttccccatccagttcgtctggaagagacctccggaaatttgcgagaatccccgatttatcattgatggagccaacagaactgacatctgtcaaggagagctaggggactgctggtttctcgcagccattgcctgcctgaccctgaaccagcaccttcttttccgagtcataccccatgatcaaagtttcatcgaaaactacgcagggatcttccacttccagttctggcgctatggagagtgggtggacgtggttatagatgactgcctgccaacgtacaacaatcaactggttttcaccaagtccaaccaccgcaatgagttctggagtgctctgctggagaaggcttatgctaagctccatggttcctacgaagctctgaaaggtgggaacaccacagaggccatggaggacttcacaggaggggtggcagagttttttgagatcagggatgctcctagtgacatgtacaagatcatgaagaaagccatcgagagaggctccctcatgggctgctccattgatgatggcacgaacatgacctatggaacctctccttctggtctgaacatgggggagttgattgcacggatggtaaggaatatggataactcactgctccaggactcagacctcgaccccagaggctcagatgaaagaccgacccggacaatcattccggttcagtatgagacaagaatggcctgcgggctggtcagaggtcacgcctactctgtcacggggctggatgaggtcccgttcaaaggtgagaaagtgaagctggtgcggctgcggaatccgtggggccaggtggagtggaacggttcttggagtgatagatggaaggactggagctttgtggacaaagatgagaaggcccgtctgcagcaccaggtcactgaggatggagagttctggatgtcctatgaggatttcatctaccatttcacaaagttggagatctgcaacctcacggccgatgctctgcagtctgacaagcttcagacctggacagtgtctgtgaacgagggccgctgggtacggggttgctctgccggaggctgccgcaacttcccagatactttctggaccaaccctcagtaccgtctgaagctcctggaggaggacgatgaccctgatgactcggaggtgatttgcagcttcctggtggccctgatgcagaagaaccggcggaaggaccggaagctaggggccagtctcttcaccattggcttcgccatctacgaggttcccaaagagatgcacgggaacaagcagcacctgcagaaggacttcttcctgtacaacgcctccaaggccaggagcaaaacctacatcaacatgcgggaggtgtcccagcgcttccgcctgcctcccagcgagtacgtcatcgtgccctccacctacgagccccaccaggagggggaattcatcctccgggtcttctctgaaaagaggaacctctctgaggaagttgaaaataccatctccgtggatcggccagtgaaaaagaaaaaaaccaagcccatcatcttcgtttcggacagagcaaacagcaacaaggagctgggtgtggaccaggagtcagaggagggcaaaggcaaaacaagccctgataagcaaaagcagtccccacagccacagcctggcagctctgatcaggaaagtgaggaacagcaacaattccggaacattttcaagcagatagcaggagatgacatggagatctgtgcagatgagctcaagaaggtccttaacacagtcgtgaacaaacacaaggacctgaagacacacgggttcacactggagtcctgccgtagcatgattgcgctcatggatacagatggctctggaaagctcaacctgcaggagttccaccacctctggaacaagattaaggcctggcagaaaattttcaaacactatgacacagaccagtccggcaccatcaacagctacgagatgcgaaatgcagtcaacgacgcaggattccacctcaacaaccagctctatgacatcattaccatgcggtacgcagacaaacacatgaacatcgactttgacagtttcatctgctgcttcgttaggctggagggcatgttcagagcttttcatgcatttgacaaggatggagatggtatcatcaagctcaacgttctggagtggctgcagctcaccatgtatgcctgaaccaggctggcctcatccaaagccatgcaggatcactcaggatttcagtttcaccctctatttccaaagccatttacctcaaaggacccagcagctacacccctacaggcttccaggcacctcatcagtcatgctcctcctccattttaccccctacccatccttgatcggtcatgcctagcctgaccctttagtaaagcaatgaggtaggaagaacaaacccttgtccctttgccatgtggaggaaagtgcctgcctctggtccgagccgcctcggttctgaagcgagtgctcctgcttaccttgctctaggctgtctgcagaagcacctgccggtggcactcagcacctccttgtgctagagccctccatcaccttcacgctgtcccaccatgggccaggaaccaaaccagcactgggttctactgctgtggggtaaactaactcagtggaatagggctggttactttgggctgtccaactcataagtttggctgcattttgaaaaaagctgatctaaataaaggcatgtgtatggctggtc

SEQ ID NO: 2310 - protein, 821 aa, Homo sapien
MPTVISASVAPRTAAEPRSPGPVPHPAQSKATEAGGGNPSGIYSAIISRNFPIIGVKEKTFEQLHKKCLEKKVLYVDPEFPPDETSLFYSQKFPIQFVWKRPPEICENPRFIIDGANRTDICQGELGDCWFLAAIACLTLNQHLLFRVIPHDQSFIENYAGIFHFQFWRYGEWVDVVIDDCLPTYNNQLVFTKSNHRNEFWSALLEKAYAKLHGSYEALKGGNTTEAMEDFTGGVAEFFEIRDAPSDMYKIMKKAIERGSLMGCSIDDGTNMTYGTSPSGLNMGELIARMVRNMDNSLLQDSDLDPRGSDERPTRTIIPVQYETRMACGLVRGHAYSVTGLDEVPFKGEKVKLVRLRNPWGQVEWNGSWSDRWKDWSFVDKDEKARLQHQVTEDGEFWMSYEDFIYHFTKLEICNLTADALQSDKLQTWTVSVNEGRWVRGCSAGGCRNFPDTFWTNPQYRLKLLEEDDDPDDSEVICSFLVALMQKNRRKDRKLGASLFTIGFAIYEVPKEMHGNKQHLQKDFFLYNASKARSKTYINMREVSQRFRLPPSEYVIVPSTYEPHQEGEFILRVFSEKRNLSEEVENTISVDRPVKKKKTKPIIFVSDRANSNKELGVDQESEEGKGKTSPDKQKQSPQPQPGSSDQESEEQQQFRNIFKQIAGDDMEICADELKKVLNTVVNKHKDLKTHGFTLESCRSMIALMDTDGSGKLNLQEFHHLWNKIKAWQKIFKHYDTDQSGTINSYEMRNAVNDAGFHLNNQLYDIITMRYADKHMNIDFDSFICCFVRLEGMFRAFHAFDKDGDGIIKLNVLEWLQLTMYA

SEQ ID NO: 2311 - DNA, 1638 bp, Homo sapien
tcagcgggaggggctggaccccgcgttcctcctccctgccggtccccatccttaaagcgagagtctggacgccccgcctgtgggagagagcgccgggatccggacggggagcaaccggggcaggccgtgccggctgaggaggtcctgaggctacagagctgccgcggctggcacacgagcgcctcggcactaaccgagtgttcgcgggggctgtgaggggagggccccgggcgccattgctggcggtgggagcgccgcccggtctcagcccgccctcggctgctctcctcctccggctgggaggggccgtagctcggggccgtcgccagccccggcccgggctcgagaatcaagggcctcggccgccgtcccgcagctcagtccatcgcccttgccgggcagcccgggcagagaccatgtttgacaagacgcggctgccgtacgtggccctcgatgtgctctgcgtgttgctggctggattgccttttgcaattcttacttcaaggcatacccccttccaacgaggagtattctgtaatgatgagtccatcaagtacccttacaaagaagacaccataccttatgcgttattaggtggaataatcattccattcagtattatcgttattattcttggagaaaccctgtctgtttactgtaaccttttgcactcaaattcctttatcaggaataactacatagccactatttacaaagccattggaacctttttatttggtgcagctgctagtcagtccctgactgacattgccaagtattcaataggcagactgcggcctcacttcttggatgtttgtgatccagattggtcaaaaatcaactgcagcgatggttacattgaatactacatatgtcgagggaatgcagaaagagttaaggaaggcaggttgtccttctattcaggccactcttcgttttccatgtactgcatgctgtttgtggcactttatcttcaagccaggatgaagggagactgggcaagactcttacgccccacactgcaatttggtcttgttgccgtatccatttatgtgggcctttctcgagtttctgattataaacaccactggagcgatgtgttgactggactcattcagggagctctggttgcaatattagttgctgtatatgtatcggatttcttcaaagaaagaacttcttttaaagaaagaaaagaggaggactctcatacaactctgcatgaaacaccaacaactgggaatcactatccgagcaatcaccagccttgaaaggcagcagggtgcccaggtgaagctggcctgttttctaaaggaaaatgattgccacaaggcaagaggatgcatctttcttcctggtgtacaagcctttaaagacttctgctgctgctatgcctcttggatgcacactttgtgtgtacatagttacctttaactcagtggttatctaatagctctaaactcattaaaaaaactccaagccttccaccaaaacagtgccccacctgtatacatttttattaaaaaaatgtaatgcttatgtataaacatgtatgtaatatgctttctatgaatgatgtttgatttaaatataatacatattaaaatgtatgggagaaccaaaaaaaaaaaaaaaaaa

SEQ ID NO: 2312 - protein, 284 aa, Homo sapien
MFDKTRLPYVALDVLCVLLAGLPFAILTSRHTPFQRGVFCNDESIKYPYKEDTIPYALLGGIIIPFSIIVIILGETLSVYCNLLHSNSFIRNNYIATIYKAIGTFLFGAAASQSLTDIAKYSIGRLRPHFLDVCDPDWSKINCSDGYIEYYICRGNAERVKEGRLSFYSGHSSFSMYCMLFVALYLQARMKGDWARLLRPTLQFGLVAVSIYVGLSRVSDYKHHWSDVLTGLIQGALVAILVAVYVSDFFKERTSFKERKEEDSHTTLHETPTTGNHYPSNHQP

SEQ ID NO: 2313 - DNA, 1280 bp, Homo sapien
atgccccaactttccggaggaggtggcggcggcgggggggacccggaactctgcgccacggacgagatgatccccttcaaggacgagggcgatcctcagaaggaaaagatcttcgccgagatcagtcatcccgaagaggaaggcgatttagctgacatcaagtcttccttggtgaacgagtctgaaatcatcccggccagcaacggacacgaggtggccagacaagcacaaacctctcaggagccctaccacgacaaggccagagaacaccccgatgacggaaagcatccagatggaggcctctacaacaagggaccctcctactcgagttattccgggtacataatgatgccaaatatgaataacgacccatacatgtcaaatggatctctttctccacccatcccgagaacatcaaataaagtgcccgtggtgcagccatcccatgcggtccatcctctcacccccctcatcacttacagtgacgagcacttttctccagggtcacacccgtcacacatcccatcagatgtcaactccaaacaaggcatgtccagacatcctccagctcctgatatccctactttctatcccttgtctccgggtggtgttggacagatcaccccacctcttggttggcaaggtcagcctgtatatcccatcacgggtggattcaggcaaccctacccatcctcactgtcagtcgacacttccatgtccaggttttcccatcatatgattcccggtcctcctggtccccacacaactggcatccctcatccagctattgtaacacctcaggtcaaacaggaacatccccacactgacagtgacctaatgcacgtgtgctctgcttttctcctcccccatcccttcctcattccttcaaccccttcccctaaccaccaccaccaccaccttttaggaagcctcagcatgaacagagaaaggagcaggagccaaaaagacctcacattaagaagcctctgaatgcttttatgttatacatgaaagaaatgagagcgaatgtcgttgctgagtgtactctaaaagaaagtgcagctatcaaccagattcttggcagaaggtggcatgccctctcccgtgaagagcaggctaaatattatgaattagcacggaaagaaagacagctacatatgcagctttatccaggctggtctgcaagagacaattatggtaagaaaaagaagaggaagagagagaaactacaggaatctgcatcaggtacaggtccaagaatgacagctgcctacatctga

SEQ ID NO: 2314 - protein, 329 aa, Homo sapien
MPQLSGGGGGGGGDPELCATDEMIPFKDEGDPQKEKIFAEISHPEEEGDLADIKSSLVNESEIIPASNGHEVARQAQTSQEPYHDKAREHPDDGKHPDGGLYNKGPSYSSYSGYIMMPNMNNDPYMSNGSLSPPIPRTSNKVPVVQPSHAVHPLTPLITYSDEHFSPGSHPSHIPSDVNSKQGMSRHPPAPDIPTFYPLSPGGVGQITPPLGWQGQPVYPITGGFRQPYPSSLSVDTSMSRFSHHMIPGPPGPHTTGIPHPAIVTPQVKQEHPHTDSDLMHVCSAFLLPHPFLIPSTPSPNHHHHHLLGSLSMNRERSRSQKDLTLRSL

SEQ ID NO: 2315 - DNA, 1649 bp, Homo sapien
agaggtgagagagtcgcgcccgggagtccgccgcctgcgccaggatggagttcgtgaaatgccttggccaccccgaagagttctacaacctggtgcgcttccggatcgggggcaagcggaaggtgatgcccaagatggaccaggactcgctcagcagcagcctgaaaacttgctacaagtatctcaatcagaccagtcgcagtttcgcagctgttatccaggcgctggatggggaaatgcgcaacgcagtgtgcatattttatctggttctccgagctctggacacactggaagatgacatgaccatcagtgtggaaaagaaggtcccgctgttacacaactttcactctttcctttaccaaccagactggcggttcatggagagcaaggagaaggatcgccaggtgctggaggacttcccaacgatctcccttgagtttagaaatctggctgagaaataccaaacagtgattgccgacatttgccggagaatgggcattgggatggcagagtttttggataagcatgtgacctctgaacaggagtgggacaagtactgccactatgttgctgggctggtcggaattggcctttcccgtcttttctcagcctcagagtttgaagaccccttagttggtgaagatacagaacgtgccaactctatgggcctgtttctgcagaaaacaaacatcatccgtgactatctggaagaccagcaaggaggaagagagttctggcctcaagaggtttggagcaggtatgttaagaagttaggggattttgctaagccggagaatattgacttggccgtgcagtgcctgaatgaacttataaccaatgcactgcaccacatcccagatgtcatcacctacctttcgagactcagaaaccagagtgtgtttaacttctgtgctattccacaggtgatggccattgccactttggctgcctgttataataaccagcaggtgttcaaaggggcagtgaagattcggaaagggcaagcagtgacccttatgatggatgccaccaatatgccagctgtcaaagccatcatatatcagtatatggaagagatttatcatagaatccccgactcagacccatcttctagcaaaacaaggcagatcatctccaccatccggacgcagaatcttcccaactgtcagctgatttcccgaagccactactcccccatctacctgtcgtttgtcatgcttttggctgccctgagctggcagtacctgaccactctctcccaggtaacagaagactatgttcagactggagaacactgatcccaaatttgtccatagctgaagtccaccataaagtggatttactttttttctttaaggatggatgttgtgttctctttatttttttcctactactttaatccctaaaagaacgctgtgtggctgggacctttaggaaagtgaaatgcaggtgagaagaacctaaacataaaaggaaagggtgcctcatcccagcaacctgtccttgtgggtgatgatcactgtgctgcttgcggctcatggcagagcattcagtgccacggtttaggtgaagtcgctgcatatgtgactgtcatgagatcctacttagtatgatcctggctagaatgataattaaaagtatttaatttg

SEQ ID NO: 2316 - protein, 417 aa, Homo sapien
MEFVKCLGHPEEFYNLVRFRIGGKRKVMPKMDQDSLSSSLKTCYKYLNQTSRSFAAVIQALDGEMRNAVCIFYLVLRALDTLEDDMTISVEKKVPLLHNFHSFLYQPDWRFMESKEKDRQVLEDFPTISLEFRNLAEKYQTVIADICRRMGIGMAEFLDKHVTSEQEWDKYCHYVAGLVGIGLSRLFSASEFEDPLVGEDTERANSMGLFLQKTNIIRDYLEDQQGGREFWPQEVWSRYVKKLGDFAKPENIDLAVQCLNELITNALHHIPDVITYLSRLRNQSVFNFCAIPQVMAIATLAACYNNQQVFKGAVKIRKGQAVTLMMDATNMPAVKAIIYQYMEEIYHRIPDSDPSSSKTRQIISTIRTQNLPNCQLISRSHYSPIYLSFVMLLAALSWQYLTTLSQVTEDYVQTGEH

SEQ ID NO: 2317 - DNA, 2496 bp, Homo sapien; identical to SEQ ID NO: 2030

SEQ ID NO: 2318 - protein, 221 aa, Homo sapien; identical to SEQ ID NO: 2031

SEQ ID NO: 2319 - DNA, 2776 bp, Homo sapien; identical to SEQ ID NO: 2110

SEQ ID NO: 2320 - protein, 626 aa, Homo sapien; identical to SEQ ID NO: 2111

SEQ ID NO: 2321 - DNA, 4049 bp, Homo sapien
cctcttgcggccacaggcgcggcgtcctcggcggcgggcggcagctagcgggagccgggacgccggtgcagccgcagcgcgcggaggaacccgggtgtgccgggagctgggcggccacgtccggacgggaccgagacccctcgtagcgcattgcggcgacctcgccttccccggccgcgagcgcgccgctgcttgaaaagccgcggaacccaaggacttttctccggtccgagctcggggcgccccgcaggcgcacggtacccgtgctgcagtcgggcacgccgcggcgccgggggcctccgcagggcgatggagccggtctgcaaggaaagtgaggcgccgccgctgcgttctggaggaggggggcacaaggtctggagaccccgggtggcggacgggagccctccccccgccccgcctccggggcaccagctccggctccattgttcccgcccgggctggaggcgccgagcaccgagcgccgccgggagtcgagcgccggccgcggagctcttgcgaccccgccaggacccgaacagagcccgggggcggcgggccggagccggggacgcgggcacacgcccgctcgcacaagccacggcggactctcccgaggcggaacctccacgccgagcgagggtcagtttgaaaaggaggatcgagctcactgtggagtatccatggagatgtggagccttgtcaccaacctctaactgcagaactgggatgtggagctggaagtgcctcctcttctgggctgtgctggtcacagccacactctgcaccgctaggccgtccccgaccttgcctgaacaagcccagccctggggagcccctgtggaagtggagtccttcctggtccaccccggtgacctgctgcagcttcgctgtcggctgcgggacgatgtgcagagcatcaactggctgcgggacggggtgcagctggcggaaagcaaccgcacccgcatcacaggggaggaggtggaggtgcaggactccgtgcccgcagactccggcctctatgcttgcgtaaccagcagcccctcgggcagtgacaccacctacttctccgtcaatgtttcagatgctctcccctcctcggaggatgatgatgatgatgatgactcctcttcagaggagaaagaaacagataacaccaaaccaaaccgtatgcccgtagctccatattggacatccccagaaaagatggaaaagaaattgcatgcagtgccggctgccaagacagtgaagttcaaatgcccttccagtgggaccccaaaccccacactgcgctggttgaaaaatggcaaagaattcaaacctgaccacagaattggaggctacaaggtccgttatgccacctggagcatcataatggactctgtggtgccctctgacaagggcaactacacctgcattgtggagaatgagtacggcagcatcaaccacacataccagctggatgtcgtggagcggtcccctcaccggcccatcctgcaagcagggttgcccgccaacaaaacagtggccctgggtagcaacgtggagttcatgtgtaaggtgtacagtgacccgcagccgcacatccagtggctaaagcacatcgaggtgaatgggagcaagattggcccagacaacctgccttatgtccagatcttgaagactgctggagttaataccaccgacaaagagatggaggtgcttcacttaagaaatgtctcctttgaggacgcaggggagtatacgtgcttggcgggtaactctatcggactctcccatcactctgcatggttgaccgttctggaagccctggaagagaggccggcagtgatgacctcgcccctgtacctggagatcatcatctattgcacaggggccttcctcatctcctgcatggtggggtcggtcatcgtctacaagatgaagagtggtaccaagaagagtgacttccacagccagatggctgtgcacaagctggccaagagcatccctctgcgcagacaggtaacagtgtctgctgactccagtgcatccatgaactctggggttcttctggttcggccatcacggctctcctccagtgggactcccatgctagcaggggtctctgagtatgagcttcccgaagaccctcgctgggagctgcctcgggacagactggtcttaggcaaacccctgggagagggctgctttgggcaggtggtgttggcagaggctatcgggctggacaaggacaaacccaaccgtgtgaccaaagtggctgtgaagatgttgaagtcggacgcaacagagaaagacttgtcagacctgatctcagaaatggagatgatgaagatgatcgggaagcataagaatatcatcaacctgctgggggcctgcacgcaggatggtcccttgtatgtcatcgtggagtatgcctccaagggcaacctgcgggagtacctgcaggcccggaggcccccagggctggaatactgctacaaccccagccacaacccagaggagcagctctcctccaaggacctggtgtcctgcgcctaccaggtggcccgaggcatggagtatctggcctccaagaagtgcatacaccgagacctggcagccaggaatgtcctggtgacagaggacaatgtgatgaagatagcagactttggcctcgcacgggacattcaccacatcgactactataaaaagacaaccaacggccgactgcctgtgaagtggatggcacccgaggcattatttgaccggatctacacccaccagagtgatgtgtggtctttcggggtgctcctgtgggagatcttcactctgggcggctccccataccccggtgtgcctgtggaggaacttttcaagctgctgaaggagggtcaccgcatggacaagcccagtaactgcaccaacgagctgtacatgatgatgcgggactgctggcatgcagtgccctcacagagacccaccttcaagcagctggtggaagacctggaccgcatcgtggccttgacctccaaccaggagtacctggacctgtccatgcccctggaccagtactcccccagctttcccgacacccggagctctacgtgctcctcaggggaggattccgtcttctctcatgagccgctgcccgaggagccctgcctgccccgacacccagcccagcttgccaatggcggactcaaacgccgctgactgccacccacacgccctccccagactccaccgtcagctgtaaccctcacccacagcccctgctgggcccaccacctgtccgtccctgtcccctttcctgctggcaggagccggctgcctaccaggggccttcctgtgtggcctgccttcaccccactcagctcacctctccctccacctcctctccacctgctggtgagaggtgcaaagaggcagatctttgctgccagccacttcatcccctcccagatgttggaccaacacccctccctgccaccaggcactgcctggagggcagggagtgggagccaatgaacaggcatgcaagtgagagcttcctgagctttctcctgtcggtttggtctgttttgccttcacccataagcccctcgcactctggtggcaggtgccttgtcctcagggctacagcagtagggaggtcagtgcttcgtgcctcgattgaaggtgacctctgccccagataggtggtgccagtggcttattaattccgatactagtttgctttgctgaccaaatgcctggtaccagaggatggtgaggcgaaggccaggttgggggcagtgttgtggccctggggcccagccccaaactgggggctctgtatatagctatgaagaaaacacaaagtgtataaatctgagtatatatttacatgtctttttaaaagggtcgttaccagagatttacccatcgggtaagatgctcctggtggctgggaggcatcagttgctatatattaaaaacaaaaaagaaaaaaaaggaaaatgtttttaaaaaggtcatatattttttgctacttttgctgttttatttttttaaattatgttctaaac

SEQ ID NO: 2322 - protein, 822 aa, Homo sapien [sequence omitted]

SEQ ID NO: 2323 - DNA, 2258 bp, Homo sapien
ggcgttggctgctagagcgatgccgggccggagttgcgtcgccttagtcctcctggctgccgcgtcagctgtgccgtcgcagcacgcgccgccgtggacagaggactgcagaaaatcaacctatcctccttcaggaccaacgtacagaggtgcagttccatggtacaccataaatcttgacttaccaccctacaaaagatggcatgaattgatgcttgacaaggcaccaatgctaaaggttatagtgaattctctgaagaatatgataaatacattcgtgccaagtggaaaagttatgcaggtggtggatgaaaaattgcctggcctacttggcaactttcctggcccttttgaagaggaaatgaagggtattgccgctgttactgatatacctttaggagagattatttcattcaatattttttatgaattatttaccatttgtacttcaatagtagcagaagacaaaaaaggtcatctaatacatgggagaaacatggattttggagtatttcttgggtggaacataaataatgatacctgggtcataactgagcaactaaaacctttaacagtgaatttggatttccaaagaaacaacaaaactgtcttcaaggcttcaagctttgctggctatgtgggcatgttaacaggattcaaaccaggactgttcagtcttacactgaatgaacgtttcagtataaatggtggttatctgggtattctagaatggattctgggaaagaaagatgccatgtggatagggttcctcactagaacagttctggaaaatagcacaagttatgaagaagccaagaatttattgaccaagaccaagatattggccccagcctactttatcctgggaggcaaccagtctggggaaggttgtgtgattacacgagacagaaaggaatcattggatgtatatgaactcgatgctaagcagggtagatggtatgtggtacaaacaaattatgaccgttggaaacatcccttcttccttgatgatcgcagaacgcctgcaaagatgtgtctgaaccgcaccagccaagagaatatctcatttgaaaccatgtatgatgtcctgtcaacaaaacctgtcctcaacaagctgaccgtatacacaaccttgatagatgttaccaaaggtcaattcgaaacttacctgcgggactgccctgacccttgtataggttggtgagcacacgtctggcctacagaatgcggcctctgagacatgaagacaccatctccatgtgaccgaacactgcagctgtctgaccttccaaagactaagactcgcggcaggttctctttgagtcaatagcttgtcttcgtccatctgttgacaaatgacagactttttttttttccccctatcagttgatttttcttatttatagataacttctttaggggaagtaaaacagtcatctagaattcactgagttttgtttcactttgacatttggggatctggtgggcagtcgaaccatggtgaactccacctccgtgaataaatggagattcagcgtgggtgttgaatccagcacgtctgtgtgagtaacgggacagtaaacactccacattcttcagtttttcacttctacctacatatttgtatgtttttctgtataacagccttttccttctggttctaactgctgttaaaattaatatatcattatctttgctgttattgacagcgatataattttattacatatgattagagggatgagacagacattcacctgtatatttcttttaatgggcacaaaattggtgcctttgcctctaaatagcactttttcggggtcaagaagtaatcagatgcaaagcaatcgtttatacaataattgaagcgcacctttcaataccactccagtacctaaggaagtgctactaaactgcatccacgtctgtatagtaataacagtcaagctggaatcgaggaccaattaattccaatggcacagagtagcattcatgtaataaacaggtttttagtttgttcttcagattgatagggagttttaaagaaattttagtagttactaaaattatgttactgtatttttcagaaatccaactgcttatgaaaagtactaatagaacttgttaacctttctaaccttcacgattaactgtgaaatgtacgtcatttgtgcaagaccgtttgtccacttcattttgtataatcacagttgtgttcctgacactcaataaacagtcattggaaagagaaaaaaaaa

SEQ ID NO: 2324 - protein, 394 aa, Homo sapien [sequence omitted]

SEQ ID NO: 2325 - DNA, 2848 bp, Homo sapien
cgcggcactcgcgcgcgatcccggccggcggcgcgccggcgggccaggcggcgccacagcccatggagctcgagaacatcgtagcgaacacggtgctactcaaggcccgggaaggtggcggtggaaatcgcaaaggcaaaagcaagaaatggcggcagatgctccagttccctcacatcagccagtgcgaagagctgcggctcagcctcgagcgtgactatcacagcctgtgcgagcggcacgccattgggcgcctgctgttccgagagttctgtgccacgaggccggagctgagccgctgcgtcgccttcctggatggggtggccgagtatgaagtgaccccggatgacaagcggaaggcatgtgggcggcacgtaacgcagaattttctgagccacacgggtcctgacctcatccctgaggtcccccggcagctggtgacgaactgcacccagcggctggagcagggtccctgcaaagaccttttccaggaactcacccggctgacccacgagtacctgagcgtggccccttttgccgactacctcgacagcatctacttcaaccgtttcctgcagtggaagtggctggaaaggcagccagtgaccaaaaacaccttcaggcaataccgagtcctgggcaaaggtggctttggggaggtgtgcgcctgccaggtgcgggccacaggtaagatgtatgcctgcaagaagctagagaaaaagcggatcaagaagcggaaaggggaggccatggcgctgaacgagaagcagatcctggagaaagtgaacagtaggtttgtagtgagcttggcctacgcctatgagaccaaggacgcgctgtgcctggtgctgacactgatgaacgggggcgacctcaagttccacatctaccacatgggccaggctggcttccccgaagcgcgggccgtcttctacgccgccgagatctgctgtggcctggaggacctgcaccgggagcgcatcgtgtacagggacctgaagcccgagaacatcttgctggatgaccacggccacatccgcatctctgacctgggactagctgtgcatgtgcccgagggccagaccatcaaagggcgtgtgggcaccgtgggttacatggctccggaggtggtgaagaatgaacggtacacgttcagccctgactggtgggcgctcggctgcctcctgtacgagatgatcgcaggccagtcgcccttccagcagaggaagaagaagatcaagcgggaggaggtggagcggctggtgaaggaggtccccgaggagtattccgagcgcttttccccgcaggcccgctcactttgctcacagctcctctgcaaggaccctgccgaacgcctggggtgtcgtgggggcagtgcccgcgaggtgaaggagcaccccctctttaagaagctgaacttcaagcggctgggagctggcatgctggagccgccgttcaagcctgacccccaggccatttactgcaaggatgttctggacattgaacagttctctacggtcaagggcgtggagctggagcctaccgaccaggacttctaccagaagtttgccacaggcagtgtgcccatcccctggcagaacgagatggtggagaccgagtgcttccaagagctgaatgtctttgggctggatggctcagttcccccagacctggactggaagggccagccacctgcacctcctaaaaagggactgctgcagagactcttcagtcgccaagattgctgtggaaactgcagcgacagcgaggaagagctccccacccgcctctagcccccagcccgaggcccccaccagcagttggcggtagcagctactccgagcgccgtttacagttttgcacagtgatcttccccattgtccactcaagtcgtggcctggggaacacagacggagctgtccccagtgtcctccgtccctcagcccctggcctggctgagtttggcagggcctgggccatccctgggacaaaggtgcgtcccttcagctcttctccgtggagctcggggctttctgtatttatgtatttgtacgaatgtatatagcgaccagagcattcttaattcccgccgcagacctggcgcccccgccttggctcctgggggcagccagccctggctggagagcgggacgtggcagaggagccactgccaaactcaaggctcctctggcccagcttggatggctgagggtggtcacacctgagccttcagcactgtgctgccaccccggcctctgagtaagactcgtgcctccccctgctgccctgggctcaggctgctacctctggggcccaaagctgtcccttctcagtgcttgtcagcgctgggtctggggcctctgtatgccctaggcctgtgccaaagtggccagagattgggctgcctgtgatacccatcagcccactgccccggccggcccagataggtctgcctctgccttccagctcccacagcctggtccctgatactgggctctgtcctgcagacacctctttcagaaacgcccaagcccagccctaggagggggtggggcatccctggtcaaccctcaaacattccggactcccctcataacaatagacacatgtgcccagcaataatccgccccttcctgtgtgcgcctgtggggtgcgtgctctctgtgtgtacctgtgtgggtgaaggggatagggcgaggctgtgcctgtgccccaggtcccagccctggcccttcccagactgtgatggccatcctggtcccagtgttagggtagcatgggattacagggccctgttttttccatatttaaagccaatttttattactcgttttgtccaacgtaaaag

SEQ ID NO: 2326 - protein, 576 aa, Homo sapien
MELENIVANTVLLKAREGGGGNRKGKSKKWRQMLQFPHISQCEELRLSLERDYHSLCERHAIGRLLFREFCATRPELSRCVAFLDGVAEYEVTPDDKRKACGRHVTQNFLSHTGPDLIPEVPRQLVTNCTQRLEQGPCKDLFQELTRLTHEYLSVAPFADYLDSIYFNRFLQWKWLERQPVTKNTFRQYRVLGKGGFGEVCACQVRATGKMYACKKLEKKRIKKRKGEAMALNEKQILEKVNSRFVVSLAYAYETKDALCLVLTLMNGGDLKFHIYHMGQAGFPEARAVFYAAEICCGLEDLHRERIVYRDLKPENILLDDHGHIRISDLGLAVHVPEGQTIKGRVGTVGYMAPEVVKNERYTFSPDWWALGCLLYEMIAGQSPFQQRKKKIKREEVERLVKEVPEEYSERFSPQARSLCSQLLCKDPAERLGCRGGSAREVKEHPLFKKLNFKRLGAGMLEPPFKPDPQAIYCKDVLDIEQFSTVKGVELEPTDQDFYQKFATGSVPIPWQNEMVETECFQELNVFGLDGSVPPDLDWKGQPPAPPKKGLLQRLFSRQDCCGNCSDSEEELPTRL

SEQ ID NO: 2327 - DNA, 1237 bp, Homo sapien; identical to SEQ ID NO: 1853

SEQ ID NO: 2328 - protein, 254 aa, Homo sapien; identical to SEQ ID NO: 1854

SEQ ID NO: 2329 - DNA, 2427 bp, Homo sapien
gacgtttcgcgccaatttcggttggccggccacagtccaccgcgcggagattctcagcttccccaggagcaagacctctgagcccgccaagcgcggccgcacggccctcggcagcgatggcactgaaggactacgcgctagagaaggaaaaggttaagaagttcttacaagagttctaccaggatgatgaactcgggaagaagcagttcaagtatgggaaccagttggttcggctggctcatcgggaacaggtggctctgtatgtggacctggacgacgtagccgaggatgaccccgagttggtggactcaatttgtgagaatgccaggcgctacgcgaagctctttgctgatgccgtacaagagctgctgcctcagtacaaggagagggaagtggtaaataaagatgtcctggacgtttacattgagcatcggctaatgatggagcagcggagtcgggaccctgggatggtccgaagcccccagaaccagtaccctgctgaactcatgcgcagatttgagctgtattttcaaggccctagcagcagcaagcctcgtgtgatccgggaagtgcgggctgactctgtggggaagttggtaactgtgcgtggaatcgtcactcgtgtctctgaagtcaaacccaagatggtggtggccacttacacttgtgaccagtgtggggcagagacctaccagccgatccagtctcccactttcatgcctctgatcatgtgcccaagccaggagtgccaaaccaaccgctcaggagggcggctgtatctgcagacacggggctccagattcatcaaattccaggagatgaagatgcaagaacatagtgatcaggtgcctgtgggaaatatccctcgtagtatcacggtgctggtagaaggagagaacacaaggattgcccagcctggagaccacgtcagcgtcactggtattttcttgccaatcctgcgcactgggttccgacaggtggtacagggtttactctcagaaacctacctggaagcccatcggattgtgaagatgaacaagagtgaggatgatgagtctggggctggagagctcaccagggaggagctgaggcaaattgcagaggaggatttctacgaaaagctggcagcttcaatcgccccagaaatatacgggcatgaagatgtgaagaaggcactgctgctcctgctagtcgggggtgtggaccagtctcctcgaggcatgaaaatccggggcaacatcaacatctgtctgatgggggatcctggtgtggccaagtctcagctcctgtcatacattgatcgactggcgcctcgcagccagtacacaacaggccggggctcctcaggagtggggcttacggcagctgtgctgagagactccgtgagtggagaactgaccttagagggtggggccctggtgctggctgaccagggtgtgtgctgcattgatgagttcgacaagatggctgaggccgaccgcacagccatccacgaggtcatggagcagcagaccatctccattgccaaggccggcattctcaccacactcaatgcccgctgctccatcctggctgccgccaaccctgcctacgggcgctacaaccctcgccgcagcctggagcagaacatacagctacctgctgcactgctctcccggtttgacctcctctggctgattcaggaccggcccgaccgagacaatgacctacggttggcccagcacatcacctatgtgcaccagcacagccggcagcccccctcccagtttgaacctctggacatgaagctcatgaggcgttacatagccatgtgccgcgagaagcagcccatggtgccagagtctctggctgactacatcacagcagcatacgtggagatgaggcgagaggcttgggctagtaaggatgccacctatacttctgcccggaccctgctggctatcctgcgcctttccactgctctggcacgtctgagaatggtggatgtggtggagaaagaagatgtgaatgaagccatcaggctaatggagatgtcaaaggactctcttctaggagacaaggggcagacagctaggactcagagaccagcagatgtgatatttgccaccgtccgtgaactggtctcagggggccgaagtgtccggttctctgaggcagagcagcgctgtgtatctcgtggcttcacacccgcccagttccaggcggctctggatgaatatgaggagctcaatgtctggcaggtcaatgcttcccggacacggatcacttttgtctgattccagcctgcttgcaaccctggggtcctcttgttccctgctggcctgccccttgggaaggggcagtgatgcctttgaggggaaggaggagcccctctttctcccatgctgcacttactccttttgctaataaaagtgtttgtagattgtc

SEQ ID NO: 2330 - protein, 719 aa, Homo sapien [sequence omitted]

SEQ ID NO: 2331 - DNA, 1990 bp, Homo sapien
gaattccgggggtattggcagctgaggagtggaggctgggcagctccgactccctgacgccagcgcgaccagatcaatccaggctccaggagaaagcaggcgggcgggcggagaaaggagaggccgagcggctcaacccgggccgaggctcggggagcggagagtggcgcaccgcccggccgtccggacccgggccgcgagaccccgctcgcccggccactcgtgctcccgcacggacgggcgcgccgccaacccggtgctgactgggttacttttttaaacactaggaatggtaatttctactcttctggacttcaaactaagaagttaaagagacttctctgtaaataaacaaatctcttctgctgtccttttgcatttggagacagctttatttcaccatatccaaggagtataactagtgctgtcattatgaatgtgacaagtttattttcctttacaagtccagctgtgaagagacttcttgggtggaaacagggcgatgaagaagaaaaatgggcagagaaagctgttgatgctttggtgaaaaaactgaagaaaaagaaaggtgccatggaggaactggaaaaggccttgagctgcccagggcaaccgagtaactgtgtcaccattccccgctctctggatggcaggctgcaagtctcccaccggaagggactgcctcatgtcatttactgccgtgtgtggcgctggcccgatcttcagagccaccatgaactaaaaccactggaatgctgtgagtttccttttggttccaagcagaaggaggtctgcatcaatccctaccactataagagagtagaaagccctgtacttcctcctgtgctggttccaagacacagcgaatataatcctcagcacagcctcttagctcagttccgtaacttaggacaaaatgagcctcacatgccactcaacgccacttttccagattctttccagcaacccaacagccacccgtttcctcactctcccaatagcagttacccaaactctcctgggagcagcagcagcacctaccctcactctcccaccagctcagacccaggaagccctttccagatgccagctgatacgcccccacctgcttacctgcctcctgaagaccccatgacccaggatggctctcagccgatggacacaaacatgatggcgcctcccctgccctcagaaatcaacagaggagatgttcaggcggttgcttatgaggaaccaaaacactggtgctctattgtctactatgagctcaacaatcgtgtgggtgaagcgttccatgcctcctccacaagtgtgttggtggatggtttcactgatccttccaacaataagaaccgtttctgccttgggctgctctccaatgttaaccggaattccactattgaaaacaccaggcggcatattggaaaaggagttcatctttattatgttggaggggaggtgtatgccgaatgccttagtgacagtagcatctttgtgcaaagtcggaactgcaactaccatcatggatttcatcctactactgtttgcaagatccctagtgggtgtagtctgaaaatttttaacaaccaagaatttgctcagttattggcacagtctgtgaaccatggatttgagacagtctatgagcttacaaaaatgtgtactatacgtatgagctttgtgaagggctggggagcagaataccaccgccaggatgttactagcaccccctgctggattgagatacatctgcacggccccctccagtggctggataaagttcttactcaaatgggttcacctcataatcctatttcatctgtatcttaaatggccccagcatctgcctctggaaaactattgagccttgcatgtacttgaaggatggatgagtcagacacgattgagaactgacaaaggagccttgataatacttgacctctgtgaccaactgttggattcagaaatttaaacaaaaaaaaaaaaaaaa

SEQ ID NO: 2332 - protein, 465 aa, Homo sapien
MNVTSLFSFTSPAVKRLLGWKQGDEEEKWAEKAVDALVKKLKKKKGAMEELEKALSCPGQPSNCVTIPRSLDGRLQVSHRKGLPHVIYCRVWRWPDLQSHHELKPLECCEFPFGSKQKEVCINPYHYKRVESPVLPPVLVPRHSEYNPQHSLLAQFRNLGQNEPHMPLNATFPDSFQQPNSHPFPHSPNSSYPNSPGSSSSTYPHSPTSSDPGSPFQMPADTPPPAYLPPEDPMTQDGSQPMDTNMMAPPLPSEINRGDVQAVAYEEPKHWCSIVYYELNNRVGEAFHASSTSVLVDGFTDPSNNKNRFCLGLLSNVNRNSTIENTRRHIGKGVHLYYVGGEVYAECLSDSSIFVQSRNCNYHHGFHPTTVCKIPSGCSLKIFNNQEFAQLLAQSVNHGFETVYELTKMCTIRMSFVKGWGAEYHRQDVTSTPCWIEIHLHGPLQWLDKVLTQMGSPHNPISSVS

SEQ ID NO: 2333 - DNA, 3242 bp, Homo sapien; identical to SEQ ID NO: 1235

SEQ ID NO: 2334 - protein, 918 aa, Homo sapien; identical to SEQ ID NO: 1236

SEQ ID NO: 2335 - DNA, 1460 bp, Homo sapien
accccatcttcatctggccttgactctgcccttgaggggcctaggggtgcagccagcctgctccgagctcccctgcagatggaggaggccatcctggtcccctgcgtgctggggctcctgctgctgcccatcctggccatgttgatggcactgtgtgtgcactgccacagactgccaggctcctacgacagcacatcctcagatagtttgtatccaaggggcatccagttcaaacggcctcacacggttgccccctggccacctgcctacccacctgtcacctcctacccacccctgagccagccagacctgctccccatcccaagatccccgcagccccttgggggctcccaccggacgccatcttcccggcgggattctgatggtgccaacagtgtggcgagctacgagaacgagggtgcgtctgggatccgaggtgcccaggctgggtggggagtctggggtccgtcctggactaggctgacccctgtgtcgttacccccagaaccagcctgtgaggatgcagatgaggatgaggacgactatcacaacccaggctacctggtggtgcttcctgacagcaccccggccactagcactgctgccccatcagctcctgcactcagcacccctggcatccgagacagtgccttctccatggagtccattgatgattacgtgaacgttccggagagcggggagagcgcagaagcgtctctggatggcagccgggagtatgtgaatgtgtcccaggaactgcatcctggagcggctaagactgagcctgccgccctgagttcccaggaggcagaggaagtggaggaagagggggctccagattacgagaatctgcaggagctgaactgagggcctgtggaggccgagtctgtcctggaaccaggcttgcctgggacggctgagctgggcagctggaagtggctctggggtcctcacatggcgtcctgcccttgctccagcctgacaacagcctgagaaatccccccgtaacttattatcactttggggttcggcctgtgtcccccgaacgctctgcaccttctgacgcagcctgagaatgacctgccctggccccagccctactctgtgtaatagaataaaggcctgcgtgtgtctgtgttgagcgtgcgtctgtgtgtgcctgtgtgcgagtctgagtcagagatttggagatgtctctgtgtgtttgtgtgtatctgtgggtctccatcctccatgggggctcagccaggtgctgtgacaccccccttctgaatgaagccttctgacctgggctggcactgctgggggtgaggacacattgccccatgagacagtcccagaacacggcagctgctggctgtgacaatggtttcaccatccttagaccaagggatgggacctgatgacctgggaggactcttttagttcttacctcttgtggttctcaataaaacagaacg

SEQ ID NO: 2336 - protein, 262 aa, Homo sapien
MEEAILVPCVLGLLLLPILAMLMALCVHCHRLPGSYDSTSSDSLYPRGIQFKRPHTVAPWPPAYPPVTSYPPLSQPDLLPIPRSPQPLGGSHRTPSSRRDSDGANSVASYENEGASGIRGAQAGWGVWGPSWTRLTPVSLPPEPACEDADEDEDDYHNPGYLVVLPDSTPATSTAAPSAPALSTPGIRDSAFSMESIDDYVNVPESGESAEASLDGSREYVNVSQELHPGAAKTEPAALSSQEAEEVEEEGAPDYENLQELN

SEQ ID NO: 2337 - DNA, 2391 bp, Homo sapien
tgcggccgcacctgcaggcgcagagtaggtatggaagatccctcgagatccattgtgctctaaagccgccgggggtccgtgtcctgtctcggttggccggacccgggcccgagcccgagcagtagccggcgccatgtcggtggtgggcatagacctgggcttccagagctgctacgtcgctgtggcccgcgccggcggcatcgagactatcgctaatgagtatagcgaccgctgcacgccggcttgcatttcttttggtcctaagaatcgttcaattggagcagcagctaaaagccaggtaatttctaatgcaaagaacacagtccaaggatttaaaagattccatggccgagcattctctgatccatttgtggaggcagaaaaatctaaccttgcatatgatattgtgcagtggcctacaggattaacaggtataaaggtgacatatatggaggaagagcgaaattttaccactgagcaagtgactgccatgcttttgtccaaactgaaggagacagccgaaagtgttcttaagaagcctgtagttgactgtgttgtttcggttccttgtttctatactgatgcagaaagacgatcagtgatggatgcaacacagattgctggtcttaattgcttgcgattaatgaatgaaaccactgcagttgctcttgcatatggaatctataagcaggatcttcctcgcttagaagagaaaccaagaaatgtagtttttgtagacatgggccactctgcttatcaagtttctgtatgtgcatttaatagaggaaaactgaaagttctggccactgcatttgacacgacattgggaggtagaaaatttgatgaagtgttagtaaatcacttctgtgaagaatttgggaagaaatacaagctagacattaagtccaaaatccgtgcattattacgactctctcaggagtgtgagaaactcaagaaattgatgagtgcaaatgcttcagatctccctttgagcattgaatgttttatgaatgatgttgatgtatctggaactatgaatagaggcaaatttctggagatgtgcaatgatctcttagctagagtggagccaccacttcgtagtgttttggaacaaaccaagttaaagaaagaagatatttatgcagtggagatagttggtggtgctacacgaatccctgcggtaaaagagaagatcagcaaatttttcggtaaagaacttagtacaacattaaatgctgatgaagctgtcactcgaggctgtgcattgcagtgtgccatcttatcgcctgctttcaaagtcagagaattttctatcactgatgtagtaccatatccaatatctctgagatggaattctccagctgaagaagggtcaagtgactgtgaagtcttttccaaaaatcatgctgctcctttctctaaagttcttacattttatagaaaggaacctttcactcttgaggcctactacagctctcctcaggatttgccctatccagatcctgctatagctcagttttcagttcagaaagtcactcctcagtctgatggctccagttcaaaagtgaaagtcaaagttcgagtaaatgtccatggcattttcagtgtgtccagtgcatctttagtggaggttcacaagtctgaggaaaatgaggagccaatggaaacagatcagaatgcaaaggaggaagagaagatgcaagtggaccaggaggaaccacatgttgaagagcaacagcagcagacaccagcagaaaataaggcagagtctgaagaaatggagacctctcaagctggatccaaggataaaaagatggaccaaccaccccaatgccaagaaggcaaaagtgaagaccagtactgtggacctgccaatcgagaatcagctatatggcagatagacagagagatgctcaacttgtacattgaaaatgagggtaagatgatcatgcaggataaactggagaaggagcggaatgatgctaagaacgcagtggaggaatatgtgtatgaaatgagagacaagcttagtggtgaatatgagaagtttgtgagtgaagatgatcgtaacagttttactttgaaactggaagatactgaaaattggttgtatgaggatggagaagaccagccaaagcaagtttatgttgataagttggctgaattaaaaaatctaggtcaacctattaagatacgtttccaggaatctgaagaacgaccaaattatttgaagaactagagaacttagggaaacagatccaacagtatatgaaaataatcagctcctttcaaaaacaaggaggaccaggtatgatcatttggatgctgctgacatgacaaaggtagaaaaaagcacaaatgaagcaatggagtggatggaagtcacaccaa

SEQ ID NO: 2338 - protein, 701 aa, Homo sapien [sequence omitted]

SEQ ID NO: 2339 - DNA, 715 bp, Homo sapien
ggcacgaggggccactgagccggagccggcctgagcagcgctctcggttgcagtacccactggaaggacttaggcgctcgcgtggacaccgcaagcccctcagtagcctcggcccaagaggcctgctttccactcgctagccccgccgggggtccgtgtcctgtctcggtggccggacccgggcccgagcccgagcagtagccggcgccatgtcggtggtgggcatagacctgggcttccagagctgctacgtcgctgtggcccgcgccggcggcatcgagactatcgctaatgagtatagcgaccgctgcacgccggcttgcatttcttttggtcctaagaatcgttcaattggagcagcagctaaaagccaggtaatttctaatgcaaagaacacagtccaaggatttaaaagattccatggccgagcattctctgatccatttgtggaggcagaaaaatctaaccttgcatatgatattgtgcagttgcctacaggattaacaggtataaaggtgacatatatggaggaagagcagaatggaccagtggatggacaaggagacaacccaggcccccaggctgctgagcagggtacagacacagctgtgccttcggattcagacaagaagcttcctgaaatggacattgattgattccaacacttgtttctattaaaacagactattataaaaaaaaaaaaaaaaaaaaaaaa

SEQ ID NO: 2340 - protein, 148 aa, Homo sapien
MSVVGIDLGFQSCYVAVARAGGIETIANEYSDRCTPACISFGPKNRSIGAAAKSQVISNAKNTVQGFKRFHGRAFSDPFVEAEKSNLAYDIVQLPTGLTGIKVTYMEEEQNGPVDGQGDNPGPQAAEQGTDTAVPSDSDKKLPEMDID

SEQ ID NO: 2341 - DNA, 10330 bp, Homo sapien
ctcggcccaacaaaatggcggcggcagcggtgtcgctttgtttccgcggctcctgcggcggtggcagtggtagcggcctttgagctgtggggaggttccagcagcagctacagtgacgactaagactccagtgcatttctatcgtaaccgggcgcgggggagcgcagatcggcgcccagcaatcacagaagccgacaaggcgttcaagcgaaaacatgaccgctgagcccatgagtgaaagcaagttgaatacattggtgcagaagcttcatgacttccttgcacactcatcagaagaatctgaagaaacaagttctcctccacgacttgcaatgaatcaaaacacagataaaatcagtggttctggaagtaactctgatatgatggaaaacagcaaggaagagggaactagctcttcagaaaaatccaagtcttcaggatcgtcacgatcaaagaggaaaccttcaattgtaacaaagtatgtagaatcagatgatgaaaaacctttggatgatgaaactgtaaatgaagatgcgtctaatgaaaattcagaaaatgatattactatgcagagcttgccaaaaggtacagtgattgtacagccagagccagtgctgaatgaagacaaagatgattttaaagggcctgaatttagaagcagaagtaaaatgaaaactgaaaatctcaaaaaacgcggagaagatgggcttcatgggattgtgagctgcactgcttgtggacaacaggtcaatcattttcaaaaagattccatttatagacacccttcattgcaagttcttatttgtaagaattgctttaagtattacatgagtgatgatattagccgtgactcagatggaatggatgaacaatgtaggtggtgtgcggaaggtggaaacttgatttgttgtgacttttgccataatgctttctgcaagaaatgcattctacgcaaccttggtcgaaaggagttgtccacaataatggatgaaaacaaccaatggtattgctacatttgtcacccagagcctttgttggacttggtcactgcatgtaacagcgtatttgagaatttagaacagttgttgcagcaaaataagaagaagataaaagttgacagtgaaaagagtaataaagtatatgaacatacatccagattttctccaaagaagactagttcaaattgtaatggagaagaaaagaaattagatgattcctgttctggctctgtaacctactcttattccgcactaattgtgcccaaagagatgattaagaaggcaaaaaaactgattgagaccacagccaacatgaactccagttatgttaaatttttaaagcaggcaacagataattcagaaatcagttctgctacaaaattacgtcagcttaaggcttttaagtctgtgttggctgatattaagaaggctcatcttgcattggaagaagacttaaattccgagtttcgagcgatggatgctgtaaacaaagagaaaaataccaaagagcataaagtcatagatgctaagtttgaaacaaaagcacgaaaaggagaaaaaccttgtgctttggaaaagaaggatatttcaaagtcagaagctaaactttcaagaaaacaggtagatagtgagcacatgcatcagaatgttccaacagaggaacaaagaacaaataaaagtaccggtggtgaacataagaaatctgatagaaaagaagaacctcaatatgaacctgccaacacttctgaagatttagacatggatattgtgtctgttccttcctcagttccagaagacatttttgagaatcttgagactgctatggaagttcagagttcagttgatcatcaaggggatggcagcagtggaactgaacaagaagtggagagttcatctgtaaaattaaatatttcttcaaaagacaacagaggaggtattaaatcaaaaactacagctaaagtaacaaaagaattatatgttaaactcactcctgtttccctttctaattccccaattaaaggtgctgattgtcaggaagttccacaagataaagatggctataaaagttgtggtctgaaccccaagttagagaaatgtggacttggacaggaaaacagtgataatgagcatttggttgaaaatgaagtttcattacttttagaggaatctgatcttcgaagatccccacgtgtaaagactacacccttgaggcgaccgacagaaactaaccctgtaacatctaattcagatgaagaatgtaatgaaacagttaaggagaaacaaaaactatcagttccagtgagaaaaaaggataagcgtaattcttctgacagtgctatagataatcctaagcctaataaattgccaaaatctaagcaatcagagactgtggatcaaaattcagattctgatgaaatgctagcaatcctcaaagaggtgagcaggatgagtcacagttcttcttcagatactgatattaatgaaattcatacaaaccataagactttgtatgatttaaagactcaggcggggaaagatgataaaggaaaaaggaaacgaaaaagttctacatctggctcagattttgatactaaaaagggcaaatcagctaagagctctataatttctaaaaagaaacgacaaacccagtctgagtcttctaattatgactcagaattagaaaaagagataaagagcatgagtaaaattggtgctgccagaaccaccaaaaaaagaattccaaatacaaaagattttgactcttctgaagatgagaaacacagcaaaaaaggaatggataatcaagggcacaaaaatttgaagacctcacaagaaggatcatctgatgatgctgaaagaaaacaagagagagagactttctcttcagcagaaggcacagttgataaagacacgaccatcatggaattaagagatcgacttcctaagaagcagcaagcaagtgcttccactgatggtgtcgataagctttctgggaaagagcagagttttacttctttggaagttagaaaagttgctgaaactaaagaaaagagcaagcatctcaaaaccaaaacatgtaaaaaagtacaggatggcttatctgatattgcagagaaattcctaaagaaagaccagagcgatgaaacttctgaagatgataaaaagcagagcaaaaagggaactgaagaaaaaaagaaaccttcagactttaagaaaaaagtaattaaaatggaacaacagtatgaatcttcatctgatggcactgaaaagttacctgagcgagaagaaatttgtcattttcctaagggcataaaacaaattaagaatggaacaactgatggagaaaagaaaagtaaaaaaataagagataaaacttctaaaaagaaggatgaattatctgattatgctgagaagtcaacagggaaaggagatagttgtgactcttcagaggataaaaagagtaagaatggagcatatggtagagagaagaaaaggtgcaagttgcttggaaagagttcaaggaagagacaagattgttcatcatctgatactgagaaatattccatgaaagaagatggttgtaactcttctgataagagactgaaaagaatagaattgagggaaagaagaaatttaagttcaaagagaaatactaaggaaatacaaagtggctcatcatcatctgatgctgaggaaagttctgaagataataaaaagaagaagcaaagaacttcatctaaaaagaaggcagtcattgtcaaggagaaaaagagaaactccctaagaacaagcactaaaaggaagcaagctgacattacatcctcatcttcttctgatatagaagatgatgatcagaattctataggtgagggaagcagcgatgaacagaaaattaagcctgtgactgaaaatttagtgctgtcttcacatactggattttgccaatcttcaggagatgaagccttatctaaatcagtgcctgtcacagtggatgatgatgatgacgacaatgatcctgagaatagaattgccaagaagatgcttttagaagaaattaaagccaatctttcctctgatgaggatggatcttcagatgatgagccagaagaagggaaaaaaagaactggaaaacaaaatgaagaaaacccaggagatgaggaagcaaaaaatcaagtcaattctgaatcagattcagattctgaagaatctaagaagccaagatacagacataggcttttgcggcacaaattgactgtgagtgacggagaatctggagaagaaaaaaagacaaagcctaaagagcataaagaagtcaaaggcagaaacagaagaaaggtgagcagtgaagattcagaagattctgattttcaggaatcaggagttagtgaagaagttagtgaatccgaagatgaacagcggcccagaacaaggtctgcaaagaaagcagagttggaagaaaatcagcggagctataaacagaaaaagaaaaggcgacgtattaaggttcaagaagattcatccagtgaaaacaagagtaattctgaggaagaagaggaggaaaaagaagaggaggaggaagaggaggaggaggaggaagaggaggaggaagatgaaaatgatgattccaagtctcctggaaaaggcagaaagaaaattcggaagattcttaaagatgataaactgagaacagaaacacaaaatgctcttaaggaagaggaagagagacgaaaacgtattgctgagagggagcgtgagcgagaaaaattgagagaggtgatagaaattgaagatgcttcacccaccaagtgtccaataacaaccaagttggttttagatgaagatgaagaaaccaaagaacctttagtgcaggttcatagaaatatggttatcaaattgaaaccccatcaagtagatggtgttcagtttatgtgggattgctgctgtgagtctgtgaaaaaaacaaagaaatctccaggttcaggatgcattcttgcccactgtatgggccttggtaagactttacaggtggtaagttttcttcatacagttcttttgtgtgacaaactggatttcagcacggcgttagtggtttgtcctcttaatactgctttgaattggatgaatgaatttgagaagtggcaagagggattaaaagatgatgagaagcttgaggtttctgaattagcaactgtgaaacgtcctcaggagagaagctacatgctgcagaggtggcaagaagatggtggtgttatgatcataggctatgagatgtatagaaatcttgctcaaggaaggaatgtgaagagtcggaaacttaaagaaatatttaacaaagctttggttgatccaggccctgattttgttgtttgtgatgaaggccatattctaaaaaatgaagcatctgctgtttctaaagctatgaattctatacgatcaaggaggaggattattttaacaggaacaccacttcaaaataacctaattgagtatcattgtatggttaattttatcaaggaaaatttacttggatccattaaggagttcaggaatagatttataaatccaattcaaaatggtcagtgtgcagattctaccatggtagatgtcagagtgatgaaaaaacgtgctcacattctctatgagatgttagctggatgtgttcagaggaaagattatacagcattaacaaaattcttgcctccaaaacacgaatatgtgttagctgtgagaatgacttctattcagtgcaagctctatcagtactacttagatcacttaacaggtgtgggcaataatagtgaaggtggaagaggaaaggcaggtgcaaagcttttccaagattttcagatgttaagtagaatatggactcatccttggtgtttgcagctagactacattagcaaagaaaataagggttattttgatgaagacagtatggatgaatttatagcctcagattctgatgaaacctccatgagtttaagctccgatgattatacaaaaaagaagaaaaaagggaaaaaggggaaaaaagatagtagctcaagtggaagtggcagtgacaatgatgttgaagtgattaaggtctggaattcaagatctcggggaggtggtgaaggaaatgtggatgaaacaggaaacaatccttctgtttctttaaaactggaagaaagtaaagctacttcttcttctaatccaagcagcccagctccagactggtacaaagattttgttacagatgctgatgctgaggttttagagcattctgggaaaatggtacttctctttgaaattcttcgaatggcagaggaaattggggataaagtccttgttttcagccagtccctcatatctctggacttgattgaagattttcttgaattagctagtagggagaagacagaagataaagataaaccccttatttataaaggtgaggggaagtggcttcgaaacattgactattaccgtttagatggttccactactgcacagtcaaggaagaagtgggctgaagaatttaatgatgaaactaatgtgagaggacgattatttatcatttctactaaagcaggatctctaggaattaatctggtagctgctaatcgagtaattatattcgacgcttcttggaatccatcttatgacatccagagtatattcagagtttatcgctttggacaaactaagcctgtttatgtatataggttcttagctcagggaaccatggaagataagatttatgatcggcaagtaactaagcagtcactgtcttttcgagttgttgatcagcagcaggtggagcgtcattttactatgaatgagcttactgaactttatacttttgagccagacttattagatgaccctaattcagaaaagaagaagaagagggatactcccatgctgccaaaggataccatacttgcagagctccttcagatacataaagaacacattgtaggataccatgaacatgattctcttttggaccacaaagaagaagaagagttgactgaagaagaaagaaaagcagcttgggctgagtatgaagcagagaagaagggactgaccatgcgtttcaacataccaactgggaccaatttaccccctgtcagtttcaactctcaaactccttatattcctttcaatttgggagccctgtcagcaatgagtaatcaacagctggaggacctcattaatcaaggaagagaaaaagttgtagaagcaacaaacagtgtgacagcagtgaggattcaacctcttgaggatataatttcagctgtatggaaggagaacatgaatctctcagaggcccaagtacaggcgttagcattaagtagacaagccagccaggagcttgatgttaaacgaagagaagcaatctacaatgatgtattgacaaaacaacagatgttaatcagctgtgttcagcgaatacttatgaacagaaggctccagcagcagtacaatcagcagcaacagcaacaaatgacttatcaacaagcaacactgggtcacctcatgatgccaaagcccccaaatttgatcatgaatccttctaactaccagcagattgatatgagaggaatgtatcagccagtggctggtggtatgcagccaccaccattacagcgtgcaccacccccaatgagaagcaaaaatccaggaccttcccaagggaaatcaatgtgattttgcactaaaagcttaatggattgttaaaatcatagaaagatcttttatttctttaggaatcaatgacttaacagaactcaactgtataaatagtttggtccccttaaatgccaatcttccatattagttttacttttttttttttttaaatagggcataccatttcttcctgacatttgtcagtgatgttgcctagaatcttcttacacacgctgagtacagaagatatttcaaattgttttcagtgaaaacaagtccttccataatagtaacaactccacagatttcctctctaaatttttatgcctgcttttagcaaccataaaattgtcataaaattaataaatttaggaaagaataaagatttatatattcattctttacatataaaaacacacagctgagttcttagagttgattcctcaagttatgaaatacttttgtacttaatccatttcttgattaaagtgattgaaatggttttaatgttcttttgactgaagtctgaaactgggctcctgctttattgtctctgtgactgaaagttagaaactgagggttatctttgacacagaattgtgtgcaatattcttaaatactactgctctaaaagttggagaagtcttgcagttatcttagcattgtataaacagccttaagtatagcctaagaagagaattcctttttcttctttagtccttctgccattttttattttcagttatatgtgctgaaataattactggtaaaatttcagggttgtggattatcttccacacatgaattttctctctcctggcacgaatataaagcacatctcttaactgcatggtgccagtgctaatgcttcatcctgttgctggcagtgggatgtggacttagaaaatcaagttctagcattttagtaggttaacactgaagttgtggttgttaggttcacaccctgttttataaacaacatcaaaatggcagaaccattgctgactttaggttcacatgaggaatgtacttttaacaattcccagtactatcagtattgtgaaataattcctctgaaagataagaatcactggcttctatgcgcttcttttctctcatcatcatgttcttttaccccagtttccttacatttttttaaattgtttcagagtttgttttttttttagtttagattgtgaggcaattattaaatcaaaattaattcatccaatacccctttactagaagttttactagaaaatgtattacattttattttttcttaatccagttctgcaaaaatgacctataaatttattcatgtacaattttggttacttgaattgttaaagaaaacattgtttttgactatgggagtcaactcaacatggcagaaccatttttgagatgatgatacaacaggtagtgaaacagcttaagaattccaaaaaaaaaaaaaaaaaaaaaaaaaaagaaaactgggtttgggctttgctttaggtatcactggattagaatgagtttaacattagctaaaactgctttgagttgtttggatgattaagagattgccatttttatcttggaagaactagtggtaaaacatccaagagcactaggattgtgatacagaatttgtgaggtttggtggatccacgcccctctcccccactttcccatgatgaaatatcactaataaatcctgtatatttagatattatgctagccatgtaatcagatttatttaattgggtggggcaggtgtgtatttactttagaaaaaatgaaaaagacaagatttatgagaaatatttgaaggcagtacactctggccaactgttaccagttggtatttctacaagttcagaatattttaaacctgatttactagacctgggaattttcaacatggtctaattatttactcaaagacatagatgtgaaatttaggcaaccttctaaatcttttcaccatggatgaaactataacttaaagataatacttagaagggttaattggaaatcagagtttgaaataaaacttggaccactttgtatacactcttctcacttgacattttagctatataatatgtactttgagtataacatcaagctttaacaaatatttaaagacaaaaaaatcacgtcagtaaaatactaaaaggctcatttttatatttgttttagatgttttaaatagttgcaatggattaaaaatgatgatttaaaatgttgcttgtaatacagttttgcctgctaaattctccacattttgtaacctgttttatttctttgggtgtaaagcgtttttgcttagtattgtgatattgtatatgttttgtcccagttgtatagtaatgtttcagtccatcatccagctttggctgctgaaatcatacagctgtgaagacttgcctttgtttctgttagactgcttttcagttctgtattgagtatcttaagtactgtagaaaagatgtcacttcttcctttaaggctgttttgtaatatatataaggactggaattgtgtttttaaagaaaagcattcaagtatgacaatatactatctgtgttttcaccattcaaagtgctgtttagtagttgaaacttaaactatttaatgtcatttaataaagtgaccaaaatgtg

SEQ ID NO: 2342 - protein, 2000 aa, Homo sapien
MTAEPMSESKLNTLVQKLHDFLAHSSEESEETSSPPRLAMNQNTDKISGSGSNSDMMENSKEEGTSSSEKSKSSGSSRSKRKPSIVTKYVESDDEKPLDDETVNEDASNENSENDITMQSLPKGTVIVQPEPVLNEDKDDFKGPEFRSRSKMKTENLKKRGEDGLHGIVSCTACGQQVNHFQKDSIYRHPSLQVLICKNCFKYYMSDDISRDSDGMDEQCRWCAEGGNLICCDFCHNAFCKKCILRNLGRKELSTIMDENNQWYCYICHPEPLLDLVTACNSVFENLEQLLQQNKKKIKVDSEKSNKVYEHTSRFSPKKTSSNCNGEEKKLDDSCSGSVTYSYSALIVPKEMIKKAKKLIETTANMNSSYVKFLKQATDNSEISSATKLRQLKAFKSVLADIKKAHLALEEDLNSEFRAMDAVNKEKNTKEHKVIDAKFETKARKGEKPCALEKKDISKSEAKLSRKQVDSEHMHQNVPTEEQRTNKSTGGEHKKSDRKEEPQYEPANTSEDLDMDIVSVPSSVPEDIFENLETAMEVQSSVDHQGDGSSGTEQEVESSSVKLNISSKDNRGGIKSKTTAKVTKELYVKLTPVSLSNSPIKGADCQEVPQDKDGYKSCGLNPKLEKCGLGQENSDNEHLVENEVSLLLEESDLRRSPRVKTTPLRRPTETNPVTSNSDEECNETVKEKQKLSVPVRKKDKRNSSDSAIDNPKPNKLPKSKQSETVDQNSDSDEMLAILKEVSRMSHSSSSDTDINEIHTNHKTLYDLKTQAGKDDKGKRKRKSSTSGSDFDTKKGKSAKSSIISKKKRQTQSESSNYDSELEKEIKSMSKIGAARTTKKRIPNTKDFDSSEDEKHSKKGMDNQGHKNLKTSQEGSSDDAERKQERETFSSAEGTVDKDTTIMELRDRLPKKQQASASTDGVDKLSGKEQSFTSLEVRKVAETKEKSKHLKTKTCKKVQDGLSDIAEKFLKKDQSDETSEDDKKQSKKGTEEKKKPSDFKKKVIKMEQQYESSSDGTEKLPEREEICHFPKGIKQIKNGTTDGEKKSKKIRDKTSKKKDELSDYAEKSTGKGDSCDSSEDKKSKNGAYGREKKRCKLLGKSSRKRQDCSSSDTEKYSMKEDGCNSSDKRLKRIELRERRNLSSKRNTKEIQSGSSSSDAEESSEDNKKKKQRTSSKKKAVIVKEKKRNSLRTSTKRKQADITSSSSSDIEDDDQNSIGEGSSDEQKIKPVTENLVLSSHTGFCQSSGDEALSKSVPVTVDDDDDDNDPENRIAKKMLLEEIKANLSSDEDGSSDDEPEEGKKRTGKQNEENPGDEEAKNQVNSESDSDSEESKKPRYRHRLLRHKLTVSDGESGEEKKTKPKEHKEVKGRNRRKVSSEDSEDSDFQESGVSEEVSESEDEQRPRTRSAKKAELEENQRSYKQKKKRRRIKVQEDSSSENKSNSEEEEEEKEEEEEEEEEEEEEEEDENDDSKSPGKGRKKIRKILKDDKLRTETQNALKEEEERRKRIAEREREREKLREVIEIEDASPTKCPITTKLVLDEDEETKEPLVQVHRNMVIKLKPHQVDGVQFMWDCCCESVKKTKKSPGSGCILAHCMGLGKTLQVVSFLHTVLLCDKLDFSTALVVCPLNTALNWMNEFEKWQEGLKDDEKLEVSELATVKRPQERSYMLQRWQEDGGVMIIGYEMYRNLAQGRNVKSRKLKEIFNKALVDPGPDFVVCDEGHILKNEASAVSKAMNSIRSRRRIILTGTPLQNNLIEYHCMVNFIKENLLGSIKEFRNRFINPIQNGQCADSTMVDVRVMKKRAHILYEMLAGCVQRKDYTALTKFLPPKHEYVLAVRMTSIQCKLYQYYLDHLTGVGNNSEGGRGKAGAKLFQDFQMLSRIWTHPWCLQLDYISKENKGYFDEDSMDEFIASDSDETSMSLSSDDYTKKKKKGKKGKKDSSSSGSGSDNDVEVIKVWNSRSRGGGEGNVDETGNNPSVSLKLEESKATSSSNPSSPAPD

SEQ ID NO: 2343 - DNA, 1596 bp, Homo sapien
tgtcggggacggtaaccgggacccgtgctctgctcctgtcgccttcgcctcctgaatccctagccatatgcgtgagtgcatctccatccacgttggccaggctggtgtccagattggcaatgcctgctgggagctctactgcctggaacacggcatccagcccgatggccagatgccaagtgacaagaccattgggggaggagatgactccttcaacaccttcttcagtgagacgggcgctggcaagcacgtgccccgggctgtgtttgtagacttggaacccacagtcattgatgaagttcgcactggcacctaccgccagctcttccaccctgagcagctcatcacaggcaaggaagatgctgccaataactatgcccgagggcactacaccattggcaaggagatcattgaccttgtgttggaccgaattcgcaagctggctgaccagtgcacccgtcttcagggcttcttggttttccacagctttggtgggggaactggttctgggttcacctccctgctcatggaacgcctgtcagttgattatggcaagaaatccaagctggagttctccatttacccggcaccccaggtttccacagctgtagttgagccctacaactccatcctcaccacccacaccaccctggagcactctgattgtgccttcatggtagacaatgaggccatctatgacatctgtcgtagaaacctcgatatcgagcgcccaacctacactaaccttaaccgccttattagccagattgtgtcctccatcactgcttccctgagatttgatggagccctgaatgttgacctgacagaattccagaccaacctggtcccctacccccgcatccacttccctctggccacatatgcccctgtcatctctgctgagaaagcctaccatgaacagctttctgtagcagacatcaccaatgcttgctttgagccagccaaccagatggtgaaatgtgaccctggccatggtaaatacatggcttgctgcctgttgtaccgtggtgacgtggttcccaaagatgtcaatgctgccattgccaccatcaaaaccaagcgcacgatccagtttgtggattggtgccccactggcttcaaggttggcatcaactaccagcctcccactgtggtgcctggtggagacctggccaaggtacagagagctgtgtgcatgctgagcaacaccacagccattgctgaggcctgggctcgcctggaccacaagtttgacctgatgtatgccaagcgtgcctttgttcactggtacgtgggtgaggggatggaggaaggcgagttttcagaggcccgtgaagatatggctgcccttgagaaggattatgaggaggttggtgtggattctgttgaaggagagggtgaggaagaaggagaggaatactaattatccattccttttggccctgcagcatgtcatgctcccagaatttcagcttcagcttaactgacagatgttaaagctttctggttagattgttttcacttggtgatcatgtcttttccatgtgtacctgtaatatttttccatcatatctcaaagtaaagtcattaacatca

SEQ ID NO: 2344 - protein, 451 aa, Homo sapien
MRECISIHVGQAGVQIGNACWELYCLEHGIQPDGQMPSDKTIGGGDDSFNTFFSETGAGKHVPRAVFVDLEPTVIDEVRTGTYRQLFHPEQLITGKEDAANNYARGHYTIGKEIIDLVLDRIRKLADQCTRLQGFLVFHSFGGGTGSGFTSLLMERLSVDYGKKSKLEFSIYPAPQVSTAVVEPYNSILTTHTTLEHSDCAFMVDNEAIYDICRRNLDIERPTYTNLNRLISQIVSSITASLRFDGALNVDLTEFQTNLVPYPRIHFPLATYAPVISAEKAYHEQLSVADITNACFEPANQMVKCDPGHGKYMACCLLYRGDVVPKDVNAAIATIKTKRTIQFVDWCPTGFKVGINYQPPTVVPGGDLAKVQRAVCMLSNTTAIAEAWARLDHKFDLMYAKRAFVHWYVGEGMEEGEFSEAREDMAALEKDYEEVGVDSVEGEGEEEGEEY

SEQ ID NO: 2345 - DNA, 1947 bp, Homo sapien; identical to SEQ ID NO: 1191

SEQ ID NO: 2346 - protein, 377 aa, Homo sapien; identical to SEQ ID NO: 1192

SEQ ID NO: 2347 - DNA, 1311 bp, Homo sapien; identical to SEQ ID NO: 241

SEQ ID NO: 2348 - protein, 403 aa, Homo sapien; identical to SEQ ID NO: 242

SEQ ID NO: 2349 - DNA, 4064 bp, Homo sapien
ccctctgaccaggactgaggggctttttctctctgtgccccaggcaagttgcactcattatggaattccggcggcccgctaggcaagttgcactcatggcacctccaagtgaagagacgcccctgatccctcagcgttcatgcagcctcttgtccacggaggctggtgccctgcatgtgctgctgcccgctcgggccccggggcccccccagcgcctatctttctcctttggggaccacttggctgaggacctgtgcgtgcaggctgccaaggccagcggcatcctgcctgtgtaccactccctctttgctctggccacggaggacctgtcctgctggttccccccgagccacatcttctccgtggaggatgccagcacccaagtcctgctgtacaggattcgcttttacttccccaattggtttgggctggagaagtgccaccgcttcgggctacgcaaggatttggccagtgctatccttgacctgccagtcctggagcacctctttgcccagcaccgcagtgacctggtgagtgggcgcctccccgtgggcctcagtctcaaggagcagggtgagtgtctcagcctggccgtgttggacctggcccggatggcgcgagagcaggcccagcggccgggagagctgctgaagactgtcagctacaaggcctgcctacccccaagcctgcgcgacctgatccagggcctgagcttcgtgacgcggagggctattcggaggacggtgcgcagagccctgccgcgcgtggccgcctgccaggcagaccggcactcgctcatggccaagtacatcatggacctggagcggctggatccagccggggccgccgagaccttccacgtgggcctccctggggcccttggtggccacgacgggctggggctgctccgcgtggctggtgacggcggcatcgcctggacccagggagaacaggaggtcctccagcccttctgcgactttccagaaatcgtagacattagcatcaagcaggccccgcgcgttggcccggccggagagcaccgcctggtcactgttaccaggacagacaaccagattttagaggccgagttcccagggctgcccgaggctctgtcgttcgtggcgctcgtggacggctacttccggctgaccacggactcccagcacttcttctgcaaggaggtggcaccgccgaggctgctggaggaagtggccgagcagtgccacggccccatcactctggactttgccatcaacaagctcaagactgggggctcacgtcctggctcctatgttctccgccgcagcccccaggactttgacagcttcctcctcactgtctgtgtccagaacccccttggtcctgattataagggctgcctcatccggcgcagccccacaggaaccttccttctggttggcctcagccgaccccacagcagtcttcgagagctcctggcaacctgctgggatggggggctgcacgtagatggggtggcagtgaccctcacttcctgctgtatccccagacccaaagaaaagtccaacctgatcgtggtccagagaggtcacagcccacccacatcatccttggttcagccccaatcccaataccagctgagtcagatgacatttcacaagatccctgctgacagcctggagtggcatgagaacctgggccatgggtccttcaccaagatttaccggggctgtcgccatgaggtggtggatggggaggcccgaaagacagaggtgctgctgaaggtcatggatgccaagcacaagaactgcatggagtcattcctggaagcagcgagcttgatgagccaagtgtcgtaccggcatctcgtgctgctccacggcgtgtgcatggctggagacagcaccatggtgcaggaatttgtacacctgggggccatagacatgtatctgcgaaaacgtggccacctggtgccagccagctggaagctgcaggtggtcaaacagctggcctacgccctcaactatctggaggacaaaggcctgccccatggcaatgtctctgcccggaaggtgctcctggctcgggagggggctgatgggagcccgcccttcatcaagctgagtgaccctggggtcagccccgctgtgttaagcctggagatgctcaccgacaggatcccctgggtggcccccgagtgtctccgggaggcgcagacacttagcttggaagctgacaagtggggcttcggcgccacggtctgggaagtgtttagtggcgtcaccatgcccatcagtgccctggatcctgctaagaaactccaattttatgaggaccggcagcagctgccggcccccaagtggacagagctggccctgctgattcaacagtgcatggcctatgagccggtccagaggccctccttccgagccgtcattcgtgacctcaatagcctcatctcttcagactatgagctcctctcagaccccacacctggtgccctggcacctcgtgatgggctgtggaatggtgcccagctctatgcctgccaagaccccacgatcttcgaggagagacacctcaagtacatctcacagctgggcaagggcaactttggcagcgtggagctgtgccgctatgacccgctagcccacaatacaggtgccctggtggccgtgaaacagctgcagcacagcgggccagaccagcagagggactttcagcgggagattcagatcctcaaagcactgcacagtgatttcattgtcaagtatcgtggtgtcagctatggcccgggccggccagagctgcggctggtcatggagtacctgcccagcggctgcttgcgcgacttcctgcagcggcaccgcgcgcgcctcgatgccagccgcctccttctctattcctcgcagatctgcaagggcatggagtacctgggctcccgccgctgcgtgcaccgcgacctggccgcccgaaacatcctcgtggagagcgaggcacacgtcaagatcgctgacttcggcctagctaagctgctgccgcttgacaaagactactacgtggtccgcgagccaggccagagccccattttctggtatgcccccgaatccctctcggacaacatcttctctcgccagtcagacgtctggagcttcggggtcgtcctgtacgagctcttcacctactgcgacaaaagctgcagcccctcggccgagttcctgcggatgatgggatgtgagcgggatgtccccgccctctgccgcctcttggaactgctggaggagggccagaggctgccggcgcctcctgcctgccctgctgaggttcacgagctcatgaagctgtgctgggcccctagcccacaggaccggccatcattcagcgccctgggcccccagctggacatgctgtggagcggaagccgggggtgtgagactcatgccttcactgctcacccagagggcaaacaccactccctgtccttttcatagctcctgcccgcagacctctggattaggtctctgttgactggctgtgtgaccttaggcccggagctgcccctctctgggcctcagaggccttatgagggtcctctacttcaggaacacccccatgacattgcatttgggggggctcccgtggcctgtagaatagcctgtggcctttgcaatttgttaaggttcaagacagatgggcatatgtgtcagtggggctctctgagtcctggcccaaagaagcaaggaaccaaatttaagactctcgcatcttcccaaccccttaagccctggccccctgagtttccttttctcgtctctctctttttattttttttatttttatttttatttttgagacagagcctcgctcgttacccagggtggagtgcagtggtagcgatctcggctcacagtgcaacctctgcttcccaggttcaagcgattctcctgcctcagcctcccgagtagctgggattacaggtgtgcaccaccacacccggctaattttttttatttttaatagagatgaggtttcaccatgatggccaggctgatctcgaactcctaacctcaagtgatcctcccacc

SEQ ID NO: 2350 - protein, 1124 aa, Homo sapien
MAPPSEETPLIPQRSCSLLSTEAGALHVLLPARAPGPPQRLSFSFGDHLAEDLCVQAAKASGILPVYHSLFALATEDLSCWFPPSHIFSVEDASTQVLLYRIRFYFPNWFGLEKCHRFGLRKDLASAILDLPVLEHLFAQHRSDLVSGRLPVGLSLKEQGECLSLAVLDLARMAREQAQRPGELLKTVSYKACLPPSLRDLIQGLSFVTRRAIRRTVRRALPRVAACQADRHSLMAKYIMDLERLDPAGAAETFHVGLPGALGGHDGLGLLRVAGDGGIAWTQGEQEVLQPFCDFPEIVDISIKQAPRVGPAGEHRLVTVTRTDNQILEAEFPGLPEALSFVALVDGYFRLTTDSQHFFCKEVAPPRLLEEVAEQCHGPITLDFAINKLKTGGSRPGSYVLRRSPQDFDSFLLTVCVQNPLGPDYKGCLIRRSPTGTFLLVGLSRPHSSLRELLATCWDGGLHVDGVAVTLTSCCIPRPKEKSNLIVVQRGHSPPTSSLVQPQSQYQLSQMTFHKIPADSLEWHENLGHGSFTKIYRGCRHEVVDGEARKTEVLLKVMDAKHKNCMESFLEAASLMSQVSYRHLVLLHGVCMAGDSTMVQEFVHLGAIDMYLRKRGHLVPASWKLQVVKQLAYALNYLEDKGLPHGNVSARKVLLAREGADGSPPFIKLSDPGVSPAVLSLEMLTDRIPWVAPECLREAQTLSLEADKWGFGATVWEVFSGVTMPISALDPAKKLQFYEDRQQLPAPKWTELALLIQQCMAYEPVQRPSFRAVIRDLNSLISSDYELLSDPTPGALAPRDGLWNGAQLYACQDPTIFEERHLKYISQLGKGNFGSVELCRYDPLAHNTGALVAVKQLQHSGPDQQRDFQREIQILKALHSDFIVKYRGVSYGPGRPELRLVMEYLPSGCLRDFLQRHRARLDASRLLLYSSQICKGMEYLGSRRCVHRDLAARNILVESEAHVKIADFGLAKLLPLDKDYYVVREPGQSPIFWYAPESLSDNIFSRQSDVWSFGVVLYELFTYCDKSCSPSAEFLRMMGCERDVPALCRLLELLEEGQRLPAPPACPAEVHELMKLCWAPSPQDRPSFSALGPQLDMLWSGSRGCETHAFTAHPEGKHHSLSFS

SEQ ID NO: 2351 - DNA, 1586 bp, Homo sapien
gaatcaggaagaccagctcctcctactgtcttctgtgttacgggatcagcgttccttgttgagtgggacctgagttttgagagggtcttctgctcctcttggtctggtcccttacttccaagagccccagagaggaaggcatgctgttggctctagctctgcttctagctttcctgcctcctgccagtcagaaatcttccaacttggaagggagaacaaagtcagtcaccaggccaactgggtcatcagctgtaatcacttgtgatcttcctgtagaaaatgccgtctacacccactggtacctacaccaggaggggaaggccccacagcgtcttctgtactatgactcctacaactccagggttgtgttggaatcaggaatcagtcgagaaaagtatcatacttatgcaagcacagggaagagccttaaatttatactggaaaatctaattgaacgtgactctggggtctattactgtgccacctggaaggattattataagaaactctttggcagtggaacaacacttgttgtcacagataaacaacttgatgcagatgtttcccccaagcccactatttttcttccttcgattgctgaaacaaaactccagaaggctggaacatatctttgtcttcttgagaaatttttcccagatattattaagatacattggcaagaaaagaagagcaacacgattctgggatcccaggaggggaacaccatgaagactaacgacacatacatgaaatttagctggttaacggtgccagaagagtcactggacaaagaacacagatgtatcgtcagacatgagaataataaaaacggaattgatcaagaaattatctttcctccaataaagacagatgtcaccacagtggatcccaaagacagttattcaaaagatgcaaatgatgtcaccacagtggatcccaaatacaattattcaaaggatgcaaatgatgtcatcacaatggatcccaaagacaattggtcaaaagatgcaaatgatacactactgctgcagctcacaaacacctctgcatattacatgtacctcctcctgctcctcaagagtgtggtctattttgccatcatcacctgctgtctgcttggaagaacggctttctgctgcaatggagagaaatcataacagacggtggcacaaggaggccatcttttcctcatcggttattgtccctagaagcgtcttctgaggatctagttgggctttctttctgggtttgggccatttcagttctcatgtgtgtactattctatcattattgtataatggttttcaaaccagtgggcacacagagaacctcagtctgtaataacaatgaggaatagccatggcgatctccagcaccaatctctccatgttttccacagctcctccagccaacccaaatagcgcctgctatagtgtagacagcctgcggcttctagccttgtccctctcttagtgttctttaatcagataactgcctggaagcctttcattttacacgccctgaagcagtcttctttgctagttgaattatgtggtgtgtttttccgtaataagcaaaataaattt

SEQ ID NO: 2352 - protein, 338 aa, Homo sapien [sequence omitted]

SEQ ID NO: 2353 - DNA, 3299 bp, Homo sapien; identical to SEQ ID NO: 1461

SEQ ID NO: 2354 - protein, 328 aa, Homo sapien; identical to SEQ ID NO: 1462

SEQ ID NO: 2355 - DNA, 1299 bp, Homo sapien
cggctcaagtgaactgactctgctagaacagtgccgtgcttttccacagaaggttagaccctgaaagagatggctcagcaccacctatggatcttgctcctttgcctgcaaacctggccggaagcagctggaaaagactcagaaatcttcacagtgaatgggattctgggagagtcagtcactttccctgtaaatatccaagaaccacggcaagttaaaatcattgcttggacttctaaaacatctgttgcttatgtaacaccaggagactcagaaacagcacccgtagttactgtgacccacagaaattattatgaacggatacatgccttaggtccgaactacaatctggtcattagcgatctgaggatggaagacgcaggagactacaaagcagacataaatacacaggctgatccctacaccaccaccaagcgctacaacctgcaaatctatcgtcggcttgggaaaccaaaaattacacagagtttaatggcatctgtgaacagcacctgtaatgtcacactgacatgctctgtagagaaagaagaaaagaatgtgacatacaattggagtcccctgggagaagagggtaatgtccttcaaatcttccagactcctgaggaccaagagctgacttacacgtgtacagcccagaaccctgtcagcaacaattctgactccatctctgcccggcagctctgtgcagacatcgcaatgggcttccgtactcaccacaccgggttgctgagcgtgctggctatgttctttctgcttgttctcattctgtcttcagtgtttttgttccgtttgttcaagagaagacaaggtaggattttcccagaaggtaaaatgtggaaactcaccttctctcctcctgggactgaagccatttatccaaggtttagctgaaaggcccattgttccagggaatctgcctttttccgatctccaccccaccacctcccagaatgatggctctgaggatggtatgacattaccctgaatggtcttcagaatccattcctgagatcaccagtagctggtgggcccagaacatgggttcgagcttagtacatacatgaacaagctgtgcttcactgtacgagtgtgttcacctttccgctcagggccctcacatgtgaaatgtttggactagaggatctccagggtcacttccaatttcattgtattttgattatgactattggagagtcattgagaaacatatactaatcctgtactccatggttgtcactatgtccctctgaatccctctggatcattctgtagttgtgc

SEQ ID NO: 2356 - protein, 280 aa, Homo sapien
MAQHHLWILLLCLQTWPEAAGKDSEIFTVNGILGESVTFPVNIQEPRQVKIIAWTSKTSVAYVTPGDSETAPVVTVTHRNYYERIHALGPNYNLVISDLRMEDAGDYKADINTQADPYTTTKRYNLQIYRRLGKPKITQSLMASVNSTCNVTLTCSVEKEEKNVTYNWSPLGEEGNVLQIFQTPEDQELTYTCTAQNPVSNNSDSISARQLCADIAMGFRTHHTGLLSVLAMFFLLVLILSSVFLFRLFKRRQGRIFPEGKMWKLTFSPPGTEAIYPRFS

SEQ ID NO: 2357 - DNA, 2555 bp, Homo sapien
ctctgagcggcacttgcaccgggcagtgccccgctgctgaccaccatgctgatcgcttcttcctctgtgtcggggggcttctgggtagagtttgtcctctcacttctggagaagatgcagacacaggagatcctgaggatactgcgactgcctgagctaggtgacttggaacagtttttccgcagcctctcggccaccaccctcgtgagtatgggtgccctggctgccatccttgcctactggttcactcagcggccaaaggccttgcagccgccatgcaacctcctgatgcagtcagaagaagtagaggacagtggcggggcacggcgatctgtgattgggtctggccctcagctacttacccactactatgatgatgcccggaccatgtaccaggtgttccgccgtgggcttagcatctcagggaatgggccctgtcttggtttcaggaagcctaagcagccttaccagtggctgtcctaccaggaggtggccgacagggctgaatttctggggtccggacttctccagcacaattgtaaagcatgcactgatcagtttattggtgtttttgcacaaaatcggccagagtggatcattgtggagctggcctgctacacatattccatggtggtggtcccgctctatgacaccctgggccctggggctatccgctacatcatcaatacagcggacatcagcaccgtgattgtggacaaacctcagaaggctgtgcttctgctagagcatgtggagaggaaggagactccaggcctcaagctgatcatcctcatggacccattcgaagaagccctgaaagagagagggcagaagtgcggggtggtcattaagtccatgcaggccgtggaggactgtggccaagagaatcaccaggctcctgtgcccccgcagcctgatgacctctccattgtgtgtttcacaagcggcacgacagggaacccaaaaggtgcgatgctcacccatgggaacgtggtggctgatttctcaggctttctgaaagtgacagagagtcagtgggctcccacttgtgcggatgtgcacatttcctatttgcctttagcacacatgtttgagcgaatggtgcagtctgtcgtctattgccacggagggcgtgttggcttcttccagggagatatccgccttctctcagatgacatgaaggctctatgccccaccatcttccctgtggtcccacgactgctgaaccggatgtacgacaagatcttcagccaggcaaacacaccattaaagcgctggctcctggagtttgcagcaaagcgtaagcaagccgaggtccggagtggaatcatcaggaatgatagtatctgggatgaactcttctttaataagattcaggccagtcttggtgggtgtgtgcggatgattgttactggagcagccccagcatcaccaacagttctgggatttctccgggcagctctagggtgccaggtttatgaaggttatggccaaactgagtgcacagctggatgtaccttcaccactcctggcgactggacctcagggcacgtaggggcgccacttccctgcaatcatatcaagctcgttgatgttgaggaactgaactactgggcctgcaaaggagagggagagatatgtgtgagaggaccaaatgtgttcaaaggctacttgaaagatccagacaggacgaaggaggccctggacagcgatggctggcttcacactggagacatcggaaaatggctgccggcaggaactcttaaaattattgatcggaaaaagcatatatttaaacttgctcagggagaatatgttgcacccgagaagattgagaacatctacatccggagccaacctgtggcgcaaatctatgtccatggggacagcttaaaggcctttttggtaggcattgttgtgcctgaccctgaagttatgccctcctgggcccagaagagaggaattgaaggaacatatgcagatctctgcacaaataaggatctgaagaaagccattttggaagatatggtgaggttaggaaaagaaagtggactccattcttttgagcaggttaaagccattcacatccattctgacatgttctcagttcaaaatggcttgctgaccccaacactaaaagctaagagacctgagctgagagagtacttcaaaaaacaaatagaagagctttactcaatccccatgtgaagttcaaggaaagttcttctcagtgtaatgaactgtctagcaatattatagttattcttgaaagtaatgagtcaaaatgacacagctgaaaatgaataagcatctgattttatgactgagccttttcctgtcccaagaggtctttaacaatattttctctatcatcaatgagtatattttatttttattataaaaatgatattgtggtggactgctaaaaatatcacaaatggcaatgtaaaaatcaagacattttctcaagaacttgtaccactaaaagtaatatattgtcaatgttcacagaactattaaactaaaaaaaaaaaaaaaaaaaaaaaaaaaaaaaa

SEQ ID NO: 2358 - protein, 697 aa, Homo sapien
MQTQEILRILRLPELGDLEQFFRSLSATTLVSMGALAAILAYWFTQRPKALQPPCNLLMQSEEVEDSGGARRSVIGSGPQLLTHYYDDARTMYQVFRRGLSISGNGPCLGFRKPKQPYQWLSYQEVADRAEFLGSGLLQHNCKACTDQFIGVFAQNRPEWIIVELACYTYSMVVVPLYDTLGPGAIRYIINTADISTVIVDKPQKAVLLLEHVERKETPGLKLIILMDPFEEALKERGQKCGVVIKSMQAVEDCGQENHQAPVPPQPDDLSIVCFTSGTTGNPKGAMLTHGNVVADFSGFLKVTESQWAPTCADVHISYLPLAHMFERMVQSVVYCHGGRVGFFQGDIRLLSDDMKALCPTIFPVVPRLLNRMYDKIFSQANTPLKRWLLEFAAKRKQAEVRSGIIRNDSIWDELFFNKIQASLGGCVRMIVTGAAPASPTVLGFLRAALGCQVYEGYGQTECTAGCTFTTPGDWTSGHVGAPLPCNHIKLVDVEELNYWACKGEGEICVRGPNVFKGYLKDPDRTKEALDSDGWLHTGDIGKWLPAGTLKIIDRKKHIFKLAQGEYVAPEKIENIYIRSQPVAQIYVHGDSLKAFLVGIVVPDPEVMPSWAQKRGIEGTYADLCTNKDLKKAILEDMVRLGKESGLHSFEQVKAIHIHSDMFSVQNGLLTPTLKAKRPELREYFKKQIEELYSIPM

SEQ ID NO: 2359 - DNA, 2530 bp, Homo sapien; identical to SEQ ID NO: 2176

SEQ ID NO: 2360 - protein, 128 aa, Homo sapien; identical to SEQ ID NO: 2177

SEQ ID NO: 2361 - DNA, 483 bp, Homo sapien
ggcatctcccttgcacagttctcctcctcggcctgcccaagagtccaccaggccatggacgcagtggctgtgtatcatggcaaaatcagcagggaaaccggcgagaagctcctgcttgccactgggctggatggcagctatttgctgagggacagcgagagcgtgccaggcgtgtactgcctatgtgtgctgtatcacggttacatttatacataccgagtgtcccagacagaaacaggttcttggagtgctgagcatttcagaagccagatcaaggcattgtaatacctctgcagtatccagttgagaagaagtcctcagctagaagtacacaaggtactacagggataagagaagatcctgatgtctgcctgaaagccccatgaagaaaaataaaacaccttgtactttattttctataatttaaatatatgctaagtcttatatattgtagataatacagttcggtgagctacaaatgca

SEQ ID NO: 2362 - protein, 76 aa, Homo sapien
MDAVAVYHGKISRETGEKLLLATGLDGSYLLRDSESVPGVYCLCVLYHGYIYTYRVSQTETGSWSAEHFRSQIKAL

SEQ ID NO: 2363 - DNA, 461 bp, Homo sapien
ggcatctcccttgcacagttctcctcctcggcctgcccaagagtccaccaggccatggacgcagtggctgtgtatcatggcaaaatcagcagggaaaccggcgagaagctcctgcttgccactgggctggatggcagctatttgctgagggacagcgagagcgtgccaggtatcacggttacatttatacataccgagtgtcccagacagaaacaggttcttggagtgctgagcatttcagaagccagatcaaggcattgtaatacctctgcagtatccagttgagaagaagtcctcagctagaagtacacaaggtactacagggataagagaagatcctgatgtctgcctgaaagccccatgaagaaaaataaaacaccttgtactttattttctataatttaaatatatgctaagtcttatatattgtagataatacagttcggtgagctacaaatgca

SEQ ID NO: 2364 - protein, 76 aa, Homo sapien
MDAVAVYHGKISRETGEKLLLATGLDGSYLLRDSESVPGITVTFIHTECPRQKQVLGVLSISEARSRHCNTSAVSS

SEQ ID NO: 2365 - DNA, 2564 bp, Homo sapien; identical to SEQ ID NO: 867

SEQ ID NO: 2366 - protein, 735 aa, Homo sapien; identical to SEQ ID NO: 868

SEQ ID NO: 2367 - DNA, 1807 bp, Homo sapien; identical to SEQ ID NO: 373

SEQ ID NO: 2368 - protein, 350 aa, Homo sapien; identical to SEQ ID NO: 374

SEQ ID NO: 2369 - DNA, 4068 bp, Homo sapien; identical to SEQ ID NO: 960

SEQ ID NO: 2370 - protein, 564 aa, Homo sapien; identical to SEQ ID NO: 961

SEQ ID NO: 2371 - DNA, 9517 bp, Homo sapien; identical to SEQ ID NO: 962

SEQ ID NO: 2372 - protein, 2695 aa, Homo sapien
MSDKMSSFLHIGDICSLYAEGSTNGFISTLGLVDDRCVVQPETGDLNNPPKKFRDCLFKLCPMNRYSAQKQFWKAAKPGANSTTDAVLLNKLHHAADLEKKQNETENRKLLGTVIQYGNVIQLLHLKSNKYLTVNKRLPALLEKNAMRVTLDEAGNEGSWFYIQPFYKLRSIGDSVVIGDKVVLNPVNAGQPLHASSHQLVDNPGCNEVNSVNCNTSWKIVLFMKWSDNKDDILKGGDVVRLFHAEQEKFLTCDEHRKKQHVFLRTTGRQSATSATSSKALWEVEVVQHDPCRGGAGYWNSLFRFKHLATGHYLAAEVDPDQDASRSRLRNAQEKMVYSLVSVPEGNDISSIFELDPTTLRGGDSLVPRNSYVRLRHLCTNTWVHSTNIPIDKEEEKPVMLKIGTSPVKEDKEAFAIVPVSPAEVRDLDFANDASKVLGSIAGKLEKGTITQNERRSVTKLLEDLVYFVTGGTNSGQDVLEVVFSKPNRERQKLMREQNILKQIFKLLQAPFTDCGDGPMLRLEELGDQRHAPFRHICRLCYRVLRHSQQDYRKNQEYIAKQFGFMQKQIGYDVLAEDTITALLHNNRKLLEKHITAAEIDTFVSLVRKNREPRFLDYLSDLCVSMNKSIPVTQELICKAVLNPTNADILIETKLVLSRFEFEGVSSTGENALEAGEDEEEVWLFWRDSNKEIRSKSVRELAQDAKEGQKEDRDVLSYYRYQLNLFARMCLDRQYLAINEISGQLDVDLILRCMSDENLPYDLRASFCRLMLHMHVDRDPQEQVTPVKYARLWSEIPSEIAIDDYDSSGASKDEIKERFAQTMEFVEEYLRDVVCQRFPFSDKEKNKLTFEVVNLARNLIYFGFYNFSDLLRLTKILLAILDCVHVTTIFPISKMAKGEENKGSNVMRSIHGVGELMTQVVLRGGGFLPMTPMAAAPEGNVKQAEPEKEDIMVMDTKLKIIEILQFILNVRLDYRISCLLCIFKREFDESNSQTSETSSGNSSQEGPSNVPGALDFEHIEEQAEGIFGGSEENTPLDLDDHGGRTFLRVLLHLTMHDYPPLVSGALQLLFRHFSQRQEVLQAFKQVQLLVTSQDVDNYKQIKQDLDQLRSIVEKSELWVYKGQGPDETMDGASGENEHKKTEEGNNKPQKHESTSSYNYRVVKEILIRLSKLCVQESASVRKSRKQQQRLLRNMGAHAVVLELLQIPYEKAEDTKMQEIMRLAHEFLQNFCAGNQQNQALLHKHINLFLNPGILEAVTMQHIFMNNFQLCSEINERVVQHFVHCIETHGRNVQYIKFLQTIVKAEGKFIKKCQDMVMAELVNSGEDVLVFYNDRASFQTLIQMMRSERDRMDENSPLMYHIHLVELLAVCTEGKNVYTEIKCNSLLPLDDIVRVVTHEDCIPEVKIAYINFLNHCYVDTEVEMKEIYTSNHMWKLFENFLVDICRACNNTSDRKHADSILEKYVTEIVMSIVTTFFSSPFSDQSTTLQTRQPVFVQLLQGVFRVYHCNWLMPSQKASVESCIRVLSDVAKSRAIAIPVDLDSQVNNLFLKSHSIVQKTAMNWRLSARNAARRDSVLAASRDYRNIIERLQDIVSALEDRLRPLVQAELSVLVDVLHRPELLFPENTDARRKCESGGFICKLIKHTKQLLEENEEKLCIKVLQTLREMMTKDRGYGEKGEALRQVLVNRYYGNVRPSGRRESLTSFGNGPLSAGGPGKPGGGGGGSGSSSMSRGEMSLAEVQCHLDKEGASNLVIDLIMNASSDRVFHESILLAIALLEGGNTTIQHSFFCRLTEDKKSEKFFKVFYDRMKVAQQEIKATVTVNTSDLGNKKKDDEVDRDAPSRKKAKEPTTQITEEVRDQLLEASAATRKAFTTFRREADPDDHYQPGEGTQATADKAKDDLEMSAVITIMQPILRFLQLLCENHNRDLQNFLRCQNNKTNYNLVCETLQFLDCICGSTTGGLGLLGLYINEKNVALINQTLESLTEYCQGPCHENQNCIATHESNGIDIITALILNDINPLGKKRMDLVLELKNNASKLLLAIMESRHDSENAERILYNMRPKELVEVIKKAYMQGEVEFEDGENGEDGAASPRNVGHNIYILAHQLARHNKELQSMLKPGGQVDGDEALEFYAKHTAQIEIVRLDRTMEQIVFPVPSICEFLTKESKLRIYYTTERDEQGSKINDFFLRSEDLFNEMNWQKKLRAQPVLYWCARNMSFWSSISFNLAVLMNLLVAFFYPFKGVRGGTLEPHWSGLLWTAMLISLAIVIALPKPHGIRALIASTILRLIFSVGLQPTLFLLGAFNVCNKIIFLMSFVGNCGTFTRGYRAMVLDVEFLYHLLYLVICAMGLFVHEFFYSLLLFDLVYREETLLNVIKSVTRNGRSIILTAVLALILVYLFSIVGYLFFKDDFILEVDRLPNETAVPETGESLASEFLFSDVCRVESGENCSSPAPREELVPAEETEQDKEHTCETLLMCIVTVLSHGLRSGGGVGDVLRKPSKEEPLFAARVIYDLLFFFMVIIIVLNLIFGVIIDTFADLRSEKQKKEEILKTTCFICGLERDKFDNKTVTFEEHIKEEHNMWHYLCFIVLVKVKDSTEYTGPESYVAEMIKERNLDWFPRMRAMSLVSSDSEGEQNELRNLQEKLESTMKLVTNLSGQLSELKDQMTEQRKQKQRIGLLGHPPHMNVNPQQPA

SEQ ID NO: 2373 - DNA, 4366 bp, Homo sapien
tgcattctttgccccaaaactctttcctttggttgtgctaagaggtgatgcccaaggtgcaccacctttcaagaactggatcatgaacaactttatcctcctggaagaacagctcatcaagaaatcccaacaaaagagaagaacttctccctcgaactttaaagtccgcttctttgtgttaaccaaagccagcctggcatactttgaagatcgtcatgggaagaagcgcacgctgaaggggtccattgagctctcccgaatcaaatgtgttgagattgtgaaaagtgacatcagcatcccatgccactataaatacccgtttcaggtggtgcatgacaactacctcctatatgtgtttgctccagatcgtgagagccggcagcgctgggtgctggcccttaaagaagaaacgaggaataataacagtttggtgcctaaatatcatcctaatttctggatggatgggaagtggaggtgctgttctcagctggagaagcttgcaacaggctgtgcccaatatgatccaaccaagaatgcttcaaagaagcctcttcctcctactcctgaagacaacaggcgaccactttgggaacctgaagaaactgtggtcattgccttatatgactaccaaaccaatgatcctcaggaactcgcactgcggcgcaacgaagagtactgcctgctggacagttctgagattcactggtggagagtccaggacaggaatgggcatgaaggatatgtaccaagcagttatctggtggaaaaatctccaaataatctggaaacctatgagtggtacaataagagtatcagccgagacaaagctgaaaaacttcttttggacacaggcaaagaaggagccttcatggtaagggattccaggactgcaggaacatacaccgtgtctgttttcaccaaggctgttgtaagtgagaacaatccctgtataaagcattatcacatcaaggaaacaaatgacaatcctaagcgatactatgtggctgaaaagtatgtgttcgattccatccctcttctcatcaactatcaccaacataatggaggaggcctggtgactcgactccggtatccagtttgttttgggaggcagaaagccccagttacagcagggctgagatacgggaaatgggtgatcgacccctcagagctcacttttgtgcaagagattggcagtgggcaatttgggttggtgcatctgggctactggctcaacaaggacaaggtggctatcaaaaccattcgggaaggggctatgtcagaagaggacttcatagaggaggctgaagtaatgatgaaactctctcatcccaaactggtgcagctgtatggggtgtgcctggagcaggcccccatctgcctggtgtttgagttcatggagcacggctgcctgtcagattatctacgcacccagcggggactttttgctgcagagaccctgctgggcatgtgtctggatgtgtgtgagggcatggcctacctggaagaggcatgtgtcatccacagagacttggctgccagaaattgtttggtgggagaaaaccaagtcatcaaggtgtctgactttgggatgacaaggttcgttctggatgatcagtacaccagttccacaggcaccaaattcccggtgaagtgggcatccccagaggttttctctttcagtcgctatagcagcaagtccgatgtgtggtcatttggtgtgctgatgtgggaagttttcagtgaaggcaaaatcccgtatgaaaaccgaagcaactcagaggtggtggaagacatcagtaccggatttcggttgtacaagccccggctggcctccacacacgtctaccagattatgaatcactgctggaaagagagaccagaagatcggccagccttctccagactgctgcgtcaactggctgaaattgcagaatcaggactttagtagagactgagtaccaggccacgggctgcagatcctgaatggaggaaggatatgtcctcattccatagagcattagaagctgccaccagcccaggaccctccagaggcagcctggcctgtggcatcagtccctgagtcaccatggaagcagcatcctgaccacagctggcagtcaagccacagctggagggtcagccaccaagctgggagctgagccagaacaggagtgatgtctctgcccttcctctagcctcttgtcacatgtggtgcacaaacctcaacctgacagctttcagacagcattcttgcacttcttagcaacagagagagacatgagtaagacccagattgctatttttattgttatttttaacatgaatctaaagtttatggttccagggactttttatttgacccaacaacacagtatcccaggatatggaggcaaggggaacaaagagcatgagtctttttccaagaaaactggtgagttaagtaagattagagtgagtgtgctctgttgctgtgatgctgtcagccacagcttcctgccgtagagaatgatagagcagctgctcacacaggaggccggatattctgagaagcagctttatgaggttttacagagtatgctgctacctctctccttgaagggagcatggcgagacccattggatggattggggtgaacagttcaggtcccatgcttggagcattgggtatctgatgtctgcaccagaacaagagaacctctgacggtggagaaccatgtggtgcaagaagagatcttaggtctcttcttttataccaagctcatcttttataccaagctgtgcaggtgactatgcctcctcttctgcacagaatgcttccaccagcatcctgagaagaaatgattacttctgaaaaacatccttttttccagcctctgggaatcagccccccctctctgcactatccgatcctcatcaacagagggcagcattgtgttggtcaatgttcccttggcgagcaattgaaacttgtttaggccctagggttgagcaattttaaggttgagactccaagtctcctaaaattctaggagagaaataaagagtctgtttttgctcaaaccatcaggatggaaacagtcaggcactgactggggtgcttccaagaggcatgagagtgcctactctggcttgagcacttctatatgcaaggtgaatatgtactgagctaggagacttccctgcaaaatctctgttcaccctgggttcacatccccatgaggtaatattattattcccattttacaaataatgtaactgaggctttaaaaagccaagacatctgcccaaagtgatggaactagaaagtctagagctggtattctagcccaaatctgtctgaccgcaatacacagattctttattcctattcgacactggcttctactgaaaatgaaacggattgcagagggaataaatacaaagatggaaagccagtaaagaagtcagtatagaaccactagcgaatagtgttgctctggcacagaccactgtggttgatggcatggccctccaacttggaataggattttccttttcctattctgtatccttaccttggtcatgttaatgactttggagttattcagttaatgaccctttaattctcacaaccaaccagtcatgttgcttgaagccatttatagacgagcttcaaagcaactttaaaagattcttctgtagaagtatgagttcttcctttaattatcattccaactttcagctgtagtcttcttgaacacttcatgaggagggacattccctgatataagagaggatggtgttgcaattggctctttctaaatcatgtgacgttttgactggcttgagattcagatgcataatttttaattataattattgtgaagtggagagcctcaagataaaactctgtcattcagaagatgattttactcagcttatccaaaattatctctgtttactttttagaattttgtacattatcttttgggatccttaattagagatgatttctggaacattcagtctagaaagaaaacattggaattgactgatctctgtggtttggtttagaaaattcccctgtgcatggtattacctttttcaagctcagattcatctaatcctcaactgtacatgtgtacattcttcacctcctggtgccctatcccgcaaaatgggcttcctgcctggtttttctcttctcacattttttaaatggtcccctgtgtttgtagagaactcccttatacagagttttggttctagttttatttcgtagattttgcattttgtaccttttgagactatgtatttatatttggatcagatgcatatttattaatgtacagtcactgctagtgttcaaaataaaaatgttacaaat

SEQ ID NO: 2374 - protein, 620 aa, Homo sapien
MNNFILLEEQLIKKSQQKRRTSPSNFKVRFFVLTKASLAYFEDRHGKKRTLKGSIELSRIKCVEIVKSDISIPCHYKYPFQVVHDNYLLYVFAPDRESRQRWVLALKEETRNNNSLVPKYHPNFWMDGKWRCCSQLEKLATGCAQYDPTKNASKKPLPPTPEDNRRPLWEPEETVVIALYDYQTNDPQELALRRNEEYCLLDSSEIHWWRVQDRNGHEGYVPSSYLVEKSPNNLETYEWYNKSISRDKAEKLLLDTGKEGAFMVRDSRTAGTYTVSVFTKAVVSENNPCIKHYHIKETNDNPKRYYVAEKYVFDSIPLLINYHQHNGGGLVTRLRYPVCFGRQKAPVTAGLRYGKWVIDPSELTFVQEIGSGQFGLVHLGYWLNKDKVAIKTIREGAMSEEDFIEEAEVMMKLSHPKLVQLYGVCLEQAPICLVFEFMEHGCLSDYLRTQRGLFAAETLLGMCLDVCEGMAYLEEACVIHRDLAARNCLVGENQVIKVSDFGMTRFVLDDQYTSSTGTKFPVKWASPEVFSFSRYSSKSDVWSFGVLMWEVFSEGKIPYENRSNSEVVEDISTGFRLYKPRLASTHVYQIMNHCWKERPEDRPAFSRLLRQLAEIAESGL

SEQ ID NO: 2375 - DNA, 3487 bp, Homo sapien
  Unsure 2733, 2804, 2876: Unknown base
gaattcctttttttgactgagtctccctctgtcacctaggctggagtgcagtggcacaatcttggctcgctgcaaccttcacccttcacctcccaggtcgaagcgattctcctgcctcagtctcccgagtagctgggattacaggcgtgcgccaccaaatctggctatttttttattattattattttgagtagagatggggtttcaccatgttggccagactggtcttgaactcttggcctcaaattatctgcccacctcggcctcccaaagtgctgggattacaggcatgagccaccatgcccagatgacaagactaattttttatccctttggtttattggctacaacatcttcttggaatcagaggtgaattttttcttaccttgggatgcctgagactaggggagtatagaattccaattggtaattaaggcatctttctgctcctgatcagaagggcaggttagttgggagaggtcagatggcacaacagaagtcaccttgtaagtaaggcaaagacttgaaggcattagcgtttctcattactaggtcaataacctgagggaatcaatggctttttgccgctctacctcttgtgtatctctttgacttttctttctctgtctagggcattcctgaacttgtcaatcagggacaggcattagagcccaaacaggatgctttccaaggccaagaagcagcagtaatgatggatcagaaggcaggattatatggacagacatacccagcacaggggcctccaatgcaaggaggctttcatcttcagggacaatcaccatcttttaactctatgatgaatcagatgaaccagcaaggcaattttcctctccaaggaatgcacccacgagccaacatcatgagaccccggacaaacacccccaagcaacttagaatgcagcttcagcagaggctgcagggccagcagtttttgaatcagagccgacaggcacttgaattgaaaatggaaaaccctactgctggtggtgctgcggtgatgaggcctatgatgcagccccaggtgagctcccaggagggttttcttaatgctcaaatgggcgcccaacggaggagagagctgctaagtcatcacttccgacaacagagggtggctatgatgatgcagcagcagcaacagcagcaacagcagcagcagcagcagcagcagcagcagcagcagcaacagcaacagcaacagcagcaacaggagcaaccccaggtcttcagcccacctcctaatgtgactgctcccccagcatggatggcttkyggcaggacccacaatgccacaagctcctccgcaacaagtttccaatatccaaccccaaattatgggaatggggaccaaccaacaaagatccagcctttgggtcgagtgtctaagtcctcccaatgcaatgatgtcgtcaagaatggtccctcccagaatcccatgatgcaacacccgcaggctgcatccatctatcagtcctcagaaatgaagggctggccatcaggaaatttggccaggaacagctccttttcccagcagcagtttgcccaccaggggaatcctgcagtgtatagtatggtgcacatgaatggcagcagtggtcacatgggacagatgaacatgaaccccatgcccatgtctggcatgcctatgggtcctgatcagaaatactgctgacatctctgcaccaggacctcttaaggaaaccactgtacaaatgacactgcactaggattattgggaaggaatcattgttcccaggccatccatcttgggaagaaaggaccagcttttgagctccatcaagggtattttaagtgatgtcatttgagcaggactggattttaagccgaagggcaatatccaacgtgtttttcccccctccttcctgctgtgtatcatggtgttcaaaacagaaatgttttttggcattccacctcctagggatataattctggagacatggagtgttactgatcataaaacttttgtgtcacttttttctgccttgctagccaaaatctcttaaatacacgtaggtgggccagagaacattggaagaatcaagagagattagaatatctggtttctctagttgcagtattggacaaagagcatagtcccagccttcaggtgtagtagttctgtgttgaccctttgtccagtggaattggtgattctgaattgtcctttactaatgttgttgagttgctctgtccctattatttgccctagcctttctcctaatggggttttcatttgccattcatgtccctgtaaaacttcacctccaggaactgtcatggatgtccaaatggctttgcagaaaggaaatgagatgacagtatttaatcgcagcagtagcaaacttttcacatgctaatgtgcagctgagtgcactttatttaaaaagaatggataaatgcaatattcttgaggtcttgagggaatagtgaaacacattcctggtttttgcctacacttacgtgttagacaagaactatgatttttttttttaaagtactggtgtcaccctttgcctatatggtagagcaataatgctttttaaaaataaacttctgaaaacccaaggccaggtactgcattctgaatcagaatctcgcagtgtttctgtgaatagatttttttgtaaatatgacctttaagatattgtattatgtaaaatatgtatataccttttttttgtaggtgcacagcgnctcatttttacagagtttgtgaagctaaatatttaacattgttgatttcagtaagctgtgtggtgaggctnccagtggaagagacatcccttgacttttgtggcctgggggaggggtagtgctccacagcttttccttccccnccccccagccttagatgcctcgctcttttcaatctcttaatctaaatgctttttaaagagattatttgtttagatgtaggcattttaattttttaaaaattcctctaccagaactaagcactttgttaatttggggggggagaatagatatggggagaaaaaacttaaaaaaaaaatcaggaattaaaaaaagcgagcaatttgaagagaatcttttggattttaagcagtccgaaataatagcaattcatgggctgtgtgtgtgtgtgtatgtgtgtgtgtgtgtgtgtgaatgtttaagtatgttaccttttcatcccctttaggagcgttttcagattttggttgctaagacctgaatcccatattgagatctcgagtagaatccttggtgtggtttctggtgtctgctcagctgtcccctcattctactaatgtgatgctttcattatgtccctgtggattagaatagtgtcagttatttcttaagtaactcagtacccagaacaaccagttttactgtgattcagagccacagtctaactgagcaccttttaaacccctccctcttctgccccctaccacttttctgctgttgcctctcggaattc

SEQ ID NO: 2376 - protein, 326 aa, Homo sapien
  unsure 194: unknown amino acid
  Unsure 2733, 2804, 2876: Unknown amino acid
MMDQKAGLYGQTYPAQGPPMQGGFHLQGQSPSFNSMMNQMNQQGNFPLQGMHPRANIMRPRTNTPKQLRMQLQQRLQGQQFLNQSRQALELKMENPTAGGAAVMRPMMQPQVSSQEGFLNAQMGAQRRRELLSHHFRQQRVAMMMQQQQQQQQQQQQQQQQQQQQQQQQQQQQEQPQVFSPPPNVTAPPAWMAXGRTHNATSSSATSFQYPTPNYGNGDQPTKIQPLGRVSKSSQCNDVVKNGPSQNPMMQHPQAASIYQSSEMKGWPSGNLARNSSFSQQQFAHQGNPAVYSMVHMNGSSGHMGQMNMNPMPMSGMPMGPDQKYC

SEQ ID NO: 2377 - DNA, 1373 bp, Homo sapien
gggaggagagaaaagccatggccgacaaggtcctgaaggagaagagaaagctgtttatccgttccatgggtgaaggtacaataaatggcttactggatgaattattacagacaagggtgctgaacaaggaagagatggagaaagtaaaacgtgaaaatgctacagttatggataagacccgagctttgattgactccgttattccgaaaggggcacaggcatgccaaatttgcatcacatacatttgtgaagaagacagttacctggcagggacgctgggactctcagcagatcaaacatctggaaattaccttaatatgcaagactctcaaggagtactttcttcctttccagctcctcaggcagtgcaggacaacccagctatgcccacatcctcaggctcagaagggaatgtcaagctttgctccctagaagaagctcaaaggatatggaaacaaaagtcggcagagatttatccaataatggacaagtcaagccgcacacgtcttgctctcattatctgcaatgaagaatttgacagtattcctagaagaactggagctgaggttgacatcacaggcatgacaatgctgctacaaaatctggggtacagcgtagatgtgaaaaaaaatctcactgcttcggacatgactacagagctggaggcatttgcacaccgcccagagcacaagacctctgacagcacgttcctggtgttcatgtctcatggtattcgggaaggcatttgtgggaagaaacactctgagcaagtcccagatatactacaactcaatgcaatctttaacatgttgaataccaagaactgcccaagtttgaaggacaaaccgaaggtgatcatcatccaggcctgccgtggtgacagccctggtgtggtgtggtttaaagattcagtaggagtttctggaaacctatctttaccaactacagaagagtttgaggatgatgctattaagaaagcccacatagagaaggattttatcgctttctgctcttccacaccagataatgtttcttggagacatcccacaatgggctctgtttttattggaagactcattgaacatatgcaagaatatgcctgttcctgtgatgtggaggaaattttccgcaaggttcgattttcatttgagcagccagatggtagagcgcagatgcccaccactgaaagagtgactttgacaagatgtttctacctcttcccaggacattaaaataaggaaactgtatgaatgtctgtgggcaggaagtgaagagatcgttctgtaaaaggtttttggaattatgtctgctgaataataaactttttttgaaataataaatctggtagaaaaatgaaaaaaaaaaaaaaaaaa

SEQ ID NO: 2378 - protein, 404 aa, Homo sapien
MADKVLKEKRKLFIRSMGEGTINGLLDELLQTRVLNKEEMEKVKRENATVMDKTRALIDSVIPKGAQACQICITYICEEDSYLAGTLGLSADQTSGNYLNMQDSQGVLSSFPAPQAVQDNPAMPTSSGSEGNVKLCSLEEAQRIWKQKSAEIYPIMDKSSRTRLALIICNEEFDSIPRRTGAEVDITGMTMLLQNLGYSVDVKKNLTASDMTTELEAFAHRPEHKTSDSTFLVFMSHGIREGICGKKHSEQVPDILQLNAIFNMLNTKNCPSLKDKPKVIIIQACRGDSPGVVWFKDSVGVSGNLSLPTTEEFEDDAIKKAHIEKDFIAFCSSTPDNVSWRHPTMGSVFIGRLIEHMQEYACSCDVEEIFRKVRFSFEQPDGRAQMPTTERVTLTRCFYLFPGH

SEQ ID NO: 2379 - DNA, 4586 bp, Homo sapien
agaacgatggcctttctgcggtgtctgcgaccgggaccaaggcggagcaaagtcgccgggggtgtggggtgttccacgctatgttgggagtgttcgctttcgagcttattgcaggagtgaccaggacactacctcctagaagtaatgcccacagaaagcgcaagttgttcgactgctcgccaaacaaaacagaagcgcaaatcccatagcctttctatacgaagaactaacagctcggagcaggagaggacgggactgccaagagacatgttagaaggacaagattctaaactgccttcctcggttcgcagtacacttctggaactgtttggtcaaatagaaagagaatttgaaaacctttatatcgaaaacttagaattacgtagagaaatcgacactcttaatgaacgtttagctgctgaaggacaagcgattgatggagcagagctgagtaagggccaactcaaaacaaaagccagtcacagcaccagccagctctcccagaaactgaagaccacttacaaggcttccaccagcaagattgtctccagctttaagaccacgacatcgagagctgcctgccagctcgtgaaggagtacatcggccaccgggacggcatctgggatgtcagcgtggccaagacacagccagtggtgctcgggactgcatcagccgatcacacggctttgctgtggagcatagagacagggaagtgcctagtcaagtacgcaggccacgtgggctcagtaaattctatcaaatttcatccctcagagcagttggctctcactgcttctggagatcagactgctcatatctggagatacgcggtgcagctgccgacaccccagcctgttgctgacactagtatatctggggaagatgaagtagagtgctctgacaaggacgagcccgacctcgatggggatgtgtccagcgactcccccaccatccgcgtcccactgacatccctcaagagccaccagggcgtggtcatcgcctccgactggctggttggggggaagcaggctgtgactgcctcctgggaccggacggcaaacctgtacgacgtggagacgtccgagctcgttcactctctgacagggcacgaccaggagttgacgcactgctgcacacaccccacccagcggctcgtggtgacctcctcccgtgacacgactttccgcctctgggatttcagggacccctccatccactcggtgaatgttttccagggacacacggacactgtgacttctgccgtgttcaccgtgggagacaacgtggtttcaggcagcgatgaccgcacggtgaaagtctgggacttgaaaaatatgagatcccccattgcaactattcgcacggactctgccattaacaggatcaatgtatgtgtcggccaaaaaatcatagccctcccccatgacaaccgacaagtgagactgtttgatatgtcaggagtgcgcctggcgcggcttccccggagcagccgacagggccacaggagaatggtatgctgctcggcatggagtgaagaccaccccgtgtgcaatctgttcacctgtgggtttgaccggcaagccattggttggaacatcaacatccctgcattgctacaagaaaaataaggacaccggcagcccttagtttcactgtttgccagcacagacctttgatgggtgcaggcttttctgcgtattaatcagccatttttgtgagagtttgaccctggaaagggtgctttgtatatgttcttttcacatagtgcccagcttgcatgaaatgtacagagaaatgtgtggtcgtattttttacttttgtcttgtatatgtatgtatattgggtcctctgggcagtagaggcaaagctcacctcccatgtagcacatgaaatgcttgtgagttgttgacattggacaggtgaacagtagggcattacatttgtgtgaattaaatgtgaacttctgtattacgttgcggcgtcggctgtcctgcgttccctggagtaactgtacgtatctgcctttgctgggaagactgtgaggctgcctgtgttggctggcgaccagcaggattgctccaggattttgtgtttacctcgcgtgaagttcagcacgtgctgtcgtgtagtcagcttctactctaatttctgttacagttctgcaaaggtaacctggagtttagaagttaaaaaaaagcatgggatgttggatttgcaccatttggagtttctttaggaaagaaaagttttctgcttttttatagaaaatcatttcagtctcctgaggtctcatgctagcaaattttgaaataggattctaatcactgatttcaaatattaagcaaaatgtaaagcactttaatttatagctatggttataaacaggttttagatgtttcaaatgacttgtccactgaatgtcacttgaccttgataagaggccgcctgcacacagagcccagttaattctccgcacctcggttgtgtgcttccgaatgggctcactcccgtggtggtgtttgagagccaacaacactacctcagagacgggtctttgggaaactttgggtctcactgttgcctggctggagcactttggtttatagctggaatactgagttcagttcagaaggcaggaaagacagtcacaccgacgtgtcctgaaggtgtaggctctccacttaggcgcacaagctgacggctgcagccagcaggccccggtgacgagacacttccaggtcttgtggtggggacgcctctcagtgccagtcccgccactgctgagtgagcctggtgttcttgccttcttggaaattactgctcacctggtatctgtacgttaatgtttcttgctgagttacagttttgataaagaggctctcatttcctgtgtcttgtatattcagtcctttcaatacgtccacctggaggctcaccacttggagagacacaggaaggtaatatttacagctgtcatgtgacatccccaggtctttgtgttttgccctgttttacggtgaggtaggagggaacccatctggggaccggtaggtgcaggtgcagtaggacgtgggacttttggacccgtcctttggtgcagctcgccagggatgagaggcacctccctacttgggtcttcaggagctggtccaaggagcttcgaatctaagtcatctagaatgaccctgaaatgactgacagccccgggcccaagaaaaacccataaccacctcagatggatctgacgtggctaagggacaaacagcaaatatttcagtcattttgattttacaaataaaaaatgtgttgtgtttttgtccgacattatttcctgactgcactgttctgagaatggagtccacctggtccctctggttgattagaatctcaggtttcagctcctgctgtcctgagcgaacttgcctgatgcagggctgtgctgtgtccagatgttgctggggcctcactttttctcttggctggaggtccaattgccagagcctcccacactgcacatacaaaggtctgagcccagggcagcttctggggccactgcacaggccacctgcttgggttcctcggagtttaatttgaaagtctgggtgtcttaggatgatggttaggaacattgaaaaatggctgcaaatagccaaatcaaacttaagaaccagatctctgccagattaaacatttttgaagcttttaaaagtcaatattcctagtggccactgagttccaggcacactggtgccctttactgccacagctgctcaccttgtctggcaaactggagggacctcagaaactggactcctgcatgtccttgggggcgcagccctgtggtgctcaggcagagctctcaggagccggggcaccttgctgttcgctgctgtgtcgtcttctaatgtgagctcatccactgctgctgcagcgtggtgatcaggagtcacagacaagatcggggatggtgtgtgtgtgcgtgtgtgtgtgtgtgtgtgtgcacgtgtgtgtggctaaattaagtcatactgtcaaccacacgtgatctcgtctgaaacagtgtttggaagtgggaacagttttgtcctgtatgctgatgtgtccagaatttcatttaatgatagacggaaaatgtgtggttactgaaaactgtatatgatacagaatttcataagagccatgctgttgggcaaagcaactctttttcaaccactgctcatcagtttctgtagagacaaaaactctgtacatattttggaatctgaagaatcctatgtaaatcatttgttacttaagtctgtgaaaaacatatttctttggaggaaaatgtatgcatttataagtgttccatggaatcagtttttattgtatcgatataattgtctctaagtgttgactgtcttcattgcaatatgaaattcattaaaatgtccatgttccataattactattataaaagctttgtgttattgggagtcttattatttttatagtttttcatgttttgctttggtgaaacattgtgaatgactatataaacatcacgatgagctagaaattgaacaaatataatactggtcactcg

SEQ ID NO: 2380 - protein, 494 aa, Homo sapien
MPTESASCSTARQTKQKRKSHSLSIRRTNSSEQERTGLPRDMLEGQDSKLPSSVRSTLLELFGQIEREFENLYIENLELRREIDTLNERLAAEGQAIDGAELSKGQLKTKASHSTSQLSQKLKTTYKASTSKIVSSFKTTTSRAACQLVKEYIGHRDGIWDVSVAKTQPVVLGTASADHTALLWSIETGKCLVKYAGHVGSVNSIKFHPSEQLALTASGDQTAHIWRYAVQLPTPQPVADTSISGEDEVECSDKDEPDLDGDVSSDSPTIRVPLTSLKSHQGVVIASDWLVGGKQAVTASWDRTANLYDVETSELVHSLTGHDQELTHCCTHPTQRLVVTSSRDTTFRLWDFRDPSIHSVNVFQGHTDTVTSAVFTVGDNVVSGSDDRTVKVWDLKNMRSPIATIRTDSAINRINVCVGQKIIALPHDNRQVRLFDMSGVRLARLPRSSRQGHRRMVCCSAWSEDHPVCNLFTCGFDRQAIGWNINIPALLQEK

SEQ ID NO: 2381 - DNA, 1851 bp, Homo sapien
gaaaagccgccggtatttctccacctggctctcctctacctccaggcaggcgcacccgaggtccccctcccaccccaccttctgccctcccgcacacttggaccagtgctgttgacccggaagcggacatttctgcagctattctaagcacacgtcggcggagggagcgggacgtggccagcggtcagcggcgaaggaggcaggccctgcgcggggatcacggaagccctgtgattcaccatgaagttccagtacaaggaggtccatccctttgagtatcggaaaaaggaaggagaaaagatccggaagaaatatccggacagggtccccttgattgtagagaaggctccaaaagcaagggtgcctgatctggacaggaggaagtacctagtgccctccgaccttaccgatggccagttctaccttttaatccggaagagaatccacctgagacctgaggacgccttattcttctttgtcaacaacactatccctcccactagtgctaccatgggccaactatatgaggacagtcatgaggaagatgattttctgtatgtggcctacagtaatgagagtgtctatgggaaatgagtggttggaagcccagcagatggaagcacctggacttaggggtaggggaggggtgtgtgtgtgacttggggaaagagagggcggctcccaccgtgaggagacagaaggtgaagacatatagaaactttacaccgcacacaccgtcaacgcattttcacatgctcaactgatattttttgttgcttccttggcccagggagaaagcatgtcaggacagagctgttggattggctttgatagaggaatggggatgatgtaattttatggcattcctgagatttaatttttgtgcagtttcatagaaaggtcggtcaggaggtggacaagttggggtcagagatgatggcagtccagcagcaactccctgtgctcccttctctttgggcagagattctgtttttgacagttgcacaagacaggtagggaaaggggacttgtggtagtgggccatacctggggacgaaaagagacccactgtaattgatgcatcgtggcccccgatcttccgtatcccacacttcttttctcccatcccagttgcaatctcactcacaaacatcacagtaccaccccaggggcggcagtagacaccaacccagaaatttagacagggatctcttatctttggaaaataggggttaggcatgagggtggttatgattaagaagataattttgttgttaaatagcattaaactggaattgacagagtgagttgagcatctctgtctaacctgctctttctctctggtgctcctcatctcacccctaccttggaatttaataagcttcaggcatttccaattgcagactaaaaccacttctaccatctcctctagtattttccatgtatcaggacagagatgtcttatgtagggaaggggcaggtatgaagtgaggtagattatctatacctctcactcattcaggattctcgctcccatgctgctgtcccttcattctcacactcacaggaatgctatgtgatggccagctgcttcccttcttggttatccactgcagctgctagttagaaaggtttgcagggatgacttttagtaaatcatggggattttattgatttattatcacttataggattttgtggggtgggagtggggagcaggaattgcactcagacatgacatttcaattcatctctgcaaatgaaaagggttcttcctcttgggggaaatctgtgtgtcagttctgtcagctgcaagttcttgtgtaatgaagtcaatgctgtcaggccaag

SEQ ID NO: 2382 - protein, 117 aa, Homo sapien
MKFQYKEVHPFEYRKKEGEKIRKKYPDRVPLIVEKAPKARVPDLDRRKYLVPSDLTDGQFYLLIRKRIHLRPEDALFFFVNNTIPPTSATMGQLYEDSHEEDDFLYVAYSNESVYGK

SEQ ID NO: 2383 - DNA, 1953 bp, Homo sapien; identical to SEQ ID NO: 1563

SEQ ID NO: 2384 - protein, 342 aa, Homo sapien; identical to SEQ ID NO: 1564

SEQ ID NO: 2385 - DNA, 3445 bp, Homo sapien; identical to SEQ ID NO: 966

SEQ ID NO: 2386 - protein, 766 aa, Homo sapien; identical to SEQ ID NO: 967

SEQ ID NO: 2387 - DNA, 2862 bp, Homo sapien
cggagccctgcgagtaggcagcgttgggcccatgcaggacgcggagaacgtggcggtgcccgaggcggccgaggagcgcgccgagcccggccagcagcagccggccgccgagccgccgccagccgaggggctgctgcggcccgcggggcccggcgctccggaggccgcggggaccgaggcctccagtgaggaggtggggatcgcggaggccgggccggagcccgaggtgaggaccgagccggcggccgaggcagaggcggcctccggcccgtccgagtcgccctcgccgccggccgccgaggagctgcccgggtcgcatgctgagccccctgtcccggcacagggcgaggccccaggagagcaggctcgggacgagcgctccgacagccgggcccaggcggtgtccgaggacgcgggaggaaacgagggcagagcggccgaggccgaaccccgggcgctggagaatggcgacgcggacgagccctccttcagcgaccccgaggacttcgtggacgacgtgagcgaggaagaattactgggagatgtactcaaagatcggccccaggaagcagatggaatcgattcggtgattgtagtggacaatgtccctcaggtgggacccgaccgacttgagaaactcaaaaatgtcatccacaagatcttttccaagtttgggaaaatcacaaatgatttttatcctgaagaggatgggaagacaaaagggtatattttcctggagtacgcgtcccctgcccacgctgtggatgctgtgaagaacgccgacggctacaagcttgacaagcagcacacattccgggtcaacctctttacggattttgacaagtatatgacgatcagtgacgagtgggatattccagagaaacagcctttcaaagacctggggaacttacgttactggcttgaagaggcagaatgcagagatcagtacagtgtgatttttgagagtggagaccgcacttccatattctggaatgacgtaaaagaccctgtctcaattgaagaaagagcgagatggacagagacgtatgtgcgttggtctcctaagggcacctacctggctacctttcatcaaagaggcattgctctatgggggggagagaaattcaagcaaattcagagattcagccaccaaggggttcagcttattgacttctcaccttgtgaaaggtacctggtgacctttagccccctgatggacacgcaggatgaccctcaggccataatcatctgggacatccttacggggcacaagaagaggggttttcactgtgagagctcagcccattggcctatttttaagtggagccatgatggcaaattctttgccagaatgaccctggatacgcttagcatctatgaaactccttctatgggtcttttggacaagaagagtttgaagatctctgggataaaagacttttcttggtctcctggtggtaacataatcgccttctgggtgcctgaagacaaagatattccagccagggtaaccctgatgcagctccctaccaggcaagagatccgagtgaggaacctgttcaatgtggtggactgcaagctccattggcagaagaacggagactacttgtgtgtgaaagtagataggactccgaaaggcacccagggtgttgtcacaaattttgaaattttccgaatgagggagaaacaggtacctgtggatgtggtcgagatgaaagaaaccatcatagcctttgcctgggaaccaaatggaagtaagtttgctgtgctgcacggagaggctccgcggatatctgtgtctttctaccacgtcaaaaacaacgggaagattgaactcatcaagatgttcgacaagcagcaggcgaacaccatcttctggagcccccaaggacagttcgtggtgttggcgggcctgaggagtatgaacggtgccttagcgtttgtggacacttcggactgcacggtcatgaacatcgcagagcactacatggcttccgacgtcgaatgggatcctactgggcgctacgtcgtcacctctgtgtcctggtggagccataaggtggacaacgcgtactggctgtggactttccagggacgcctcctgcagaagaacaacaaggaccgcttctgccagctgctgtggcggccccggcctcccacactcctgagccaggaacagatcaagcaaattaaaaaggatctgaagaaatactctaagatctttgaacagaaggatcgtttgagtcagtccaaagcctcaaaggaattggtggagagaaggcgcaccatgatggaagatttccggaagtaccggaaaatggcccaggagctctatatggagcagaaaaacgagcgcctggagttgcgaggaggggtggacactgacgagctggacagcaacgtggacgactgggaagaggagaccattgagttcttcgtcactgaagaaatcattcccctcgggaatcaggagtgacctggagcactgtgcgcagccgtgtgtgctgtggagccgaggccgtcctgcaggaagccgcgtgactcccgcctcctccctgtgctctctggctctggactgtgactgcgcctggattctgccattgcgacacttagcgacgccactggcggcaccttctcctgcgcccagtgatgtttccacggtgcctgtacacagccgagcagcatttccgttgaaggacttgcatccccattgcgggcagtgctggacgtgtcccggagacccaccgggagggcgccgccatgccttgtacccccaccgtgcaggttgtggccggttttctccgcaggttgaacatggaaataaaagcaaacttgtatgaaaaaaaaaaaaaaaaaaaaaaa

SEQ ID NO: 2388 - protein, 814 aa, Homo sapien
MQDAENVAVPEAAEERAEPGQQQPAAEPPPAEGLLRPAGPGAPEAAGTEASSEEVGIAEAGPEPEVRTEPAAEAEAASGPSESPSPPAAEELPGSHAEPPVPAQGEAPGEQARDERSDSRAQAVSEDAGGNEGRAAEAEPRALENGDADEPSFSDPEDFVDDVSEEELLGDVLKDRPQEADGIDSVIVVDNVPQVGPDRLEKLKNVIHKIFSKFGKITNDFYPEEDGKTKGYIFLEYASPAHAVDAVKNADGYKLDKQHTFRVNLFTDFDKYMTISDEWDIPEKQPFKDLGNLRYWLEEAECRDQYSVIFESGDRTSIFWNDVKDPVSIEERARWTETYVRWSPKGTYLATFHQRGIALWGGEKFKQIQRFSHQGVQLIDFSPCERYLVTFSPLMDTQDDPQAIIIWDILTGHKKRGFHCESSAHWPIFKWSHDGKFFARMTLDTLSIYETPSMGLLDKKSLKISGIKDFSWSPGGNIIAFWVPEDKDIPARVTLMQLPTRQEIRVRNLFNVVDCKLHWQKNGDYLCVKVDRTPKGTQGVVTNFEIFRMREKQVPVDVVEMKETIIAFAWEPNGSKFAVLHGEAPRISVSFYHVKNNGKIELIKMFDKQQANTIFWSPQGQFVVLAGLRSMNGALAFVDTSDCTVMNIAEHYMASDVEWDPTGRYVVTSVSWWSHKVDNAYWLWTFQGRLLQKNNKDRFCQLLWRPRPPTLLSQEQIKQIKKDLKKYSKIFEQKDRLSQSKASKELVERRRTMMEDFRKYRKMAQELYMEQKNERLELRGGVDTDELDSNVDDWEEETIEFFVTEEIIPLGNQE

SEQ ID NO: 2389 - DNA, 1723 bp, Homo sapien; identical to SEQ ID NO: 2242

SEQ ID NO: 2390 - protein, 215 aa, Homo sapien
MNFLLSWVHWSLALLLYLHHAKWSQAAPMAEGGGQNHHEVVKFMDVYQRSYCHPIETLVDIFQEYPDEIEYIFKPSCVPLMRCGGCCNDEGLECVPTEESNITMQIMRIKPHQGQHIGEMSFLQHNKCECRPKKDRARQEKKSVRGKGKGQKRKRKKSRYKSWSVPCGPCSERRKHLFVQDPQTCKCSCKNTDSRCKARQLELNERTCRCDKPRR

SEQ ID NO: 2391 - DNA, 598 bp, Homo sapien
ctccttcttttccagccccggtaccggaccctgcagccgcagagatgttgatgcctaagaagaaccggattgccatttatgaactcctttttaaggagggagtcatggtggccaagaaggatgtccacatgcctaagcacccggagctggcagacaagaatgtgcccaaccttcatgtcatgaaggccatgcagtctctcaagtcccgaggctacgtgaaggaacagtttgcctggagacatttctactggtaccttaccaatgagggtatccagtatctccgtgattaccttcatctgcccccggagattgtgcctgccaccctacgccgtagccgtccagagactggcaggcctcggcctaaaggtctggagggtgagcgacctgcgagactcacaagaggggaagctgacagagatacctacagacggagtgctgtgccacctggtgccgacaagaaagccgaggctggggctgggtcagcaaccgaattccagtttagaggcggatttggtcgtggacgtggtcagccacctcagtaaaattggagaggattcttttgcattgaataaacttacagccaaaaaaccttaaaaaa

SEQ ID NO: 2392 - protein, 165 aa, Homo sapien
MLMPKKNRIAIYELLFKEGVMVAKKDVHMPKHPELADKNVPNLHVMKAMQSLKSRGYVKEQFAWRHFYWYLTNEGIQYLRDYLHLPPEIVPATLRRSRPETGRPRPKGLEGERPARLTRGEADRDTYRRSAVPPGADKKAEAGAGSATEFQFRGGFGRGRGQPPQ

SEQ ID NO: 2393 - DNA, 2848 bp, Homo sapien; identical to SEQ ID NO: 2325

SEQ ID NO: 2394 - protein, 576 aa, Homo sapien; identical to SEQ ID NO: 2326

SEQ ID NO: 2395 - DNA, 2044 bp, Homo sapien; identical to SEQ ID NO: 711

SEQ ID NO: 2396 - protein, 344 aa, Homo sapien; identical to SEQ ID NO: 712

SEQ ID NO: 2397 - DNA, 1865 bp, Homo sapien
gagtgcgcacgcatcctgcccgcggcgcgcgcgcaggtcggtgcgtctgtcgggggcgcgctcgggtacctgtaccccacgtagtcgccggttaccgatcggactaagttccagtggtgatttacaagtcaagttaaaatgtccccagaagtggccttgaaccgaatatctccaatgctctcccctttcatatctagcgtggtccggaatggaaaagtgggactggatgctacaaactgtttgaggataactgacttaaaatctggctgcacatcattgactcctgggcccaactgtgaccgatttaaactgcacataccatatgctggagagacattaaagtgggatatcattttcaatgcccaatacccagaactgcctcccgattttatctttggagaagatgctgaattcctgccagacccctcagctttgcagaatcttgcctcctggaatccttcaaatcctgaatgtctcttacttgtggtgaaggaacttgtgcaacaatatcaccaattccaatgtagccgcctccgggagagctcccgcctcatgtttgaataccagacattactggaggagccacagtatggagagaacatggaaatttatgctgggaaaaaaaacaactggactggtgaattttcagctcgtttccttttgaagctgcccgtagatttcagcaatatccccacataccttctcaaggatgtaaatgaagaccctggagaagatgtggccctcctctctgttagttttgaggacactgaagccacccaggtgtaccccaagctgtacttgtcacctcgaattgagcatgcacttggaggctcctcagctcttcatatcccagcttttccaggaggaggatgtctcattgattacgttcctcaagtatgccacctgctcaccaacaaggtgcagtacgtgattcaagggtatcacaaaagaagagagtatattgctgcttttctcagtcactttggcacaggtgtcgtggaatatgatgcagaaggctttacaaaactcactctgctgctgatgtggaaagatttttgttttcttgtacacattgacctgcctctgtttttccctcgagaccagccaactctcacatttcagtccgtttatcactttaccaacagtggacagctttactcccaggcccaaaaaaattatccgtacagccccagatgggatggaaatgaaatggccaaaagagcaaagggatgccaggggagcagagatgcctgcagcccgtgggagcaagtcctggcctttgcagttgcaaaaactggctgcaagctgctccagccccagaggaactggccaagctccagagggcctccttggagggcctcagagggagagagaactgctcagtaattttgatcactttgggcttatttcaaaacctttgtccctcagttccaggaggcagcatttgccaatggaaagctctaggaaacaccagtcttgagaggtggccagccagactgcctgtccacatgcgtgtcagcacatacagccgcttcctggaagccgcctggaatgtcttcacggcagcgttttgctcacacagcagcttttgcacgccccaggcagccccgactgctgaaatccaacttgagctggctggtggtccctggatcctagagcccttcacttcgggttactccctctttcttgcctctatttcttagttggaagaaataaactcacaaattatggtgcagtaattttccggggaaagtaaagcctcaggaatgcccacgcctttcttccaaagcctttgtctctgagacctcttaagttctaagattaaatgcccctcgctgtttctcctctgaaaaaaaaaaaaaaaa

SEQ ID NO: 2398 - protein, 415 aa, Homo sapien
MSPEVALNRISPMLSPFISSVVRNGKVGLDATNCLRITDLKSGCTSLTPGPNCDRFKLHIPYAGETLKWDIIFNAQYPELPPDFIFGEDAEFLPDPSALQNLASWNPSNPECLLLVVKELVQQYHQFQCSRLRESSRLMFEYQTLLEEPQYGENMEIYAGKKNNWTGEFSARFLLKLPVDFSNIPTYLLKDVNEDPGEDVALLSVSFEDTEATQVYPKLYLSPRIEHALGGSSALHIPAFPGGGCLIDYVPQVCHLLTNKVQYVIQGYHKRREYIAAFLSHFGTGVVEYDAEGFTKLTLLLMWKDFCFLVHIDLPLFFPRDQPTLTFQSVYHFTNSGQLYSQAQKNYPYSPRWDGNEMAKRAKGCQGSRDACSPWEQVLAFAVAKTGCKLLQPQRNWPSSRGPPWRASEGERTAQ

SEQ ID NO: 2399 - DNA, 3259 bp, Homo sapien
gggccgggtccgggagccccagggcagccgccccgccgagtcgcagtgtcgggggctgcggggtgtctcggggccctggggtgagtgcggggcgcgggccgaggtttgcagggccctgtgagcgcgcccaggcacgtgttgcttcgggacgggccagccggtgggtgaaccctgccagccacgcgtggggcgggcccctggcacatctccagaccattgtctcctgtgccagaagctttgtaggtgcaacttccccttggagcagctgtgggtgcggatccagcggacgaatcccgaggcgtctcagagagagcctggacagccgctggagcctttcccgagtgggtccttccaacaccgctacagcaggaaagccatccccctagggtcctgtccatcggaaactcctgtcctggggagtctgcctgcctggcctcaggacacaggccaactaagctggccccgaaatccagaatgcatccagagggaaggcacagtgtcaccttcgtcccctccggagctgcacgtggcctgagcaggatggtgccctccagcccagcggtggagaagcaggtgcccgtggaacctgggcctgaccccgagctccggtcctggcggcgcctcgtgtgctacctttgcttctacggcttcatggcgcagatacggccaggggagagcttcatcaccccctacctcctggggcccgacaagaacttcacgcgggagcaggtcacgaacgagatcacgccggtgctgtcgtactcctacctggccgtgctggtgccggtgttcctgctcaccgactacctgcgctacacgccggtgctgctgctgcaggggctcagcttcgtgtcggtgtggctgctgctgctgctgggccactcggtggcgcacatgcagctcatggagctcttctacagcgtcaccatggccgcgcgcatcgcctattcctcctacatcttctctctcgtgcggcccgcgcgctaccagcgtgtggccggctactcgcgcgctgcggtgctgctgggcgtgttcaccagctccgtgctgggccagctgctggtcactgtgggccgagtctccttctccacgctcaactacatctcgctggccttcctcaccttcagcgtggtcctcgccctcttcctgaagcgccccaagcgcagcctcttcttcaaccgcgacgaccgggggcggtgcgaaacctcggcttcggagctggagcgcatgaatcccggcccaggcgggaagctgggacacgccctgcgggtggcctgtggggactcagtgctggcgcggatgctgcgggagctgggggacagcctgcggcggccgcagctgcgcctgtggtccctctggtgggtcttcaactcggccggctactacctggtggtctactacgtgcacatcctgtggaacgaggtggaccccaccaccaacagtgcgcgggtctacaacggcgcggcagatgctgcctccacgctgctgggcgccatcacgtccttcgccgcgggcttcgtgaagatccgctgggcgcgctggtccaagctgctcatcgcgggcgtcacggccacgcaggcggggctggtcttccttctggcgcacacgcgccacccgagcagcatctggctgtgctatgcggccttcgtgctgttccgcggctcctaccagttcctcgtgcccatcgccacctttcagattgcatcttctctgtctaaagagctctgtgccctggtcttcggggtcaacacgttctttgccaccatcgtcaagaccatcatcactttcattgtctcggacgtgcggggcctgggcctcccggtccgcaagcagttccagttatactccgtgtacttcctgatcctgtccatcatctacttcttgggggccatgctggatggcctgcggcactgccagcggggccaccacccgcggcagcccccggcccagggcctgaggagtgccgcggaggagaaggcagcacaggcactgagcgtgcaggacaagggcctcggaggcctgcagccagcccagagcccgccgctttccccagaagacagcctgggggctgtggggccagcctccctggagcagagacagagcgacccatacctggcccaggccccggccccgcaggcagctgaattcctgagcccagtgacaaccccttccccctgcactctgtcgtccgcccaagcctcaggccctgaggctgcagatgagacttgtccccagctggctgtccatcctcctggtgtcagcaagctgggtttgcagtgtcttccaagcgacggtgttcagaatgtgaaccagtgactctcgggcgcccctgtggtaactttgcaggcggccctcagtgcatccccacgacccctgcctcgagggccgcctgccttagcaatgggggcctccgcttatcctgctagcaggccccctaggattccccctgccctgtgccgcactctggcggtggccacagcgtgctggcgacactcagggcagctgcctggccatgctgtccctgcactgtgccccgcgggctttgttgctggaagaggtgggtggtgggcttctgcgtccaccaggcctcactggctcatgccccttggggggcttgagacaaatcctttctgccccccagggctagtgaagtggcctcttggataccagctcaggggacactggccccacaggagttgtgagccctctagggcagggtgggagccgggaccctcaggtgtagctgagctgtgacattgctggtcatccttggtgctcttgcttttttgaaagatgctttttttttttttaactgacgtagaatgaagaactgcatgtggcttctctgtctctgtggaaaagccatctcaggttggcggcagacacattgtcatcagaggggagcagcggctctggtcctcggagctggttcctctctcccaccctaagggcagccctccatggtcctgtctgtccttctgaagtgtgtccatcctgacctgcgggtcctcagctgctcccacacttgtgccagcccggaggggactggtcccggtcaccgcggacgtgctggccttggtatgtgccaggcttgcctgggctgggcagccttgggggggctgcctttgtggtgggcgctggggaagtacgtcccagcggcctcagggtctaaggagcgctagtgccttgcccacaggtgcgggaccatctgatgtgatgtgaatactcttcccacatacattaaacacacttaagtgag

SEQ ID NO: 2400 - protein, 591 aa, Homo sapien
MVPSSPAVEKQVPVEPGPDPELRSWRRLVCYLCFYGFMAQIRPGESFITPYLLGPDKNFTREQVTNEITPVLSYSYLAVLVPVFLLTDYLRYTPVLLLQGLSFVSVWLLLLLGHSVAHMQLMELFYSVTMAARIAYSSYIFSLVRPARYQRVAGYSRAAVLLGVFTSSVLGQLLVTVGRVSFSTLNYISLAFLTFSVVLALFLKRPKRSLFFNRDDRGRCETSASELERMNPGPGGKLGHALRVACGDSVLARMLRELGDSLRRPQLRLWSLWWVFNSAGYYLVVYYVHILWNEVDPTTNSARVYNGAADAASTLLGAITSFAAGFVKIRWARWSKLLIAGVTATQAGLVFLLAHTRHPSSIWLCYAAFVLFRGSYQFLVPIATFQIASSLSKELCALVFGVNTFFATIVKTIITFIVSDVRGLGLPVRKQFQLYSVYFLILSIIYFLGAMLDGLRHCQRGHHPRQPPAQGLRSAAEEKAAQALSVQDKGLGGLQPAQSPPLSPEDSLGAVGPASLEQRQSDPYLAQAPAPQAAEFLSPVTTPSPCTLSSAQASGPEAADETCPQLAVHPPGVSKLGLQCLPSDGVQNVNQ

SEQ ID NO: 2401 - DNA, 504 bp, Homo sapien
cacccacccaggcccaggctccttcccctccatcatccccttaccagcacctagaaccatccagggctgaaaagtcccctccaaaccacgtgatgaggaacttgaggcaagtcaccagcccctgatcatttcgcctaaaagagcaaggactagagttcctgacctccaggccagtccctgatccctgacctaatgttatcgcggaatgatgacccagggctcctcagagcaggaactccactatgcatctctgcagaggctgccagtgcccagcagtgagggacctgacctcaggggcagagacaagagaggcaccaaggaggatccaagagctgactatgcctgcattgctgagaacaaacccacctgagcaccccagacaccttcctcaacccaggcgggtggacagggtccccctgtggtccagccagtaaaaaccatggtccccccacttctgtgtctcagtcctctcagtccatctcgagcctccgttcaaattgatca

SEQ ID NO: 2402 - protein, 53 aa, Homo sapien
MTQGSSEQELHYASLQRLPVPSSEGPDLRGRDKRGTKEDPRADYACIAENKPT

SEQ ID NO: 2403 - DNA, 1116 bp, Homo sapien
ccacaagctggccccttggcctcctagagaccctgacatctcctccagcagcatctgtcctctctcctcagggaggcaagcatttgatgctcgaggtccctggcagttgtggtccttggcaagtgatgtgtgagtcccgtgtgtcataggaagctccccatccccatctggtgaccaaaggcctggctacaagtagtgagtccttcctcctccacccagacctcactgctcagatccccttcgccaactgggacatcttccgacatggcctggatgctgttgctcatcttgatcatggtccatccaggatcctgtgctctctgggtgtcccagccccctgagattcgtaccctggaaggatcctctgccttcctgccctgctccttcaatgccagccaagggagactggccattggctccgtcacgtggttccgagatgaggtggttccagggaaggaggtgaggaatggaaccccagagttcaggggccgcctggccccacttgcttcttcccgtttcctccatgaccaccaggctgagctgcacatccgggacgtgcgaggccatgacgccagcatctacgtgtgcagagtggaggtgctgggccttggtgtcgggacagggaatgggactcggctggtggtggagaaagaacatcctcagctaggggctggtacagtcctcctccttcgggctggattctatgctgtcagctttctctctgtggccgtgggcagcaccgtctattaccagggcaaatatgccaaatctactctctccggattcccccaactctgaactttcccttccaccaggtctgacctggaaaggtccaagaaggcagctgccggctgtggtcccagcgcccctcccaccaccatgtgggagctcagcacatctgcttcccccagtcccaggaggctgagcctgattgtcctgagaaatgggaaggatcagatatgactcctccttggcaactgccctttcctgccaggcccacacataccctcttctggctgttaggggagcttgggtccctgaacactgtcattcacccaataaattactatttgaccccagagtgggtggaagggtgaaaaaaaaaaaaaaaaaaaa

SEQ ID NO: 2404 - protein, 177 aa, Homo sapien
MAWMLLLILIMVHPGSCALWVSQPPEIRTLEGSSAFLPCSFNASQGRLAIGSVTWFRDEVVPGKEVRNGTPEFRGRLAPLASSRFLHDHQAELHIRDVRGHDASIYVCRVEVLGLGVGTGNGTRLVVEKEHPQLGAGTVLLLRAGFYAVSFLSVAVGSTVYYQGKYAKSTLSGFPQL

SEQ ID NO: 2405 - DNA, 1013 bp, Homo sapien
gcttccaaacccagggcttgcgcttgcctttgcctcttccaccgcgcagggaccatgtcggcggagaccgcgagcggccccacagaggaccaggtggaaatcctggagtacaacttcaacaaggtcgacaagcacccggattccaccacgctgtgcctcatcgcggccgaggcaggcctttccgaggaggagacccagaaatggtttaagcagcgcctggcaaagtggcggcgctcagaaggcctgccctcagagtgcagatccgtcacagactaaggagatggcaggcattgacagcttcactccatgaaggccatctctgtttctctcctccgcttaaccaagctgttgtggtttttcagcatagtgttgtatgttccattgctagctgtcctgctgtttaacacagtgttgtattttttttctaaatgtacataattagaaaagaaaataacaataggaagctatgtgtatcttctgtgtaaagcagtggcttcactggaaaaatggtgtggctagcatttccctttgagtcatgatgacagatggtgtgaaaaccatctaagtttgcttttgaccatcacctcccagtagcaatttgctttcataatccatttagcaatccaggcctctgttgaaaagataatatgagggagaagggaacacatttccttctgaacttacttccctaagtcactttccttatgtatcatctaatacaatgatggttgagtgaaaatacagaaggggtgtttgagtattcagatttcataaaacacttccttggaatatagctgcattaacttggaaagaagcctgttgggccagaagacagaaactccaactggcaaaaaagcaagcatctaagaaaaaaaaccaccaaagttcttgaatttactatatttaaatgcattggttaagtttattttgctaaataaagtgaactgctttttgtctctaaaatgatattctaaataaaaccttaactttttgttgaaaaaaaaaaaaaaaaa

SEQ ID NO: 2406 - protein, 73 aa, Homo sapien
MSAETASGPTEDQVEILEYNFNKVDKHPDSTTLCLIAAEAGLSEEETQKWFKQRLAKWRRSEGLPSECRSVTD

SEQ ID NO: 2407 - DNA, 2527 bp, Homo sapien
tccgggcctggcctgtacggtcgccgccgttccctggaagtagcaacttccctaccccaccccagtcctggtccccgtccagccgctgacgtgaagatgagcagctcagaggaggtgtcctggatttcctggttctgtgggctccgtggcaatgaattcttctgtgaagtggatgaagactacatccaggacaaatttaatcttactggactcaatgagcaggtccctcactaccgacaagctctagacatgatcttggacctggagcctgatgaagaactggaagacaaccccaaccagagtgacctgattgagcaggcagccgagatgctttatggattgatccacgcccgctacatccttaccaaccgtggcatcgcccagatgttggaaaagtaccagcaaggagactttggttactgtcctcgtgtgtactgtgagaaccagccaatgcttcccattggcctttcagacatcccaggtgaagccatggtgaagctctactgccccaagtgcatggatgtgtacacacccaagtcatcaagacaccatcacacggatggcgcctacttcggcactggtttccctcacatgctcttcatggtgcatcccgagtaccggcccaagagacctgccaaccagtttgtgcccaggctctacggtttcaagatccatgcgatggcctaccagctgcagctccaagccgccagcaacttcaagagcccagtcaagacgattcgctgattccctcccccacctgtcctgcagtctttgacttttcctttcttttttgccaccctttcaggaaccctgtatggtttttagtttaaattaaaggagtcgttattgtggtgggaatatgaaataaagtagaagaaaaggccatgaaaaaaaaaaaaaaaaaaaaaaaaaaggtttgtgttctcgacgccttggtagttggcataggctaaagaaaagggatctcagccccgaggaagggtcaccctcctagagatagctactaccccgtctcaggagaccctggtatttctagagcacgctttgctttcaccaaacccaaggaggtgacaggaggagcccccgcacaggacctaagaatgctgtgaccagaagatgggatcgcggaacagcagcagtgcaggatccggtccggagacccctccgagggcttgccccgaagaggggctggcctgcgtcggagtgaggaagaggaagaagaggatgaagatgtggatctggcccaggtactggcctatctcctccgcagaggccaagtgaggttggtgcagggaggaggtgcagcaaatttacaattcattcaggccctcttggactcagaggaagagaatgacagagcttgggatggtcgtcttggggatcgatacaacccacctgtggatgctacccctgacacccgggagctggaattcctggagttgtgaacgccgcggactccggagccgcacaaaccagggctcgccatgaagccaggattcagtcccccgtgggggtggctttggcggccgagggggctttggtgaccgtggtggtcgtggaggccgagggggctttggcgggggccgaggtcgaggcggaggctttagaggtcgtggacgaggaggaggtggaggcggcggcggcggtggaggaggaggaagaggtggaggcttccattctggtggcaaccggggtcgtggtcggggaggaaaaagaggaaaccagtcggggaagaatgtgatggtggagccgcatcggactgagggtgtcttcatttgtcgaggaaaggagatgcactggtcaccaagaacctggtcctgggaatcaagttatggagagaagagagtctcgattcggaaggagatgacaaaattgagtaccgagcctggaaccccttccgctccaagctagcagcagcaatcctgggtggtgtggaccagatccacatcaaaccgggggctaaggttctctacctcggggctgcctcgggcaccacggtctcccatgtctctgacatcgttggtccggatggtctagtctatgcagtcgagtttccccaccgctctggccgtgacctcattaacttggccaagaagaggaccaacatcattcctgtgatcgaggatgctcgacacccacacaaataccgcatgctcatcgcaatggtggatgtgatctttgctgatgtggcccagccagaccagacccggaatgtggccctgaaagcccacaccttcctgcgctaatggaggacactttgtgatttccattaaggccaactgcattgactccacagcctagcggtcaggccgtgtttgcctccgaagtgaaaaagatgcaacaggagaacatgaagccgcaggagcagttgacccttgagccatatgaaagagaccatgccgtggtcgtgggagtgtacaggccaccccccaaggtgaagaactgaagttcagcgctgtcaggattgcgagagatgtgtgttgatactgttgcccgtgtgtttttctaattaaaagactcctccgtc

SEQ ID NO: 2408 - protein, 215 aa, Homo sapien
MSSSEEVSWISWFCGLRGNEFFCEVDEDYIQDKFNLTGLNEQVPHYRQALDMILDLEPDEELEDNPNQSDLIEQAAEMLYGLIHARYILTNRGIAQMLEKYQQGDFGYCPRVYCENQPMLPIGLSDIPGEAMVKLYCPKCMDVYTPKSSRHHHTDGAYFGTGFPHMLFMVHPEYRPKRPANQFVPRLYGFKIHAMAYQLQLQAASNFKSPVKTIR

SEQ ID NO: 2409 - DNA, 436 bp, Homo sapien
gttcctcaccatggactggacctggaggatcctcttcttggtggcagcagccacaggagcccactcccaggtgcagctggtgcaatctggggctgaggtgaagaagcctggggcctcagtgaaggtctcctgcgaggcttctggatacaccttcaccggccactatatgcactgggtgcgacaggcccctggacaagggcttgagtggatgggatggatcaaccctaacagtggtggcacaaactatgcagagaagtttcagggcagggtcaccatcaccagggacacgtccatcaacacagcctacatggagctgagcaggctgagatctgacgacacggccgtgtattactgtgcgagagcctcatattgtggttatgactgctattacttctttgactactggggccagggaaccctggtcaccgtctcctca

SEQ ID NO: 2410 - protein, 141 aa, Homo sapien
MDWTWRILFLVAAATGAHSQVQLVQSGAEVKKPGASVKVSCEASGYTFTGHYMHWVRQAPGQGLEWMGWINPNSGGTNYAEKFQGRVTITRDTSINTAYMELSRLRSDDTAVYYCARASYCGYDCYYFFDYWGQGTLVTVS

SEQ ID NO: 2411 - DNA, 365 bp, Homo sapien
taaaaggtgtccagtgtgaggtgcagttggtggagtccgggggaggcttagttcagcctggggggtccctgagactctcctgtgcagcctctggattcaccttcagtacctacaggatgcactgggtccgccaagctccagggaaggggctggtgtgggtctcacgtattaatagtgatgggagtagcacagactacgcggactccgtggagggccgattcaccatctccagagacaacgccaagaacacgctgtatctgcaaatgaacagtctgagagccgaagacacggctgtgtattactgtgcaagatccaattactactttgactcctggggccagggaaccctggtcaccgtctcctca

SEQ ID NO: 2412 - DNA, 993 bp, Homo sapien
agaccttcgggtagcaactgtcaccttgatgctggcgatcctgagctcctcactggctgagggcagagactctcccgaggatttcgtgtaccagtttaagggcctgtgctacttcaccaacgggacggagcgcgtgcggggtgtgaccagacacatctataaccgagaggagtacgtgcgcttcgacagcgacgtgggggtgtaccgggcagtgacgccgcaggggcggcctgttgccgagtactggaacagccagaaggaagtcctagagggggcccgggcgtcggtggacagggtgtgcagacacaactacgaggtggcgtaccgcgggatcctgcagaggagagtggagcccacagtgaccatctccccatccaggacagaggccctcaaccaccacaacctgctgatctgctcggtgacagatttctatccaagccagatcaaagtccggtggtttcggaatgatcaggaggagacagccggcgttgtgtccacccccctcattaggaacggtgactggaccttccagatcctggtgatgctggaaatgactccccagcgtggagatgtctacacctgccacgtggagcaccccagcctccagagccccatcaccgtggagtggcgggctcagtctgaatctgcccagagcaagatgctgagtggcgttggaggcttcgtgctggggctgatcttccttgggcttggccttatcatccgtcaaaggagtcggaaagggcttctgcactgactcctgagactgttttaactaagactggttatcactcttctgtgatgcctgcttgtccctgcccagaattcccagctgcctgtgtcagcttgtccccctgagatcaaagtcctacagtggctgtcacgcaaccaccaggtcatctcctttcatccccaccccaaggcgctggctgtgactctgcttcctgcactgacccagagccactgcctgtacatggccagctgcgtctactcagg

SEQ ID NO: 2413 - DNA, 4788 bp, Homo sapien; identical to SEQ ID NO: 469

SEQ ID NO: 2414 - protein, 777 aa, Homo sapien; identical to SEQ ID NO: 470

SEQ ID NO: 2415 - DNA, 4152 bp, Homo sapien
cccaggccggctctggcctcctgacccagacagcgcagggcgcgagggatcgcgcggccgagcccgggtcgcgccgctcccagcatcggggccgctagccaagagttcgaggccttcccgatccggatgtgatgaaaaagagcaacagagggagaagtgtttcaggattgtaggagtggaagaggggaaagagaggcagagagggggaaggccccctcgcaggggagccggctggagtgagctggctggaaagagggggcggagtgcgcggagtcagagccgccaccgctgccgcagttgccgccactgcggcgtctgggctgagccggagggaggcgggaggacgcgcaggggcggccgccgccgtcgtcaggccaccggggcgaaaatgcggccgctgccggaggctcgctaactttccggggcggaagaggaggaggaggaggaggaaggggcttggagcgactacggggggatgcggagaagcagtcagttccctgcacccagcacctcacagcccttcctccgtgcgccctgccgggcggcgagctaggcggcagcggcgcggcgcgggctcggcggagcggcccatgtccggcgcgggcgaagccctcgctcccgggcccgtggggccgcagcgcgtggccgaggcgggcggcggccagctgggctccacagcccagggaaaatgtgataaagacaatactgagaaagatataactcaagctaccaatagccacttcacacatggagagatgcaagaccagtccatttggggaaatccttcggatggtgaactcattagaacccaacctcagcgcttgcctcagcttcagacttcagcacaggtgccaagtggtgaggaaataggcaagataaagaacggccacacaggtctgagcaatggaaatggaattcaccacggggccaaacacggatccgcagataatcgcaaactttcagcacctgtttctcaaaaaatgcatagaaaaattcagtccagcttgtctgtaaacagcgatatcagtaagaagagcaaagtaaatgctgtcttttcccaaaagacaggctcttcacctgaagattgttgtgtccactgtatcctggcttgcttgttctgcgaattcctgaccctttgcaacattgtcctgggacaagcgtcatgtggcatctgcacctcagaagcctgctgctgttgctgtggtgacgagatgggggatgattgtaactgcccttgtgatatggactgtggcatcatggatgcctgttgtgaatcatcagactgcttggaaatctgtatggaatgctgtggaatttgttttccttcataaatatttatcttttgtttgtgttaaaactggagagtgtttaaaaatttccttttggggggaagaaaagcacattgtaagattctcatgaaacaacatggaatttgcactgttaactcattattgtaagtaatctctgaaagcctttttactttaaccaaatctacatggtttaatatgtgaaattttaactactttaactagttttataaatttcttaatatgttacaataacttagggacattttgacaccccccttcccaaatgttaaatgccttctcctttttaccgatatttctgtttcttttaaccgttctcaggagcactttgctccaaatatattatttttcagtgtgtatttaaacgaggcagtttattttgatatgtatctattcatgattgaaaggaagcagtcttggccaggcacggtggcttacacctgtaaccctggcattttgggaggccaaggtgggcagattgcctgagctcaggagttcgagaccagccagggcaacatggtgaaaccccatctctactaaaatacaaaaagttagctgggcttggcggtgtgcgcctgtagtcccagctactcaggaggctgaggcaggagaattgcttgaacccgagaggcggaagttgcagtgagccgagattgtgccactgaactccaacctgcactccagcctgggcaacagagcgagactccatctctaaataaataaataaataaataaataaataaataaataaataaataaacaaaccagtctttattttaaaagaaactttaggaaacaaacccacataatagttgggaaccagtgttgatctctctcccttaccttctccacttgttcaacagactctgaatgccgactgtgtggactctcttcctcagactgtggggacagatacaattccactcctgtccacaggaacatgagatttagcagactaaggagatctgtaaagaatgaaccataccacaaggcatactgaagtgaggattataagagaaataaactcaaaatgctgttggaatatgcagagaattgctaccagaatattcagtaaggtttcagggagaatgtggcatttgaggactctcttagaatgagtgattcacctgctatttaaatgaattatttagatttttgacaaagatttaggtggacaccctaaactgtgtgtgcctttaaccagttaaaagaacagtgccttcagcatacttttttattagttgtaggaatacagctttttgaaaaagctataaagtttaaattaactaaaaatatgcattttcttacacataatttaaatgttatcatacttttttgatgaaaacataatgccttagtaaaatagctctatttaataaagaagattgagtactctgacacatttcatttaaattaggaaatttttaatattaaaatcccagtgttctgagttattgaaaggctttcttttattttgagagctttaggtctttttgggatgagaacattttagttgtttagtttgtttcttaagcagtgctattttttgtaaacacagataaatggaaaccattcttttcaatgcagaagaaatctagatatcccctactgtgaccaaatttctgtattacgattttatgttaaattaaactaatatggcaggttataatgatccttaagtgtaaagaaatcagtcaattacaagagtaattgtatagttattgagacctatagtgtgtggcttagatgaaagggagagtaaattttcataccatgctctctcctactcagtttgatctctctaaaattgtagtttggtttgatttaatataattcttagtagaaattttgaaagtatgctttgggattaataattatttttaatttttctggctgaatatcaaattgatagtaacaacagaagcataattttaggaaggctttcgcaaacctagccttttaagagaggtttttaacctgaagcatgagaatatatcacctgtggtttttcctttgagatgaaacgtagtttctagttatatcattacttaaagggcttaaaaagaaaaaacttagcaaacttttgaatctttcttttattgctatttacacatacatacacacatacaaaacctttaaattttgggatctgaatataattctggtaaacagctgtcttcatttttctcctctaaagaacttaattcatttgttacataaaatataaggaaatctttatactattttacagtaaccacaatctaaatatttacatatacccaaaattaacttatgctcatatattaggatgtgagaatatcatctgtttatggacacatgaaacctcctaatgacctggaattgttagaatatttgactttttatatgcaaagtttttcaaccaagtggtttgtctaatatttaaacatgtactggcacaatttgtgatgaaaatattagcacatttgcaataatgtttctccataacagagaatgttaatggataccagaattttatttttgtatttatgttcatagtacttttcctcttgtctactccagacagttattccataaagcatttgtataattaaaaggaaaacagaaaaaggaaaagtaggcaaatgtgaaaatagtttcaatatatcttatgatttcttaatgtaaaatgttttgttgaagtatatggctatcatgactaagtgctagaatttatagttacaggcggtgtccttttaaatgtggaaaggcttttaaaatattttaaaactggacctgtattatcctgaatacactattttgaaaatttttaagaaaaaaaaaa

SEQ ID NO: 2416 - protein, 355 aa, Homo sapien
VRGVRAATAAAVAATAASGLSRREAGGRAGAAAAVVRPPGRKCGRCRRLANFPGRKRRRRRRKGLGATTGGCGEAVSSLHPAPHSPSSVRPAGRRARRQRRGAGSAERPMSGAGEALAPGPVGPQRVAEAGGGQLGSTAQGKCDKDNTEKDITQATNSHFTHGEMQDQSIWGNPSDGELIRTQPQRLPQLQTSAQVPSGEEIGKIKNGHTGLSNGNGIHHGAKHGSADNRKLSAPVSQKMHRKIQSSLSVNSDISKKSKVNAVFSQKTGSSPEDCCVHCILACLFCEFLTLCNIVLGQASCGICTSEACCCCCGDEMGDDCNCPCDMDCGIMDACCESSDCLEICMECCGICFPS

SEQ ID NO: 2417 - DNA, 2059 bp, Homo sapien
ccgcaggcgctcggggttggagccagcgaccgtcggtagcagcatggctctcctctttctcctaccccttgtcatgcagggtgtgagcagggctgagatgggcaccgcggatctggggccgtcctcagtgcctacaccaactaatgttacaattgaatcctataacatgaaccctatcgtatattgggagtaccagatcatgccacaggtccctgtttttaccgtagaggtaaagaactatggtgttaagaattcagaatggattgatgcctgcatcaatatttctcatcattattgtaatatttctgatcatgttggtgatccatcaaattctctttgggtcagagttaaagccagggttggacaaaaagaatctgcctatgcaaagtcagaagaatttgctgtatgccgagatggaaaaattggaccacctaaactggatatcagaaaggaggagaagcaaatcatgattgacatatttcacccttcagtttttgtaaatggagacgagcaggaagtcgattatgatcccgaaactacctgttacattagggtgtacaatgtgtatgtgagaatgaacggaagtgagatccagtataaaatactcacgcagaaggaagatgattgtgacgagattcagtgccagttagcgattccagtatcctcactgaattctcagtactgtgtttcagcagaaggagtcttacatgtgtggggtgttacaactgaaaagtcaaaagaagtttgtattaccattttcaatagcagtataaaaggttctctttggattccagttgttgctgctttactactctttctagtgcttagcctggtattcatctgtttttatattaagaaaattaatccattgaaggaaaaaagcataatattacccaagtccttgatctctgtggtaagaagtgctactttagagacaaaacctgaatcaaaatatgtatcactcatcacgtcataccagccattttccttagaaaaggaggtggtctgtgaagagccgttgtctccagcaacagttccaggcatgcataccgaagacaatccaggaaaagtggaacatacagaagaactttctagtataacagaagtggtgactactgaagaaaatattcctgacgtggtcccgggcagccatctgactccaatagagagagagagttcttcacctttaagtagtaaccagtctgaacctggcagcatcgctttaaactcgtatcactccagaaattgttctgagagtgatcactccagaaatggttttgatactgattccagctgtctggaatcacatagctccttatctgactcagaatttcccccaaataataaaggtgaaataaaaacagaaggacaagagctcataaccgtaataaaagcccccacctcctttggttatgataaaccacatgtgctagtggatctacttgtggatgatagcggtaaagagtccttgattggttatagaccaacagaagattccaaagaattttcatgagatcagctaagttgcaccaactttgaagtctgattttcctggacagttttctgctttaatttcatgaaaagattatgatctcagaaattgtatcttagttggtatcaaccaaatggagtgacttagtgtacatgaaagcgtaaagaggatgtgtggcattttcacttttggcttgtaaagtacagacttttttttttttttaaacaaaaaaagcattgtaacttatgaacctttacatccagataggttaccagtaacggaacatatccagtactcctggttcctaggtgagcaggtgatgccccagggacctttgtagccacttcactttttttcttttctctgccttggtatagcatatgtgttttgtaagtttatgcatacagtaattttaagtaatttcagaagaaattctcgaagcttttcaaaattggacttaaaatctaattcaaactaatagaattaatggaatatgtaaatagaaacgtgtatattttttatgaaacattacagttagagatttttaaataaagaattttaaaactc

SEQ ID NO: 2418 - protein, 489 aa, Homo sapien
MALLFLLPLVMQGVSRAEMGTADLGPSSVPTPTNVTIESYNMNPIVYWEYQIMPQVPVFTVEVKNYGVKNSEWIDACINISHHYCNISDHVGDPSNSLWVRVKARVGQKESAYAKSEEFAVCRDGKIGPPKLDIRKEEKQIMIDIFHPSVFVNGDEQEVDYDPETTCYIRVYNVYVRMNGSEIQYKILTQKEDDCDEIQCQLAIPVSSLNSQYCVSAEGVLHVWGVTTEKSKEVCITIFNSSIKGSLWIPVVAALLLFLVLSLVFICFYIKKINPLKEKSIILPKSLISVVRSATLETKPESKYVSLITSYQPFSLEKEVVCEEPLSPATVPGMHTEDNPGKVEHTEELSSITEVVTTEENIPDVVPGSHLTPIERESSSPLSSNQSEPGSIALNSYHSRNCSESDHSRNGFDTDSSCLESHSSLSDSEFPPNNKGEIKTEGQELITVIKAPTSFGYDKPHVLVDLLVDDSGKESLIGYRPTEDSKEFS

SEQ ID NO: 2419 - DNA, 3300 bp, Homo sapien
ggggagaatctggtggatgctggaccttgctgctgctgctactgctgtttccaggggctgcagagcatggactgttaaatcttgcacttcttctgagtgagctgaattcttgccgccaggatggggaaacagaacagcaagctgcgcccggaggtcatgcaggacttgctggaaagcacagactttacagagcatgagatccaggaatggtataaaggcttcttgagagactgccccagtggacatttgtcaatggaagagtttaagaaaatatatgggaactttttcccttatggggatgcttccaaatttgcagagcatgtcttccgcaccttcgatgcaaatggagatgggacaatagactttagagaattcatcatcgccttgagtgtaacttcgagggggaagctggagcagaagctgaaatgggccttcagcatgtacgacctggacggaaatggctatatcagcaaggcagagatgctagtgatcgtgcaggcaatctataagatggtttcctctgtaatgaaaatgcctgaagatgagtcaaccccagagaaaagaacagaaaagatcttccgccagatggacaccaatagagacggaaaactctccctggaagagttcatccgaggagccaaaagcgacccgtccattgtgcgcctcctgcagtgcgacccgagcagtgccggccagttctgagccctgcgcccaccaatcgaattgtagagctgcttgtgttcccttttgattcttctttttaacaatttttttttttttttgccaaacaatatcaatggtgatgccgtcccctgtgcggtctgatgcgccttcctccgtgacgccttcagcctcttttgtcgtggatgcttcgtgggaatgcccagagccccagtgtgcttgtggagagcatggacagacttcgtggtgttcattgtttgatgatttttaatcgttactattatttctttttattctaatgtctctgttctaaaacgtaagactcgggggttggggcaaaagaagggaaacccatccagtcctgtgattctattgcaagcttcaaggggcttttgtttgaaagacaaaactccccacctgggtctgttgtcacacgtgccgtaggggtgatggatggcaccggatgctggattccccaagaacaagttaccctctggggtgaggctattccagcgagctgggacatttccccatgggggcccactcccctctcttccccagcaggctgtagtttctaagctgtgaacatttcaagataaattaacagaggagaggaaaaagatggctcagctattttttcacaggtttacactagttgagctaatatgcgtgtctttggaaattaaacacaaatggtaacatattccaaaaccagacccatcttgttgcctattgtgataaaataaaaagacggctgtatataacatattgggtaatgcagaccaaattaagtgttttgccttgtttaaatgaaatgcatgtttagtgagcactaatacaatcttattccagaagactgtttttagtagcttattgtgaagtaagacaactataatgaatgtctgtcttgtttggaagtcatatctgtctttgcacaaatgtaccaatcgacaagtatattttatatattccataaaaatacaaagtaaccctgactagggcccaactttaattttgaatgcatttccagagtggccatgcctagagggcagatgcagagcaggtggtagtgggacaggacaattggagcacaggaatgttaacatgtatgacaggggaccagtagggtggtttccctctcaggcccagcagcccattgacagcattagactggcggcatggtgcttttctgagcagatcaatactctgcagactcgaaaaaacatcacatacattcttggaacttcccagtggtttaatctatgtgcatggttagggagccaggcctggaatattcagtttccctgcccctgttaaagaatcagaggttgggcagtcatcaaattcatcataaagacatgggcaagtgtgtctgtggtttccaaggcccccctatggagaatccaaaagtattttccattgccgtgctctttgaatgcagacttctatttccagaagtgacagcacaagtctgagttgctgtttggtctggtgacctcagacacactaatttgaattgaaagctaagagtaaaaatttgctggttacaggcgagtcatactcttgcaagtagttagcaaagggaggcccaaattctcaaggttgttgatggggaacttgccactaagagaaggcagagaggtccctagtgggtatatttgctgccaagccacttgccaaagaagaggaaccacagaaagagagacatcatgaccaggagaaaaatgtgactagacatgctaacctccaggtttttatatatgacttgagtctgctgtaattggcagcagaaatccaaatttgtatggtagaccaaaaagaaccaaatccatagggtgaaattttgagacctagactctgtaaaaataatcctagtcttcctccaggggtcagttcctcacagtggttctgtaccaaaacttgccaaattcctccatggccaagtgttaaaatctgtgtttggaaaatagcgaattaacctaagacacagaaggcagactgggtgaggagacctagcatgccctattggcagtgctcaggagctgcatcccacttttccctgctctgaatcgaagtcctagttccttcctttgattctcctttggtaggtggaatcagttaatgttttgagaaacctgcctgggctctgcccttagtcatgacatctcgctgagccagacccactctgttccttggaacctagagctggagtgaggagtagaggtctccggctattccagaaagaaaagtgagccacatgcaggctgatgaatgccgacacttccagaatgtatagaaatagtccctgtcctggcctgccactgaccctgtctgtattttctcggaggttgtttttctccttctccttcccaggaaggtctttgtatgtcgaatccagtgcactcaagtttggccaagggactccacagcacccagaggactgcatgcctcaaggtttatgtcactcctctgctgggctgttcattgtcattgctgtgttcagggacctttggaaataaaacctgttctgtcccaaataaaaccagcctgtgatgttcaagggactggaataaagtggcttacgacctgaaggattctaaaaaaaaaaaaaaaaaaaaa

SEQ ID NO: 2420 - protein, 193 aa, Homo sapien
MGKQNSKLRPEVMQDLLESTDFTEHEIQEWYKGFLRDCPSGHLSMEEFKKIYGNFFPYGDASKFAEHVFRTFDANGDGTIDFREFIIALSVTSRGKLEQKLKWAFSMYDLDGNGYISKAEMLVIVQAIYKMVSSVMKMPEDESTPEKRTEKIFRQMDTNRDGKLSLEEFIRGAKSDPSIVRLLQCDPSSAGQF

SEQ ID NO: 2421 - DNA, 1863 bp, Homo sapien
tgtctgcaccggcagcaccatgtcgctcacggtcgtcagcatggcgtgcgttgggttcttcttgctgcagggggcctggccactcatgggtggtcaggacaaacccttcctgtctgcccggcccagcactgtggtgcctcgaggaggacacgtggctcttcagtgtcactatcgtcgtgggtttaacaatttcatgctgtacaaagaagacagaagccacgttcccatcttccacggcagaatattccaggagagcttcatcatgggccctgtgaccccagcacatgcagggacctacagatgtcggggttcacgcccacactccctcactgggtggtcggcacccagcaaccccctggtgatcatggtcacaggaaaccacagaaaaccttccctcctggcccacccagggcccctgctgaaatcaggagagacagtcatcctgcaatgttggtcagatgtcatgtttgagcacttctttctgcacagagaggggatctctgaggacccctcacgcctcgttggacagatccatgatggggtctccaaggccaacttctccatcggtcccttgatgcctgtccttgcaggaacctacagatgttatggttctgttcctcactccccctatcagttgtcagctcccagtgaccccctggacatcgtgatcacaggtctatatgagaaaccttctctctcagcccagccgggccccacggttcaggcaggagagaacgtgaccttgtcctgtagctcctggagctcctatgacatctaccatctgtccagggaaggggaggcccatgaacgtaggctccgtgcagtgcccaaggtcaacagaacattccaggcagactttcctctgggccctgccacccacggagggacctacagatgcttcggctctttccgtgccctgccctgcgtgtggtcaaactcaagtgacccactgcttgtttctgtcacaggaaacccttcaagtagttggccttcacccacagaaccaagctccaaatctggtatctgcagacacctgcatgttctgattgggacctcagtggtcatcttcctcttcatcctcctcctcttctttctcctttatcgctggtgctccaacaaaaagaatgctgctgtaatggaccaagagcctgcgggggacagaacagtgaataggcaggactctgatgaacaagaccctcaggaggtgacgtacgcacagttggatcactgcgttttcatacagagaaaaatcagtcgcccttctcagaggcccaagacacccctaacagataccagcgtgtacacggaacttccaaatgctgagcccagatccaaagttgtctcctgcccacgagcaccacagtcaggtcttgagggggttttctagggagacaacagccctgtctcaaaaccaggttgccagatccaatgaaccagcagctggaatctgaaggcatcagtctgcatcttaggggatcgctcttcctcacaccacgaatctgaacatgcctctctcttgcttacaaatgcctaaggtcgccactgcctgctgcagagaaaacacactcctttgcttagcccacaagtatctatttcacttgacccctgcccacctctccaacctaactggcttacttcctagtcctacttgaggctgcaatcacactgaggaactcacaattccaaacatacaagaggctccctcttaacacggcacttacacacttgctgttccaccttccctcatgctgttccacctcccctcagactatctttcagccttctgtcatcagtaaaatttataaattttttttataacttcagtgtagctctctcctcttcaaataaacatgtctgccctca

SEQ ID NO: 2422 - protein, 455 aa, Homo sapien
MSLTVVSMACVGFFLLQGAWPLMGGQDKPFLSARPSTVVPRGGHVALQCHYRRGFNNFMLYKEDRSHVPIFHGRIFQESFIMGPVTPAHAGTYRCRGSRPHSLTGWSAPSNPLVIMVTGNHRKPSLLAHPGPLLKSGETVILQCWSDVMFEHFFLHREGISEDPSRLVGQIHDGVSKANFSIGPLMPVLAGTYRCYGSVPHSPYQLSAPSDPLDIVITGLYEKPSLSAQPGPTVQAGENVTLSCSSWSSYDIYHLSREGEAHERRLRAVPKVNRTFQADFPLGPATHGGTYRCFGSFRALPCVWSNSSDPLLVSVTGNPSSSWPSPTEPSSKSGICRHLHVLIGTSVVIFLFILLLFFLLYRWCSNKKNAAVMDQEPAGDRTVNRQDSDEQDPQEVTYAQLDHCVFIQRKISRPSQRPKTPLTDTSVYTELPNAEPRSKVVSCPRAPQSGLEGVF

SEQ ID NO: 2423 - DNA, 1449 bp, Homo sapien; identical to SEQ ID NO: 219

SEQ ID NO: 2424 - protein, 427 aa, Homo sapien [sequence omitted]

SEQ ID NO: 2425 - DNA, 2519 bp, Rattus norvegicus
ggcacgagggcacctcgctgctccagcctctggggcgcattccaaccttccagcctgcgacctgcggagaaaaaaaattacttattttcttgccccatacataccttgaggcgagcaaaaaaattaaattttaaccatgagggaaatcgtgcacatccaggctggtcagtgtggcaaccagatcggtgccaagttctgggaggtgatcagtgatgaacatggcatcgaccccaccggcacctaccacggggacagcgacctgcagctggaccgcatctctgtgtactacaatgaagccacaggtggcaaatatgttcctcgtgccatcctggtggatctagaacctgggaccatggactctgttcgctcaggtccttttggccagatctttagaccagacaactttgtatttggtcagtctggggcaggtaacaactgggccaaaggccactacacagagggcgccgagctggttgattctgtcctggatgtggtacggaaggaggcagagagctgtgactgcctgcagggcttccagctgacccactcactgggcgggggcacaggctctggaatgggcactctccttatcagcaagatccgagaagaataccctgatcgcatcatgaataccttcagtgtggtgccttcacccaaagtgtctgacaccgtggtcgagccctacaatgccaccctctccgtccatcagttggtagagaatactgatgagacctattgcattgacaacgaggccctctatgatatctgcttccgcactctgaagctgaccacaccaacctacggggatctgaaccaccttgtctcagccaccatgagtggtgtcaccacctgcctccgtttccctggccagctcaatgctgacctccgcaagttggcagtcaacatggtccccttcccacgtctccatttctttatgcctggctttgcccctctcaccagccgtggaagccagcagtatcgagctctcacagtgccggaactcacccagcaggtcttcgatgccaagaacatgatggctgcctgtgacccccgccacggccgatacctcaccgtggctgctgtcttccgtggtcggatgtccatgaaggaggtcgatgagcagatgcttaacgtgcagaacaagaacagcagctactttgtggaatggatccccaacaatgtcaagacagccgtctgtgacatcccacctcgtggcctcaagatggcagtcaccttcattggcaatagcacagccatccaggagctcttcaagcgcatctcggagcagttcactgccatgttccgccggaaggccttcctccactggtacacaggcgagggcatggacgagatggagttcaccgaggctgagagcaacatgaacgacctcgtctctgagtatcagcagtaccaggatgccaccgcagaagaggaggaggatttcggtgaggaggccgaagaggaggcctaaggcagagcccccatcacctcaggcttctcagttcccttagccgtcttactcaactgcccctttcctctccctcagaatttgtgtttgctgcctctatcttgttttttgttttttcttctggggggggtctagaacagtgcctggcacatagtaggcgctcaataaatacttgtttgttgaatgtctcctctctctttccactctgggaaacctaggtttctgccattctgggtgaccctgtatttctttctggtgcccattccatttgtccagttaatacttcctcttaaaaatctccaagaagctgggtctccagatcccatttagaaccaaccaggtgctgaaaacacatgtagataatggccatcatcctaagcccaaagtagaaaatggtagaaggtagtgggtagaagtcactatataaggaaggggatgggattttccattctaaaagttttggagagggaaatccaggctattaaagtcactaaatttctaagtatgtccatttcccatctcagcttcaagggaggtgtcagcagtattatctccactttcaatctccctccaagctctactctggaggagtctgtcccactctgtcaagtggaatccttccctttccaactctacctccctcactcagctcctttcccctgatcagagaaagggatcaagggggttgggaggggggaaagagaccagccttggtccctaagcctccagaaacgtcttcttaatccccaccttttcttactcccaaaaaagaatgaacacccctgactctggagtggtgtatactgccacatcagtgtttgagtcagtccccagaggagaggggaaccctcctccatcttttttgcaacatctcatttcttccttttgctgttgcttcccccctcacacacttggttttgttctatcctacatttgagatttctattttatgttgaacttgctgctttttttcatattgaaaagatgacatcgccccaagagccaaaaataaatgggaattgaaaaaaaaaaaaaaaaaaaaaaaaaaaaa

SEQ ID NO: 2426 - protein, 444 aa, Rattus norvegicus
MREIVHIQAGQCGNQIGAKFWEVISDEHGIDPTGTYHGDSDLQLDRISVYYNEATGGKYVPRAILVDLEPGTMDSVRSGPFGQIFRPDNFVFGQSGAGNNWAKGHYTEGAELVDSVLDVVRKEAESCDCLQGFQLTHSLGGGTGSGMGTLLISKIREEYPDRIMNTFSVVPSPKVSDTVVEPYNATLSVHQLVENTDETYCIDNEALYDICFRTLKLTTPTYGDLNHLVSATMSGVTTCLRFPGQLNADLRKLAVNMVPFPRLHFFMPGFAPLTSRGSQQYRALTVPELTQQVFDAKNMMAACDPRHGRYLTVAAVFRGRMSMKEVDEQMLNVQNKNSSYFVEWIPNNVKTAVCDIPPRGLKMAVTFIGNSTAIQELFKRISEQFTAMFRRKAFLHWYTGEGMDEMEFTEAESNMNDLVSEYQQYQDATAEEEEDFGEEAEEEA

SEQ ID NO: 2427 - DNA, 3678 bp, Homo sapien
ggcacgagggccagtttctgcagtggaggtcgcgactgagggacgggacagagaagtcgcgaaagtgggccagaggttctgcgacaccacctcgggtgagctgcgccaggcccgggatagggactgttgtgttcgaatgcccgccccggtcggccgccgctccccgcctagtccacggagctcaatggcggcagtcgcgctgagggactcggctcagggtatgacctttgaggatgtggccatttatttctcccaagaagagtgggagctccttgatgagtctcagaggttcctgtactgcgatgtgatgctggagaactttgcacatgtaacatccctgggttattgccatggaatggagaatgaggcgatagcttctgagcagagtgtatctatacaggtcaggacttctaagggcaatacacccacccagaaaactcacctcagtgagattaagatgtgtgtcccagtcttgaaagacattttgcctgcggctgagcaccaaaccacatcccctgtgcaaaagtcatacttgggtagcacaagcatgagaggcttctgcttcagtgctgaccttcaccagcatcaaaagcattacaatgaagaagagccctggaaaaggaaggtggatgaggctacatttgtgaccggctgcagattccatgtgttgaattatttcacctgtggggaggccttcccagcccccacggacctactccaacacgaagccactcccagtggtgaggagccacacagtagcagcagcaagcatatacaggcatttttcaatgcaaaaagttattacaagtggggtgaatacagaaaagcttcaagccacaaacacacacttgttcagcatcagagtgtctgttctgaaggagggctttatgagtgtagcaaatgtgagaaagccttcacttgcaagaacacacttgttcagcaccagcaaattcacactggacaaaagatgtttgagtgtagtgaatgtgaggaatcctttagcaaaaagtgccacctaatcttacacaagataattcacactggagaaaggccttatgaatgcagtgatcgtgagaaagcctttatccataaatctgaattcattcaccaccagagacgtcacactggaggagtgcgtcatgagtgtggtgaatgtaggaaaacctttagctacaaatctaacctcattgaacaccagagagttcacactggagaaaggccttatgaatgtggcgagtgcgggaaatcctttagacaaagctctagcctttttcgacaccagagagttcactctggagaaaggccttatcagtgctgtgagtgtgggaaatcctttagacaaatcttcaatctcattcgacatagaagagttcacactggagaaatgccttatcagtgcagtgattgtgggaaatcttttagctgcaaatcggaactcattcaacaccagagaattcacagtggagaaagaccttatgaatgcagagaatgtgggaaatcctttagacaattctctaacctcattcgacaccgcagcattcacactggtgataggccttatgagtgcagtgaatgtgagaaatcctttagccgcaaatttatcctgattcaacaccaaagagttcacactggagaaagaccttatgaatgcagtgaatgtggaaaatcctttacccgcaaatctgacctcattcaacaccggagaattcatactggcacaagaccttatgagtgcagtgaatgtggcaaatcttttagacagcgctctggcctcattcagcaccggagacttcatactggagaaaggccttatgaatgtagtgaatgtggaaagtcttttagccaaagtgctagcctcattcaacaccagagagttcacactggagaaaggccttatgaatgtagtgaatgtgggaaatcctttagccagagctctagcctcattcaacaccagagaggtcacactggagaaagaccttatgagtgcagtcaatgtgggaaaccctttacccacaaatcagaccttattcagcaccaaagagttcacactggagaaaggccttatgaatgcagtgaatgtgggaaatcctttagccgcaaatctaacctcattcgacatcggagagttcacactgaagaaaggccttaaatgtgaagggaatgtgctatttctttattcagtataatagcactggaggagactgtggtagccatcttcgtaaatttaaactttgagcacccacagtggggtattcttcataagtttcaggtatgtgggaagctctgaggaggttcattgtaatttctaatctgccgaggcctatagcctgatttatgtcactgccaatttctgaggctgaagccatttcacatttcacccctaccacctggcaggtgcacaccatgtgcatgagtcacttccccacagtgctcagagaagcaaacctctgtactctcccatttgcttggggaaattattaatagcccaagcatgtagggtcttcatgtcttttctctgactttagagtatacacctgacccagttgtggtccagagaatctgagttgtgctgtcagctttctaaggattacctttttaaggaacattgtcggtctcacatgatgcttgtaatgaatttttccacattctgattcaccagcctggaaactgcttggtgcacattgctttaatttataatgtttttataaaggttttaaaaaaatttacgcacctttaatcttgggtgttctattcattgcatagaatgacttgtaagcagaatagtgatgtcagcatgaaggggtgaatagattttgtggagatctcaaactttctgtactcagaagggacaatgtgatggcagaagacagctctttgttctgtattgctctaattggcctgctgcccaaggcctcaaagtaaagactgccaggctttgtgttcctgtattgtggcctggtgccatttttgtcaggtcagaggtcaccatgaaaaggaggcagttgtgacaatccccagtgcttctgtgaacgtgaattttgttcagttgtccacaggagatccacataattcctagcactggtgaggggaatctgttgcccaggtcctgcaaaggagccatgtgccatggcatataagtcagtgtagactggtgccatttgttgtcagactataggtgtggaggtgaaattacaggttcaacagtaattgggacagaaactccaggtaaatggggagtggagaagactgcagtaaattagatggaatgactcttctaaaagttcatctacaaattttccagtgaatatggttgtgtaggatcagtgcatacagaaattctcaggatcttctgtttactatcgctgagatcattatcagaaaatagtctggccgggcatggtgtaatcctaacactttgggaggccaaggcgggcggattgcctgagctcaggagttcaagaccagcctgggcaacatggtgaaatcccatgtctactaaaatacaaaaaattagccaggcgtggcagcatgcgcctatagtcccagccacttgggaggctgaggcaggagaatcgcttgaacccagaaggcggaagttgcagtgagctgagattgcaccactgcactccagcccaggcaacagagtgagactccgtctccaaaaaaaaaaaaaaaaaa

SEQ ID NO: 2428 - protein, 654 aa, Homo sapien
MAAVALRDSAQGMTFEDVAIYFSQEEWELLDESQRFLYCDVMLENFAHVTSLGYCHGMENEAIASEQSVSIQVRTSKGNTPTQKTHLSEIKMCVPVLKDILPAAEHQTTSPVQKSYLGSTSMRGFCFSADLHQHQKHYNEEEPWKRKVDEATFVTGCRFHVLNYFTCGEAFPAPTDLLQHEATPSGEEPHSSSSKHIQAFFNAKSYYKWGEYRKASSHKHTLVQHQSVCSEGGLYECSKCEKAFTCKNTLVQHQQIHTGQKMFECSECEESFSKKCHLILHKIIHTGERPYECSDREKAFIHKSEFIHHQRRHTGGVRHECGECRKTFSYKSNLIEHQRVHTGERPYECGECGKSFRQSSSLFRHQRVHSGERPYQCCECGKSFRQIFNLIRHRRVHTGEMPYQCSDCGKSFSCKSELIQHQRIHSGERPYECRECGKSFRQFSNLIRHRSIHTGDRPYECSECEKSFSRKFILIQHQRVHTGERPYECSECGKSFTRKSDLIQHRRIHTGTRPYECSECGKSFRQRSGLIQHRRLHTGERPYECSECGKSFSQSASLIQHQRVHTGERPYECSECGKSFSQSSSLIQHQRGHTGERPYECSQCGKPFTHKSDLIQHQRVHTGERPYECSECGKSFSRKSNLIRHRRVHTEERP

SEQ ID NO: 2429 - DNA, 1983 bp, Homo sapien
gaattgaaccacccattttcctttcttagccaaatcaccaaaatgtccagttagaacaagaatttagcattctgcaaaagaagttaacagctgagataacgaggaaatattctgaaatggatcccaaatatttcatcttaattttgttttgtggacacctgaacaatacatttttttcaaagacagagacaattacaacagagaagcagtcacagcctaccttattcacatcatcaatgtcacaggtattggctaattctcaaaacacaacagggaatcctttgggtcaaccaacacaattcagcgacactttttctggacaatcaatatcacctgccaaagtcactgctggacaaccaacaccagctgtctatacctcttctgaaaaaccagaagcacatacttctgctggacaaccacttgcctacaacaccaaacaaccaacaccaatagccaacacctcctcccagcaagccgtgttcacctctgccagacaactaccatctgcccgtacttctaccacacaaccaccaaagtcatttgtctatacttttactcaacaatcatcatctgtccagatcccttctagaaaacaaataactgttcataatccatccacacaaccaacatcaactgtcaaaaattcacctaggagtacaccaggatttatcttagatactaccagtaacaaacaaaccccacaaaaaaacaattataattcaatagctgccatactaattggtgtacttctgacttctatgttggtagctataatcatcattgtactttggaaatgcttaaggaaaccagttttaaatgatcaaaattgggcaggtagatctccatttgctgatggagaaacccctgacatttgtatggataacatcagagaaaatgaaatatccacaaaacgtacatcaatcatttcacttacaccctggaaaccaagcaaaagcacacttttagcagatgacttagaaattaagttgtttgaatcaagtgaaaacattgaagactccaacaaccccaaaacagagaaaataaaagatcaagtaaatggtacatcagaagatagtgctgatggttcaacagttggaactgctgtttcttcttcagatgatgcaggtctgcctccaccacctccccttctggatttggaaggacaggaaagtaaccaatctgacaaacccacaatgacaattgtatctcctcttccaaatgattctactagtctccctccatctctggactgtctcaatcaagactgtggagatcataaatctgagataatacaatcatttccaccgcttgactcacttaacttgcccctgccaccagtagattttatgaaaaaccaagaagattccaaccttgagatccagtgtcaggagttctctattcctcccaactctgatcaagatcttaatgaatccctgccacctccacctgcagaactgttataaatattacaacttgctttttagctgatcttccatcctcaaatgactcttttttctttatatgttaacatatataaaatggcaactgatagtcaattttgatttttattcaggaactatctgaaatctgctcagagcctatgtgcatagatgaaacttttttttaaaaaaagttatttaacagtaatctatttactaattatagtacctatctttaaagtatagtacattttacatatgtaaatggtatgtttcaataatttaagaactctgaaacaatctacatatacttattacccagtacagttttttttcccctgaaaagctgtgtataaaattatggtgaataaacttttatgtttccatttcaaagaccagggtggagaggaataagagactaagtatatgcttcaagttttaaattaatacctcaagtattaaataaatattccaagtttgtgggaatgggagattaaaatgcatgtttgagagtaaaaaaaaaaaaaaaaaaaaaaaaaaaaaa

SEQ ID NO: 2430 - protein, 448 aa, Homo sapien
MDPKYFILILFCGHLNNTFFSKTETITTEKQSQPTLFTSSMSQVLANSQNTTGNPLGQPTQFSDTFSGQSISPAKVTAGQPTPAVYTSSEKPEAHTSAGQPLAYNTKQPTPIANTSSQQAVFTSARQLPSARTSTTQPPKSFVYTFTQQSSSVQIPSRKQITVHNPSTQPTSTVKNSPRSTPGFILDTTSNKQTPQKNNYNSIAAILIGVLLTSMLVAIIIIVLWKCLRKPVLNDQNWAGRSPFADGETPDICMDNIRENEISTKRTSIISLTPWKPSKSTLLADDLEIKLFESSENIEDSNNPKTEKIKDQVNGTSEDSADGSTVGTAVSSSDDAGLPPPPPLLDLEGQESNQSDKPTMTIVSPLPNDSTSLPPSLDCLNQDCGDHKSEIIQSFPPLDSLNLPLPPVDFMKNQEDSNLEIQCQEFSIPPNSDQDLNESLPPPPAELL

SEQ ID NO: 2431 - DNA, 1480 bp, Homo sapien; identical to SEQ ID NO: 425

SEQ ID NO: 2432 - protein, 269 aa, Homo sapien; identical to SEQ ID NO: 426

SEQ ID NO: 2433 - DNA, 749 bp, Homo sapien
atggcggctaacgctactaccaacccgtcgcagctgctgccgttagagcttgtggacaaatgtataggatcaagaattcacatcgtgatgaagagtgataaggaaattgttggtactcttctaggatttgatgactttgtcaatatggtactggaagatgtcactgagtttgaaatcacaccagaaggaagaaggattactaaattagatcagattttgctaaatggaaataatataacaatgctggttcctggaggagaaggacctgaagtgtgaatgagtttccttgacttacactagattttgttttggcttataatgacaagaaaatggaattttttttcccactttctaatgtttaaatcccataaagctaagtttcccgttaaagggaagtgctttgaagatgtgtacccatttttgtaagttaatcatgattatcctggaaaaagaagaaaagaacttcttcttttgcagatgaaaataaaggtgtttttggttaactgtcattttgtttattctactgcagtagccagtggaacaaagtttgtagttattttgccacttacttttctgtcattatatgcttatttgttttgtcatttacgtgaccatttgattctcaaacaaaagttgttccaaacaaaatgatgaactttgatttgaacaggtgcatttaaacaaccggaaatgatcacttagaaaattcaattaaaatgctgttgttttgtaaaaaaaaaaaaaaaaaa

SEQ ID NO: 2434 - protein, 91 aa, Homo sapien
MAANATTNPSQLLPLELVDKCIGSRIHIVMKSDKEIVGTLLGFDDFVNMVLEDVTEFEITPEGRRITKLDQILLNGNNITMLVPGGEGPEV

SEQ ID NO: 2435 - DNA, 1542 bp, Homo sapien
gagatccttgttgccgtcccttcgcctccttcaccgccgcagaccccttcaagttctagtcatgcgtgagtgcatctccatccacgttggccaggctggtgtccagattggcaatgcctgctgggagctctactgcctggaacacggcatccagcccgatggccagatgccaagtgacaagaccattgggggaggagatgattccttcaacaccttcttcagtgaaacgggtgctggcaagcatgtgccccgggcagtgtttgtagacttggaacccacagtcattgatgaagttcgcactggcacttaccgccagctcttccaccctgagcaactcatcacaggcaaggaagatgctgccaataactatgcccgagggcactacaccattggcaaggagatcattgacctcgtgttggaccgaattcgcaagctggctgaccagtgcaccggtcttcagggcttcttggttttccacagctttggtgggggaactggttctgggttcacctcgctgctcatggaacgtctctcagttgattatggcaagaagtccaagctggagttctccatttacccggcgccccaggtttccacagctgtagttgagccctacaactccatcctcaccacccacaccaccctggagcactctgattgtgccttcatggtagacaatgaggccatctatgacatctgtcgtagaaacctcgatatcgagcgcccaacctacactaaccttaaccgccttattagccagattgtgtcctccatcactgcttccctgagatttgatggagccctgaatgttgacctgacagaattccagaccaacctggtgccctacccccgcatccacttccctctggccacatatgcccctgtcatctctgctgagaaagcctaccacgaacagcttactgtagcagagatcaccaatgcttgctttgagccagccaaccagatggtgaaatgtgaccctcgccatggtaaatacatggcttgctgcctgttataccgtggtgacgtggttcccaaagatgtcaatgctgccattgccaccatcaaaaccaagcgtaccatccagtttgtggattggtgccccactggcttcaaggttggcattaattaccagcctcccactgtggtgcctggcggagacctggccaaggtacagagagctgtgtgcatgctgagcaataccacagctgttgccgaggcctgggctcgcctggaccacaagtttgacctgatgtatgccaagcgtgcctttgttcactggtacgtgggtgaggggatggaggaaggcgagttttcagaggcccgtgaggacatggctgcccttgagaaggattatgaggaggttggagcagatagtgctgacggagaggatgagggtgaagagtattaacctgtgtgctgtacttttacactcctttgtcttggaactgtcttatttttgttctgtaaatgtctattgccgtaaattgttaataaaattgatgtttccattttaaaaaaaaaaaaaaaaaaaaaaaaaaa

SEQ ID NO: 2436 - protein, 449 aa, Homo sapien; identical to SEQ ID NO: 1971

SEQ ID NO: 2437 - DNA, 1494 bp, Homo sapien
ttgcagccgccggcagctactgcaaggcaaaagccggagtggacgtgtcttttgaaactgctgctctttcacttctcaggcgtcaccgagagctcagcacccaggctgaactctgtaccatttggaagaatggaagctgatgcatctgttgacatgttttccaaagtcctggagcatcagctgcttcagactaccaaactggtggaagaacatttggattctgaaattcaaaaactggatcagatggatgaggatgaattggaacgccttaaagaaaagagactccaggcactaaggaaagctcaacagcagaaacaagaatggctttctaaaggacatggggaatacagagaaatccctagtgaaagagacttttttcaagaagtcaaggagagtgaaaatgtggtttgccatttctacagagactccacattcaggtgtaaaatactagacagacatctggcaatattgtccaagaaacacctcgagaccaaatttttgaagctgaatgtggaaaaagcacctttcctttgtgagagactgcatatcaaagtcattcccacactagcactgctaaaagatgggaaaacacaagattatgttgttgggtttactgacctaggaaatacagatgacttcaccacagaaactttagaatggaggctcggttcttctgacattcttaattacagtggaaatttaatggagccaccatttcagaaccaaaagaaatttggaacaaacttcacaaagctggaaaagaaaactatccgaggaaagaaatatgattcagactctgatgatgattagagctcaataattctttgtaaattgtctttttttttctgcttcagatttaaatgtgtttttaaaattctattaatgtctatacattggtcacctaaatactcatattctcgagttttatacagttgtatcacatcgaaaagtgtctttactgttttctgtgtggccatcatgtttaagttgaggaaaactcagttcttaaattatctgggaagggtctggattctctatttttgagattgactttatcacaatatgattcttacatctttataccatttacaattgtgttttagatctacagagttagaaattcgaaaactattccaggactaattcttaatcggcattatttatacaagaggtcaagtaacatttactagcgcaatactgcacttgtaaatgaattataaacgctcttctggaatatatttaaataaccattaaagaactgcttattcattctggacactgcatgttgatgttgaatcaactgatgccagcagaaagctattttgatttgtgaacatactgccttatttaaagggtcctgattgcttgtattttaagacattcattaaaaagaaaccaggaaacacttttgaaataacagcataaggaacttcactgtctctgctcaataaaatacctgtaactggaaaaaaaaaaaaaaaaaaaaaaaaaaaa

SEQ ID NO: 2438 - protein, 226 aa, Homo sapien
MEADASVDMFSKVLEHQLLQTTKLVEEHLDSEIQKLDQMDEDELERLKEKRLQALRKAQQQKQEWLSKGHGEYREIPSERDFFQEVKESENVVCHFYRDSTFRCKILDRHLAILSKKHLETKFLKLNVEKAPFLCERLHIKVIPTLALLKDGKTQDYVVGFTDLGNTDDFTTETLEWRLGSSDILNYSGNLMEPPFQNQKKFGTNFTKLEKKTIRGKKYDSDSDDD

SEQ ID NO: 2439 - DNA, 1157 bp, Homo sapien
accgccagcccgggagagctgccgggagttccccgggagcgctgccgggagttccccgggagcctcaggtggtgactatcctgttgagaagcaaaagatactttgcaagtaaaaaatatgcctcccaagtttaagcgccacctcaatgatgatgatgtcacaggttctgtgaaaagtgaaaggagaaatcttttggaagatgattcagatgaagaagaggacttttttctaaggggaccatctggaccaagatttggacctagaaatgataaaattaagcatgttcagaatcaagtggatgaagttattgatgtcatgcaagaaaatattacaaaggtaattgagagaggggagagactagatgaactacaggacaaatcagaaagcttatcggataatgcaacagcttttagcaacagatccaaacaacttcgaaggcaaatgtggtggcgtggatgcaaaataaaagccatcatggctttggttgctgctatccttttgctagtgattatcattcttatagtcatgaaataccgtacttgatttgatgacagagatcttcattaaacaagatctgggacagtaataaaagattgctgcataatttaaatgaaacctatgtgtatataactttcaaaacttctttttcaagaaactaagaggcaagtatcacttcaaattggaacgttgagaatgtccaattatcttctccctttctaacaaaatgttcttttaataattatgtttaaggcaaagagaactagcctctatttttccatatttcaaggatctaatttgaaactagatacttgccagttcattatttgtgtatataaacactgattataatatttcatattaatattttaatggcataaggacttgcattattgcattagggagcgggtcatgctggtggtcaggaagcctgtgtagagtaccaaattatatgttgaaagagatgcataaccattctgtcaatatttgcagaaatatagttcctttcatattacagttgttttgcaagcaatttccacatttataggtgtaacaaaagctaaatgttgtaaatgttgttgccctcaggtataactaaaaacattccagtaaatatatttttgactgtgtaaaaaaaaaaaaaaaaaaaaaaaaaaaaa

SEQ ID NO: 2440 - protein, 141 aa, Homo sapien
MPPKFKRHLNDDDVTGSVKSERRNLLEDDSDEEEDFFLRGPSGPRFGPRNDKIKHVQNQVDEVIDVMQENITKVIERGERLDELQDKSESLSDNATAFSNRSKQLRRQMWWRGCKIKAIMALVAAILLLVIIILIVMKYRT

SEQ ID NO: 2441 - DNA, 1976 bp, Homo sapien; identical to SEQ ID NO: 203

SEQ ID NO: 2442 - protein, 529 aa, Homo sapien [sequence omitted]

SEQ ID NO: 2443 - DNA, 3309 bp, Homo sapien; identical to SEQ ID NO: 1545

SEQ ID NO: 2444 - protein, 503 aa, Homo sapien; identical to SEQ ID NO: 1546

SEQ ID NO: 2445 - DNA, 1935 bp, Homo sapien; identical to SEQ ID NO: 1631

SEQ ID NO: 2446 - protein, 255 aa, Homo sapien; identical to SEQ ID NO: 1632

SEQ ID NO: 2447 - DNA, 3171 bp, Homo sapien
gctgcaccaacttcctgttgggtgctgtggtcccaaggcgcgtgctttgcagcagatgtgtgacctggcgttcccctgagtgctcggaaaatggccttgtctccggtcgttcccgttcaggagcagaattttcccactgtaaaaaaccgagcaagtctggataagtgaggctggctccatgtatccagaatcaacgacgggctccccggctcggctctcgctgcggcagacgggctcccccgggatgatctacagtactcggtatgggagtcccaaaagacagctccagttttacaggaacctgggcaagtctggcctgcgggtctcctgcctgggacttggaacatgggtgaccttcggaggccagatcaccgatgagatggcagagcagctcatgaccttggcctatgataatggcatcaacctcttcgatacagcagaagtctacgcagccggcaaggctgaagtggtactgggaaacatcattaagaagaaaggatggaggcggtccagcctcgtcatcaccaccaagatcttctggggcggaaaggcggagacggagcggggcctgtccaggaagcacataatcgaaggtctgaaagcttccctggagcgactgcagctggagtacgtggatgtggtgtttgccaaccgcccggaccccaacaccccgatggaagagaccgtccgcgccatgacccacgtcatcaaccaggggatggccatgtactggggcacgtcacgctggagctccatggagatcatggaggcctactccgtggcccggcagttcaacctgaccccgcccatctgcgagcaggctgagtaccacatgttccagcgtgagaaagtggaggtgcagctgccggagctgttccacaagataggagtgggcgccatgacctggtcccctctggcctgtggcattgtttctggcaagtacgacagtggcatcccaccctactcaagagcctccttgaagggctaccagtggctgaaggacaagatcctcagtgaggagggccggcgccagcaagccaagctgaaggagctgcaggccatcgccgagcgcctgggctgcaccctgccccagctggccatagcctggtgcctgaggaatgagggagtcagctccgtgctcctgggggcctccaatgcggaccagctcatggagaacattggggcaatacaggtccttccgaaactgtcatcttccattatccacgagattgatagtattttgggcaataaaccctacagcaaaaaggactacagatcctaagccgcccccgcccgcctgctcggacagtttccgttccctcctagtctctgttcgctcgcttaagctgttttgaagccaagtgaagagtgtggtttgcatccaagagaaaacaccacactgtgatgtcatcgggaaatgatctcccaagtcgctgccagacaccacccactgcttcgccggacaatgtcgaagtccagtctgtgccggggaaggcactggttaggaaggatgttcaaacggtcccacccaagcctgtcacctctgctcatcctccaagaccacccagctttctcccagccacagccaagattcccaaagtcaaggcccaaagatttccaaggttcccaaagtcaaggccaggccaaggcctggttgggtccttggggcgggcagggccagcctctcctctgctgagaatccccacttggtgtagggggagaggggaaaggggtctggcccatcgaggggccccttctgccagggccttggttgctggggcagggcctccccactgggggtcttcctccacctcccactttccaagggctccaggaatctggggcctgaccacagattcctctcccatccttttctgctccaacctgccccactgggtcccggcaggggccatgcctaccaagctcgagctggcccttgacccccacccacccccacccttgctggcaggggcagggaccccagggggattgactctgcagtttgggagccacaaaaagcgtagcggtgtgatttctagctcagcctcccaccgtcttcctcctacacaccaatgatgagcctcatgccagtgaggcccggagcgcttgggaggggtcccagtggggcaggcccctctgtctggccacccctctgtcctggccccggaaggccctgtggtcatgtgctcctagctgcacggtggctgctggccacaccacggcaagtggcagcaggggccggccctgtgcacaaggatgcactcctctcggcccctgtagactttctctaaagccgcccgccagcccaggccgctgctctgcaccgagctggtgggcttgggttttgtggagcgcatgcttggaccctttcagtaaggaagggtctttggggttttctgtgcccatgacttgggggctgcacccccacagcacccccacaatgtaggaaaagacctcagggaacctctccctggaaagacgggcagggctggttagcccctcccactgcctgacacctgggacaggctgggcagaggggagagagggcaggacaggccagagtgacgcccccgtgcagcttgggccggagggcaagggatgccagtaagtctgcaggtgcggggtgccacctacaggcccaggcctgtgtcccaagcagtacccaggctttgcagaccacgcggggcagggctccactgaagccacccccacccctcgccagctagctccatagggaagcctgtgtctcctgcccccagggcgcaccctcagtgcaggcacctctgttcccgctttgcccctggaggagccactattccagaaggctccaccctgccgtcctgcgggagcctgctgtccagtcctggccgggccaaggcctgggaaactgtgaaagtcagaaaggccagcggggagaggctggggcgaggggaggagggggatcagcttctgctattaccgaccccccttcatgctgcccctggcgcctagaacccttgcccctcctcatagaccaagtcccgggggtctccactcagtcctgctgcctgcttcaccagaagcagccctgtgagtgtggggtggggaagtcccttcccaacggaggtcccagcctatggccctgggcccaggtgggggtcgcctgcttccttcccggacagggtcctgcag

SEQ ID NO: 2448 - protein, 367 aa, Homo sapien
MYPESTTGSPARLSLRQTGSPGMIYSTRYGSPKRQLQFYRNLGKSGLRVSCLGLGTWVTFGGQITDEMAEQLMTLAYDNGINLFDTAEVYAAGKAEVVLGNIIKKKGWRRSSLVITTKIFWGGKAETERGLSRKHIIEGLKASLERLQLEYVDVVFANRPDPNTPMEETVRAMTHVINQGMAMYWGTSRWSSMEIMEAYSVARQFNLTPPICEQAEYHMFQREKVEVQLPELFHKIGVGAMTWSPLACGIVSGKYDSGIPPYSRASLKGYQWLKDKILSEEGRRQQAKLKELQAIAERLGCTLPQLAIAWCLRNEGVSSVLLGASNADQLMENIGAIQVLPKLSSSIIHEIDSILGNKPYSKKDYRS

SEQ ID NO: 2449 - DNA, 2008 bp, Homo sapien
atggcgtagtccccaaagaacgaggacctagtaacataattgtgcttcattatggtcctttcccggccttctctctcacacatacacagagcccctaccaggaccagacagctctcagagcaaccctagccccattacctcttccctttccagaggacctgaaaaacgtgttcccacccgaggtcgctgtgtttgagccatcagaagcagagatctcccacacccaaaaggccacactggtgtgcctggccacaggcttctaccccgaccacgtggagctgagctggtgggtgaatgggaaggaggtgcacagtggggtcagcacagacccgcagcccctcaaggagcagcccgccctcaatgactccagatactgcctgagcagccgcctgagggtctcggccaccttctggcagaacccccgcaaccacttccgctgtcaagtccagttctacgggctctcggagaatgacgagtggacccaggatagggccaaacctgtcacccagatcgtcagcgccgaggcctggggtagagcaggtgagtggggcctggggagatgcctggaggagattaggtgagaccagctaccagggaaaatggaaagatccaggtagcggacaagactagatccagaagaaagccagagtggacaaggtgggatgatcaaggttcacagggtcagcaaagcacggtgtgcacttcccccaccaagaagcatagaggctgaatggagcacctcaagctcattcttccttcagatcctgacaccttagagctaagctttcaagtctccctgaggaccagccatacagctcagcatctgagtggtgtgcatcccattctcttctggggtcctggtttcctaagatcatagtgaccacttcgctggcactggagcagcatgagggagacagaaccagggctatcaaaggaggctgactttgtactatctgatatgcatgtgtttgtggcctgtgagtctgtgatgtaaggctcaatgtccttacaaagcagcattctctcatccatttttcttcccctgttttctttcagactgtggcttcacctccggtaagtgagtctctcctttttctctctatctttcgccgtctctgctctcgaaccagggcatggagaatccacggacacaggggcgtgagggaggccagagccacctgtgcacaggtacctacatgctctgttcttgtcaacagagtcttaccagcaaggggtcctgtctgccaccatcctctatgagatcttgctagggaaggccaccttgtatgccgtgctggtcagtgccctcgtgctgatggccatggtaaggaggagggtgggatagggcagatgatgggggcaggggatggaacatcacacatgggcataaaggaatctcagagccagagcacagcctaatatatcctatcacctcaatgaaaccataatgaagccagactggggagaaaatgcagggaatatcacagaatgcatcatgggaggatggagacaaccagcgagccctactcaaattaggcctcagagcccgcctcccctgccctactcctgctgtgccatagcccctgaaaccctgaaaatgttctctcttccacaggtcaagagaaaggattccagaggctagctccaaaaccatcccaggtcattcttcatcctcacccaggattctcctgtacctgctcccaatctgtgttcctaaaagtgattctcactctgcttctcatctcctacttacatgaatacttctctcttttttctgtttccctgaagattgagctcccaacccccaagtacgaaataggctaaaccaataaaaaattgtgtgttgggcctggttgcatttcaggagtgtctgtggagttctgctcatcactgacctatcttctgatttagggaaagcagcattcgcttggacatctgaagtgacagccctctttctctccacccaatgctgctttctcctgttcatcctgatggaagtctcaacaca

SEQ ID NO: 2450 - protein, 178 aa, Homo sapien
DLKNVFPPEVAVFEPSEAEISHTQKATLVCLATGFYPDHVELSWWVNGKEVHSGVSTDPQPLKEQPALNDSRYCLSSRLRVSATFWQNPRNHFRCQVQFYGLSENDEWTQDRAKPVTQIVSAEAWGRADCGFTSESYQQGVLSATILYEILLGKATLYAVLVSALVLMAMVKRKDSRG

SEQ ID NO: 2451 - DNA, 2226 bp, Homo sapien
ggaagcagggcggggcctctggtggcggtcgggaactcggtgggaggcggcaacattgtttcaagttggccaaattgacaagagcgagaggtatactgcgttccatcccgacccggggccacggtactgggccctgtttccccctcctcggcccccgagagccagggtccgccttctgcagggttcccaggcccccgctccagggccgggctgacccgactcgctggcgcttcatggagaacttccaaaaggtggaaaagatcggagagggcacgtacggagttgtgtacaaagccagaaacaagttgacgggagaggtggtggcgcttaagaaaatccgcctggacactgagactgagggtgtgcccagtactgccatccgagagatctctctgcttaaggagcttaaccatcctaatattgtcaagctgctggatgtcattcacacagaaaataaactctacctggtttttgaatttctgcaccaagatctcaagaaattcatggatgcctctgctctcactggcattcctcttcccctcatcaagagctatctgttccagctgctccagggcctagctttctgccattctcatcgggtcctccaccgagaccttaaacctcagaatctgcttattaacacagagggggccatcaagctagcagactttggactagccagagcttttggagtccctgttcgtacttacacccatgaggtgactcgccgggccctattccctggagattctgagattgaccagctcttccggatctttcggactctggggaccccagatgaggtggtgtggccaggagttacttctatgcctgattacaagccaagtttccccaagtgggcccggcaagattttagtaaagttgtacctcccctggatgaagatggacggagcttgttatcgcaaatgctgcactacgacccttacaagaggatttcggccaaggcagccctggctcaccctttcttccaggatgtgaccaagccagtaccccatcttcgactctgatagccttcttgaagcccccagccctaatctcaccctctcctccagtgtgggcttgaccaggcttggccttgggctatttggactcaggtgggccctctgaacttgccttaaacactcaccttctagtcttggccagccaactctgggaatacaggggtgaaaggggggaaccagtgaaaatgaaaggaagtttcagtattagatgcacttaagttagcctccaccaccctttcccccttctcttagttattgctgaagagggttggtataaaaataattttaaaaaagccttcctacacgttagatttgccgtaccaatctctgaatgccccataattattatttccagtgtttgggatgaccaggatcccaagcctcctgctgccacaatgtttataaaggccaaatgatagcgggggctaagttggtgcttttgagaaccaagtaaaacaaaaccactgggaggagtctattttaaagaattcggttgaaaaaatagatccaatcagtttataccctagttagtgttttgcctcacctaataggctgggagactgaagactcagcccgggtggggctgcagaaaaatgattggccccagtccccttgtttgtcccttctacaggcatgaggaatctgggaggccctgagacagggattgtgcttcattccaatctattgcttcaccatggccttatgaggcaggtgagagatgtttgaatttttctcttccttttagtattcttagttgttcagttgccaaggatccctgatcccattttcctctgacgtccacctcctaccccataggagttagaagttagggtttaggcatcattttgagaatgctgacactttttcagggctgtgattgagtgagggcatgggtaaaaatatttctttaaaagaaggatgaacaattatatttatatttcaggttatatccaatagtagagttggcttttttttttttttttttggtcatagtgggtggatttgttgccatgtgcaccttggggttttgtaatgacagtgctaaaaaaaaaaaagcatttttttttatgatttgtctctgtcacccttgtccttgagtgctcttgctattaacgttatttgtaatttagtttgtagctcattaaaaaaatgtgcctagttttataaaaaaaaaaaaaaaaaaaaaaaaaaaaaaaaaaaaaaa

SEQ ID NO: 2452 - protein, 264 aa, Homo sapien
MENFQKVEKIGEGTYGVVYKARNKLTGEVVALKKIRLDTETEGVPSTAIREISLLKELNHPNIVKLLDVIHTENKLYLVFEFLHQDLKKFMDASALTGIPLPLIKSYLFQLLQGLAFCHSHRVLHRDLKPQNLLINTEGAIKLADFGLARAFGVPVRTYTHEVTRRALFPGDSEIDQLFRIFRTLGTPDEVVWPGVTSMPDYKPSFPKWARQDFSKVVPPLDEDGRSLLSQMLHYDPYKRISAKAALAHPFFQDVTKPVPHLRL

SEQ ID NO: 2453 - DNA, 3986 bp, Homo sapien
atgctggggaagagccatggtaggaccactcatggccctcttcctttggcggaccttggaatccaccttccctgcgttaaagtgctccaccaggtgacgccggaagagaagccagcaggcggcggcggcgtcagcatcagcggcctcctgcccgtatctatcgtggcggcgacgggacccgcctccctgggcgccggagtcatgtgacccacacaatggctgagtggctactctcggcttcctggcaacgccgagcgaaagctatgactgcggccgcgggttcggcgggccgcgccgcggtgcccttgctgctgtgtgcgctgctggcgcccggcggcgcgtacgtgctcgacgactccgacgggctgggccgggagttcgacggcatcggcgcggtcagcggcggcggggcaacctcccgacttctagtaaattacccagagccctatcgttctcagatattggattatctctttaagccgaattttggtgcctctttgcatattttaaaagtggaaataggtggtgatgggcagacaacagacggcactgagccctcccacatgcattatgcactagatgagaattatttccgaggatacgagtggtggttgatgaaagaagctaagaagaggaatcccaatattacactcattgggttgccatggtcattccctggatggctgggaaaaggtttcgactggccttatgtcaatcttcagctgactgcctattatgtcgtgacctggattgtgggcgccaagcgttaccatgatttggacattgattatattggaatttggaatgagaggtcatataatgccaattatattaagatattaagaaaaatgctgaattatcaaggtctccagcgagtgaaaatcatagcaagtgataatctctgggagtccatctctgcatccatgctccttgatgccgaactcttcaaggtggttgatgttataggggctcattatcctggaacccattcagcaaaagatgcaaagttgactgggaagaagctttggtcttctgaagactttagcactttaaatagtgacatgggtgcaggctgctggggtcgcattttaaatcagaattatatcaatggctatatgacttccacaatcgcatggaatttagtggctagttactatgaacagttgccttatgggagatgcgggttgatgacggcccaagagccatggagtgggcactacgtggtagaatctcctgtctgggtatcagctcataccactcagtttactcaacctggctggtattacctgaagacagttggccatttagagaaaggaggaagctacgtagctctgactgatggcttagggaacctcaccatcatcattgaaaccatgagtcataaacattctaagtgcatacggccatttcttccttatttcaatgtgtcacaacaatttgccacctttgttcttaagggatcttttagtgaaataccagagctacaggtatggtataccaaacttggaaaaacatccgaaagatttctttttaagcagctggattctctatggctccttgacagcgatggcagtttcacactgagcctgcatgaagatgagctgttcacactcaccactctcaccactggtcgcaaaggcagctacccgcttcctccaaaatcccagcccttcccaagtacctataaggatgatttcaatgttgattacccattttttagtgaagctccaaactttgctgatcaaactggtgtatttgaatattttacaaatattgaagaccctggcgagcatcacttcacgctacgccaagttctcaaccagagacccattacgtgggctgccgatgcatccaacacaatcagtattataggagactacaactggaccaatctgactataaagtgtgatgtttacatagagacccctgacacaggaggtgtgttcattgcaggaagagtaaataaaggtggtattttgattagaagtgccagaggaattttcttctggatttttgcaaatggatcttacagggttacaggtgatttagctggatggattatatatgctttaggacgtgttgaagttacagcaaaaaaatggtatacactcacgttaactattaagggtcatttcgcctctggcatgctgaatgacaagtctctgtggacagacatccctgtgaattttccaaagaatggctgggctgcaattggaactcactcctttgaatttgcacagtttgacaactttcttgtggaagccacacgctaatacttaacagggcatcatagaatactctggattttcttcccttctttttggttttggttcagagccaattcttgtttcattggaacagtatatgaggcttttgagactaaaaataatgaagagtaaaaggggagagaaatttatttttaatttaccctgtggaagattttattagaattaattccaaggggaaaactggtgaatctttaacattacctggtgtgttccctaacattcaaactgtgcattggccatacccttaggagtggtttgagtagtacagacctcgaagccttgctgctaacactgaggtagctctcttcatcttatttgcaagcggtcctgtagatggcagtaacttgatcatcactgagatgtatttatgcatgctgaccgtgtgtccaagtgagccagtgtcttcatcacaagatgatgctgccataatagaaagctgaagaacactagaagtagctttttgaaaaccacttcaacctgttatgctttatgctctaaaaagtatttttttattttcctttttaagatgatacttttgaaatgcaggatatgatgagtgggatgattttaaaaacgcctctttaataaactacctctaacactatttctgcggtaatagatattagcagattaattgggttatttgcattatttaatttttttgattccaagttttggtcttgtaaccactataactctctgtgaacgtttttccaggtggctggaagaaggaagaaaacctgatatagccaatgctgttgtagtcgtttcctcagcctcatctcactgtgctgtggtctgtcctcacatgtgcactggtaacagactcacacagctgatgaatgcttttctctccttatgtgtggaaggaggggagcacttagacatttgctaactcccagaattggatcatctcctaagatgtacttactttttaaagtccaaatatgtttatatttaaatatacgtgagcatgttcatcatgttgtatgatttatactaagcattaatgtggctctatgtagcaaatcagttattcatgtaggtaaagtaaatctagaattatttataagaattactcattgaactaattctactatttaggaatttataagagtctaacataggcttagctacagtgaagttttgcattgcttttgaagacaagaaaagtgctagaataaataagattacagagaaaattttttgttaaaaccaagtgatttccagctgatgtatctaatattttttaaaacaaacattatagaggtgtaatttatttacaataaaatgttcctactttaaatatacaattcagtgagttttgataaattgatatacccatgtaaccaacactccagtcaagcttcagaatatttccatcaccccagaaggttctcttgtatacctgctcagtcagttcctttcactcccaattgttggcagccattgataggaattctatcactataggttagttttctttgttccagaacatcatgaaagcggcgtcatgtactgtgtattcttatgaatggtttctttccatcagcataatgatttgagattggtccatgttgtgtgattcagtggtttgttccttcttatttctgaagagttttccattgtatgaatataccacaatttgtttcctccccaccagtttctgatactacaattaaaactgtctacatttac

SEQ ID NO: 2454 - protein, 669 aa, Homo sapien
MTAAAGSAGRAAVPLLLCALLAPGGAYVLDDSDGLGREFDGIGAVSGGGATSRLLVNYPEPYRSQILDYLFKPNFGASLHILKVEIGGDGQTTDGTEPSHMHYALDENYFRGYEWWLMKEAKKRNPNITLIGLPWSFPGWLGKGFDWPYVNLQLTAYYVVTWIVGAKRYHDLDIDYIGIWNERSYNANYIKILRKMLNYQGLQRVKIIASDNLWESISASMLLDAELFKVVDVIGAHYPGTHSAKDAKLTGKKLWSSEDFSTLNSDMGAGCWGRILNQNYINGYMTSTIAWNLVASYYEQLPYGRCGLMTAQEPWSGHYVVESPVWVSAHTTQFTQPGWYYLKTVGHLEKGGSYVALTDGLGNLTIIIETMSHKHSKCIRPFLPYFNVSQQFATFVLKGSFSEIPELQVWYTKLGKTSERFLFKQLDSLWLLDSDGSFTLSLHEDELFTLTTLTTGRKGSYPLPPKSQPFPSTYKDDFNVDYPFFSEAPNFADQTGVFEYFTNIEDPGEHHFTLRQVLNQRPITWAADASNTISIIGDYNWTNLTIKCDVYIETPDTGGVFIAGRVNKGGILIRSARGIFFWIFANGSYRVTGDLAGWIIYALGRVEVTAKKWYTLTLTIKGHFASGMLNDKSLWTDIPVNFPKNGWAAIGTHSFEFAQFDNFLVEATR

SEQ ID NO: 2455 - DNA, 4083 bp, Homo sapien
atggcgagcgactccccggctcgaagcctggatgaaatagatctctcggctctgagggaccctgcagggatctttgaattggtggaacttgttggaaatggaacatacgggcaagtttataagggtcgtcatgtcaaaacgggccagcttgcagccatcaaggttatggatgtcacaggggatgaagaggaagaaatcaaacaagaaattaacatgttgaagaaatattctcatcaccggaatattgctacatactatggtgcttttatcaaaaagaacccaccaggcatggatgaccaactttggttggtgatggagttttgtggtgctggctctgtcaccgacctgatcaagaacacaaaaggtaacacgttgaaagaggagtggattgcatacatctgcagggaaatcttacgggggctgagtcacctgcaccagcataaagtgattcatcgagatattaaagggcaaaatgtcttgctgactgaaaatgcagaagttaaactagtggactttggagtcagtgctcagcttgatcgaacagtgggcaggaggaatactttcattggaactccctactggatggcaccagaagttattgcctgtgatgaaaacccagatgccacatatgatttcaagagtgacttgtggtctttgggtatcaccgccattgaaatggcagaaggtgctccccctctctgtgacatgcaccccatgagagctctcttcctcatcccccggaatccagcgcctcggctgaagtctaagaagtggtcaaaaaaattccagtcatttattgagagctgcttggtaaagaatcacagccagcgaccagcaacagaacaattgatgaagcatccatttatacgagaccaacctaatgagcgacaggtccgcattcaactcaaggaccatattgatagaacaaagaagaagcgaggagaaaaagatgagacagagtatgagtacagtggaagtgaggaagaagaggaggagaatgactcaggagagcccagctccatcctgaatctgccaggggagtcgacgctgcggagggactttctgaggctgcagctggccaacaaggagcgttctgaggccctacggaggcagcagctggagcagcagcagcgggagaatgaggagcacaagcggcagctgctggccgagcgtcagaagcgcatcgaggagcagaaagagcagaggcggcggctggaggagcaacaaaggcgagagaaggagctgcggaagcagcaggagagggagcagcgccggcactatgaggagcagatgcgccgggaggaggagaggaggcgtgcggagcatgaacaggaatacatcaggcgacagttagaggaggagcagagacagttagagatcttgcagcagcagctactgcatgaacaagctctacttctggaatataagcgcaaacaattggaagaacagagacaagcagaaagactgcagaggcagctaaagcaagaaagagactacttagtttcccttcagcatcagcggcaggagcagaggcctgtggagaagaagccactgtaccattacaaagaaggaatgagtcctagtgagaagccagcatgggccaaggaggtagaagaacggtcaaggctcaaccggcaaagttcccctgccatgcctcacaaggttgccaacaggatatctgaccccaacctgcccccaaggtcggagtccttcagcattagtggagttcagcctgctcgaacaccccccatgctcagaccagtcgatccccagatcccacatctggtagctgtaaaatcccagggacctgccttgaccgcctcccagtcagtgcacgagcagcccacaaagggcctctctgggtttcaggaggctctgaacgtgacctcccaccgcgtggagatgccacgccagaactcagatcccacctcggaaaatcctcctctccccactcgcattgaaaagtttgaccgaagctcttggttacgacaggaagaagacattccaccaaaggtgcctcaaagaacaacttctatatccccagcattagccagaaagaattctcctgggaatggtagtgctctgggacccagactaggatctcaacccatcagagcaagcaaccctgatctccggagaactgagcccatcttggagagccccttgcagaggaccagcagtggcagttcctccagctccagcacccctagctcccagcccagctcccaaggaggctcccagcctggatcacaagcaggatccagtgaacgcaccagagttcgagccaacagtaagtcagaaggatcacctgtgcttccccatgagcctgccaaggtgaaaccagaagaatccagggacattacccggcccagtcgaccagctagctacaaaaaagctatagatgaggatctgacggcattagccaaagaactaagagaactccggattgaagaaacaaaccgcccaatgaagaaggtgactgattactcctcctccagtgaggagtcagaaagtagcgaggaagaggaggaagatggagagagcgagacccatgatgggacagtggctgtcagcgacatacccagactgataccaacaggagctccaggcagcaacgagcagtacaatgtgggaatggtggggacgcatgggctggagacctctcatgcggacagtttcagcggcagtatttcaagagaaggaaccttgatgattagagagacgtctggagagaagaagcgatctggccacagtgacagcaatggctttgctggccacatcaacctccctgacctggtgcagcagagccattctccagctggaaccccgactgagggactggggcgcgtctcaacccattcccaggagatggactctgggactgaatatggcatggggagcagcaccaaagcctccttcaccccctttgtggaccccagagtataccagacgtctcccactgatgaagatgaagaggatgaggaatcatcagccgcagctctgtttactagcgaacttcttaggcaagaacaggccaaactcaatgaagcaagaaagatttcggtggtaaatgtaaacccaaccaacattcggcctcatagcgacacaccagaaatcagaaaatacaagaaacgattcaactcagaaatactttgtgcagctctgtggggtgtaaaccttctggtggggactgaaaatggcctgatgcttttggaccgaagtgggcaaggcaaagtctataatctgatcaaccggaggcgatttcagcagatggatgtgctagagggactgaatgtccttgtgacaatttcaggaaagaagaataagctacgagtttactatctttcatggttaagaaacagaatactacataatgacccagaagtagaaaagaaacaaggctggatcactgttggggacttggaaggctgtatacattataaagttgttaaatatgaaaggatcaaatttttggtgattgccttaaagaatgctgtggaaatatatgcttgggctcctaaaccgtatcataaattcatggcatttaagtcttttgcagatctccagcacaagcctctgctagttgatctcacggtagaagaaggtcaaagattaaaggttatttttggttcacacactggtttccatgtaattgatgttgattcaggaaactcttatgatatctacataccatctcatattcagggcaatatcactcctcatgctattgtcatcttgcctaaaacagatggaatggaaatgcttgtttgctatgaggatgagggggtgtatgtaaacacctatggccggataactaaggatgtggtgctccaatggggagaaatgcccacgtctgtggcctacattcattccaatcagataatgggctggggcgagaaagctattgagatccggtcagtggaaacaggacatttggatggagtatttatgcataagcgagctcaaaggttaaagtttctatgtgaaagaaatgataaggtattttttgcatccgtgcgatctggaggaagtagccaagtgtttttcatgaccctcaacagaaattccatgatgaactggtaa

SEQ ID NO: 2456 - protein, 1360 aa, Homo sapien
MASDSPARSLDEIDLSALRDPAGIFELVELVGNGTYGQVYKGRHVKTGQLAAIKVMDVTGDEEEEIKQEINMLKKYSHHRNIATYYGAFIKKNPPGMDDQLWLVMEFCGAGSVTDLIKNTKGNTLKEEWIAYICREILRGLSHLHQHKVIHRDIKGQNVLLTENAEVKLVDFGVSAQLDRTVGRRNTFIGTPYWMAPEVIACDENPDATYDFKSDLWSLGITAIEMAEGAPPLCDMHPMRALFLIPRNPAPRLKSKKWSKKFQSFIESCLVKNHSQRPATEQLMKHPFIRDQPNERQVRIQLKDHIDRTKKKRGEKDETEYEYSGSEEEEEENDSGEPSSILNLPGESTLRRDFLRLQLANKERSEALRRQQLEQQQRENEEHKRQLLAERQKRIEEQKEQRRRLEEQQRREKELRKQQEREQRRHYEEQMRREEERRRAEHEQEYIRRQLEEEQRQLEILQQQLLHEQALLLEYKRKQLEEQRQAERLQRQLKQERDYLVSLQHQRQEQRPVEKKPLYHYKEGMSPSEKPAWAKEVEERSRLNRQSSPAMPHKVANRISDPNLPPRSESFSISGVQPARTPPMLRPVDPQIPHLVAVKSQGPALTASQSVHEQPTKGLSGFQEALNVTSHRVEMPRQNSDPTSENPPLPTRIEKFDRSSWLRQEEDIPPKVPQRTTSISPALARKNSPGNGSALGPRLGSQPIRASNPDLRRTEPILESPLQRTSSGSSSSSSTPSSQPSSQGGSQPGSQAGSSERTRVRANSKSEGSPVLPHEPAKVKPEESRDITRPSRPASYKKAIDEDLTALAKELRELRIEETNRPMKKVTDYSSSSEESESSEEEEEDGESETHDGTVAVSDIPRLIPTGAPGSNEQYNVGMVGTHGLETSHADSFSGSISREGTLMIRETSGEKKRSGHSDSNGFAGHINLPDLVQQSHSPAGTPTEGLGRVSTHSQEMDSGTEYGMGSSTKASFTPFVDPRVYQTSPTDEDEEDEESSAAALFTSELLRQEQAKLNEARKISVVNVNPTNIRPHSDTPEIRKYKKRFNSEILCAALWGVNLLVGTENGLMLLDRSGQGKVYNLINRRRFQQMDVLEGLNVLVTISGKKNKLRVYYLSWLRNRILHNDPEVEKKQGWITVGDLEGCIHYKVVKYERIKFLVIALKNAVEIYAWAPKPYHKFMAFKSFADLQHKPLLVDLTVEEGQRLKVIFGSHTGFHVIDVDSGNSYDIYIPSHIQGNITPHAIVILPKTDGMEMLVCYEDEGVYVNTYGRITKDVVLQWGEMPTSVAYIHSNQIMGWGEKAIEIRSVETGHLDGVFMHKRAQRLKFLCERNDKVFFASVRSGGSSQVFFMTLNRNSMMNW

SEQ ID NO: 2457 - DNA, 724 bp, Homo sapien
gctgcggccgcccgcgcggacccggcgagaggcggcggcgggagcggcggtgatggacgggtccggggagcagcccagaggcggggggcccaccagctctgagcagatcatgaagacaggggcccttttgcttcaggggatgattgccgccgtggacacagactccccccgagaggtctttttccgagtggcagctgacatgttttctgacggcaacttcaactggggccgggttgtcgcccttttctactttgccagcaaactggtgctcaaggccctgtgcaccaaggtgccggaactgatcagaaccatcatgggctggacattggacttcctccgggagcggctgttgggctggatccaagaccagggtggttgggacggcctcctctcctactttgggacgcccacgtggcagaccgtgaccatctttgtggcgggagtgctcaccgcctcgctcaccatctggaagaagatgggctgaggcccccagctgccttggactgtgtttttcctccataaattatggcatttttctgggaggggtggggattgggggacatgggcatttttcttacttttgtaattattggggggtgtggggaagagtggtcttgagggggtaataaacctccttcgggacacaaaaaaaaaaaaaaaaaaaaaaaaaaaaaaaaaaaaaaaaaaaaaaaaaaaaaaaaaaaaaaaaaaaaaaaaaaaaaaa

SEQ ID NO: 2458 - protein, 143 aa, Homo sapien
MDGSGEQPRGGGPTSSEQIMKTGALLLQGMIAAVDTDSPREVFFRVAADMFSDGNFNWGRVVALFYFASKLVLKALCTKVPELIRTIMGWTLDFLRERLLGWIQDQGGWDGLLSYFGTPTWQTVTIFVAGVLTASLTIWKKMG

SEQ ID NO: 2459 - DNA, 2545 bp, Homo sapien
gagggctggccagtgaggctcggcccggggaaagtgaaagtttgcctgggtcctctcggcgccagagccgctctccgcatcccaggacagcggtgcggccctcggccggggcgcccactccgcagcagccagcgagcgagcgagcgagcgagggcggccgacgcgcccggccgggacccagctgcccgtatgaccgcgccgggcgccgccgggcgctgccctcccacgacatggctgggctccctgctgttgttggtctgtctcctggcgagcaggagtatcaccgaggaggtgtcggagtactgtagccacatgattgggagtggacacctgcagtctctgcagcggctgattgacagtcagatggagacctcgtgccaaattacatttgagtttgtagaccaggaacagttgaaagatccagtgtgctaccttaagaaggcatttctcctggtacaagacataatggaggacaccatgcgcttcagagataacacccccaatgccatcgccattgtgcagctgcaggaactctctttgaggctgaagagctgcttcaccaaggattatgaagagcatgacaaggcctgcgtccgaactttctatgagacacctctccagttgctggagaaggtcaagaatgtctttaatgaaacaaagaatctccttgacaaggactggaatattttcagcaagaactgcaacaacagctttgctgaatgctccagccaagatgtggtgaccaagcctgattgcaactgcctgtaccccaaagccatccctagcagtgacccggcctctgtctcccctcatcagcccctcgccccctccatggcccctgtggctggcttgacctgggaggactctgagggaactgagggcagctccctcttgcctggtgagcagcccctgcacacagtggatccaggcagtgccaagcagcggccacccaggagcacctgccagagctttgagccgccagagaccccagttgtcaaggacagcaccatcggtggctcaccacagcctcgcccctctgtcggggccttcaaccccgggatggaggatattcttgactctgcaatgggcactaattgggtcccagaagaagcctctggagaggccagtgagattcccgtaccccaagggacagagctttccccctccaggccaggagggggcagcatgcagacagagcccgccagacccagcaacttcctctcagcatcttctccactccctgcatcagcaaagggccaacagccggcagatgtaactggtacagccttgcccagggtgggccccgtgaggcccactggccaggactggaatcacaccccccagaagacagaccatccatctgccctgctcagagaccccccggagccaggctctcccaggatctcatcactgcgcccccagggcctcagcaacccctccaccctctctgctcagccacagctttccagaagccactcctcgggcagcgtgctgccccttggggagctggagggcaggaggagcaccagggatcggaggagccccgcagagccagaaggaggaccagcaagtgaaggggcagccaggcccctgccccgttttaactccgttcctttgactgacacaggccatgagaggcagtccgagggatcctccagcccgcagctccaggagtctgtcttccacctgctggtgcccagtgtcatcctggtcttgctggccgtcggaggcctcttgttctacaggtggaggcggcggagccatcaagagcctcagagagcggattctcccttggagcaaccagagggcagccccctgactcaggatgacagacaggtggaactgccagtgtagagggaattctaagacccctcaccatcctggacacactcgtttgtcaatgtccctctgaaaatgtgacgcccagccccggacacagtactccagatgttgtctgaccagctcagagagagtacagtgggactgttaccttccttgatatggacagtattcttctatttgtgcagattaagattgcattagtttttttcttaacaactgcatcatactgttgtcatatgttgagcctgtggttctataaaacccctagttccatttcccataaacttctgtcaagccagaccatctctaccctgtacttggacaacttaacttttttaaccaaagtgcagtttatgttcacctttgttaaagccacctttgtggtttctgcccatcacctgaacctactgaagttgtgtgaaatcctaattctgtcatctccgtagccctcccagttgtgcctcctgcacattgatgagtgcctgctgttgtctttgcccatgttgttgatgtagctgtgaccctattgttcctcacccctgccccccgccaaccccagctggcccacctcttccccctcccacccaagcccacagccagcccatcaggaagccttcctggcttctccacaaccttctgactgtcttttcagtcatgccccctgctcttttgtatttggctaatagtatatcaatttgcactt

SEQ ID NO: 2460 - protein, 554 aa, Homo sapien
MTAPGAAGRCPPTTWLGSLLLLVCLLASRSITEEVSEYCSHMIGSGHLQSLQRLIDSQMETSCQITFEFVDQEQLKDPVCYLKKAFLLVQDIMEDTMRFRDNTPNAIAIVQLQELSLRLKSCFTKDYEEHDKACVRTFYETPLQLLEKVKNVFNETKNLLDKDWNIFSKNCNNSFAECSSQDVVTKPDCNCLYPKAIPSSDPASVSPHQPLAPSMAPVAGLTWEDSEGTEGSSLLPGEQPLHTVDPGSAKQRPPRSTCQSFEPPETPVVKDSTIGGSPQPRPSVGAFNPGMEDILDSAMGTNWVPEEASGEASEIPVPQGTELSPSRPGGGSMQTEPARPSNFLSASSPLPASAKGQQPADVTGTALPRVGPVRPTGQDWNHTPQKTDHPSALLRDPPEPGSPRISSLRPQGLSNPSTLSAQPQLSRSHSSGSVLPLGELEGRRSTRDRRSPAEPEGGPASEGAARPLPRFNSVPLTDTGHERQSEGSSSPQLQESVFHLLVPSVILVLLAVGGLLFYRWRRRSHQEPQRADSPLEQPEGSPLTQDDRQVELPV

SEQ ID NO: 2461 - DNA, 3804 bp, Homo sapien
taaagtcatcaaaacaacgttatatcctgtgtgaaatgctgcagtcaggatgccttgtggtttgagtgccttgatcatgtgccctaaggggatggtggcggtggtggtggccgtggatgacggagactctcaggccttggcaggtgcgtctttcagttcccctcacacttcgggttcctcggggaggaggggctggaaccctagcccatcgtcaggacaaagatgctcaggctgctcttggctctcaacttattcccttcaattcaagtaacaggaaacaagattttggtgaagcagtcgcccatgcttgtagcgtacgacaatgcggtcaaccttagctgcaagtattcctacaatctcttctcaagggagttccgggcatcccttcacaaaggactggatagtgctgtggaagtctgtgttgtatatgggaattactcccagcagcttcaggtttactcaaaaacggggttcaactgtgatgggaaattgggcaatgaatcagtgacattctacctccagaatttgtatgttaaccaaacagatatttacttctgcaaaattgaagttatgtatcctcctccttacctagacaatgagaagagcaatggaaccattatccatgtgaaagggaaacacctttgtccaagtcccctatttcccggaccttctaagcccttttgggtgctggtggtggttggtggagtcctggcttgctatagcttgctagtaacagtggcctttattattttctgggtgaggagtaagaggagcaggctcctgcacagtgactacatgaacatgactccccgccgccccgggcccacccgcaagcattaccagccctatgccccaccacgcgacttcgcagcctatcgctcctgacacggacgcctatccagaagccagccggctggcagcccccatctgctcaatatcactgctctggataggaaatgaccgccatctccagccggccacctcaggcccctgttgggccaccaatgccaatttttctcgagtgactagaccaaatatcaagatcattttgagactctgaaatgaagtaaaagagatttcctgtgacaggccaagtcttacagtgccatggcccacattccaacttaccatgtacttagtgacttgactgagaagttagggtagaaaacaaaaagggagtggattctgggagcctcttccctttctcactcacctgcacatctcagtcaagcaaagtgtggtatccacagacattttagttgcagaagaaaggctaggaaatcattccttttggttaaatgggtgtttaatcttttggttagtgggttaaacggggtaagttagagtagggggagggataggaagacatatttaaaaaccattaaaacactgtctcccactcatgaaatgagccacgtagttcctatttaatgctgttttcctttagtttagaaatacatagacattgtcttttatgaattctgatcatatttagtcattttgaccaaatgagggatttggtcaaatgagggattccctcaaagcaatatcaggtaaaccaagttgctttcctcactccctgtcatgagacttcagtgttaatgttcacaatatactttcgaaagaataaaatagttctcctacatgaagaaagaatatgtcaggaaataaggtcactttatgtcaaaattatttgagtactatgggacctggcgcagtggctcatgcttgtaatcccagcactttgggaggccgaggtgggcagatcacttgagatcaggaccagcctggtcaagatggtgaaactccgtctgtactaaaaatacaaaatttagcttggcctggtggcaggcacctgtaatcccagctgcccaggaggctgaggcatgagaatcgcttgaacctggcaggcggaggttgcagtgagccgagatagtgccacagctctccagcctgggcgacagagtgagactccatctcaaacaacaacaacaacaacaacaacaacaacaaaccacaaaattatttgagtactgtgaaggattatttgtctaacagttcattccaatcagaccaggtaggagctttcctgtttcatatgtttcagggttgcacagttggtctctttaatgtcggtgtggagatccaaagtgggttgtggaaagagcgtccataggagaagtgagaatactgtgaaaagggatgttagcattcattagagtatgaggatgagtcccaagaaggttctttggaaggaggacgaatagaatggagtaatgaaattcttgccatgtgctgaggagatagccagcattaggtgacaatcttccagaagtggtcaggcagaaggtgccctggtgagagctcctttacagggactttatgtggtttagggctcagagctccaaaactctgggctcagctgctcctgtaccttggaggtccattcacatgggaaagtattttggaatgtgtcttttgaagagagcatcagagttcttaagggactgggtaaggcctgaccctgaaatgaccatggatatttttctacctacagtttgagtcaactagaatatgcctggggaccttgaagaatgcccttcagtggccctcaccatttgttcatgcttcagttaattcaggtgttgaaggagcttaggttttagaggcacgtagacttggttcaagtctcgttagtagttgaatagcctcaggcaagtcactgcccacctaagatgatggttcttcaactataaatggagataatggttacaaatgtctcttcctatagtataatctccataagggcatggcccaagtctgtctttgactctgcctatccctgacgtttagtagcatgcccgacatacaatgttagctattggtattattgccatatagataaattatgtataaaaattaaactgggcaatagcctaagaaggggggaatattgtaacacaaatttaaacccactacgcagggatgaggtgctataatatgaggaccttttaacttccatcattttcctgtttcttgaaatagtttatcttgtaatgaaatataaggcacctcccacttttatgtatagaaagaggtcttttaatttttttttaatgtgagaaggaagggaggagtaggaatcttgagattccatatcgaaaatactgtactttggttgatttttaagtgggcttccattccatggatttaatcagtcccaagaagatcaaactcagcagtacttgggtgctgaagaactgttggatttaccctggcacgtgtgccacttgcccagcttcttgggcacacagagttcttcaatccaagttatcagattgtatttgaaaatgacagagctggagagttttttgaaatggcagtggcaaataaataaatacttttttttaaatggaaagacttgatctatggtaataaatgattttgttttctgactggaaaaataggcctactaaagatgaatcacacttgagatgtttcttactcactctgcacagaaacaaagaagaaatgttatacagggaagtccgttttcactattagtatgaaccaagaaatggttcaaaaacagtggtaggagcaatgctttcatagtttcagatatggtagttatgaagaaaacaatgtcatttgctgctattattgtaagagtcttataattaatggtactcctataatttttgattgtgagctcacctatttgggttaagcatgccaatttaaagagaccaagtgtatgtacattatgttctacatattcagtgataaaattactaaactact

SEQ ID NO: 2462 - protein, 220 aa, Homo sapien
MLRLLLALNLFPSIQVTGNKILVKQSPMLVAYDNAVNLSCKYSYNLFSREFRASLHKGLDSAVEVCVVYGNYSQQLQVYSKTGFNCDGKLGNESVTFYLQNLYVNQTDIYFCKIEVMYPPPYLDNEKSNGTIIHVKGKHLCPSPLFPGPSKPFWVLVVVGGVLACYSLLVTVAFIIFWVRSKRSRLLHSDYMNMTPRRPGPTRKHYQPYAPPRDFAAYRS

SEQ ID NO: 2463 - DNA, 3804 bp, Homo sapien; identical to SEQ ID NO: 2461

SEQ ID NO: 2464 - protein, 220 aa, Homo sapien; identical to SEQ ID NO: 2462

SEQ ID NO: 2465 - DNA, 2010 bp, Homo sapien; identical to SEQ ID NO: 1781

SEQ ID NO: 2466 - protein, 668 aa, Homo sapien; identical to SEQ ID NO: 1782

SEQ ID NO: 2467 - DNA, 1782 bp, Homo sapien
atgtggctcttcttcgggatcactggattgctgacggcagccctctcaggtcatccatctccagccccacctgaccagctcaacaccagcagtgcagagagtgagctctgggagccaggggagcggcttccggtccgtctgacaaacgggagcagcagctgcagcgggacggtggaggtgcggctcgaggcgtcctgggagcccgcgtgcggggcgctctgggacagccgcgccgccgaggccgtgtgccgagcactgggctgcggcggggcggaggccgcctctcagctcgccccgccgacccctgagctgccgcccccgcctgcagccgggaacaccagcgtagcagctaatgccactctggccggggcgcccgccctcctgtgcagcggcgccgagtggcggctctgcgaggtggtggagcacgcgtgccgcagcgacgggaggcgggcccgtgtcacctgtgcagagaaccgcgcgctgcgcctggtggacggtggcggcgcctgcgccggccgcgtggagatgctggagcatggcgagtggggatcagtgtgcgatgacacttgggacctggaggacgcccacgtggtgtgcaggcaactgggctgcggctgggcagtccaggccctgcccggcttgcacttcacgcccggccgcgggcctatccaccgggaccaggtgaactgctcgggggccgaagcttacctgtgggactgcccggggctgccaggacagcactactgcggccacaaagaggacgcgggcgtggtgtgctcagagcaccagtcctggcgcctgacagggggcgctgaccgctgcgaggggcaggtggaggtacacttccgaggggtctggaacacagtgtgtgacagtgagtggtacccatcggaggccaaggtgctctgccagtccttgggctgtggaactgcggttgagaggcccaaggggctgccccactccttgtccggcaggatgtactactcatgcaatggggaggagctcaccctctccaactgctcctggcggttcaacaactccaacctctgcagccagtcgctggcagccagggtcctctgctcagcttcccggagtttgcacaatctgtccactcccgaagtccctgcaagtgttcagacagtcactatagaatcttctgtgacagtgaaaatagagaacaaggaatctcgggagctaatgctcctcatcccctccatcgttctgggaattctcctccttggctccctcatcttcatagccttcatcctcttgagaattaaaggaaaatatgccctccccgtaatggtgaaccaccagcacctacccaccaccatcccggcagggagcaatagctatcaaccggtccccatcaccatccccaaagaagattcccagcggcatcgggtcacagatgaggaggtccagcaaagcaggttccagatgccacccttggaggaaggacttgaagagttgcatgcctcccacatcccaactgccaaccctggacactgcattacagacccgccatccctgggccctcagtatcacccgaggagcaacagtgagtcgagcacctcttcaggggaggattactgcaatagtcccaaaagcaagctgcctccatggaacccccaggtgttttcttcagagaggagttccttcctggagcagcccccaaacttggagctggccggcacccagccagccttttcagggtcccccagccctcagcctgactccaccgacaacgatgactacgatgacatcagcgcagcctaggcc

SEQ ID NO: 2468 - protein, 592 aa, Homo sapien [sequence omitted]

SEQ ID NO: 2469 - DNA, 1679 bp, Homo sapien; identical to SEQ ID NO: 1960

SEQ ID NO: 2470 - protein, 352 aa, Homo sapien; identical to SEQ ID NO: 1961

SEQ ID NO: 2471 - DNA, 2279 bp, Homo sapien; identical to SEQ ID NO: 323

SEQ ID NO: 2472 - protein, 527 aa, Homo sapien; identical to SEQ ID NO: 324

SEQ ID NO: 2473 - DNA, 2620 bp, Homo sapien
  Unsure 1109-1286: Unknown base
ttcggctcgaggcactacaccgtggcaggtactgctgcagggcagggtgcagaggatgaaagaaatcttaatacttatcactgtcatagccaacagcgttgtaggaaactacataataaaatactgttatattacttcatatatattaaagaaaatgggtcatgtgggtcaacccatgtttttacatgtaaaataatcgttcctgacaaataagaacattgatacatgaggggcccatatgtatgtctctaggaagaaaatatgtctctaggaagaaaattgtgccatatgtaccggcatggactaaggcagaaaaagctgtgtatcagtaggtagatacatttcaggctatggtggtggtggaccaggatatggaaaccaaggtggtggatatggtggaggtggaggatatgatggttacaatgaaggaggaaattttggcggtggtaactatggtggtggtgggaactataatgattttggaaattatagtggacaacagcaatcaaattatggacccatgaaagggggcagttttggtggaagaagctcgggcagtccctatggtggtggttatggatctggtggtggaagtggtggatatggtagcagaaggttctaaaaacagcagaaaagggttgaatgagaaccctacttgcctaaatgaggaatgtctttcctaccatctaaaatacgaaggtttctggctgggtaaggtttgtagttgacagtaaaacctgatgacaccatttgtttccctgcaagtctacattacatatttcacaactttgtccctctctagtaggcacattggaaaaattcttcaactgaaaactaccttggtaccatgtcctacacgtttttttttaaaccttagttttaaaaattcccctgcgaaatagccataagtattcatatcaagtcagttgtgactccttgtgtatacaattcattttttgtgtcttcagggtaaactcaatttttggtaaagtggtttcagcttttgtgaaaaccgtttttgtgtgtaagcatgacacacaacagactcagtaagctgcccatcctcatactaggaaaacaccttcaaaggaacattaaaagttaccagnnnnnnnnnnnnnnnnnnnnnnnnnnnnnnnnnnnnnnnnnnnnnnnnnnnnnnnnnnnnnnnnnnnnnnnnnnnnnnnnnnnnnnnnnnnnnnnnnnnnnnnnnnnnnnnnnnnnnnnnnnnnnnnnnnnnnnnnnnnnnnnnnnnnnnnnnnnnnnnnnnnnnnnnnnnnnnnnnnctagcgcttgatatcaggcagtcgaggctggcagtgagctgactgccccactgtattccagcctgggtgaccccatctcaaagaagaaaagttaccagatgtcatgggtaaaggttggtcttcaagtggcctcataagttgtcttgcatttaaattcagggaattcattggaccaataggttacattttcgttccttttttgttttggttcatctgttaagcagtgggggcctaattactgctcctttgtaaaaacacattttcccaaagaacactgaattaccgttcaaactggttgttgatgggtaataagggctgtttttgctgccccaaaagggcttaacaatttaggcggatagtttacttaaaaaaaaaaatcctttggagacatactgaaaatgcaaactagtttctaaattatcaattccctacatgaagaagcagtttgccagagtttagtctcagaaaatgactggttggctctatttaaatcagaacccaatttctacgcgtgttgaataaggtaacagcctttgatgaatttccttcacaacatggttttagtgaagcaaacattttttttttaagggcattgttctttctagtttatttctttttatgaaataaaattattttatttaaacagttccattgtcgtttctgaaaactacagtattctcagaagttgtagcagcagtaaaaaaaaaaaagttgttctataagtgattggggcagatttaactgattttgttaaaccaatttgtaagttactgcttctaatattacacttctaaaaagctgaatttatactcatgtcctaaaggagaatatgtggtaataaagtatatttgttaagtaactaattgaaataggcttggttttaagagttccagtatataataatcacaaattgaaacctgacagtatcttgggagttccagtaatgtcacaaattagtgaataagcatgccagtgtgcaagggtaatgtaaggattgttagcctatctaaatattcaaaattactttaaaacttaagtatgttttctgatttttaagaattcagaagtgttctgtaatggattcagatgtttcatttgtagtataatgaaatgtttacagaaagataactttttcattaaaatatttttagaaatgtgtgtgttgttttgtcacttcacaatgttcatgtgacttaaacactataggtgaatattttgacttattttaccagtaagtaataaaacaacaggaaacttggaaaaaaaatctatgtcgggtgcggagaaagaggtaatgaaatggcaggaattcgatatcagcttatcggataccg

SEQ ID NO: 2474 - protein, 88 aa, Homo sapien
  unsure 27-86: unknown amino acid
  Unsure 1109-1286: Unknown amino acid
MTHNRLSKLPILILGKHLQRNIKSYQXXXXXXXXXXXXXXXXXXXXXXXXXXXXXXXXXXXXXXXXXXXXXXXXXXXXXXXXXXXXSA

SEQ ID NO: 2475 - DNA, 3727 bp, Homo sapien
cggccgccggcattcgccgcgtggttcccagcgacctgtatcccctcgtgctcggcttcctgcgcgataaccaactctcagaggtggccaataagttcgccaaagcgacaggagctacacagcaggatgccaatgcctcttccctcttagacatctatagcttctggctcaagtctgccaaggtcccagagcgaaagttacaggcaaatggaccagtggctaagaaagctaagaagaaggcctcatccagtgacagtgaggacagcagcgaggaggaggaggaagttcaagggcctccagcaaagaaggctgctgtacctgccaagcgagtcggtctgcctcctgggaaggctgcagccaaagcatcagagagtagcagcagtgaagagtccagtgatgatgatgatgaggaggaccaaaagaaacagcctgtccagaagggagttaagccccaagccaaggcagccaaagctcctcctaagaaggccaagagctctgattctgattctgactcaagctccgaggatgagccaccaaagaaccagaagccaaagataacacctgtgacagttaaagctcagactaaagcccctcccaaaccagctcgagcagcacctaaaatagccaatggtaaagcagccagtagcagcagtagcagcagcagcagcagtagcagtgatgactcagaggaggagaaggcagcagccacccccaagaaggtctggaccataacttctgtcagggcagagactgtacctaaaaagcaagttgtggccaaggccccagtgaaagcagctaccacccctacccggaagagttctagcagtgaggattcctccagtgacgaggaagaggagcaaaaaaaacccatgaaaaataaaccaggtccctacagttcagtccccccgccttctgctcccccaccaaagaagtctctgggaacccagcctcccaagaaggctgtggagaagcagcagcctgtggaaagcagtgaagacagcagtgatgagtctgattcaagttctgaagaagagaagaaacccccaactaaggcagtagtctctaaagcaaccactaaaccacctccagcaaagaaagcagcagagagctcttcagacagctcagactctgacagctctgaggatgatgaagctccttctaagccagctggtaccaccaagaattcttcaaataagccagctgtcaccaccaagtcacctgcagtgaagccagctgcagcccccaagcaacctgtgggcggtggccagaagcttctgacgagaaaggctgacagcagctccagtgaggaagagagcagctccagtgaggaggagaagacaaagaagatggtggccaccactaagcccaaggcgactgccaaagcagctctacctctgcctgccaagcaggctcctcagggtagtagggacagcagctctgattcagacagctccagcagtgaggaggaggaagagaagacatctaagtctgcagttaagaagaagccacagaaggtagcaggaggtgcagccccttccaagccagcctctgcaaagaaaggaaaggctgagagcagcaacagttcttcttctgatgactccagtgaggaagaggaagagaagctcaagggcaagggctctccaagaccacaagcccccaaggccaatggcacctctgcactgactgcccagaatggaaaagcagctaagaacagtgaggaggaggaagaagaaaagaaaaaggcggcagtggtagtttccaaatcaggttcattaaagaagcggaagcagaatgaggctgccaaggaggcagagactcctcaggccaagaagataaagcttcagacccctaacacatttccaaaaaggaagaaaggagaaaaaagggcatcatccccattccgaagggtcagggaggaggaaattgaggtggattcacgagttgcggacaactcctttgatgccaagcgaggtgcagccggagactggggagagcgagccaatcaggttttgaagttcaccaaaggcaagtcctttcggcatgagaaaaccaagaagaagcggggcagctaccggggaggctcaatctctgtccaggtcaattctattaagtttgacagcgagtgacctgaggccatcttcggtgaagcaagggtgatgatcggagactacttactttctccagtggacctgggaaccctcaggtctctaggtgagggtcttgatgaggacagaagtttagagtaggtcctaagactttacagtgtaacatcctctctggtccttttctgtgttcctagttttgtacagacttgtttttgagtgttgagtagcagggacaaaataagggaatgttattttttaagaaaattcattttcattgttgtctccttccttttctgtgaaagtcctcatactgagaaatttgtatattttatattaaatcacttactattgatttttgttgtgattttcaaaggtggattcccacagataaaatcttggctattgcccaaaacatagtaaagggtcacgtgtgactttttataataggaagaaaattctgcctttgtgagtgcacatgtccacatttcatccctccttccctcaaaaccctagagaggggcattaaagaattgttgatgtatatgcaatgtctgttaagcatgcactatgtatttcatcctcatttattgggtctgggactgaagtttttagccagcatggacctaacctactttttgggataaaattctctgttttgttacaggcaaaattctggtatggcgtgaatgccatgggtcattctgaatatatttttttctgtaattttatcattacacgatgtttgcaatacgtgctttgttttttaatttgaaagcaaacttttctactgttgaaagacattttttgacaacttgacccttcctagtattgagttctaagttgaggactgcatcttctcgttttttacagtatagagaacaaaatgacattagtttgaaaaatacatatcacttggtattgctgtcttggttgcagtggtgatacagaattggtttcattaattcctacatggttgagaatcactgatcaagaaagtggggggaaaaaaaacaaacgttaaaacctcaatcctcagtaggaaggtagattacattaggtgaaattataggtaatctatgtatgtgctaatggggttggaaagaaccttacagagcatattacctgataaactggagtgggtttgggagaacaaactaataggattattgtgtctcctagttggtacctgggagcaattgacatgcccccttcagaaccttaactgttagtagcagtggctgtaacaacacaaaccagtgaccagagataacagcttttaggccaagctggcctgacggtatggctgcaggaagtgactgagcagtagcggtactcagccagaccaagacggagagggaagagtccacagctttctggaagctaaggcattctggtggtagaaaagtgtgccccaagccttcatggacgagttataggtcttaagattagtctcctcttgtttggattccatacttgctaaataacctgataataacctggttttccatgtaactgcctctaggaagaaaatgtactgttcatgctgacacagatatttcagtctgcatggtaaaagttctaaatcttactacaaaataataaactggctggtttataatgtg

SEQ ID NO: 2476 - DNA, 2259 bp, Homo sapien
cagttgcttcagcgtcccggtgtggctgtgccgttggtcctgtgcggtcacttagccaagatgcctgaggaaacccagacccaagaccaaccgatggaggaggaggaggttgagacgttcgcctttcaggcagaaattgcccagttgatgtcattgatcatcaatactttctactcgaacaaagagatctttctgagagagctcatttcaaattcatcagatgcattggacaaaatccggtatgaaagcttgacagatcccagtaaattagactctgggaaagagctgcatattaaccttataccgaacaaacaagatcgaactctcactattgtggatactggaattggaatgaccaaggctgacttgatcaataaccttggtactatcgccaagtctgggaccaaagcgttcatggaagctttgcaggctggtgcagatatctctatgattggccagttcggtgttggtttttattctgcttatttggttgctgagaaagtaactgtgatcaccaaacataacgatgatgagcagtacgcttgggagtcctcagcagggggatcattcacagtgaggacagacacaggtgaacctatgggtcgtggaacaaaagttatcctacacctgaaagaagaccaaactgagtacttggaggaacgaagaataaaggagattgtgaagaaacattctcagtttattggatatcccattactctttttgtggagaaggaacgtgataaagaagtaagcgatgatgaggctgaagaaaaggaagacaaagaagaagaaaaagaaaaagaagagaaagagtcggaagacaaacctgaaattgaagatgttggttctgatgaggaagaagaaaagaaggatggtgacaagaagaagaagaagaagattaaggaaaagtacatcgatcaagaagagctcaacaaaacaaagcccatctggaccagaaatcccgacgatattactaatgaggagtacggagaattctataagagcttgaccaatgactgggaagatcacttggcagtgaagcatttttcagttgaaggacagttggaattcagagcccttctatttgtcccacgacgtgctccttttgatctgtttgaaaacagaaagaaaaagaacaacatcaaattgtatgtacgcagagttttcatcatggataactgtgaggagctaatccctgaatatctgaacttcattagaggggtggtagactcggaggatctccctctaaacatatcccgtgagatgttgcaacaaagcaaaattttgaaagttatcaggaagaatttggtcaaaaaatgcttagaactctttactgaactggcggaagataaagagaactacaagaaattctatgagcagttctctaaaaacataaagcttggaatacacgaagactctcaaaatcggaagaagctttcagagctgttaaggtactacacatctgcctctggtgatgagatggtttctctcaaggactactgcaccagaatgaaggagaaccagaaacatatctattatatcacaggtgagaccaaggaccaggtagctaactcagcctttgtggaacgtcttcggaaacatggcttagaagtgatctatatgattgagcccattgatgagtactgtgtccaacagctgaaggaatttgaggggaagactttagtgtcagtcaccaaagaaggcctggaacttccagaggatgaagaagagaaaaagaagcaggaagagaaaaaaacaaagtttgagaacctctgcaaaatcatgaaagacatattggagaaaaaagttgaaaaggtggttgtgtcaaaccgattggtgacatctccatgctgtattgtcacaagcacatatggctggacagcaaacatggagagaatcatgaaagctcaagccctaagagacaactcaacaatgggttacatggcagcaaagaaacacctggagataaaccctgaccattccattattgagaccttaaggcaaaaggcagaggctgataagaacgacaagtctgtgaaggatctggtcatcttgctttatgaaactgcgctcctgtcttctggcttcagtctggaagatccccagacacatgctaacaggatctacaggatgatcaaacttggtctgggtattgatgaagatgaccctactgctgatgataccagtgctgctgtaactgaagaaatgccaccccttgaaggagatgacgacacatcacgcatggaagaagtagactaa

SEQ ID NO: 2477 - protein, 732 aa, Homo sapien
MPEETQTQDQPMEEEEVETFAFQAEIAQLMSLIINTFYSNKEIFLRELISNSSDALDKIRYESLTDPSKLDSGKELHINLIPNKQDRTLTIVDTGIGMTKADLINNLGTIAKSGTKAFMEALQAGADISMIGQFGVGFYSAYLVAEKVTVITKHNDDEQYAWESSAGGSFTVRTDTGEPMGRGTKVILHLKEDQTEYLEERRIKEIVKKHSQFIGYPITLFVEKERDKEVSDDEAEEKEDKEEEKEKEEKESEDKPEIEDVGSDEEEEKKDGDKKKKKKIKEKYIDQEELNKTKPIWTRNPDDITNEEYGEFYKSLTNDWEDHLAVKHFSVEGQLEFRALLFVPRRAPFDLFENRKKKNNIKLYVRRVFIMDNCEELIPEYLNFIRGVVDSEDLPLNISREMLQQSKILKVIRKNLVKKCLELFTELAEDKENYKKFYEQFSKNIKLGIHEDSQNRKKLSELLRYYTSASGDEMVSLKDYCTRMKENQKHIYYITGETKDQVANSAFVERLRKHGLEVIYMIEPIDEYCVQQLKEFEGKTLVSVTKEGLELPEDEEEKKKQEEKKTKFENLCKIMKDILEKKVEKVVVSNRLVTSPCCIVTSTYGWTANMERIMKAQALRDNSTMGYMAAKKHLEINPDHSIIETLRQKAEADKNDKSVKDLVILLYETALLSSGFSLEDPQTHANRIYRMIKLGLGIDEDDPTADDTSAAVTEEMPPLEGDDDTSRMEEVD

SEQ ID NO: 2478 - DNA, 1857 bp, Homo sapien
ggtttccagggaaggcagcgagcaggatcccctactctgcgggcggcgcgaggcgtctggctcttcgcggcggcggcgaggggaaagggagcgcgggggctgggtggaatcgaggagtgaggaaaaagggaaggggcgggggagagggaccagggaaggcgtcggggggaatctcgcgagggttggagttttggcgagagtttgtggaagatggcgcctgttgtgacagggaaatttggtgagcggcctccacctaaacgacttactagggaagctatgcgaaattatttaaaagagcgaggggatcaaacagtacttattcttcatgcaaaagttgcacagaagtcatatggaaatgaaaaaaggtttttttgcccacctccttgtgtatatcttatgggcagtggatggaagaaaaaaaaagaacaaatggaacgcgatggttgttctgaacaagagtctcaaccgtgtgcatttattgggataggaaatagtgaccaagaaatgcagcagctaaacttggaaggaaagaactattgcacagccaaaacattgtatatatctgactcagacaagcgaaagcacttcatgttgtctgtaaagatgttctatggcaacagtgatgacattggtgtgttcctcagcaagcggataaaagtcatctccaaaccttccaaaaagaagcagtcattgaaaaatgctgacttatgcattgcctcaggaacaaaggtggctctgtttaatcgactacgatcccagacagttagtaccagatacttgcatgtagaaggaggtaattttcatgccagttcacagcagtggggagccttttttattcatctcttggatgatgatgaatcagaaggagaagaattcacagtccgagatggctacatccattatggacaaacagtcaaacttgtgtgctcagttactggcatggcactcccaagattgataattaggaaagttgataagcagaccgcattattggatgcagatgatcctgtgtcacaactccataaatgtgcattttaccttaaggatacagaaagaatgtatttgtgcctttctcaagaaagaataattcaatttcaggccactccatgtccaaaagaaccaaataaagagatgataaatgatggcgcttcctggacaatcattagcacagataaggcagagtatacattttatgagggaatgggccctgtccttgccccagtcactcctgtgcctgtggtagagagccttcagttgaatggcggtggggacgtagcaatgcttgaacttacaggacagaatttcactccaaatttacgagtgtggtttggggatgtagaagctgaaactatgtacaggtgtggagagagtatgctctgtgtcgtcccagacatttctgcattccgagaaggttggagatgggtccggcaaccagtccaggttccagtaactttggtccgaaatgatggaatcatttattccaccagccttacctttacctacacaccagaaccagggccgcggccacattgcagtgcagcaggagcaatccttcgagccaattcaagccaggtgccccctaacgaatcaaacacaaacagcgagggaagttacacaaacgccagcacaaattcaaccagtgtcacatcatctacagccacagtggtatcctaactaccgtctttttgctaggacttaaactgacttgagtgtggcaaaaagttaacaaaaaaggagaaaaaatgaacaatcgtttgtggtttcttgggaaaacttttcataccaggtgatactattcaaaaaccccgttgtctccctgcaagtgctgatttgaaatgcagaagccacagtaaaaaa

SEQ ID NO: 2479 - protein, 487 aa, Homo sapien
MAPVVTGKFGERPPPKRLTREAMRNYLKERGDQTVLILHAKVAQKSYGNEKRFFCPPPCVYLMGSGWKKKKEQMERDGCSEQESQPCAFIGIGNSDQEMQQLNLEGKNYCTAKTLYISDSDKRKHFMLSVKMFYGNSDDIGVFLSKRIKVISKPSKKKQSLKNADLCIASGTKVALFNRLRSQTVSTRYLHVEGGNFHASSQQWGAFFIHLLDDDESEGEEFTVRDGYIHYGQTVKLVCSVTGMALPRLIIRKVDKQTALLDADDPVSQLHKCAFYLKDTERMYLCLSQERIIQFQATPCPKEPNKEMINDGASWTIISTDKAEYTFYEGMGPVLAPVTPVPVVESLQLNGGGDVAMLELTGQNFTPNLRVWFGDVEAETMYRCGESMLCVVPDISAFREGWRWVRQPVQVPVTLVRNDGIIYSTSLTFTYTPEPGPRPHCSAAGAILRANSSQVPPNESNTNSEGSYTNASTNSTSVTSSTATVVS

SEQ ID NO: 2480 - DNA, 3718 bp, Homo sapien
ggtggtggtgctgggagtgtcgtggacgccgtgccgttactcgtagtcaggcggcggcgcaggcggcggcggcggcatagcgcacagcgcgccttagcagcagcagcagcagcagcagcatcggaggtacccccgccgtcgcagcccccgcgctggtgcagccaccctcgctccctctgctcttcctcccttcgctcgcaccatggctgatcagctgaccgaagaacagattgctgaattcaaggaagccttctccctatttgataaagatggcgatggcaccatcacaacaaaggaacttggaactgtcatgaggtcactgggtcagaacccaacagaagctgaattgcaggatatgatcaatgaagtggatgctgatggtaatggcaccattgacttccccgaatttttgactatgatggctagaaaaatgaaagatacagatagtgaagaagaaatccgtgaggcattccgagtctttgacaaggatggcaatggttatatcagtgcagcagaactacgtcacgtcatgacaaacttaggagaaaaactaacagatgaagaagtagatgaaatgatcagagaagcagatattgatggagacggacaagtcaactatgaagaattcgtacagatgatgactgcaaaatgaagacctactttcaactcctttttcccccctctagaagaatcaaattgaatcttttacttacctcttgcaaaaaaaatgaaaaatgaaaaaaacaaattcaaaacctattcaaatgggttctagttcaatttgtttagtataaattgtcatagctggtttactgaaaacaaacacatttaaaattggtttacctcaggatgacgtgcagaaaaatgggtgaaggataaaccgttgagacgtggccccactggtaggatggtcctcttgtacttcgtgtgctccgacccatggtgacgatgacacaccctggtggcatgcccgtgtatgttggtttagcgttgtctgcattgttctagagtgaaacaggtgtcaggctgtcactgttcacacaaatttttaataagaaacatttaccaagggagcatctttggactctctgtttttaaaaccttctgaaccatgacttggagccggcagagtaggctgtggctgtggacttcagcacaaccatcaacattgctgttcaaagaaattacagtttacgtccattccaagttgtaaatgctagtcttttttttttttttttccaataaaaagaccattaacttaaagtggtgttaaatgctttgtaaagctgagatctaaatggggacaaggcaggtggaggggaggccagtgtacatgtaaatgcccacagcccagcattgggtttccctcccaaggccccagcaccaacctctgagcccaagaccttgcctgaaaacaagcagataccgattgcttcatcctatttatggacatgtaggtctagttgcattttcactggggggaggggggaaggtgaattatggtaacttttaatgatctattcaggcagtagagctcttaaggaaaaaaaaaacccactttctctcaagcatgtatttaggggttgttctcaattgtgctgctgattacctgtcttatgtaactacttgagaccatctgcaagagacatgatttagtgtgtctgtaattcaatcttcgctgtgtgtggtagaagcagtagtcacttttgtaagccagtctcttcatgcctaaaagacactaccagtcacctttgattcgcgacttttaatttatgattatacttagcctcctcctcctttttttttttttcccaagttgacttgactttgcttttttccccccaagtagaactaatgctagcttccagcttgaaagtaaaactccagtgtggagtgaattttgtgtctaattataaacctgtaaccaaaactcagacatctggtactggtctttgcattgagattggtccctgtaaaaccccctttaaaacatattgcatttagtacagagctcttttttgaaatgaaggctggagatgtgcatttttcacggtgttaactggttgtatcttattagcaaggagattggggttttgagtgtttgcgtgggtggtttcaatttgccagggaacagtggcaggctgctagcaaggcagtgagaagctcttggcagccaaatgggtgcattcagggctgatttatagagacccttggcttctccttctcctactccctgtctttctggcattttgtagcttgttagattttctgccagaggggtgggtcagagcagtggaggggagacatcgcccatgtgcttctgctactggtccttgggctgggtggttggtagaggagatgttgacactatgagctaagggttggcttttgtaattacctgaatctgaaaggaatgcctaaggttaccttggggtttctcttctggtgagatagggttcctggtttgagtaagttaatgtcctggatatttcttgtggcagggggtggtcaaagagcctgattgctgacccagtctcaggcctgtggtcgatgacctctcggtagtttcaaagggggctggagggggatatttgacttgttttttcgaaatgtagccttctaaccctcaagtctttagaagctgggtggactcttagtggtcctgcagcgtatcctaaaagactacctttgaaacaggattcttgtatggccaggatcgtgtctgggaaccagaaaccctacaccctccccctccagggaatgctgagttccagttttgagcagaggtgaggcagaatccactgtagccttccgccctggtatttggggggatgaccagcccaggcgttgggtgttagtctgcatgagtttgtgagaggaaataactgggtgtcctggcagtgcccttgaagttggttaggaccttcctgtaaactcttgcccctacttctaactactctataaatatatacatatatttatatataaagtgattagttgaactggcatcctgctttagcctgagacttgccataagaaactgctgagtacttggcaaaccctttcatagttttgttctccatctgtttggggtaggtgttgagcgaggcaaatggatctcgatatttcagatgggcttttgatgcactgttgccaaggaaggctttttctgattttttgacaaatgaatttttgcacactttcattggtgtctttcggcaacttacacacattgaaaatgagctattgtacatatttttatattctctttataaatgcatgtctgattgtacttgtaacaatattgtaatgaacggctgtgcagtaggcccagcgctgctgtgtctcgtcagaggaatagcttaccacgaacccctcagcatactgggaatctcttcctgaacaacgaatgtaaatttggtcaagtctactcttccgttcattcaattattttaagcatttgaattatttattgtatatcctaaatatatttctcctttggcagtgactagatttccactaatgtgtcttaatctatccctccagctggcagttactgtttttttaatcccctgaagttgtcctgtaggagacagaaattctttgctgtctgtatcccttggagtaagaaggtagtggcatgggtggagtgtgtgttctttctccaaatctattatgatgtttattaaacacttctgtagcaaaaaaaaaaaaaaaa

SEQ ID NO: 2481 - protein, 149 aa, Homo sapien [sequence omitted]

SEQ ID NO: 2482 - DNA, 3952 bp, Homo sapien
gcatgtatttagtaggttagaggtgggaactagagatcagagaattgtttatggcagcagagttagcagtaacttgagagggcatagctaagtcaaagacctacttccccacactacatcattagcaataacaattgctgaatgttcacaggatggcaatggttatatcagtgcagcagaactacgtcacgtcatgacaaacttaggagaaaaactaacagatgaagaagtagatgaaatgatcagagaagcagatattgatggagacggacaagtcaactatgaagaattcgtacagatgatgactgcaaaatgaagacctactttcaactcctttttcccccctctagaagaatcaaattgaatcttttacttacctcttgcaaaaaaaagaaaaaagaaaaaagttcatttattcattctgtttctatatagcaaaactgaatgtcaaaagtaccttctgtccacacacacaaaatctgcatgtattggttggtggtcctgtcccctaaagatcaagctacacatcagttttacaatataaatacttgtactaccttaatgataaggactccttaaagttccatttgctaatgattaatacactgtttgggctggccagtttttcatgcatgcagcttgacgattgagcacagtcaggcctttgtattaaaaatgaaaaatgaaaaaacaaattcaaaacctattcaaatgggttctagttcaatttgtctagtataaattgtcatagctggtttactgaaaacaaacacatttaaaatgggtttacctcaggatgacgtgcagaaaaatgggtgaaggataaaccgttgagacgtggccccactggtaggatggtcctcttgtacttcgtgtgctccgaaccatggtgacgatgacacaccctgggggcatgcccgtgtatgttggtttagcgttgtctgcattgttctagagtgaaacaggtgtcaggctgtcactgttcacacaaatttttaataagaaacatttaccaagggagcatctttggactctctgtttttaaaaccttctgaaccatgacttggagccggcagagtaggctgtggctgtggacttcagcacaaccatcaacattgctgttcaaagaaattacagtttacgtccattccaagttgtaaatgctagtctttttcttttttttttccaataaaaagaccattaacttaaagtggtgttaaatgctttgtaaagctgagatctaaatggggacaaggcaggtggaggggaggccagtgtacatgtaaatgcccacagcccagcattgggtttccctcccaaggccccagcaccaacctctgagcccaagaccttgcctgaaaacaagcagataccgattgcttcatcctatttatggacatgtaggtctagttgcattttcactggggggaggggggaaggtgaattatggtaacttttaatgatctattcaggcagtagagctcttaaggaaaaaaaaaaacccactttctctcaagcatgtatttaggggttgttctcaattgtgctgctgattacctgtcttatgtaactacttgagaccatctgcaagagacatgatttagtgtgtctgtaattcaatcttcgctgtgtgtggtagaagcagtagtcacttttgtaagccagtctcttcatgcctaaaagacactaccagtcacctttgattcgcgacttttaatttatgattatacttagcctcctcctcctttttttttttttcccaagttgacttgactttgcttttttccccccaagtagaactaatgctagcttccagcttgaaagtaaaactccagtgtggagtgaattttgtgtctaattataaacctgtaaccaaaactcagacatctggtactggtctttgcattgagattggtccctgtaaaaccccctttaaaagcatattgcatttagtacagagctcttttttgaaatgaaggctggagatgtgcatttttcacggtgttaactggttgtatcttattagcaaggagattggggttttgagtgtttgcgtgggtggtttcaatttgccagggaacagtggcaggctgctagcaaggcagtgagaagctcttggcagccaaatgggtgcattcagggctgatttatagagacccttggcttctccttctcctactccctgtctttctggcattttgtagcttgttagattttctgccagaggggtgggtcagagcagtggaggggagacatcgcccatgtgcttctgctactggtccttgggctgggtggttggtagaggagatgttgacactatgagctaagggttggcttttgtaattacctgaatctgaaaggaatgcctaaggttaccttggggtttctcttctggtgagatagggttcctggtttgagtaagttaatgtcctggatatttcttgtggcagggggtggtcaaagagcctgattgctgacccagtctcaggcctgtggtcgatgacctctcggtagtttcaaagggggctggagggggatatttgacttgttttttcgaaatgtagccttctaaccctcaagtctttagaagctgggtggactcttagtggtcctgcagcgtatcctaaaagactacctttgaaacaggattcttgtatggccaggatcctgtctgggaaccagaaaccctacaccctccccctccagggaatgctgagttccagttttgagcagaggtgaggcagaatccactgtagccttccgccctggtatttggggggatgaccagcccaggcgttgggtgttagtctgcatgagtttgtgagaggaaatagctgggtgtcctggcagtgcccttgaagttggttaggaccttcctgtaaactcttgcccctacttctaactactctataaatatatacatatatttatatataaagtgattagttgaactggcatcctgctttagcctgagacttgccataagaaactgctgagtacttggcaaaccctttcatagttttgttctccatctgtttggggtaggtgttgagcgaggcaaatggatctcgatatttcagatgggcttttgatgcactgttgccaaggaaggctttttctgattttttgacaaatgaatttttgcacactttcattggtgtctttcggcaacttacacacattgaaaatgagctattgtacatatttttatattctctttataaatgcatgtctgattgtacttgtaacaatattgtaatgaacggctgtgcagtaggcccagcgctgctgtgtctcgtcagaggaatagcttaccacgaacccctcagcatactgggaatctcttcctgaacaacgaatgtaaatttggtcaagtctactcttccgttcattcaattattttaagcatttgaattatttattgtatatcctaaatatatttctcctttggcagtgactagatttccactaatgtgtcttaatctatccctccagctggcagttactgtttttttaatcccctgaagttgtcctgtaggagacagaaattctttgctgtctgtatcccttggagtaagaaggtagtggcatgggtggagtgtgtgttctttctccaaatctattatgatgtttattaaacacttctgtagcaaagatggtggtagttcttttgttactgaagttgcccttcaccatggctatttgaaaaggagatgtacttggacgtttctgtaaatcttgagataaactgtttggagatttaaccacctctctgatgggggaccaactctatggaaattgtaaatacgttttatttataaacctggcactgtattcaataaacatttctgcagcctttcatctcccaaaaaaatctatgtcgggtgcggagaaagaggtaatgaaatggcaggaattcgatatcagctatcataccgtcacctcgaggggc

SEQ ID NO: 2483 - protein, 58 aa, Homo sapien
MGDQLYGNCKYVLFINLALYSINISAAFHLPKKSMSGAEKEVMKWQEFDISYHTVTSR

SEQ ID NO: 2484 - DNA, 7709 bp, Homo sapien
cgaaggacctgaaggaaagtggaaaagtccaaagtttaagatgccagagatgcattttaagactccaaagatatccatgccagatattgacctgaatctcacaggtccaaaaataaaaggagatgtggatgttacaggccctaaggtagagggagatctgaaaggtcctgaagttgacctcaaaggccccaaagtggacattgatgtcccagatgttaatgttcagggtccagactggcacctgaagatgcccaagatgaaaatgcctaagttcagtatgcctggcttcaaaggagagggcccagatggtggatgtgaagctgcccataggctgacattgatgtctcaggaccaaagtggacattgaaggccctgatgttaacattgaaggaccagagggaaagttgaaagggcctaagttcaagatgccagagatgaatatcaaagcccccaagatctccatgcctgatattgacttaaacctgaaaggacccaagtgaagggtgatgtggatgtttcccttcctaaagtggaaggtgacctcaagggcccagaagttgacatcaagggcccaaaagtggacattgacgcacctgatgttgatgttcatggcccagactggcacctaaagatgcccaagatgaaaatgcccaagttcagcatgcctggcttcaaagcagagggccctgaagctggaatgtgaacctgcccaaggctgacgttgatgtctcaggccccaaagtggatattaatgccccagatgtgggtgttcaaggcccagactggcacctgaagatgcccaaggtgaaaatgccaaagttcagcatgcctggcttcaaaggagagggcccagatggggatgtgaagctgcccaaggctgacattgatgtctcaggacccaaagtggacattgaaggccctgatgttaacattgaaggaccagagggaaagttgaaagggcctaagttcaagatgccagagatgaatatcaaagcccccaagatctccatgcctgatattgacttaaacctgaaaggacccaaagtgaagggtgatgtggatgtttcccttcctaaagtggaaggtgacctcaagggcccagaagttgacatcaagggcccaaaagtggacattgacgcacctgatgttgatgttcatggcccagactggcacctaaagatgcccaagataaaaatgcccaagatcagcatgcctggcttcaaaggagaaggtccagatgtggacgtgaacctgcccaaggctgacattgatgtctcaggaccgaaagtggatgttgaatgtcccgatgtgaatatcgaaggacctgaaggaaagtggaaaagtccaaagtttaagatgccagagatgcattttaagactccaaagatatccatgccagatattgacctgaatctcacaggtccaaaaataaaaggagatgtggatgttacaggccctaaggtagagggagatctgaaaggtcctgaagttgacctcaaaggccccaaagtggacattgatgtcccagatgttaatgttcagggtccagactggcacctgaagatgcccaagatgaaaatgcccaagttcagcatgcctggcttcaaagcagagggccctgaagtggatgtgaacctgcccaaggctgacgttgatgtctcaggccccaaagtggacgttgaaggccctgatgttaacattgaaggaccagagggaaagttgaaagggcccaagttcaagatgccagagatgaatatcaaagcccccaagatccccatgcctgactttgatttgcatctgaaaggtcccaaggtgaagggcgatgtggatatttctctgcccaaagtggaaggtgacctcaagggccctgaagttgacatcaggggtcccaaagtggacattgatgtcccggatgtgggcgttcaaggcccagactggcacctaaaaatgcccaaagtgaaaatgcccaaattcagcatgcctggcttcaaaggagagggcccagatgtggatgtgaacctgcccaaggctgaccttgatgtctcaggacccaaggtggacattgatgttccagatgtgaatatcgaaggcccagagggaaagttgaaaggtcccaaattcaaaatgcctgagatgaacatcaaagcccccaagatctccatgcctgacattgatcttaacctgaaaggtcccaaagtgaagggtgacatggatgtgtctctgccaaaagtggaaggtgacatgaaagttcctgacgtggatattaaaggccccaaagtggatattaatgccccagatgtggatgttcaaggcccagactggcacctgaagatgcctaaaataaaaatgcccaagatcagcatgcctggcttcaaaggagaaggtccagaagtggacgtgaacctgcccaaggctgaccttgacgtctcaggacccaaggtggacgttgatgttccagatgtgaatattgaaggtccagatgcgaaactgaagggccctaaattcaagatgccagagatgaacatcaaagcccccaagatctccatgcctgactttgatttgcatctgaaaggccctaaggtgaaaggagatgtggatgtttctctgcctaagatggaaggtgatctaaagggtcctgaagttgacatcaagggccccaaagtggacattaatgctccagatgtggatgttcaaggcccagactggcacctgaagatgcccaaggtgaaaatgcccaagttcagcatgcctggcttcaaaggagagggcccagatgtggatgtgaacctgcccaaggctgaccttgatgtctcaggacccaaggtggacattgatgttcctgatgtggatatccgaaggtccagaagggaaactgaaaggtcccaaattcaagatgcctgagatgagcatccaagcccccaagatctccatgcctgatattgacttaaacctgaaaggacccaaagtgaagggcgatgtggatgttacccttcctaaagtggaaggtgacctcaagggcccagaagctgacatcaagggcccaaaagtggacatcaacacccctgatgtggatgttcatggcccagactggcacctgaagatgcccaaggtgaaaatgcccaaattcagcatgcctggcttcaaaggagaaggtccagatgtggatgtgaacctgcccaaggctgacattgatgtctcaggacccaaagtggacgttgatgttcctgatgtgaatatcgaaggtccagatgcgaaactaaagggccccaagttcaagatgcctgagatgagcatcaaagcccccaagatctccatgcctgatattgacttaaacctgaaaggacccaaagtgaagggcgatgtggatgttacccttcctaaagtggaaggtgacctcaagggcccagaagctgacatcaagggcccaaaagtggacatcaacacccctgatgtggatgttcatggcccagactggcacctgaagatgcccaaggtgaaaatgcccaaattcagcatgcctggcttcaaaggagaaggtccagatgtggatgtgagcctgcccaaggccgacatcgatgtctcgggacccaaggtggacgttgatattccagatgtgaatatcgaaggtccagacgcaaaactgaagggccccaagttcaagatgcctgaaataaatatcaaagctcccaagatctccatacctgatgttgacctggatttgaaaggacccaaagtaaaaggagattttgatgtgtctgtccctaaggttgaagggactttgaaaggcccagaagtagatcttaaaggtccacgtctggatttcgaaggccctgatgccaaactcagtggcccatctttgaagatgccatcgctggagatatctgctcctaaagtaactgctcctgatgttgatttgcatctcaaggcaccaaaaattggattttcaggtccgaagttagaaggtggtgaagtggacctcaagggacccaaagttgaagctccaagcttagatgtacacatggacagcccagatattaacatcgaagggccagatgttaaaatccccaaatttaagaaacccaagtttggatttggggcaaaaagccccaaagctgacatcaagtcaccttcactggatgtcactgttcctgaggcagagctgaaccttgagactcctgaaattagtgttggtggcaagggcaagaaaagtaagtttaaaatgcctaaaattcatatgagtggtcctaagattaaggccaaaaaaacagggatttgacctgaatgttcctgggggtgaaattgatgccagcctcaaggctccggatgtagatgtcaacatcgcagggccggatgctgcactcaaagtcgacgtgaaatcgcccaaaaccaagaaaacgatgtttggaaaaatgtacttcccagatgtagagtttgacattaaatcacctaaatttaaagctgaggcccctctccctagccccaaactggagggtgaactccaggcacctgatctggaactttctttgccagcgattcacgtcgaaggtcttgacatcaaggcgaaggctcccaaggtcaagatgccagatgtggacatctcagtgccaaaaatagagggtgacctgaaaggccccaaagtgcaggcaaacttgggtgcacctgacatcaacatcgaaggcctagatgctaaagtcaaaacaccgtccttcggcatttctgcccctcaagtctccatccctgatgtgaatgtaaacttgaaaggaccaaagataaagggtgatgtccccagcgtgggactggaaggaccagatgtagatctgcaaggtccagaagcaaaaattaagttccccaagttttccatgcccaagatcggcatcccaggtgtgaaaatggagggtgggggagccgaggtccatgcccagctaccctctcttgaaggagacttgagaggaccagatgttaagctcgaagggcccgatgtttctctaaaggggccaggagtagacttgccttcagtgaacctctctatgccaaaagtctctgggcctgaccttgatctgaacttgaaaggaccaagtttgaagggagacctggatgcatctgttcccagcatgaaggtgcatgctccagggctcaacctcagtggtgtcggtggcaaaatgcaggtgggaggagacggtgtgaaagtgccagggatcgatgccacaacaaagcttaacgttggggcaccagatgtgacactgaggggaccaagcctgcagggagatctggctgtctctggtgacatcaaatgccctaaagtatccgtaggagctcctgatctaagcttggaggcatccgaaggcagcattaaacttcccaaaatgaagctgccccaatttggcatctctactccggggtccgacttgcacgtcaatgccaaggggccacaggtttctggcgaactgaaggggccaggtgtggatgtgaacctgaaagggcctcggatttcagcaccgaatgtggactttaacttggaaggaccaaaagtgaaagggagccttggggccactggtgagatcaaaggccccactgtcggaggaggtcttccaggcattggtgttcaaggcctagaaggaaacctccagatgcctggaattaagtcctctggatgtgatgtgaacctgccaggcgtgaatgtgaaactcccaactgggcagatttctgggcctgaaatcaaaggtggtctgaaaggttcagaagtaggtttccatggggctgctcctgatatcagtgtgaaggggcctgcctttaatatggcatctcctgagtcagattttggcatcaacttgaagggcccaaaaatcaaaggaggtgcggatgtttcagggggtgtcagtgccccagacatcagccttggtgaagggcatttgagtgttaaaggttccgggggtgagtggaagggaccccaagtctcctctgctctcaacttggacacatctaagtttgctgggggccttcatttctcaggaccaaaggtggaaggaggtgtgaaaggaggtcagattggactccaggctcctgggctgagtgtgtctgggcctcaaggtcacttggaaagtggatctggaaaagtaacattccctaaaatgaagatccccaaatttaccttctctggccgtgagctggttggcagagaaatgggggtggatgttcacttccctaaagcagaggccagcatccaagctggtgctggagacggcgagtgggaagagtctgaagtcaaactgaaaaagtccaagatcaaaatgcccaagtttaatttttccaaacctaaagggaaaggtggtgtcactggctcaccagaagcatcaatttctgggtccaaaggtgacctgaaaagttcaaaggccagcctgggctctctggaaggagaggcagaggccgaagcctcttcaccgaaaggcaaattctccttatttaaaagtaagaagccacggcaccgctcaaattcattcagtgatgaaagagagttctctggaccttccaccccgacggggacgctggagtttgaaggtggggaagtgtctctggaaggtgggaaagttaaagggaaacacgggaagctgaaattcggtacctttggtggattggggtcaaagagcaaaggtcattatgaggtgactgggagcgatgatgagacaggcaagttacaggggagtggggtgtccctggcctctaagaagtcccgactgtcctcctcttctagcaatgacagtgggaataaggttggcatccagcttcccgaggtggagctgtcagtttccacaaagaaagagtagcaggcctttgtatgtgtgtacatatatatatatataacaaaacatcagccttgggtggtgtgttcctatataaactccaaagggaaacacaccgactgcctcagcaatcatgcaaagaccttgcctggcccggtggcaagcgctgaaaaaccgaccgcctgtaggctcctggaactatacagataggtaaagagttccaagttcgtccagcccatgtgcaaagtcaacagtatttgccttaagatttcatatatatatatttttttgcattgactgctgagagctcctgtttactaagcaagcttttgtgtttattatcctcatttttactgaacattgttagttttggggtaatggaaacccactttttcattgtaatgactttgggggcttttgttagtaagggtgggtggggtgatgggttgcagacggaggtcaggtcttcctctttcctgagactggatctgttcaaacagcaaacgcccacagatggcccagaggtggtggtagtcagggtgtgtgggtgtttttagggttctttagtgttgtttctttcacccaggggtggtggtcccagccagtttggtgctgacggtgagaggaaattagaatctgtttgcaaattgtccaacccaccccctcaacatgaggggcttccattttctgtgttttgtaagggaactgtttccttcatgccgccatgttcctgatattagttctgatttctttttaacaaatgttatcatgattaagaaaatttccagcactttaatggccaattaactgagaatgtaagaaaattgatgctgtacaaggcaaataaagctgtttattaacctccgaaaaaaaatctatgtcgggtgcggagaaagaggtaatgaaatggca

SEQ ID NO: 2485 - protein, 2007 aa, Homo sapien
MPKVKMPKFSMPGFKGEGPDGDVKLPKADIDVSGPKVDIEGPDVNIEGPEGKLKGPKFKMPEMNIKAPKISMPDIDLNLKGPKVKGDVDVSLPKVEGDLKGPEVDIKGPKVDIDAPDVDVHGPDWHLKMPKIKMPKISMPGFKGEGPDVDVNLPKADIDVSGPKVDVECPDVNIEGPEGKWKSPKFKMPEMHFKTPKISMPDIDLNLTGPKIKGDVDVTGPKVEGDLKGPEVDLKGPKVDIDVPDVNVQGPDWHLKMPKMKMPKFSMPGFKAEGPEVDVNLPKADVDVSGPKVDVEGPDVNIEGPEGKLKGPKFKMPEMNIKAPKIPMPDFDLHLKGPKVKGDVDISLPKVEGDLKGPEVDIRGPKVDIDVPDVGVQGPDWHLKMPKVKMPKFSMPGFKGEGPDVDVNLPKADLDVSGPKVDIDVPDVNIEGPEGKLKGPKFKMPEMNIKAPKISMPDIDLNLKGPKVKGDMDVSLPKVEGDMKVPDVDIKGPKVDINAPDVDVQGPDWHLKMPKIKMPKISMPGFKGEGPEVDVNLPKADLDVSGPKVDVDVPDVNIEGPDAKLKGPKFKMPEMNIKAPKISMPDFDLHLKGPKVKGDVDVSLPKMEGDLKGPEVDIKGPKVDINAPDVDVQGPDWHLKMPKVKMPKFSMPGFKGEGPDVDVNLPKADLDVSGPKVDIDVPDVDIRRSRRETERSQIQDAEMSIQAPKISMPDIDLNLKGPKVKGDVDVTLPKVEGDLKGPEADIKGPKVDINTPDVDVHGPDWHLKMPKVKMPKFSMPGFKGEGPDVDVNLPKADIDVSGPKVDVDVPDVNIEGPDAKLKGPKFKMPEMSIKAPKISMPDIDLNLKGPKVKGDVDVTLPKVEGDLKGPEADIKGPKVDINTPDVDVHGPDWHLKMPKVKMPKFSMPGFKGEGPDVDVSLPKADIDVSGPKVDVDIPDVNIEGPDAKLKGPKFKMPEINIKAPKISIPDVDLDLKGPKVKGDFDVSVPKVEGTLKGPEVDLKGPRLDFEGPDAKLSGPSLKMPSLEISAPKVTAPDVDLHLKAPKIGFSGPKLEGGEVDLKGPKVEAPSLDVHMDSPDINIEGPDVKIPKFKKPKFGFGAKSPKADIKSPSLDVTVPEAELNLETPEISVGGKGKKSKFKMPKIHMSGPKIKAKKTGIDLNVPGGEIDASLKAPDVDVNIAGPDAALKVDVKSPKTKKTMFGKMYFPDVEFDIKSPKFKAEAPLPSPKLEGELQAPDLELSLPAIHVEGLDIKAKAPKVKMPDVDISVPKIEGDLKGPKVQANLGAPDINIEGLDAKVKTPSFGISAPQVSIPDVNVNLKGPKIKGDVPSVGLEGPDVDLQGPEAKIKFPKFSMPKIGIPGVKMEGGGAEVHAQLPSLEGDLRGPDVKLEGPDVSLKGPGVDLPSVNLSMPKVSGPDLDLNLKGPSLKGDLDASVPSMKVHAPGLNLSGVGGKMQVGGDGVKVPGIDATTKLNVGAPDVTLRGPSLQGDLAVSGDIKCPKVSVGAPDLSLEASEGSIKLPKMKLPQFGISTPGSDLHVNAKGPQVSGELKGPGVDVNLKGPRISAPNVDFNLEGPKVKGSLGATGEIKGPTVGGGLPGIGVQGLEGNLQMPGIKSSGCDVNLPGVNVKLPTGQISGPEIKGGLKGSEVGFHGAAPDISVKGPAFNMASPESDFGINLKGPKIKGGADVSGGVSAPDISLGEGHLSVKGSGGEWKGPQVSSALNLDTSKFAGGLHFSGPKVEGGVKGGQIGLQAPGLSVSGPQGHLESGSGKVTFPKMKIPKFTFSGRELVGREMGVDVHFPKAEASIQAGAGDGEWEESEVKLKKSKIKMPKFNFSKPKGKGGVTGSPEASISGSKGDLKSSKASLGSLEGEAEAEASSPKGKFSLFKSKKPRHRSNSFSDEREFSGPSTPTGTLEFEGGEVSLEGGKVKGKHGKLKFGTFGGLGSKSKGHYEVTGSDDETGKLQGSGVSLASKKSRLSSSSSNDSGNKVGIQLPEVELSVSTKKE

SEQ ID NO: 2486 - DNA, 1157 bp, Homo sapien
gctcacagtcatcaattatagaccccacaacatgcgccctgaagacagaatgttccatatcagagctgtgatcttgagagccctctccttggctttcctgctgagtctccgaggagctggggccatcaaggcggaccatgtgtcaacttatgccgcgtttgtacagacgcatagaccaacaggggagtttatgtttgaatttgatgaagatgagatgttctatgtggatctggacaagaaggagaccgtctggcatctggaggagtttggccaagccttttcctttgaggctcagggcgggctggctaacattgctatattgaacaacaacttgaataccttgatccagcgttccaaccacactcaggccaccaacgatccccctgaggtgaccgtgtttcccaaggagcctgtggagctgggccagcccaacaccctcatctgccacattgacaagttcttcccaccagtgctcaacgtcacgtggctgtgcaacggggagctggtcactgagggtgtcgctgagagcctcttcctgcccagaacagattacagcttccacaagttccattacctgacctttgtgccctcagcagaggacttctatgactgcagggtggagcactggggcttggaccagccgctcctcaagcactgggaggcccaagagccaatccagatgcctgagacaacggagactgtgctctgtgccctgggcctggtgctgggcctagtcggcatcatcgtgggcaccgtcctcatcataaagtctctgcgttctggccatgacccccgggcccaggggaccctgtgaaatactgtaaaggtgacaaaatatctgaacagaagaggacttaggagagatctgaactccagctgccctacaaactccatctcagcttttcttctcacttcatgtgaaaactactccagtggctgactgaattgctgacccttcaagctctgtccttatccattacctcaaagcagtcattccttagtaaagtttccaacaaatagaaattaatgacactttggtagcactaatatggagattatcctttcattgagccttttatcctctgttctcctttgaagaacccctcactgtcaccttcccgagaataccctaagaccaataaatacttcagtatttc

SEQ ID NO: 2487 - protein, 260 aa, Homo sapien [sequence omitted]

SEQ ID NO: 2488 - DNA, 1157 bp, Homo sapien; identical to SEQ ID NO: 2486

SEQ ID NO: 2489 - protein, 260 aa, Homo sapien
MRPEDRMFHIRAVILRALSLAFLLSLRGAGAIKADHVSTYAAFVQTHRPTGEFMFEFDEDEMFYVDLDKKETVWHLEEFGQAFSFEAQGGLANIAILNNNLNTLIQRSNHTQATNDPPEVTVFPKEPVELGQPNTLICHIDKFFPPVLNVTWLCNGELVTEGVAESLFLPRTDYSFHKFHYLTFVPSAEDFYDCRVEHWGLDQPLLKHWEAQEPIQMPETTETVLCALGLVLGLVGIIVGTVLIIKSLRSGHDPRAQGTL

SEQ ID NO: 2490 - DNA, 1662 bp, Rattus norvegicus
ggtcgttcgttgggcggtgctggtttttcgctcgtcgactgcggctcttcctcgggcagcggaagcggcgcggcggtcggagaagtggcctaaaacttcggcgttgggtgaaagaaaatggcccgaaccaagcagactgctcgtaagtccaccggtgggaaagccccccgcaaacagctggccacgaaagccgccaggaaaagcgctccctctaccggcggggtgaagaagcctcatcgctacaggcccgggaccgtggcgcttcgagagattcgtcgttatcagaagtcgaccgagctgctcatccggaagctgcccttccagaggttggtgagggagatcgcgcaggatttcaaaaccgacctgaggtttcagagcgcagccatcggtgcgctgcaggaggctagcgaagcgtacctggtgggtctgttcgaagataccaacctgtgtgccatccacgctaagagagtcaccatcatgcccaaagacatccagttggctcgccggatacggggagagagagcttaagtgaaggcagtttttatggcgttttgtagtaaattctgtaaaatactttggtttaatttgtgactttttttgtaagaaattgtttataatatgttgcatttgtacttaagtcattccatctttcactcaggatgaatgcgaaaagtgactgttcacagacctcagtgatgtgagcactgttgctcaggagtgacaagttgctaatatgcagaagggatgggtgatacttcttgcttctcatgatgcatgtttctgtatgttaatgacttgttgggtagctattaaggtactagagttgataaatgtgtacagggtccttttgcaataaaactggttatgacttgatccaagtgtttaacaattggggctgttaagtctgaccatacatcactgtgatagaatgtgggctttttcaagggtgaagatacaagtcttaaccacagtgtaacttacagtttcctttaaaaaaaaaaaaagtaaacctggcagctatagaatacactatgtgcatttataatagctattttatatattgtagtatcaacatttttaaattaaatgttttacattcacaagtggtggggagtcttgtcattaaggtgtgtgtaatttagagtccagttggttttcttctgactgcacttgttctcatagtagtaaaatgctatgcgcatttataccttgcataagtcctcattctaccacatgttaaccctctagctgataatgcaaacactaactgggggattttatttataagggctctagaaaaaacgagttattcacaccagcatcatcttaactaacattctgaactagttagtgcagcttttcattgtgttgtgtggttggtctcataactaggttgagtttttctcctctgctgaggaaacagtaccgaagttctttttcttgtggcatttgtattataaaaacttggtgtgggggaggagcacaaaactccagcccactgaacctctgccaattaagatggtgttgggttaggttacatctggttactgtcctgggaaaatcatttttatagagatggccttccaagtggttttaaaatttactgaagtttttaggtcaattatgtatgttgactaaatttacaaataaacttgtttatcc

SEQ ID NO: 2491 - protein, 136 aa, Rattus norvegicus
MARTKQTARKSTGGKAPRKQLATKAARKSAPSTGGVKKPHRYRPGTVALREIRRYQKSTELLIRKLPFQRLVREIAQDFKTDLRFQSAAIGALQEASEAYLVGLFEDTNLCAIHAKRVTIMPKDIQLARRIRGERA

SEQ ID NO: 2492 - DNA, 2113 bp, Homo sapien
gtgcggttgggaacgcggagcggacggattcgattcaacggggttccggaccgcgctgcgctatggagcaggtcaatgagctgaaggagaaaggcaacaaggccctgagcgtgggtaacatcgatgatgccttacagtgctactccgaagctattaagctggatccccacaaccacgtgctgtacagcaaccgttctgctgcctatgccaagaaaggagactaccagaaggcttatgaggatggctgcaagactgtcgacctaaagcctgactggggcaagggctattcacgaaaagcagcagctctagagttcttaaaccgctttgaagaagccaagcgaacctatgaggagggcttaaaacacgaggcaaataaccctcaactgaaagagggtttacagaatatggaggccaggttggcagagagaaaattcatgaaccctttcaacatgcctaatctgtatcagaagttggagagtgatcccaggacaaggacactactcagtgatcctacctaccgggagctgatagagcagctacgaaacaagccttctgacctgggcacgaaactacaagatccccggatcatgaccactctcagcgtcctccttggggtcgatctgggcagtatggatgaggaggaagagattgcaacacctccaccaccaccccctcccaaaaaggagaccaagccagagccaatggaagaagatcttccagagaataagaagcaggcactgaaagaaaaagagctggggaacgatgcctacaagaagaaagactttgacacagccttgaagcattacgacaaagccaaggagctggaccccactaacatgacttacattaccaatcaagcagcggtatactttgaaaagggcgactacaataagtgccgggagctttgtgagaaggccattgaagtggggagagaaaaccgagaagactatcgacagattgccaaagcatatgctcgaattggcaactcctacttcaaagaagaaaagtacaaggatgccatccatttctataacaagtctctggcagagcaccgaaccccagatgtgctcaagaaatgccagcaggcagagaaaatcctgaaggagcaagagcggctggcctacataaaccccgacctggctttggaggagaagaacaaaggcaacgagtgttttcagaaaggggactatccccaggccatgaagcattatacagaagccatcaaaaggaacccgaaagatgccaaattatacagcaatcgagctgcctgctacaccaaactcctggagttccagctggcactcaaggactgtgaggaatgtatccagctggagccgaccttcatcaagggttatacacggaaagccgctgcgctggaagcgatgaaggactacaccaaagccatggatgtgtaccagaaggcgctagacctggactccagctgtaaggaggcggcagacggctaccagcgctgtatgatggcgcagtacaaccggcacgacagccccgaagatgtgaagcgacgagccatggccgaccctgaggtgcagcagatcatgagtgacccagccatgcgccttatcctggaacagatgcagaaggacccccaggcactcagcgaacacttaaagaatcctgtaatagcacagaagatccagaagctgatggatgtgggtctgattgcaattcggtgatgacttgttcatccccccttcccttcgccctcatgtggaaagaggagctgggaccgcggcgagcagcacggagcggaagggagagcaggggagagaaggcctcatctctctatatttatacataaccccggggaagacacagagactcgtacctgcgctgtttgtgccgccgctgcctctgggccctcccagcacacgcatggtctcttcaccgctgccctcgagttccatgtctctttcccctgcccctagttgctgtctcggctgctctcccatagttggttttttttttatttggggcagtgggcatgttatggggaggggagggggttcttccagcctcaggtcccagctgtctcacgttgtttattctgcgtccccttctccaataaaacaagccagttgggcgtggttataac

SEQ ID NO: 2493 - protein, 543 aa, Homo sapien
MEQVNELKEKGNKALSVGNIDDALQCYSEAIKLDPHNHVLYSNRSAAYAKKGDYQKAYEDGCKTVDLKPDWGKGYSRKAAALEFLNRFEEAKRTYEEGLKHEANNPQLKEGLQNMEARLAERKFMNPFNMPNLYQKLESDPRTRTLLSDPTYRELIEQLRNKPSDLGTKLQDPRIMTTLSVLLGVDLGSMDEEEEIATPPPPPPPKKETKPEPMEEDLPENKKQALKEKELGNDAYKKKDFDTALKHYDKAKELDPTNMTYITNQAAVYFEKGDYNKCRELCEKAIEVGRENREDYRQIAKAYARIGNSYFKEEKYKDAIHFYNKSLAEHRTPDVLKKCQQAEKILKEQERLAYINPDLALEEKNKGNECFQKGDYPQAMKHYTEAIKRNPKDAKLYSNRAACYTKLLEFQLALKDCEECIQLEPTFIKGYTRKAAALEAMKDYTKAMDVYQKALDLDSSCKEAADGYQRCMMAQYNRHDSPEDVKRRAMADPEVQQIMSDPAMRLILEQMQKDPQALSEHLKNPVIAQKIQKLMDVGLIAIR

SEQ ID NO: 2494 - DNA, 2265 bp, Homo sapien
cggcccagcggaccccagcctctgccaggttcggtccgccatcctcgtcccgtcctccgccggcccctgccccgcgcccagggatcctccagctcctttcgcccgcgccctccgttcgctccggacaccatggacaagttttggtggcacgcagcctggggactctgcctcgtgccgctgagcctggcgcagatcgatttgaatataacctgccgctttgcaggtgtattccacgtggagaaaaatggtcgctacagcatctctcggacggaggccgctgacctctgcaaggctttcaatagcaccttgcccacaatggcccagatggagaaagctctgagcatcggatttgagacctgcaggtatgggttcatagaagggcacgtggtgattccccggatccaccccaactccatctgtgcagcaaacaacacaggggtgtacatcctcacatccaacacctcccagtatgacacatattgcttcaatgcttcagctccacctgaagaagattgtacatcagtcacagacctgcccaatgcctttgatggaccaattaccataactattgttaaccgtgatggcacccgctatgtccagaaaggagaatacagaacgaatcctgaagacatctaccccagcaaccctactgatgatgacgtgagcagcggctcctccagtgaaaggagcagcacttcaggaggttacatcttttacaccttttctactgtacaccccatcccagacgaagacagtccctggatcaccgacagcacagacagaatccctgctaccagtacgtcttcaaataccatctcagcaggctgggagccaaatgaagaaaatgaagatgaaagagacagacacctcagtttttctggatcaggcattgatgatgatgaagattttatctccagcaccatttcaaccacaccacgggcttttgaccacacaaaacagaaccaggactggacccagtggaacccaagccattcaaatccggaagtgctacttcagacaaccacaaggatgactgatgtagacagaaatggcaccactgcttatgaaggaaactggaacccagaagcacaccctcccctcattcaccatgagcatcatgaggaagaagagaccccacattctacaagcacaatccaggcaactcctagtagtacaacggaagaaacagctacccagaaggaacagtggtttggcaacagatggcatgtgggatatcgccaaacacccaaagaagactcccattcgacaacagggacagctgcagcctcagctcataccagccatccaatgcaaggaaggacaacaccaagcccagaggacagttcctggactgatttcttcaacccaatctcacaccccatgggacgaggtcatcaagcaggaagaaggatggatatggactccagtcatagtacaacgcttcagcctactgcaaatccaaacacaggtttggtggaagatttggacaggacaggacctctttcaatgacaacgcagcagagtaattctcagagcttctctacatcacatgaaggcttggaagaagataaagaccatccaacaacttctactctgacatcaagcaataggaatgatgtcacaggtggaagaagagacccaaatcattctgaaggctcaactactttactggaaggttatacctctcattacccacacacgaaggaaagcaggaccttcatcccagtgacctcagctaagactgggtcctttggagttactgcagttactgttggagattccaactctaatgtcaatcgttccttatcaggagaccaagacacattccaccccagtggggggtcccataccactcatggatctgaatcagatggacactcacatgggagtcaagaaggtggagcaaacacaacctctggtcctataaggacaccccaaattccagaatggctgatcatcttggcatccctcttggccttggctttgattcttgcagtttgcattgcagtcaacagtcgaagaaggtgtgggcagaagaaaaagctagtgatcaacagtggcaatggagctgtggaggacagaaagccaagtggactcaacggagaggccagcaagtctcaggaaatggtgcatttggtgaacaaggagtcgtcagaaactccagaccagtttatgacagctgatgagacaaggaacctgcagaatgtggacatgaagattggggtgtaacacctacaccattatcttggaaagaaacaaccgttg

SEQ ID NO: 2495 - protein, 699 aa, Homo sapien [sequence omitted]

SEQ ID NO: 2496 - DNA, 12515 bp, Homo sapien
ctaccgggcggaggtgagcgcggcgccggctcctcctgcggcggactttgggtgcgacttgacgagcggtggttcgacaagtggccttgcgggccggatcgtcccagtggaagagttgtaaatttgcttctggccttcccctacggattatacctggccttcccctacggattatactcaacttactgtttagaaaatgtggcccacgagacgcctggttactatcaaaaggagcggggtcgacggtccccactttcccctgagcctcagcacctgcttgtttggaaggggtattgaatgtgacatccgtatccagcttcctgttgtgtcaaaacaacattgcaaaattgaaatccatgagcaggaggcaatattacataatttcagttccacaaatccaacacaagtaaatgggtctgttattgatgagcctgtacggctaaaacatggagatgtaataactattattgatcgttccttcaggtatgaaaatgaaagtcttcagaatggaaggaagtcaactgaatttccaagaaaaatacgtgaacaggagccagcacgtcgtgtctcaagatctagcttctcttctgaccctgatgagaaagctcaagattccaaggcctattcaaaaatcactgaaggaaaagtttcaggaaatcctcaggtacatatcaagaatgtcaaagaagacagtaccgcagatgactcaaaagacagtgttgctcagggaacaactaatgttcattcctcagaacatgctggacgtaatggcagaaatgcagctgatcccatttctggggattttaaagaaatttccagcgttaaattagtgagccgttatggagaattgaagtctgttcccactacacaatgtcttgacaatagcaaaaaaaatgaatctcccttttggaagctttatgagtcagtgaagaaagagttggatgtaaaatcacaaaaagaaaatgtcctacagtattgtagaaaatctggattacaaactgattacgcaacagagaaagaaagtgctgatggtttacagggggagacccaactgttggtctcgcgtaagtcaagaccaaaatctggtgggagcggccacgctgtggcagagcctgcttcacctgaacaagagcttgaccagaacaaggggaagggaagagacgtggagtctgttcagactcccagcaaggctgtgggcgccagctttcctctctatgagccggctaaaatgaagacccctgtacaatattcacagcaacaaaattctccacaaaaacataagaacaaagacctgtatactactggtagaagagaatctgtgaatctgggtaaaagtgaaggcttcaaggctggtgataaaactcttactcccaggaagctttcaactagaaatcgaacaccagctaaagttgaagatgcagctgactctgccactaagccagaaaatctctcttccaaaaccagaggaagtattcctacagatgtggaagttctgcctacggaaactgaaattcacaatgagccatttttaactctgtggctcactcaagttgagaggaagatccaaaaggattccctcagcaagcctgagaaattgggcactacagctggacagatgtgctctgggttacctggtcttagttcagttgatatcaacaactttggtgattccattaatgagagtgagggaatacctttgaaaagaaggcgtgtgtcctttggtgggcacctaagacctgaactatttgatgaaaacttgcctcctaatacgcctctcaaaaggggagaagccccaaccaaaagaaagtctctggtaatgcacactccacctgtcctgaagaaaatcatcaaggaacagcctcaaccatcaggaaaacaagagtcaggttcagaaatccatgtggaagtgaaggcacaaagcttggttataagccctccagctcctagtcctaggaaaactccagttgccagtgatcaacgccgtaggtcctgcaaaacagcccctgcttccagcagcaaatctcagacagaggttcctaagagaggaggagaaagagtggcaacctgccttcaaaagagagtgtctatcagccgaagtcaacatgatattttacagatgatatgttccaaaagaagaagtggtgcttcggaagcaaatctgattgttgcaaaatcatgggcagatgtagtaaaacttggtgcaaaacaaacacaaactaaagtcataaaacatggtcctcaaaggtcaatgaacaaaaggcaaagaagacctgctactccaaagaagcctgtgggcgaagttcacagtcaatttagtacaggccacgcaaactctccttgtaccataataatagggaaagctcatactgaaaaagtacatgtgcctgctcgaccctacagagtgctcaacaacttcatttccaaccaaaaaatggactttaaggaagatctttcaggaatagctgaaatgttcaagaccccagtgaaggagcaaccgcagttgacaagcacatgtcacatcgctatttcaaattcagagaatttgcttggaaaacagtttcaaggaactgattcaggagaagaacctctgctccccacctcagagagttttggaggaaatgtgttcttcagtgcacagaatgcagcaaaacagccatctgataaatgctctgcaagccctcccttaagacggcagtgtattagagaaaatggaaacgtagcaaaaacgcccaggaacacctacaaaatgacttctctggagacaaaaacttcagatactgagacagagccttcaaaaacagtatccactgtaaacaggtcaggaaggtctacagagttcaggaatatacagaagctacctgtggaaagtaagagtgaagaaacaaatacagaaattgttgagtgcatcctaaaaagaggtcagaaggcaacactactacaacaaaggagagaaggagagatgaaggaaatagaaagaccttttgagacatataaggaaaatattgaattaaaagaaaacgatgaaaagatgaaagcaatgaagagatcaagaacttgggggcagaaatgtgcaccaatgtctgacctgacagacctcaagagcttgcctgatacagaactcatgaaagacacggcacgtggccagaatctcctccaaacccaagatcatgccaaggcaccaaagagtgagaaaggcaaaatcactaaaatgccctgccagtcattacaaccagaaccaataaacaccccaacacacacaaaacaacagttgaaggcatccctggggaaagtaggtgtgaaagaagagctcctagcagtcggcaagttcacacggacgtcaggggagaccacgcacacgcacagagagccagcaggagatggcaagagcatcagaacgtttaaggagtctccaaagcagatcctggacccagcagcccgtgtaactggaatgaagaagtggccaagaacgcctaaggaagaggcccagtcactagaagacctggctggcttcaaagagctcttccagacaccaggtccctctgaggaatcaatgactgatgagaaaactaccaaaatagcctgcaaatctccaccaccagaatcagtggacactccaacaagcacaaagcaatggcctaagagaagtctcaggaaagcagatgtagaggaagaattcttagcactcaggaaactaacaccatcagcagggaaagccatgcttacgcccaaaccagcaggaggtgatgagaaagacattaaagcatttatgggaactccagtgcagaaactggacctggcaggaactttacctggcagcaaaagacagctacagactcctaaggaaaaggcccaggctctagaagacctggctggctttaaagagctcttccagactcctggtcacaccgaggaattagtggctgctggtaaaaccactaaaataccctgcgactctccacagtcagacccagtggacaccccaacaagcacaaagcaacgacccaagagaagtatcaggaaagcagatgtagagggagaactcttagcgtgcaggaatctaatgccatcagcaggcaaagccatgcacacgcctaaaccatcagtaggtgaagagaaagacatcatcatatttgtgggaactccagtgcagaaactggacctgacagagaacttaaccggcagcaagagacggccacaaactcctaaggaagaggcccaggctctggaagacctgactggctttaaagagctcttccagacccctggtcatactgaagaagcagtggctgctggcaaaactactaaaatgccctgcgaatcttctccaccagaatcagcagacaccccaacaagcacaagaaggcagcccaagacacctttggagaaaagggacgtacagaaggagctctcagccctgaagaagctcacacagacatcaggggaaaccacacacacagataaagtaccaggaggtgaggataaaagcatcaacgcgtttagggaaactgcaaaacagaaactggacccagcagcaagtgtaactggtagcaagaggcacccaaaaactaaggaaaaggcccaacccctagaagacctggctggctggaaagagctcttccagacaccagtatgcactgacaagcccacgactcacgagaaaactaccaaaatagcctgcagatcacaaccagacccagtggacacaccaacaagctccaagccacagtccaagagaagtctcaggaaagtggacgtagaagaagaattcttcgcactcaggaaacgaacaccatcagcaggcaaagccatgcacacacccaaaccagcagtaagtggtgagaaaaacatctacgcatttatgggaactccagtgcagaaactggacctgacagagaacttaactggcagcaagagacggctacaaactcctaaggaaaaggcccaggctctagaagacctggctggctttaaagagctcttccagacacgaggtcacactgaggaatcaatgactaacgataaaactgccaaagtagcctgcaaatcttcacaaccagacctagacaaaaacccagcaagctccaagcgacggctcaagacatccctggggaaagtgggcgtgaaagaagagctcctagcagttggcaagctcacacagacatcaggagagactacacacacacacacagagccaacaggagatggtaagagcatgaaagcatttatggagtctccaaagcagatcttagactcagcagcaagtctaactggcagcaagaggcagctgagaactcctaagggaaagtctgaagtccctgaagacctggccggcttcatcgagctcttccagacaccaagtcacactaaggaatcaatgactaatgaaaaaactaccaaagtatcctacagagcttcacagccagacctagtggacaccccaacaagctccaagccacagcccaagagaagtctcaggaaagcagacactgaagaagaatttttagcatttaggaaacaaacgccatcagcaggcaaagccatgcacacacccaaaccagcagtaggtgaagagaaagacatcaacacgtttttgggaactccagtgcagaaactggaccagccaggaaatttacctggcagcaatagacggctacaaactcgtaaggaaaaggcccaggctctagaagaactgactggcttcagagagcttttccagacaccatgcactgataaccccacagctgatgagaaaactaccaaaaaaatactctgcaaatctccgcaatcagacccagcggacaccccaacaaacacaaagcaacggcccaagagaagcctcaagaaagcagacgtagaggaagaatttttagcattcaggaaactaacaccatcagcaggcaaagccatgcacacgcctaaagcagcagtaggtgaagagaaagacatcaacacatttgtggggactccagtggagaaactggacctgctaggaaatttacctggcagcaagagacggccacaaactcctaaagaaaaggccaaggctctagaagatctggctggcttcaaagagctcttccagacaccaggtcacactgaggaatcaatgaccgatgacaaaatcacagaagtatcctgcaaatctccacaaccagacccagtcaaaaccccaacaagctccaagcaacgactcaagatatccttggggaaagtaggtgtgaaagaagaggtcctaccagtcggcaagctcacacagacgtcagggaagaccacacagacacacagagagacagcaggagatggaaagagcatcaaagcgtttaaggaatctgcaaagcagatgctggacccagcaaactatggaactgggatggagaggtggccaagaacacctaaggaagaggcccaatcactagaagacctggccggcttcaaagagctcttccagacaccagaccacactgaggaatcaacaactgatgacaaaactaccaaaatagcctgcaaatctccaccaccagaatcaatggacactccaacaagcacaaggaggcggcccaaaacacctttggggaaaagggatatagtggaagagctctcagccctgaagcagctcacacagaccacacacacagacaaagtaccaggagatgaggataaaggcatcaacgtgttcagggaaactgcaaaacagaaactggacccagcagcaagtgtaactggtagcaagaggcagccaagaactcctaagggaaaagcccaacccctagaagacttggctggcttgaaagagctcttccagacaccagtatgcactgacaagcccacgactcacgagaaaactaccaaaatagcctgcagatctccacaaccagacccagtgggtaccccaacaatcttcaagccacagtccaagagaagtctcaggaaagcagacgtagaggaagaatccttagcactcaggaaacgaacaccatcagtagggaaagctatggacacacccaaaccagcaggaggtgatgagaaagacatgaaagcatttatgggaactccagtgcagaaattggacctgccaggaaatttacctggcagcaaaagatggccacaaactcctaaggaaaaggcccaggctctagaagacctggctggcttcaaagagctcttccagacaccaggcactgacaagcccacgactgatgagaaaactaccaaaatagcctgcaaatctccacaaccagacccagtggacaccccagcaagcacaaagcaacggcccaagagaaacctcaggaaagcagacgtagaggaagaatttttagcactcaggaaacgaacaccatcagcaggcaaagccatggacaccccaaaaccagcagtaagtgatgagaaaaatatcaacacatttgtggaaactccagtgcagaaactggacctgctaggaaatttacctggcagcaagagacagccacagactcctaaggaaaaggctgaggctctagaggacctggttggcttcaaagaactcttccagacaccaggtcacactgaggaatcaatgactgatgacaaaatcacagaagtatcctgtaaatctccacagccagagtcattcaaaacctcaagaagctccaagcaaaggctcaagatacccctggtgaaagtggacatgaaagaagagcccctagcagtcagcaagctcacacggacatcaggggagactacgcaaacacacacagagccaacaggagatagtaagagcatcaaagcgtttaaggagtctccaaagcagatcctggacccagcagcaagtgtaactggtagcaggaggcagctgagaactcgtaaggaaaaggcccgtgctctagaagacctggttgacttcaaagagctcttctcagcaccaggtcacactgaagagtcaatgactattgacaaaaacacaaaaattccctgcaaatctcccccaccagaactaacagacactgccacgagcacaaagagatgccccaagacacgtcccaggaaagaagtaaaagaggagctctcagcagttgagaggctcacgcaaacatcagggcaaagcacacacacacacaaagaaccagcaagcggtgatgagggcatcaaagtattgaagcaacgtgcaaagaagaaaccaaacccagtagaagaggaacccagcaggagaaggccaagagcacctaaggaaaaggcccaacccctggaagacctggccggcttcacagagctctctgaaacatcaggtcacactcaggaatcactgactgctggcaaagccactaaaataccctgcgaatctcccccactagaagtggtagacaccacagcaagcacaaagaggcatctcaggacacgtgtgcagaaggtacaagtaaaagaagagccttcagcagtcaagttcacacaaacatcaggggaaaccacggatgcagacaaagaaccagcaggtgaagataaaggcatcaaagcattgaaggaatctgcaaaacagacaccggctccagcagcaagtgtaactggcagcaggagacggccaagagcacccagggaaagtgcccaagccatagaagacctagctggcttcaaagacccagcagcaggtcacactgaagaatcaatgactgatgacaaaaccactaaaataccctgcaaatcatcaccagaactagaagacaccgcaacaagctcaaagagacggcccaggacacgtgcccagaaagtagaagtgaaggaggagctgttagcagttggcaagctcacacaaacctcaggggagaccacgcacaccgacaaagagccggtaggtgagggcaaaggcacgaaagcatttaagcaacctgcaaagcggaacgtggacgcagaagatgtaattggcagcaggagacagccaagagcacctaaggaaaaggcccaacccctggaagacctggccagcttccaagagctctctcaaacaccaggccacactgaggaactggcaaatggtgctgctgatagctttacaagcgctccaaagcaaacacctgacagtggaaaacctctaaaaatatccagaagagttcttcgggcccctaaagtagaacccgtgggagacgtggtaagcaccagagaccctgtaaaatcacaaagcaaaagcaacacttccctgcccccactgcccttcaagaggggaggtggcaaagatggaagcgtcacgggaaccaagaggctgcgctgcatgccagcaccagaggaaattgtggaggagctgccagccagcaagaagcagagggttgctcccagggcaagaggcaaatcatccgaacccgtggtcatcatgaagagaagtttgaggacttctgcaaaaagaattgaacctgcggaagagctgaacagcaacgacatgaaaaccaacaaagaggaacacaaattacaagactcggtccctgaaaataagggaatatccctgcgctccagacgccaagataagactgaggcagaacagcaaataactgaggtctttgtattagcagaaagaatagaaataaacagaaatgaaaagaagcccatgaagacctccccagagatggacattcagaatccagatgatggagcccggaaacccatacctagagacaaagtcactgagaacaaaaggtgcttgaggtctgctagacagaatgagagctcccagcctaaggtggcagaggagagcggagggcagaagagtgcgaaggttctcatgcagaatcagaaagggaaaggagaagcaggaaattcagactccatgtgcctgagatcaagaaagacaaaaagccagcctgcagcaagcactttggagagcaaatctgtgcagagagtaacgcggagtgtcaagaggtgtgcagaaaatccaaagaaggctgaggacaatgtgtgtgtcaagaaaataacaaccagaagtcatagggacagtgaagatatttgacagaaaaatcgaactgggaaaaatataataaagttagttttgtgataagttctagtgcagtttttgtcataaattacaagtgaattctgtaagtaaggctgtcagtctgcttaagggaagaaaactttggatttgctgggtctgaatcggcttcataaactccactgggagcactgctgggctcctggactgagaatagttgaacaccgggggctttgtgaaggagtctgggccaaggtttgccctcagctttgcagaatgaagccttgaggtctgtcaccacccacagccaccctacagcagccttaactgtgacacttgccacactgtgtcgtcgtttgtttgcctatgttctccagggcacggtggcaggaacaactatcctcgtctgtcccaacactgagcaggcactcggtaaacacgaatgaatggataagcgcacggatgaatggagcttacaagatctgtctttccaatggccgggggcatttggtccccaaattaaggctattggacatctgcacaggacagtcctatttttgatgtcctttcctttctgaaaataaagttttgtgctttggagaatgactcgtgagcacatctttagggaccaagagtgactttctgtaaggagtgactcgtggcttgccttggtctcttgggaatacttttctaactagggttgctctcacctgagacattctccacccgcggaatctcagggtcccaggctgtgggccatcacgacctcaaactggctcctaatctccagctttcctgtcattgaaagcttcggaagtttactggctctgctcccgcctgttttctttctgactctatctggcagcccgatgccacccagtacaggaagtgacaccagtactctgtaaagcatcatcatccttggagagactgagcactcagcaccttcagccacgatttcaggatcgcttccttgtgagccgctgcctccgaaatctcctttgaagcccagacatctttctccagcttcagacttgtagatataactcgttcatcttcatttactttccactttgccccctgtcctctctgtgttccccaaatcagagaatagcccgccatcccccagatcacctgtctggattcctccccattcacccaccttgccaggtgcaggtgaggatggtgcaccagacagggtagctgtcccccaaaatgtgccctgtgcgggcagtgccctgtctccacgtttgtttccccagtgtctggcggggagccaggtgacatcataaatacttgctgaatgaatgcagaaatcagcggtactgacttgtactatattggctgccatgatagggttctcacagcgtcatccatgatcgtaagggagaatgacattctgcttgagggagggaatagaaaggggcagggaggggacatctgagggcttcacagggctgcaaagggtacagggattgcaccagggcagaacaggggagggtgttcaaggaagagtggctcttagcagaggcactttggaaggtgtgaggcataaatgcttccttctacgtaggccaacctcaaaactttcagtaggaatgttgctatgatcaagttgttctaacactttagacttagtagtaattatgaacctcacatagaaaaatttcatccagccatatgcctgtggagtggaatattctgtttagtagaaaaatcctttagagttcagctctaaccagaaatcttgctgaagtatgtcagcaccttttctcaccctggtaagtacagtatttcaagagcacgctaagggtggttttcattttacagggctgttgatgatgggttaaaaatgttcatttaagggctacccccgtgtttaatagatgaacaccacttctacacaaccctccttggtactgggggagggagagatctgacaaatactgcccattcccctaggctgactggatttgagaacaaatacccacccatttccaccatggtatggtaacttctctgagcttcagtttccaagtgaatttccatgtaataggacattcccattaaatacaagctgtttttactttttcgcctcccagggcctgtgcgatctggtcccccagcctctcttgggctttcttacactaactctgtacctaccatctcctgcctcccttaggcaggcacctccaaccaccacacactccctgctgttttccctgcctggaactttcccaccagccccaccaagatcatttcatccagtcctgagctcagcttaagggaggcttcttgcctgtgggttccctcacccccatgcctgtcctccaggctggggcaggttcttagtttgcctggaattgttctgtacctctttgtagcacgtagtgttgtgaaactaagccactaattgagtttctggctcccctcctggggttgtaagttttgttcattcatgagggccgactgtatttcctggttactgtatcccagtgaccagccacaggagatgtccaataaagtatgtgatgaaatggtcttaaaaaaaaaaaaaaaaaaaaaa

SEQ ID NO: 2497 - protein, 2000 aa, Homo sapien
MWPTRRLVTIKRSGVDGPHFPLSLSTCLFGRGIECDIRIQLPVVSKQHCKIEIHEQEAILHNFSSTNPTQVNGSVIDEPVRLKHGDVITIIDRSFRYENESLQNGRKSTEFPRKIREQEPARRVSRSSFSSDPDEKAQDSKAYSKITEGKVSGNPQVHIKNVKEDSTADDSKDSVAQGTTNVHSSEHAGRNGRNAADPISGDFKEISSVKLVSRYGELKSVPTTQCLDNSKKNESPFWKLYESVKKELDVKSQKENVLQYCRKSGLQTDYATEKESADGLQGETQLLVSRKSRPKSGGSGHAVAEPASPEQELDQNKGKGRDVESVQTPSKAVGASFPLYEPAKMKTPVQYSQQQNSPQKHKNKDLYTTGRRESVNLGKSEGFKAGDKTLTPRKLSTRNRTPAKVEDAADSATKPENLSSKTRGSIPTDVEVLPTETEIHNEPFLTLWLTQVERKIQKDSLSKPEKLGTTAGQMCSGLPGLSSVDINNFGDSINESEGIPLKRRRVSFGGHLRPELFDENLPPNTPLKRGEAPTKRKSLVMHTPPVLKKIIKEQPQPSGKQESGSEIHVEVKAQSLVISPPAPSPRKTPVASDQRRRSCKTAPASSSKSQTEVPKRGGERVATCLQKRVSISRSQHDILQMICSKRRSGASEANLIVAKSWADVVKLGAKQTQTKVIKHGPQRSMNKRQRRPATPKKPVGEVHSQFSTGHANSPCTIIIGKAHTEKVHVPARPYRVLNNFISNQKMDFKEDLSGIAEMFKTPVKEQPQLTSTCHIAISNSENLLGKQFQGTDSGEEPLLPTSESFGGNVFFSAQNAAKQPSDKCSASPPLRRQCIRENGNVAKTPRNTYKMTSLETKTSDTETEPSKTVSTVNRSGRSTEFRNIQKLPVESKSEETNTEIVECILKRGQKATLLQQRREGEMKEIERPFETYKENIELKENDEKMKAMKRSRTWGQKCAPMSDLTDLKSLPDTELMKDTARGQNLLQTQDHAKAPKSEKGKITKMPCQSLQPEPINTPTHTKQQLKASLGKVGVKEELLAVGKFTRTSGETTHTHREPAGDGKSIRTFKESPKQILDPAARVTGMKKWPRTPKEEAQSLEDLAGFKELFQTPGPSEESMTDEKTTKIACKSPPPESVDTPTSTKQWPKRSLRKADVEEEFLALRKLTPSAGKAMLTPKPAGGDEKDIKAFMGTPVQKLDLAGTLPGSKRQLQTPKEKAQALEDLAGFKELFQTPGHTEELVAAGKTTKIPCDSPQSDPVDTPTSTKQRPKRSIRKADVEGELLACRNLMPSAGKAMHTPKPSVGEEKDIIIFVGTPVQKLDLTENLTGSKRRPQTPKEEAQALEDLTGFKELFQTPGHTEEAVAAGKTTKMPCESSPPESADTPTSTRRQPKTPLEKRDVQKELSALKKLTQTSGETTHTDKVPGGEDKSINAFRETAKQKLDPAASVTGSKRHPKTKEKAQPLEDLAGWKELFQTPVCTDKPTTHEKTTKIACRSQPDPVDTPTSSKPQSKRSLRKVDVEEEFFALRKRTPSAGKAMHTPKPAVSGEKNIYAFMGTPVQKLDLTENLTGSKRRLQTPKEKAQALEDLAGFKELFQTRGHTEESMTNDKTAKVACKSSQPDLDKNPASSKRRLKTSLGKVGVKEELLAVGKLTQTSGETTHTHTEPTGDGKSMKAFMESPKQILDSAASLTGSKRQLRTPKGKSEVPEDLAGFIELFQTPSHTKESMTNEKTTKVSYRASQPDLVDTPTSSKPQPKRSLRKADTEEEFLAFRKQTPSAGKAMHTPKPAVGEEKDINTFLGTPVQKLDQPGNLPGSNRRLQTRKEKAQALEELTGFRELFQTPCTDNPTADEKTTKKILCKSPQSDPADTPTNTKQRPKRSLKKADVEEEFLAFRKLTPSAGKAMHTPKAAVGEEKDINTFVGTPVEKLDLLGNLPGSKRRPQTPKEKAKALEDLAGFKELFQTPGHTEESMTDDKITEVSCKSPQPDPVKTPTSSKQRLK

SEQ ID NO: 2498 - DNA, 12515 bp, Homo sapien; identical to SEQ ID NO: 2496

SEQ ID NO: 2499 - protein, 3256 aa, Homo sapien
MWPTRRLVTIKRSGVDGPHFPLSLSTCLFGRGIECDIRIQLPVVSKQHCKIEIHEQEAILHNFSSTNPTQVNGSVIDEPVRLKHGDVITIIDRSFRYENESLQNGRKSTEFPRKIREQEPARRVSRSSFSSDPDEKAQDSKAYSKITEGKVSGNPQVHIKNVKEDSTADDSKDSVAQGTTNVHSSEHAGRNGRNAADPISGDFKEISSVKLVSRYGELKSVPTTQCLDNSKKNESPFWKLYESVKKELDVKSQKENVLQYCRKSGLQTDYATEKESADGLQGETQLLVSRKSRPKSGGSGHAVAEPASPEQELDQNKGKGRDVESVQTPSKAVGASFPLYEPAKMKTPVQYSQQQNSPQKHKNKDLYTTGRRESVNLGKSEGFKAGDKTLTPRKLSTRNRTPAKVEDAADSATKPENLSSKTRGSIPTDVEVLPTETEIHNEPFLTLWLTQVERKIQKDSLSKPEKLGTTAGQMCSGLPGLSSVDINNFGDSINESEGIPLKRRRVSFGGHLRPELFDENLPPNTPLKRGEAPTKRKSLVMHTPPVLKKIIKEQPQPSGKQESGSEIHVEVKAQSLVISPPAPSPRKTPVASDQRRRSCKTAPASSSKSQTEVPKRGGERVATCLQKRVSISRSQHDILQMICSKRRSGASEANLIVAKSWADVVKLGAKQTQTKVIKHGPQRSMNKRQRRPATPKKPVGEVHSQFSTGHANSPCTIIIGKAHTEKVHVPARPYRVLNNFISNQKMDFKEDLSGIAEMFKTPVKEQPQLTSTCHIAISNSENLLGKQFQGTDSGEEPLLPTSESFGGNVFFSAQNAAKQPSDKCSASPPLRRQCIRENGNVAKTPRNTYKMTSLETKTSDTETEPSKTVSTVNRSGRSTEFRNIQKLPVESKSEETNTEIVECILKRGQKATLLQQRREGEMKEIERPFETYKENIELKENDEKMKAMKRSRTWGQKCAPMSDLTDLKSLPDTELMKDTARGQNLLQTQDHAKAPKSEKGKITKMPCQSLQPEPINTPTHTKQQLKASLGKVGVKEELLAVGKFTRTSGETTHTHREPAGDGKSIRTFKESPKQILDPAARVTGMKKWPRTPKEEAQSLEDLAGFKELFQTPGPSEESMTDEKTTKIACKSPPPESVDTPTSTKQWPKRSLRKADVEEEFLALRKLTPSAGKAMLTPKPAGGDEKDIKAFMGTPVQKLDLAGTLPGSKRQLQTPKEKAQALEDLAGFKELFQTPGHTEELVAAGKTTKIPCDSPQSDPVDTPTSTKQRPKRSIRKADVEGELLACRNLMPSAGKAMHTPKPSVGEEKDIIIFVGTPVQKLDLTENLTGSKRRPQTPKEEAQALEDLTGFKELFQTPGHTEEAVAAGKTTKMPCESSPPESADTPTSTRRQPKTPLEKRDVQKELSALKKLTQTSGETTHTDKVPGGEDKSINAFRETAKQKLDPAASVTGSKRHPKTKEKAQPLEDLAGWKELFQTPVCTDKPTTHEKTTKIACRSQPDPVDTPTSSKPQSKRSLRKVDVEEEFFALRKRTPSAGKAMHTPKPAVSGEKNIYAFMGTPVQKLDLTENLTGSKRRLQTPKEKAQALEDLAGFKELFQTRGHTEESMTNDKTAKVACKSSQPDLDKNPASSKRRLKTSLGKVGVKEELLAVGKLTQTSGETTHTHTEPTGDGKSMKAFMESPKQILDSAASLTGSKRQLRTPKGKSEVPEDLAGFIELFQTPSHTKESMTNEKTTKVSYRASQPDLVDTPTSSKPQPKRSLRKADTEEEFLAFRKQTPSAGKAMHTPKPAVGEEKDINTFLGTPVQKLDQPGNLPGSNRRLQTRKEKAQALEELTGFRELFQTPCTDNPTADEKTTKKILCKSPQSDPADTPTNTKQRPKRSLKKADVEEEFLAFRKLTPSAGKAMHTPKAAVGEEKDINTFVGTPVEKLDLLGNLPGSKRRPQTPKEKAKALEDLAGFKELFQTPGHTEESMTDDKITEVSCKSPQPDPVKTPTSSKQRLKISLGKVGVKEEVLPVGKLTQTSGKTTQTHRETAGDGKSIKAFKESAKQMLDPANYGTGMERWPRTPKEEAQSLEDLAGFKELFQTPDHTEESTTDDKTTKIACKSPPPESMDTPTSTRRRPKTPLGKRDIVEELSALKQLTQTTHTDKVPGDEDKGINVFRETAKQKLDPAASVTGSKRQPRTPKGKAQPLEDLAGLKELFQTPVCTDKPTTHEKTTKIACRSPQPDPVGTPTIFKPQSKRSLRKADVEEESLALRKRTPSVGKAMDTPKPAGGDEKDMKAFMGTPVQKLDLPGNLPGSKRWPQTPKEKAQALEDLAGFKELFQTPGTDKPTTDEKTTKIACKSPQPDPVDTPASTKQRPKRNLRKADVEEEFLALRKRTPSAGKAMDTPKPAVSDEKNINTFVETPVQKLDLLGNLPGSKRQPQTPKEKAEALEDLVGFKELFQTPGHTEESMTDDKITEVSCKSPQPESFKTSRSSKQRLKIPLVKVDMKEEPLAVSKLTRTSGETTQTHTEPTGDSKSIKAFKESPKQILDPAASVTGSRRQLRTRKEKARALEDLVDFKELFSAPGHTEESMTIDKNTKIPCKSPPPELTDTATSTKRCPKTRPRKEVKEELSAVERLTQTSGQSTHTHKEPASGDEGIKVLKQRAKKKPNPVEEEPSRRRPRAPKEKAQPLEDLAGFTELSETSGHTQESLTAGKATKIPCESPPLEVVDTTASTKRHLRTRVQKVQVKEEPSAVKFTQTSGETTDADKEPAGEDKGIKALKESAKQTPAPAASVTGSRRRPRAPRESAQAIEDLAGFKDPAAGHTEESMTDDKTTKIPCKSSPELEDTATSSKRRPRTRAQKVEVKEELLAVGKLTQTSGETTHTDKEPVGEGKGTKAFKQPAKRNVDAEDVIGSRRQPRAPKEKAQPLEDLASFQELSQTPGHTEELANGAADSFTSAPKQTPDSGKPLKISRRVLRAPKVEPVGDVVSTRDPVKSQSKSNTSLPPLPFKRGGGKDGSVTGTKRLRCMPAPEEIVEELPASKKQRVAPRARGKSSEPVVIMKRSLRTSAKRIEPAEELNSNDMKTNKEEHKLQDSVPENKGISLRSRRQDKTEAEQQITEVFVLAERIEINRNEKKPMKTSPEMDIQNPDDGARKPIPRDKVTENKRCLRSARQNESSQPKVAEESGGQKSAKVLMQNQKGKGEAGNSDSMCLRSRKTKSQPAASTLESKSVQRVTRSVKRCAENPKKAEDNVCVKKITTRSHRDSEDI

SEQ ID NO: 2500 - DNA, 11435 bp, Homo sapien
ctaccgggcggaggtgagcgcggcgccggctcctcctgcggcggactttgggtgcgacttgacgagcggtggttcgacaagtggccttgcgggccggatcgtcccagtggaagagttgtaaatttgcttctggccttcccctacggattatacctggccttcccctacggattatactcaacttactgtttagaaaatgtggcccacgagacgcctggttactatcaaaaggagcggggtcgacggtccccactttcccctgagcctcagcacctgcttgtttggaaggggtattgaatgtgacatccgtatccagcttcctgttgtgtcaaaacaacattgcaaaattgaaatccatgagcaggaggcaatattacataatttcagttccacaaatccaacacaagtaaatgggtctgttattgatgagcctgtacggctaaaacatggagatgtaataactattattgatcgttccttcaggtatgaaaatgaaagtcttcagaatggaaggaagtcaactgaatttccaagaaaaatacgtgaacaggagccagcacgtcgtgtctcaagatctagcttctcttctgaccctgatgagagtgagggaatacctttgaaaagaaggcgtgtgtcctttggtgggcacctaagacctgaactatttgatgaaaacttgcctcctaatacgcctctcaaaaggggagaagccccaaccaaaagaaagtctctggtaatgcacactccacctgtcctgaagaaaatcatcaaggaacagcctcaaccatcaggaaaacaagagtcaggttcagaaatccatgtggaagtgaaggcacaaagcttggttataagccctccagctcctagtcctaggaaaactccagttgccagtgatcaacgccgtaggtcctgcaaaacagcccctgcttccagcagcaaatctcagacagaggttcctaagagaggaggagaaagagtggcaacctgccttcaaaagagagtgtctatcagccgaagtcaacatgatattttacagatgatatgttccaaaagaagaagtggtgcttcggaagcaaatctgattgttgcaaaatcatgggcagatgtagtaaaacttggtgcaaaacaaacacaaactaaagtcataaaacatggtcctcaaaggtcaatgaacaaaaggcaaagaagacctgctactccaaagaagcctgtgggcgaagttcacagtcaatttagtacaggccacgcaaactctccttgtaccataataatagggaaagctcatactgaaaaagtacatgtgcctgctcgaccctacagagtgctcaacaacttcatttccaaccaaaaaatggactttaaggaagatctttcaggaatagctgaaatgttcaagaccccagtgaaggagcaaccgcagttgacaagcacatgtcacatcgctatttcaaattcagagaatttgcttggaaaacagtttcaaggaactgattcaggagaagaacctctgctccccacctcagagagttttggaggaaatgtgttcttcagtgcacagaatgcagcaaaacagccatctgataaatgctctgcaagccctcccttaagacggcagtgtattagagaaaatggaaacgtagcaaaaacgcccaggaacacctacaaaatgacttctctggagacaaaaacttcagatactgagacagagccttcaaaaacagtatccactgtaaacaggtcaggaaggtctacagagttcaggaatatacagaagctacctgtggaaagtaagagtgaagaaacaaatacagaaattgttgagtgcatcctaaaaagaggtcagaaggcaacactactacaacaaaggagagaaggagagatgaaggaaatagaaagaccttttgagacatataaggaaaatattgaattaaaagaaaacgatgaaaagatgaaagcaatgaagagatcaagaacttgggggcagaaatgtgcaccaatgtctgacctgacagacctcaagagcttgcctgatacagaactcatgaaagacacggcacgtggccagaatctcctccaaacccaagatcatgccaaggcaccaaagagtgagaaaggcaaaatcactaaaatgccctgccagtcattacaaccagaaccaataaacaccccaacacacacaaaacaacagttgaaggcatccctggggaaagtaggtgtgaaagaagagctcctagcagtcggcaagttcacacggacgtcaggggagaccacgcacacgcacagagagccagcaggagatggcaagagcatcagaacgtttaaggagtctccaaagcagatcctggacccagcagcccgtgtaactggaatgaagaagtggccaagaacgcctaaggaagaggcccagtcactagaagacctggctggcttcaaagagctcttccagacaccaggtccctctgaggaatcaatgactgatgagaaaactaccaaaatagcctgcaaatctccaccaccagaatcagtggacactccaacaagcacaaagcaatggcctaagagaagtctcaggaaagcagatgtagaggaagaattcttagcactcaggaaactaacaccatcagcagggaaagccatgcttacgcccaaaccagcaggaggtgatgagaaagacattaaagcatttatgggaactccagtgcagaaactggacctggcaggaactttacctggcagcaaaagacagctacagactcctaaggaaaaggcccaggctctagaagacctggctggctttaaagagctcttccagactcctggtcacaccgaggaattagtggctgctggtaaaaccactaaaataccctgcgactctccacagtcagacccagtggacaccccaacaagcacaaagcaacgacccaagagaagtatcaggaaagcagatgtagagggagaactcttagcgtgcaggaatctaatgccatcagcaggcaaagccatgcacacgcctaaaccatcagtaggtgaagagaaagacatcatcatatttgtgggaactccagtgcagaaactggacctgacagagaacttaaccggcagcaagagacggccacaaactcctaaggaagaggcccaggctctggaagacctgactggctttaaagagctcttccagacccctggtcatactgaagaagcagtggctgctggcaaaactactaaaatgccctgcgaatcttctccaccagaatcagcagacaccccaacaagcacaagaaggcagcccaagacacctttggagaaaagggacgtacagaaggagctctcagccctgaagaagctcacacagacatcaggggaaaccacacacacagataaagtaccaggaggtgaggataaaagcatcaacgcgtttagggaaactgcaaaacagaaactggacccagcagcaagtgtaactggtagcaagaggcacccaaaaactaaggaaaaggcccaacccctagaagacctggctggctggaaagagctcttccagacaccagtatgcactgacaagcccacgactcacgagaaaactaccaaaatagcctgcagatcacaaccagacccagtggacacaccaacaagctccaagccacagtccaagagaagtctcaggaaagtggacgtagaagaagaattcttcgcactcaggaaacgaacaccatcagcaggcaaagccatgcacacacccaaaccagcagtaagtggtgagaaaaacatctacgcatttatgggaactccagtgcagaaactggacctgacagagaacttaactggcagcaagagacggctacaaactcctaaggaaaaggcccaggctctagaagacctggctggctttaaagagctcttccagacacgaggtcacactgaggaatcaatgactaacgataaaactgccaaagtagcctgcaaatcttcacaaccagacctagacaaaaacccagcaagctccaagcgacggctcaagacatccctggggaaagtgggcgtgaaagaagagctcctagcagttggcaagctcacacagacatcaggagagactacacacacacacacagagccaacaggagatggtaagagcatgaaagcatttatggagtctccaaagcagatcttagactcagcagcaagtctaactggcagcaagaggcagctgagaactcctaagggaaagtctgaagtccctgaagacctggccggcttcatcgagctcttccagacaccaagtcacactaaggaatcaatgactaatgaaaaaactaccaaagtatcctacagagcttcacagccagacctagtggacaccccaacaagctccaagccacagcccaagagaagtctcaggaaagcagacactgaagaagaatttttagcatttaggaaacaaacgccatcagcaggcaaagccatgcacacacccaaaccagcagtaggtgaagagaaagacatcaacacgtttttgggaactccagtgcagaaactggaccagccaggaaatttacctggcagcaatagacggctacaaactcgtaaggaaaaggcccaggctctagaagaactgactggcttcagagagcttttccagacaccatgcactgataaccccacagctgatgagaaaactaccaaaaaaatactctgcaaatctccgcaatcagacccagcggacaccccaacaaacacaaagcaacggcccaagagaagcctcaagaaagcagacgtagaggaagaatttttagcattcaggaaactaacaccatcagcaggcaaagccatgcacacgcctaaagcagcagtaggtgaagagaaagacatcaacacatttgtggggactccagtggagaaactggacctgctaggaaatttacctggcagcaagagacggccacaaactcctaaagaaaaggccaaggctctagaagatctggctggcttcaaagagctcttccagacaccaggtcacactgaggaatcaatgaccgatgacaaaatcacagaagtatcctgcaaatctccacaaccagacccagtcaaaaccccaacaagctccaagcaacgactcaagatatccttggggaaagtaggtgtgaaagaagaggtcctaccagtcggcaagctcacacagacgtcagggaagaccacacagacacacagagagacagcaggagatggaaagagcatcaaagcgtttaaggaatctgcaaagcagatgctggacccagcaaactatggaactgggatggagaggtggccaagaacacctaaggaagaggcccaatcactagaagacctggccggcttcaaagagctcttccagacaccagaccacactgaggaatcaacaactgatgacaaaactaccaaaatagcctgcaaatctccaccaccagaatcaatggacactccaacaagcacaaggaggcggcccaaaacacctttggggaaaagggatatagtggaagagctctcagccctgaagcagctcacacagaccacacacacagacaaagtaccaggagatgaggataaaggcatcaacgtgttcagggaaactgcaaaacagaaactggacccagcagcaagtgtaactggtagcaagaggcagccaagaactcctaagggaaaagcccaacccctagaagacttggctggcttgaaagagctcttccagacaccagtatgcactgacaagcccacgactcacgagaaaactaccaaaatagcctgcagatctccacaaccagacccagtgggtaccccaacaatcttcaagccacagtccaagagaagtctcaggaaagcagacgtagaggaagaatccttagcactcaggaaacgaacaccatcagtagggaaagctatggacacacccaaaccagcaggaggtgatgagaaagacatgaaagcatttatgggaactccagtgcagaaattggacctgccaggaaatttacctggcagcaaaagatggccacaaactcctaaggaaaaggcccaggctctagaagacctggctggcttcaaagagctcttccagacaccaggcactgacaagcccacgactgatgagaaaactaccaaaatagcctgcaaatctccacaaccagacccagtggacaccccagcaagcacaaagcaacggcccaagagaaacctcaggaaagcagacgtagaggaagaatttttagcactcaggaaacgaacaccatcagcaggcaaagccatggacaccccaaaaccagcagtaagtgatgagaaaaatatcaacacatttgtggaaactccagtgcagaaactggacctgctaggaaatttacctggcagcaagagacagccacagactcctaaggaaaaggctgaggctctagaggacctggttggcttcaaagaactcttccagacaccaggtcacactgaggaatcaatgactgatgacaaaatcacagaagtatcctgtaaatctccacagccagagtcattcaaaacctcaagaagctccaagcaaaggctcaagatacccctggtgaaagtggacatgaaagaagagcccctagcagtcagcaagctcacacggacatcaggggagactacgcaaacacacacagagccaacaggagatagtaagagcatcaaagcgtttaaggagtctccaaagcagatcctggacccagcagcaagtgtaactggtagcaggaggcagctgagaactcgtaaggaaaaggcccgtgctctagaagacctggttgacttcaaagagctcttctcagcaccaggtcacactgaagagtcaatgactattgacaaaaacacaaaaattccctgcaaatctcccccaccagaactaacagacactgccacgagcacaaagagatgccccaagacacgtcccaggaaagaagtaaaagaggagctctcagcagttgagaggctcacgcaaacatcagggcaaagcacacacacacacaaagaaccagcaagcggtgatgagggcatcaaagtattgaagcaacgtgcaaagaagaaaccaaacccagtagaagaggaacccagcaggagaaggccaagagcacctaaggaaaaggcccaacccctggaagacctggccggcttcacagagctctctgaaacatcaggtcacactcaggaatcactgactgctggcaaagccactaaaataccctgcgaatctcccccactagaagtggtagacaccacagcaagcacaaagaggcatctcaggacacgtgtgcagaaggtacaagtaaaagaagagccttcagcagtcaagttcacacaaacatcaggggaaaccacggatgcagacaaagaaccagcaggtgaagataaaggcatcaaagcattgaaggaatctgcaaaacagacaccggctccagcagcaagtgtaactggcagcaggagacggccaagagcacccagggaaagtgcccaagccatagaagacctagctggcttcaaagacccagcagcaggtcacactgaagaatcaatgactgatgacaaaaccactaaaataccctgcaaatcatcaccagaactagaagacaccgcaacaagctcaaagagacggcccaggacacgtgcccagaaagtagaagtgaaggaggagctgttagcagttggcaagctcacacaaacctcaggggagaccacgcacaccgacaaagagccggtaggtgagggcaaaggcacgaaagcatttaagcaacctgcaaagcggaacgtggacgcagaagatgtaattggcagcaggagacagccaagagcacctaaggaaaaggcccaacccctggaagacctggccagcttccaagagctctctcaaacaccaggccacactgaggaactggcaaatggtgctgctgatagctttacaagcgctccaaagcaaacacctgacagtggaaaacctctaaaaatatccagaagagttcttcgggcccctaaagtagaacccgtgggagacgtggtaagcaccagagaccctgtaaaatcacaaagcaaaagcaacacttccctgcccccactgcccttcaagaggggaggtggcaaagatggaagcgtcacgggaaccaagaggctgcgctgcatgccagcaccagaggaaattgtggaggagctgccagccagcaagaagcagagggttgctcccagggcaagaggcaaatcatccgaacccgtggtcatcatgaagagaagtttgaggacttctgcaaaaagaattgaacctgcggaagagctgaacagcaacgacatgaaaaccaacaaagaggaacacaaattacaagactcggtccctgaaaataagggaatatccctgcgctccagacgccaagataagactgaggcagaacagcaaataactgaggtctttgtattagcagaaagaatagaaataaacagaaatgaaaagaagcccatgaagacctccccagagatggacattcagaatccagatgatggagcccggaaacccatacctagagacaaagtcactgagaacaaaaggtgcttgaggtctgctagacagaatgagagctcccagcctaaggtggcagaggagagcggagggcagaagagtgcgaaggttctcatgcagaatcagaaagggaaaggagaagcaggaaattcagactccatgtgcctgagatcaagaaagacaaaaagccagcctgcagcaagcactttggagagcaaatctgtgcagagagtaacgcggagtgtcaagaggtgtgcagaaaatccaaagaaggctgaggacaatgtgtgtgtcaagaaaataacaaccagaagtcatagggacagtgaagatatttgacagaaaaatcgaactgggaaaaatataataaagttagttttgtgataagttctagtgcagtttttgtcataaattacaagtgaattctgtaagtaaggctgtcagtctgcttaagggaagaaaactttggatttgctgggtctgaatcggcttcataaactccactgggagcactgctgggctcctggactgagaatagttgaacaccgggggctttgtgaaggagtctgggccaaggtttgccctcagctttgcagaatgaagccttgaggtctgtcaccacccacagccaccctacagcagccttaactgtgacacttgccacactgtgtcgtcgtttgtttgcctatgttctccagggcacggtggcaggaacaactatcctcgtctgtcccaacactgagcaggcactcggtaaacacgaatgaatggataagcgcacggatgaatggagcttacaagatctgtctttccaatggccgggggcatttggtccccaaattaaggctattggacatctgcacaggacagtcctatttttgatgtcctttcctttctgaaaataaagttttgtgctttggagaatgactcgtgagcacatctttagggaccaagagtgactttctgtaaggagtgactcgtggcttgccttggtctcttgggaatacttttctaactagggttgctctcacctgagacattctccacccgcggaatctcagggtcccaggctgtgggccatcacgacctcaaactggctcctaatctccagctttcctgtcattgaaagcttcggaagtttactggctctgctcccgcctgttttctttctgactctatctggcagcccgatgccacccagtacaggaagtgacaccagtactctgtaaagcatcatcatccttggagagactgagcactcagcaccttcagccacgatttcaggatcgcttccttgtgagccgctgcctccgaaatctcctttgaagcccagacatctttctccagcttcagacttgtagatataactcgttcatcttcatttactttccactttgccccctgtcctctctgtgttccccaaatcagagaatagcccgccatcccccagatcacctgtctggattcctccccattcacccaccttgccaggtgcaggtgaggatggtgcaccagacagggtagctgtcccccaaaatgtgccctgtgcgggcagtgccctgtctccacgtttgtttccccagtgtctggcggggagccaggtgacatcataaatacttgctgaatgaatgcagaaatcagcggtactgacttgtactatattggctgccatgatagggttctcacagcgtcatccatgatcgtaagggagaatgacattctgcttgagggagggaatagaaaggggcagggaggggacatctgagggcttcacagggctgcaaagggtacagggattgcaccagggcagaacaggggagggtgttcaaggaagagtggctcttagcagaggcactttggaaggtgtgaggcataaatgcttccttctacgtaggccaacctcaaaactttcagtaggaatgttgctatgatcaagttgttctaacactttagacttagtagtaattatgaacctcacatagaaaaatttcatccagccatatgcctgtggagtggaatattctgtttagtagaaaaatcctttagagttcagctctaaccagaaatcttgctgaagtatgtcagcaccttttctcaccctggtaagtacagtatttcaagagcacgctaagggtggttttcattttacagggctgttgatgatgggttaaaaatgttcatttaagggctacccccgtgtttaatagatgaacaccacttctacacaaccctccttggtactgggggagggagagatctgacaaatactgcccattcccctaggctgactggatttgagaacaaatacccacccatttccaccatggtatggtaacttctctgagcttcagtttccaagtgaatttccatgtaataggacattcccattaaatacaagctgtttttactttttcgcctcccagggcctgtgcgatctggtcccccagcctctcttgggctttcttacactaactctgtacctaccatctcctgcctcccttaggcaggcacctccaaccaccacacactccctgctgttttccctgcctggaactttcccaccagccccaccaagatcatttcatccagtcctgagctcagcttaagggaggcttcttgcctgtgggttccctcacccccatgcctgtcctccaggctggggcaggttcttagtttgcctggaattgttctgtacctctttgtagcacgtagtgttgtgaaactaagccactaattgagtttctggctcccctcctggggttgtaagttttgttcattcatgagggccgactgtatttcctggttactgtatcccagtgaccagccacaggagatgtccaataaagtatgtgatgaaatggtcttaaaaaaaaaaaaaaaaaaaaaa

SEQ ID NO: 2501 - protein, 2896 aa, Homo sapien
MWPTRRLVTIKRSGVDGPHFPLSLSTCLFGRGIECDIRIQLPVVSKQHCKIEIHEQEAILHNFSSTNPTQVNGSVIDEPVRLKHGDVITIIDRSFRYENESLQNGRKSTEFPRKIREQEPARRVSRSSFSSDPDESEGIPLKRRRVSFGGHLRPELFDENLPPNTPLKRGEAPTKRKSLVMHTPPVLKKIIKEQPQPSGKQESGSEIHVEVKAQSLVISPPAPSPRKTPVASDQRRRSCKTAPASSSKSQTEVPKRGGERVATCLQKRVSISRSQHDILQMICSKRRSGASEANLIVAKSWADVVKLGAKQTQTKVIKHGPQRSMNKRQRRPATPKKPVGEVHSQFSTGHANSPCTIIIGKAHTEKVHVPARPYRVLNNFISNQKMDFKEDLSGIAEMFKTPVKEQPQLTSTCHIAISNSENLLGKQFQGTDSGEEPLLPTSESFGGNVFFSAQNAAKQPSDKCSASPPLRRQCIRENGNVAKTPRNTYKMTSLETKTSDTETEPSKTVSTVNRSGRSTEFRNIQKLPVESKSEETNTEIVECILKRGQKATLLQQRREGEMKEIERPFETYKENIELKENDEKMKAMKRSRTWGQKCAPMSDLTDLKSLPDTELMKDTARGQNLLQTQDHAKAPKSEKGKITKMPCQSLQPEPINTPTHTKQQLKASLGKVGVKEELLAVGKFTRTSGETTHTHREPAGDGKSIRTFKESPKQILDPAARVTGMKKWPRTPKEEAQSLEDLAGFKELFQTPGPSEESMTDEKTTKIACKSPPPESVDTPTSTKQWPKRSLRKADVEEEFLALRKLTPSAGKAMLTPKPAGGDEKDIKAFMGTPVQKLDLAGTLPGSKRQLQTPKEKAQALEDLAGFKELFQTPGHTEELVAAGKTTKIPCDSPQSDPVDTPTSTKQRPKRSIRKADVEGELLACRNLMPSAGKAMHTPKPSVGEEKDIIIFVGTPVQKLDLTENLTGSKRRPQTPKEEAQALEDLTGFKELFQTPGHTEEAVAAGKTTKMPCESSPPESADTPTSTRRQPKTPLEKRDVQKELSALKKLTQTSGETTHTDKVPGGEDKSINAFRETAKQKLDPAASVTGSKRHPKTKEKAQPLEDLAGWKELFQTPVCTDKPTTHEKTTKIACRSQPDPVDTPTSSKPQSKRSLRKVDVEEEFFALRKRTPSAGKAMHTPKPAVSGEKNIYAFMGTPVQKLDLTENLTGSKRRLQTPKEKAQALEDLAGFKELFQTRGHTEESMTNDKTAKVACKSSQPDLDKNPASSKRRLKTSLGKVGVKEELLAVGKLTQTSGETTHTHTEPTGDGKSMKAFMESPKQILDSAASLTGSKRQLRTPKGKSEVPEDLAGFIELFQTPSHTKESMTNEKTTKVSYRASQPDLVDTPTSSKPQPKRSLRKADTEEEFLAFRKQTPSAGKAMHTPKPAVGEEKDINTFLGTPVQKLDQPGNLPGSNRRLQTRKEKAQALEELTGFRELFQTPCTDNPTADEKTTKKILCKSPQSDPADTPTNTKQRPKRSLKKADVEEEFLAFRKLTPSAGKAMHTPKAAVGEEKDINTFVGTPVEKLDLLGNLPGSKRRPQTPKEKAKALEDLAGFKELFQTPGHTEESMTDDKITEVSCKSPQPDPVKTPTSSKQRLKISLGKVGVKEEVLPVGKLTQTSGKTTQTHRETAGDGKSIKAFKESAKQMLDPANYGTGMERWPRTPKEEAQSLEDLAGFKELFQTPDHTEESTTDDKTTKIACKSPPPESMDTPTSTRRRPKTPLGKRDIVEELSALKQLTQTTHTDKVPGDEDKGINVFRETAKQKLDPAASVTGSKRQPRTPKGKAQPLEDLAGLKELFQTPVCTDKPTTHEKTTKIACRSPQPDPVGTPTIFKPQSKRSLRKADVEEESLALRKRTPSVGKAMDTPKPAGGDEKDMKAFMGTPVQKLDLPGNLPGSKRWPQTPKEKAQALEDLAGFKELFQTPGTDKPTTDEKTTKIACKSPQPDPVDTPASTKQRPKRNLRKADVEEEFLALRKRTPSAGKAMDTPKPAVSDEKNINTFVETPVQKLDLLGNLPGSKRQPQTPKEKAEALEDLVGFKELFQTPGHTEESMTDDKITEVSCKSPQPESFKTSRSSKQRLKIPLVKVDMKEEPLAVSKLTRTSGETTQTHTEPTGDSKSIKAFKESPKQILDPAASVTGSRRQLRTRKEKARALEDLVDFKELFSAPGHTEESMTIDKNTKIPCKSPPPELTDTATSTKRCPKTRPRKEVKEELSAVERLTQTSGQSTHTHKEPASGDEGIKVLKQRAKKKPNPVEEEPSRRRPRAPKEKAQPLEDLAGFTELSETSGHTQESLTAGKATKIPCESPPLEVVDTTASTKRHLRTRVQKVQVKEEPSAVKFTQTSGETTDADKEPAGEDKGIKALKESAKQTPAPAASVTGSRRRPRAPRESAQAIEDLAGFKDPAAGHTEESMTDDKTTKIPCKSSPELEDTATSSKRRPRTRAQKVEVKEELLAVGKLTQTSGETTHTDKEPVGEGKGTKAFKQPAKRNVDAEDVIGSRRQPRAPKEKAQPLEDLASFQELSQTPGHTEELANGAADSFTSAPKQTPDSGKPLKISRRVLRAPKVEPVGDVVSTRDPVKSQSKSNTSLPPLPFKRGGGKDGSVTGTKRLRCMPAPEEIVEELPASKKQRVAPRARGKSSEPVVIMKRSLRTSAKRIEPAEELNSNDMKTNKEEHKLQDSVPENKGISLRSRRQDKTEAEQQITEVFVLAERIEINRNEKKPMKTSPEMDIQNPDDGARKPIPRDKVTENKRCLRSARQNESSQPKVAEESGGQKSAKVLMQNQKGKGEAGNSDSMCLRSRKTKSQPAASTLESKSVQRVTRSVKRCAENPKKAEDNVCVKKITTRSHRDSEDI

SEQ ID NO: 2502 - DNA, 2379 bp, Homo sapien
ggcacgagggggaagcaggggtagcggagccatgggggacgctcccagccctgaagagaaactgcaccttatcacccggaacctgcaggaggttctgggggaagagaagctgaaggagatactgaaggagcgggaacttaaaatttactggggaacggcaaccacgggcaaaccacatgtggcttactttgtgcccatgtcaaagattgcagacttcttaaaggcagggtgtgaggtaacaattctgtttgcggacctccacgcatacctggataacatgaaagccccatgggaacttctagaactccgagtcagttactatgagaatgtgatcaaagcaatgctggagagcattggtgtgcccttggagaagctcaagttcatcaaaggcactgattaccagctcagcaaagagtacacactagatgtgtacagactctcctccgtggtcacacagcacgattccaagaaggctggagctgaggtggtaaagcaggtggagcaccctttgctgagtggcctcttataccccggactgcaggctttggatgaagagtatttaaaagtagatgcccaatttggaggcattgatcagagaaagattttcacctttgcagagaagtacctccctgcacttggctattcaaaacgggtccatctgatgaatcctatggttccaggattaacaggcagcaaaatgagctcttcagaagaggagtccaagattgatctccttgatcggaaggaggatgtgaagaaaaaactgaagaaggccttctgtgagccaggaaatgtggagaacaatggggttctgtccttcatcaagcatgtcctttttccccttaagtccgagtttgtgatcctacgagatgagaaatggggtggaaacaaaacctacacagcttacgtggacctggaaaaggactttgctgctgaggttgtacatcctggagacctgaagaattctgttgaagtcgcactgaacaagttgctggatccaatccgggaaaagtttaatacccctgccctgaaaaaactggccagcgctgcctacccagatccctcaaagcagaagccaatggccaaaggccctgccaagaattcagaaccagaggaggtcatcccatcccggctggatatccgtgtggggaaaatcatcactgtggagaagcacccagatgcagacagcctgtatgtagagaagattgacgtgggggaagctgaaccacggactgtggtgagcggcctggtacagttcgtgcccaaggaggaactgcaggacaggctggtagtggtgctgtgcaacctgaaaccccagaagatgagaggagtcgagtcccaaggcatgcttctgtgtgcttctatagaagggataaaccgccaggttgaacctctggaccctccggcaggctctgctcctggtgagcacgtgtttgtgaagggctatgaaaagggccaaccagatgaggagctcaagcccaagaagaaagtcttcgagaagttgcaggctgacttcaaaatttctgaggagtgcatcgcacagtggaagcaaaccaacttcatgaccaagctgggctccatttcctgtaaatcgctgaaaggggggaacattagctagccagcccagcatcttccccccttcttccaccactgagtcatctgctgtctcttcagtctgctccatccatcacccatttacccatctctcaggacacggaagcagcgggtttggactctttattcggtgcagaactcggcaaggggcagcttaccctccccagaacccaggatcatcctgtctggctgcagtgagagaccaacccctaacaagggctgggccacagcagggagtccagccctaccttcttcccttggcagctggagaaatctggtttcaatataactcatttaaaaatttatgccacagtccttataattggaaaaatactggtgcccaggttttcttggagttatccaagcagctgcgcccctagctgggatctggtacctggactaggctaattacagcttctccccaacaggaaactgtgggatttgaaaaggaaagggaagggaaaacagagaacctagtggtctaccaagtggttggcaactttcccaatgtctgcttactctgaggcttggcactgggggccagggcctgccccagggctcctggaatttcccttgatccagctaggctgggacactccctaaatcagctgcgtgttgttagcatcaggcagaatgaatggcagagagtgattctgtcttcatagagggtggggtacttctccataaggcatctcagtcaaatccccatcactgtcataaattcaaataaaatgtctgaacaagggaaaaaaaaaaaaaaaaaaa

SEQ ID NO: 2503 - protein, 528 aa, Homo sapien
MGDAPSPEEKLHLITRNLQEVLGEEKLKEILKERELKIYWGTATTGKPHVAYFVPMSKIADFLKAGCEVTILFADLHAYLDNMKAPWELLELRVSYYENVIKAMLESIGVPLEKLKFIKGTDYQLSKEYTLDVYRLSSVVTQHDSKKAGAEVVKQVEHPLLSGLLYPGLQALDEEYLKVDAQFGGIDQRKIFTFAEKYLPALGYSKRVHLMNPMVPGLTGSKMSSSEEESKIDLLDRKEDVKKKLKKAFCEPGNVENNGVLSFIKHVLFPLKSEFVILRDEKWGGNKTYTAYVDLEKDFAAEVVHPGDLKNSVEVALNKLLDPIREKFNTPALKKLASAAYPDPSKQKPMAKGPAKNSEPEEVIPSRLDIRVGKIITVEKHPDADSLYVEKIDVGEAEPRTVVSGLVQFVPKEELQDRLVVVLCNLKPQKMRGVESQGMLLCASIEGINRQVEPLDPPAGSAPGEHVFVKGYEKGQPDEELKPKKKVFEKLQADFKISEECIAQWKQTNFMTKLGSISCKSLKGGNIS

SEQ ID NO: 2504 - DNA, 4368 bp, Homo sapien
cttcgctcgctccctccctccgtcttaggtcactgttttcaacctcgaataaaaactgcagccaacttccgaggcagcctcattgcccagcggaccccagcctctgccaggttcggtccgccatcctcgtcccgtcctccgccggcccctgccccgcgcccagggatcctccagctcctttcgcccgcgccctccgttcgctccggacaccatggacaagttttggtggcacgcagcctggggactctgcctcgtgccgctgagcctggcgcagatcgatttgaatataacctgccgctttgcaggtgtattccacgtggagaaaaatggtcgctacagcatctctcggacggaggccgctgacctctgcaaggctttcaatagcaccttgcccacaatggcccagatggagaaagctctgagcatcggatttgagacctgcaggtatgggttcatagaagggcatgtggtgattccccggatccaccccaactccatctgtgcagcaaacaacacaggggtgtacatcctcacatccaacacctcccagtatgacacatattgcttcaatgcttcagctccacctgaagaagattgtacatcagtcacagacctgcccaatgcctttgatggaccaattaccataactattgttaaccgtgatggcacccgctatgtccagaaaggagaatacagaacgaatcctgaagacatctaccccagcaaccctactgatgatgacgtgagcagcggctcctccagtgaaaggagcagcacttcaggaggttacatcttttacaccttttctactgtacaccccatcccagacgaagacagtccctggatcaccgacagcacagacagaatccctgctaccagagaccaagacacattccaccccagtggggggtcccataccactcatggatctgaatcagatggacactcacatgggagtcaagaaggtggagcaaacacaacctctggtcctataaggacaccccaaattccagaatggctgatcatcttggcatccctcttggccttggctttgattcttgcagtttgcattgcagtcaacagtcgaagaaggtgtgggcagaagaaaaagctagtgatcaacagtggcaatggagctgtggaggacagaaagccaagtggactcaacggagaggccagcaagtctcaggaaatggtgcatttggtgaacaaggagtcgtcagaaactccagaccagtttatgacagctgatgagacaaggaacctgcagaatgtggacatgaagattggggtgtaacacctacaccattatcttggaaagaaacaaccgttggaaacataaccattacagggagctgggacacttaacagatgcaatgtgctactgattgtttcattgcgaatcttttttagcataaaattttctactctttttgttttttgtgttttgttctttaaagtcaggtccaatttgtaaaaacagcattgctttctgaaattagggcccaattaataatcagcaagaatttgatcgttccagttcccacttggaggcctttcatccctcgggtgtgctatggatggcttctaacaaaaactacacatatgtattcctgatcgccaacctttcccccaccagctaaggacatttcccagggttaatagggcctggtccctgggaggaaatttgaatgggtccattttgcccttccatagcctaatccctgggcattgctttccactgaggttgggggttggggtgtactagttacacatcttcaacagaccccctctagaaatttttcagatgcttctgggagacacccaaagggtgaagctatttatctgtagtaaactatttatctgtgtttttgaaatattaaaccctggatcagtcctttgatcagtataattttttaaagttactttgtcagaggcacaaaagggtttaaactgattcataataaatatctgtacttcttcgatcttcaccttttgtgctgtgattcttcagtttctaaaccagcactgtctgggtccctacaatgtatcaggaagagctgagaatggtaaggagactcttctaagtcttcatctcagagaccctgagttcccactcagacccactcagccaaatctcatggaagaccaaggagggcagcactgtttttgttttttgttttttgttttttttattttgtgacactgtccaaaggttttccatcctgtcctggaatcagagttggaagctgaggagcttcagcctcttttatggtttaatggccacctgttctctcctgtgaaaggctttgcaaagtcacattaagtttgcatgacctgttatccctggggccctatttcatagaggctggccctattagtgatttccaaaaacaatatggaagtgccttttgatgtcttacaataagagaagaagccaatggaaatgaaagagattggcaaaggggaaggatgatgccatgtagatcctgtttgacatttttatggctgtatttgtaaacttaaacacaccagtgtctgttcttgatgcagttgctatttaggatgagttaagtgcctggggagtccctcaaaaggttaaagggattcccatcattggaatcttatcaccagataggcaagtttatgaccaaacaagagagtactggctttatcctctaacctcatattttctcccacttggcaagtcctttgtggcatttattcatcagtcagggtgtccgattggtcctagaacttccaaaggctgcttgtcatagaagccattgcatctataaagcaacggctcctgttaaatggtatctcctttctgaggctcctactaaaagtcatttgttacctaaacttatgtgcttaacaggcaatgcttctcagaccacaaagcagaaagaagaagaaaagctcctgactaaatcagggctgggcttagacagagttgatctgtagaatatctttaaaggagagatgtcaactttctgcactattcccagcctctgctcctccctgtctaccctctcccctccctctctccctccacttcaccccacaatcttgaaaaacttcctttctcttctgtgaacatcattggccagatccattttcagtggtctggatttctttttattttcttttcaacttgaaagaaactggacattaggccactatgtgttgttactgccactagtgttcaagtgcctcttgttttcccagagatttcctgggtctgccagaggcccagacaggctcactcaagctctttaactgaaaagcaacaagccactccaggacaaggttcaaaatggttacaacagcctctacctgtcgccccagggagaaaggggtagtgatacaagtctcatagccagagatggttttccactccttctagatattcccaaaaagaggctgagacaggaggttattttcaattttattttggaattaaatacttttttccctttattactgttgtagtccctcacttggatatacctctgttttcacgatagaaataagggaggtctagagcttttattccttggccattgtcaacggagagctggccaagtcttcacaaacccttgcaacattgcctgaagtttatggaataagatgtattctcactcccttgatctcaagggcgtaactctggaagcacagcttgactacacgtcatttttaccaatgattttcaggtgacctgggctaagtcatttaaactgggtctttataaaagtaaaaggccaacatttaattattttgcaaagcaacctaagagctaaagatgtaatttttcttgcaattgtaaatcttttgtgtctcctgaagacttcccttaaaattagctctgagtgaaaaatcaaaagagacaaaagacatcttcgaatccatatttcaagcctggtagaattggcttttctagcagaacctttccaaaagttttatattgagattcataacaacaccaagaattgattttgtagccaacattcattcaatactgttatatcagaggagtaggagagaggaaacatttgacttatctggaaaagcaaaatgtacttaagaataagaataacatggtccattcacctttatgttatagatatgtctttgtgtaaatcatttgttttgagttttcaaagaatagcccattgttcattcttgtgctgtacaatgaccactgttattgttactttgacttttcagagcacacccttcctctggtttttgtatatttattgatggatcaataataatgaggaaagcatgatatgtatattgctgagttgaaagcacttattggaaaatattaaaaggctaacattaaaagactaaaggaaacag

SEQ ID NO: 2505 - protein, 361 aa, Homo sapien
MDKFWWHAAWGLCLVPLSLAQIDLNITCRFAGVFHVEKNGRYSISRTEAADLCKAFNSTLPTMAQMEKALSIGFETCRYGFIEGHVVIPRIHPNSICAANNTGVYILTSNTSQYDTYCFNASAPPEEDCTSVTDLPNAFDGPITITIVNRDGTRYVQKGEYRTNPEDIYPSNPTDDDVSSGSSSERSSTSGGYIFYTFSTVHPIPDEDSPWITDSTDRIPATRDQDTFHPSGGSHTTHGSESDGHSHGSQEGGANTTSGPIRTPQIPEWLIILASLLALALILAVCIAVNSRRRCGQKKKLVINSGNGAVEDRKPSGLNGEASKSQEMVHLVNKESSETPDQFMTADETRNLQNVDMKIGV

SEQ ID NO: 2506 - DNA, 11269 bp, Homo sapien
attctcttgctccccgccccgtcgggatcagtcagtgtgatccgaagcgggggagggggggggcggcggccgaacgatgtgcgagaactgcgcagacctggtggaggtgttaaatgaaatatcagatgtagaaggtggtgatggactgcagctcagaaaggaacatactctcaaaatatttacttacatcaattcctggacacagaggcaatgtctatgctgcttcaaggaatataagcatttggagatttttaatcaagtagtgtgtgcacttattaacttagtgattgcccaagttcaagtgctccgggaccagctttgtaaacattgtactaccattaacatagattccacgtggcaagatgagagtaatcaagcagaagaaccactgaatatagatagagagtgtaatgaaggaagtacagaaagacaaaaatcaatagaaaaaaaatcaaactctacaagaatttgtaatctgactgaggaggaatcttcaaagagttctgatccttttagtttatggagtacagatgagaaggaaaaactcttactatgtgtggcaaaaaatttttcaaattcagtttcccttatatactgcttacaagcataatactcaccctactattgaggatatatcaactcaagaaagtaacatattaggggcattctgtgatatgaatgatgtagaagtaccattgcatttgcttcgttatgtatgtttgttttgtgggaaaaatggcctttctctcatgaaggattgctttgaatatggaactcctgaaactttgccatttcttatagcacatgcgtttattacagttgtgtctaatattagaatatggctacatattcccgctgtcatgcagcacattataccttttaggacctatgttattaggtatttatgcaagctctcggatcaggagttacgacagagtgcagctcgtaacatggctgacttaatgtggagcacagtcaaagaaccattggatacaacattatgctttgataaagaaagcctagatcttgcatttaagtactttatgtcacctactttgactatgaggttggctggattgagtcagataacaaatcaactccataccttcaatgatgtgtgcaataatgaatcattagtatcggacacagaaacgtccattgcaaaagaacttgcagactggcttattagcaacaatgtggtggagcatatatttggaccaaatttacatattgagattatcaaacagtgccaagtgattttgaattttttggcagcagaagggcgactgagtactcaacatattgactgtatttgggctgcagcacagttgaaacattgtagtcggtatatacatgacttatttccttcactcatcaagaatttggatcccgtaccacttagacatctacttaatctggtctcagctcttgagccaagtgttcatactgaacagacactgtacttggcatccatgttaattaaagcactgtggaataacgcactagcagctaaggctcagttatctaaacagagttcttttgcatctttattaaatactaatattcccattggaaataagaaagaggaagaagagcttagaagaacagctccatcaccttggtcacctgcagctagtcctcaaagcagtgataatagcgatacacatcaaagtggaggtagtgacattgaaatggatgagcaacttattaatagaaccaaacatgtgcaacaacgactttcagacacagaggaatccatgcagggaagttctgacgaaactgccaacagtggtgaagatggaagcagtggtcctggtagcagtagtgggcatagtgatggatctagcaatgaggttaattctagccacgcaagccagtcagctgggagccctggcagtgaggtacagtcagaagacattgcagatattgaagccctcaaagaggaagatgaagacgatgatcatggtcataatcctcccaaaagcagttgtggtacagatcttcggaatagaaagttagagagtcaagcaggcatttgcctgggggactcccaaggcacgtcagaaagaaatgggacaagcagcggaacaggaaaggacctggtttttaacactgaatcattgccatcagtagataatcgaatgcgaatgctggatgcttgttcacactctgaagacccagaacatgatatttcaggggaaatgaatgctactcatatagcacaagggtctcaggagtcttgtatcacacgaactggggacttccttggggagactattgggaatgaattatttaattgtcgacaatttattggtccacagcatcaccaccaccaccaccaccatcaccaccaccacgatgggcatatggttgatgatatgctaagtgcagatgatgtcagttgtagtagctcccaggttagtgcaaaatcagaaaaaaatatggctgattttgatggtgaagaatctggatgtgaagaggagctagttcagattaattcacatgcggaactgacatctcacctccaacaacatcttcccaatttagcttccatttaccatgaacatcttagtcaaggacctgtagttcataaacatcaattcaacagtaatgctgttacagacattaatttggataatgtttgcaagaaaggaaatactttgttgtgggatatagtccaagatgaagatgcagttaatctttctgaaggattaataaatgaagcagagaaacttctttgttcgttagtatgttggtttacagatagacaaattcgaatgagattcattgaaggttgccttgaaaacttgggaaacaacagatcagtagtaatttcacttcgtcttcttccaaaactatttggtacttttcagcagtttgggagcagttacgatacacactggataacaatgtgggcagaaaaagaactgaacatgatgaagcttttctttgataatttggtatactacattcaaactgtgagagaaggaagacaaaaacatgcactgtacagccatagtgctgaagttcaagttcgtcttcaattcttgacttgtgtattttcaactctgggatcacctgatcatttcaggttaagtttagagcaagttgacatcttatggcattgtttagtagaagattctgaatgttatgatgatgcactccattggtttttaaatcaagttcgaagtaaagatcaacatgctatgggtatggaaacctacaaacatcttttcctggagaagatgccccagctaaaacctgaaacaattagcatgactggcttaaacctgtttcagcatctctgtaacttggctcgattggctaccagtgcctatgatggttgttcaaattctgagctgtgtggtatggaccaattttggggcattgctttaagagcacaatctggtgatgtcagtcgagcagctatccagtatattaactcctattatattaatggtaaaacaggtttggagaaggagcaagaatttattagtaagtgcatggagagtcttatgatagcttctagcagtcttgaacaggaatcacactcaagtctcatggttatagaaagaggactccttatgctgaagacacatctggaagcgtttaggagaaggtttgcatatcatctgagacagtggcaaattgaaggcactggtattagtagtcatttgaaagcactgagtgacaaacagtctctgccgctaagggttgtatgccagccagctggacttcctgacaagatgactattgaaatgtatcctagtgaccaggtagcagatcttagggctgaagtaactcattggtatgaaaatttacagaaagaacaaataaatcaacaagctcagcttcaggagtttggtcaaagcaaccgaaaaggagagtttcctggaggcctcatgggacctgtcaggatgatttcatctggacacgagttaacaacagattatgatgaaaaagcacttcatgagcttggttttaaggatatgcagatggtatttgtatctttgggtgcaccaaggagagagcggaaaggggaaggtgttcagctgccagcatcttgcctcccaccccctcagaaggacaacattccaatgcttttgcttttacaagagcctcatttaactactctttttgatttattagagatgcttgcatcatttaaaccaccctcaggaaaagtggcagtggatgatagtgagagcttacgatgtgaagaacttcatcttcatgcagaaaatctgtctaggcgggtctgggagctactgatgcttcttcctacatgtcctaatatgttgatggcattccagaatatctcagatgagcagagtaatgatggatttaattggaaagaacttctcaaaattaagagcgcccacaagctattgtatgctctggaaattattgaagcactgggaaaacctaatagaagaataaggagggagtctacgggaagttacagtgatctttatccagattcagatgattcaagtgaggatcaagtggaaaatagtaaaaattcctggagttgcaagtttgttgctgctggagggcttcaacagttattagaaatttttaattctggaattctagagcctaaagagcaggaatcatggactgtgtggcagctagactgtcttgcttgcttgctgaagttaatatgccagtttgcagtagatccatccgatttggatttagcttatcatgatgtctttgcctggtctggtatagcggaaagccataggaaaagaacctggcctggcaaatcaaggaaggctgctggtgatcatgctaagggtcttcatataccacgattaacagaggtatttcttgttcttgtccaaggaaccagtttgattcagcgacttatgtctgttgcttatacgtatgataatctggctcctagagttttaaaagctcagtctgatcacaggtctagacatgaagtttcacattattcaatgtggctcttggtgagttgggctcattgctgttctttagtgaaatctagccttgctgatagcgatcatttacaagattggctaaagaaattgactctccttattcctgagactgcagttcgtcatgaatcatgcagtggtctctataagttatccctgtcagggctggatggaggagactcaatcaatcgttcttttctgctattggctgcctcaacattattgaaatttcttcctgatgctcaagcactcaaacctattaggatagatgattatgaggaagaaccaatattaaaaccaggatgtaaagagtatttttggttgttatgcaaattagttgacaacatacatataaaggacgctagtcagacaacgctcctcgacttagatgccttggcaagacatttggctgactgtattcgaagtagggagatccttgatcatcaggatggtaatgtagaagatgatgggcttacaggactcctaaggcttgcaacaagtgttgttaaacacaaaccaccctttaaattttcaagggaaggacaggaatttttgagagatatcttcaatctcctgtttttgttgccaagtctaaaggaccgacaacagccaaagtgcaaatcacattcttcaagagctgccgcttacgatttgttagtagagatggtaaaggggtctgttgagaactacaggctaatacacaactgggttatggcacaacacatgcagtcccatgcaccttataaatgggattactggcctcatgaagatgtccgtgctgaatgtagatttgttggccttactaaccttggagctacttgttacttagcttctactattcagcaactttatatgatacctgaggcaagacaggctgtcttcactgccaagtattcagaggatatgaagcacaagaccactcttctggagcttcagaaaatgtttacatatttaatggagagtgaatgcaaagcatataatcctagacctttctgtaaaacatacaccatggataagcagcctctgaatactggggaacagaaagatatgacagagttttttactgatctaattaccaaaatcgaagaaatgtctcccgaactgaaaaataccgtcaaaagtttatttggaggtgtaattacaaacaatgttgtatccttggattgtgaacatgttagtcaaactgctgaagagttttatactgtgaggtgccaagtggctgatatgaagaacatttatgaatctcttgatgaagttactataaaagacactttggaaggtgataacatgtatacttgttctcattgtgggaagaaagtacgagctgaaaaaagggcatgttttaagaaattgcctcgcattttgagtttcaatactatgagatacacatttaatatggtcacgatgatgaaagagaaagtgaatacacacttttccttcccattacgtttggacatgacgccctatacagaagattttcttatgggaaagagtgagaggaaagaaggttttaaagaagtcagtgatcattcaaaagactcagagagctatgaatatgacttgataggagtgactgttcacacaggaacggcagatggtggacactattatagctttatcagagatatagtaaatccccatgcttataaaaacaataaatggtatctttttaatgatgctgaggtaaaaccttttgattctgctcaacttgcatctgaatgttttggtggagagatgacgaccaagacctatgattctgttacagataaatttatggacttctcttttgaaaagacacacagtgcatatatgctgttttacaaacgcatggaaccagaggaagaaaatggcagagaatacaaatttgatgtttcgtcagagttactagagtggatttggcatgataacatgcagtttcttcaagacaaaaacatttttgaacatacatattttggatttatgtggcaattgtgtagttgtattcccagtacattaccagatcctaaagctgtgtccttaatgacagcaaagttaagcacttcctttgtcctagagacatttattcattctaaagaaaagcccacgatgcttcagtggattgaactgttgacgaaacagtttaataatagtcaggcagcttgtgagtggtttttagatcgtatggctgatgacgactggtggccaatgcagatactaattaagtgccctaatcaaattgtgagacagatgtttcagcgtttgtgtatccatgtgattcagaggctgagacctgtgcatgctcatctctatttgcagccaggaatggaagatgggtcagatgatatggatacctcagtagaagatattggtggtcgttcatgtgtcactcgctttgtgagaaccctgttattaattatggaacatggtgtaaaacctcacagtaaacatcttacagagtattttgccttcctttacgaatttgcaaaaatgggtgaagaagagagccaatttttgctttcattgcaagctatatctacaatggtacatttttacatgggaacaaaaggacctgaaaatcctcaagttgaagtgttatcagaggaagaaggggaagaagaagaggaggaagaagatatcctctctctggcagaagaaaaatacaggccagctgcccttgaaaagatgatagctttagttgctcttttggttgaacagtctcgatcagaaaggcatttgacattatcacagactgacatggcagcattaacaggaggaaagggatttcccttcttgtttcaacatattcgtgatggcatcaatataagacaaacttgtaatctgattttcagcctgtgtcgatacaataatcgacttgcagaacatattgtatctatgcttttcacatcaatagcaaagttgactcctgaggcagccaatcctttctttaagttgttgactatgctaatggagtttgctggtggacctccaggaatgcctccctttgcatcttatattctgcagaggatatgggaggtgattgaatacaatccttctcagtgtctagattggttggcagtgcagacaccccgaaataaactggcacacagctgggtcttacagaatatggaaaactgggtcgagcggtttcttttggctcacaattatcctagagtgaggacttctgcagcttatcttctggtgtcccttataccaagcaattcattccgtcagatgttccggtcaacaaggtctttgcacatcccaacccgtgaccttccactcagtccagacacaacagtagtcctacatcaggtctacaacgtgctccttggtttgctctcaagagccaaactttatgttgatgctgctgttcatggcactacaaagctagtgccctattttagctttatgacttactgtttaatttccaaaactgagaagctgatgttttccacatatttcatggatttgtggaaccttttccagcctaaactttctgagccagcaatagctacaaatcacaataaacaggctttgctttcattttggtacaatgtctgtgctgactgtccagagaatatccgccttattgttcagaacccagtggtaaccaagaacattgccttcaattacatccttgctgaccatgatgatcaggatgtggtgctttttaaccgtgggatgctgccagcgtactatggcattctgaggctctgctgtgagcagtctcctgcattcacacgacaactggcttctcaccagaacatccagtgggcctttaagaatcttacaccacatgccagccaataccctggagcagtagaagaactgtttaacctgatgcagctgtttatagctcagaggccagatatgagagaagaagaattagaagatattaaacagttcaagaaaacaaccataagttgttacttacgttgcttagatggccgctcctgctggactactttaataagtgccttcagaatactattagaatctgatgaagacagacttcttgttgtatttaatcgaggattgattctaatgacagagtctttcaacactttgcacatgatgtatcacgaagctacagcttgccatgtgactggagatttagtagaacttctgtcaatatttctttcggttttgaagtctacacgcccttatcttcagagaaaagatgtgaaacaagcattaatccagtggcaggagcgaattgaatttgcccataaactgttaactcttcttaattcctatagtcctccagaacttagaaatgcctgtatagatgtcctcaaggaacttgtacttttgagtccccatgattttcttcatactctggttccctttctacaacacaaccattgtacttaccatcacagtaatataccaatgtctcttggaccttatttcccttgtcgagaaaatatcaagctaataggagggaaaagcaatattcggcctccgcgccctgaactcaatatgtgcctcttgcccacaatggtggaaaccagtaagggcaaagatgacgtttatgatcgtatgctgctagactacttcttttcttatcatcagttcatccatctattatgccgagttgcaatcaactgtgaaaaatttactgaaacattagttaagctgagtgtcctagttgcctatgaaggtttgccacttcatcttgcactgttccccaaactttggactgagctatgccagactcagtctgctatgtcaaaaaactgcatcaagcttttgtgtgaagatcctgttttcgcagaatatattaaatgtatcctaatggatgaaagaacttttttaaacaacaacattgtctacacgttcatgacacatttccttctaaaggttcaaagtcaagtgttttctgaagcaaactgtgccaatttgatcagcactcttattacaaacttgataagccagtatcagaacctacagtctgatttctccaaccgagttgaaatttccaaagcaagtgcttctttaaatggggacctgagggcactcgctttgctcctgtcagtacacactcccaaacagttaaacccagctctaattccaactctgcaagagcttttaagcaaatgcaggacttgtctgcaacagagaaactcactccaagagcaagaagccaaagaaagaaaaactaaagatgatgaaggagcaactcccattaaaaggcggcgtgttagcagtgatgaggagcacactgtagacagctgcatcagtgacatgaaaacagaaaccagggaggtcctgaccccaacgagcacttctgacaatgagaccagagactcctcaattattgatccaggaactgagcaagatcttccttcccctgaaaatagttctgttaaagaataccgaatggaagttccatcttcgttttcagaagacatgtcaaatatcaggtcacagcatgcagaagaacagtccaacaatggtagatatgacgattgtaaagaatttaaagacctccactgttccaaggattctaccctagctgaggaagaatctgagttcccttctacttctatctctgcagttctgtctgacttagctgacttgagaagctgtgatggccaagctttgccctcccaggaccctgaggttgctttatctctcagttgtggccattccagaggactctttagtcatatgcagcaacatgacattttagataccctgtgtaggaccattgaatctacaatccatgtcgtcacaaggatatctggcaaaggaaaccaagctgcttcttgacattaggtgtagcatgtctacttttaagtccctcacccccaacccccatgctgtttgtataagttttgcttatttgtttttgtgcttcagtttgtccagtgctctctgcttgaatggcaagatagatttataggcttaattcttggtcaggcagaactccagatgaaaaaaacttgcatcttcagtatacttcctaaagggcaatcagataatggatatgttttatgtaattaagagttcactttagtggctttcatttaatatggctgtctgggaagaacagggttgcctagccctgtacaatgtaatttaaacttacagcatttttactgtgtatgatatggtgtcctctgtgccagttttgtaccttatagaggcagattgcctccgatcgctgtggttcttattatcaaaattaagtttacttgtatacggaacaaccacaagaaatttgattctgtaaagaatcctctttagctgtggcctggcagtatataaatggtgctttatttaacagaatacctgtggaggaaataaagcacacttgatgt

SEQ ID NO: 2507 - protein, 2000 aa, Homo sapien
LRRNLQRVLILLVYGVQMRRKNSYYVWQKIFQIQFPLYTAYKHNTHPTIEDISTQESNILGAFCDMNDVEVPLHLLRYVCLFCGKNGLSLMKDCFEYGTPETLPFLIAHAFITVVSNIRIWLHIPAVMQHIIPFRTYVIRYLCKLSDQELRQSAARNMADLMWSTVKEPLDTTLCFDKESLDLAFKYFMSPTLTMRLAGLSQITNQLHTFNDVCNNESLVSDTETSIAKELADWLISNNVVEHIFGPNLHIEIIKQCQVILNFLAAEGRLSTQHIDCIWAAAQLKHCSRYIHDLFPSLIKNLDPVPLRHLLNLVSALEPSVHTEQTLYLASMLIKALWNNALAAKAQLSKQSSFASLLNTNIPIGNKKEEEELRRTAPSPWSPAASPQSSDNSDTHQSGGSDIEMDEQLINRTKHVQQRLSDTEESMQGSSDETANSGEDGSSGPGSSSGHSDGSSNEVNSSHASQSAGSPGSEVQSEDIADIEALKEEDEDDDHGHNPPKSSCGTDLRNRKLESQAGICLGDSQGTSERNGTSSGTGKDLVFNTESLPSVDNRMRMLDACSHSEDPEHDISGEMNATHIAQGSQESCITRTGDFLGETIGNELFNCRQFIGPQHHHHHHHHHHHHDGHMVDDMLSADDVSCSSSQVSAKSEKNMADFDGEESGCEEELVQINSHAELTSHLQQHLPNLASIYHEHLSQGPVVHKHQFNSNAVTDINLDNVCKKGNTLLWDIVQDEDAVNLSEGLINEAEKLLCSLVCWFTDRQIRMRFIEGCLENLGNNRSVVISLRLLPKLFGTFQQFGSSYDTHWITMWAEKELNMMKLFFDNLVYYIQTVREGRQKHALYSHSAEVQVRLQFLTCVFSTLGSPDHFRLSLEQVDILWHCLVEDSECYDDALHWFLNQVRSKDQHAMGMETYKHLFLEKMPQLKPETISMTGLNLFQHLCNLARLATSAYDGCSNSELCGMDQFWGIALRAQSGDVSRAAIQYINSYYINGKTGLEKEQEFISKCMESLMIASSSLEQESHSSLMVIERGLLMLKTHLEAFRRRFAYHLRQWQIEGTGISSHLKALSDKQSLPLRVVCQPAGLPDKMTIEMYPSDQVADLRAEVTHWYENLQKEQINQQAQLQEFGQSNRKGEFPGGLMGPVRMISSGHELTTDYDEKALHELGFKDMQMVFVSLGAPRRERKGEGVQLPASCLPPPQKDNIPMLLLLQEPHLTTLFDLLEMLASFKPPSGKVAVDDSESLRCEELHLHAENLSRRVWELLMLLPTCPNMLMAFQNISDEQSNDGFNWKELLKIKSAHKLLYALEIIEALGKPNRRIRRESTGSYSDLYPDSDDSSEDQVENSKNSWSCKFVAAGGLQQLLEIFNSGILEPKEQESWTVWQLDCLACLLKLICQFAVDPSDLDLAYHDVFAWSGIAESHRKRTWPGKSRKAAGDHAKGLHIPRLTEVFLVLVQGTSLIQRLMSVAYTYDNLAPRVLKAQSDHRSRHEVSHYSMWLLVSWAHCCSLVKSSLADSDHLQDWLKKLTLLIPETAVRHESCSGLYKLSLSGLDGGDSINRSFLLLAASTLLKFLPDAQALKPIRIDDYEEEPILKPGCKEYFWLLCKLVDNIHIKDASQTTLLDLDALARHLADCIRSREILDHQDGNVEDDGLTGLLRLATSVVKHKPPFKFSREGQEFLRDIFNLLFLLPSLKDRQQPKCKSHSSRAAAYDLLVEMVKGSVENYRLIHNWVMAQHMQSHAPYKWDYWPHEDVRAECRFVGLTNLGATCYLASTIQQLYMIPEARQAVFTAKYSEDMKHKTTLLELQKMFTYLMESECKAYNPRPFCKTYTMDKQPLNTGEQKDMTEFFTDLITKIEEMSPELKNTVKSLFGGVITNNVVSLDCEHVSQTAEEFYTVRCQVADMKNIYESLDEVTIKDTLEGDNMYTCSHCGKKVRAEKRACFKKLPRILSFNTMRYTFNMVTMMKEKVNTHFSFPLRLDMTPYTEDFLMGKSERKEGFK

SEQ ID NO: 2508 - DNA, 3455 bp, Homo sapien
atgttgttgtctcccaaattctccttatccaccattcacatacgactgacggccaaaggattgcttcgaaaccttcgacttccttcagggtttaggagaagcactgttgttttccacacagttgaaaagagcaggcaaaagaatcctcgaagcttatgtatccagccacagacagctcccgatgcgctgccccctgagaaaacacttgaattgacgcaatataaaacaaaatgtgaaaaccaaagtggatttatcctgcagctcaagcagcttcttgcctgtggtaataccaagtttgaggcattgacagttgtgattcagcacctgctgtctgagcgggaggaagcactgaaacaacacaaaaccctatctcaagaacttgttaacctccggggagagctagtcactgcttcaaccacctgtgagaaattagaaaaagccaggaatgagttacaaacagtgtatgaagcattcgtccagcagcaccaggctgaaaaaacagaacgagagaatcggcttaaagagttttacaccagggagtatgaaaagcttcgggacacttacattgaagaagcagagaagtacaaaatgcaattgcaagagcagtttgacaacttaaatgctgcgcatgaaacctctaagttggaaattgaagctagccactcagagaaacttgaattgctaaagaaggcctatgaagcctccctttcagaaattaagaaaggccatgaaatagaaaagaaatcgcttgaagatttactttctgagaagcaggaatcgctagagaagcaaatcaatgatctgaagagtgaaaatgatgctttaaatgaaaaattgaaatcagaagaacaaaaaagaagagcaagagaaaaagcaaatttgaaaaatcctcagatcatgtatctagaacaggagttagaaagcctgaaagctgtgttagagatcaagaatgagaaactgcatcaacaggacatcaagttaatgaaaatggagaaactggtggacaacaacacagcattggttgacaaattgaagcgtttccagcaggagaatgaagaattgaaagctcggatggacaagcacatggcaatctcaaggcagctttccacggagcaggctgttctgcaagagtcgctggagaaggagtcgaaagtcaacaagcgactctctatggaaaacgaggagcttctgtggaaactgcacaatggggacctgtgtagccccaagagatcccccacatcctccgccatccctttgcagtcaccaaggaattcgggctccttccctagccccagcatttcacccagatgacacgtccccaaagtccacagactctctgaaagcattttgatgcaggtctgcaggactgaccccaaggaggaacgtgggcacaagaggtatatcagcacacgtgtgatcaccgtagggtaactggagcgtcaccaccggcggaatcgcagcttctgagactggaagtctggaggaagacttttgcctccgtccaaaagattcctccaaaaaaagatttaaaaaaagatttcggcatcgacacggacgttgttgcacaaagcacttaaagaacgagagcatcttgttcattgcctttttcacctaagcataaggggaaaaactctcagggccctattaagatttataacctttgtaatgttcttcaccacagacaccttcttgtgagttttcagtctgactgtgggggtggggggtgtgaatgaaatggatgtcacagagtgtcatgtgtctgatgcagcctcctctgctgtgtattaaatgtcaaaatctgaatatatctggatatgtactaatcaaataataatcaatcaatcagcatatacatttcagccaaagccatagaagaaaaagcaatagttgcttgaattatgatcatctaccaccaactctgctcagccctgtaacagggtagggagagggtataacaggaagagctttgacttgtccctgtctatacattctctgtatcttttgggggtaacttcttggcagtttttcagtgttcagccatgtcagttgaaactagatttttctgtagattttttacttacccatgtgagcctaacactatcctgtaattcattttctcaggctatgtgtaaatgtagaaccctaatttttctataaaaaaacaaactaactaactgtgtaaagaaagaaaaagggaagtaccaatgggtttttccaccttatttttacctttgatctacccttgcagatttaacctgtcttcttccctcccattattctcattttccttttacctttctccaccatccagagccacaaaagcaaaccttctacctcctacctacttttctctgggacaaggataaaggaatatgattttccagagccccagagccagctcatcttccaggtgctgaaaccactttccaaataaactaaagcctggatttgatattacaaattttgggaaatcttagaataaagaacgagaacaaggaagtcattggctagtataattaagaaaggtaggattcagtgcttaccgatgatgcagtacttgatagaagaaaacagtctgggaggatagcgctcatttttcagttaccctttaaggagtccctttgtctttgggaaagtagcagaatggtccgcttctttcccatgagtggaaaatgtggcttgtccaactctcctccaggttgcatttcagtttctttccaaaacttattacctcccctaatcctgagactttggaaaaggtggaaggaagaactgttgctttatctccccctccctgcatgtgtcaacattgtgatgtcagtatttactaatctacattcagtggctgtacaaataacagctgtagtaagaagagattcaggatgctagaggtgaatatttgggtcatttacatgtacactacatagcaagttgatactcatgttgcatgttcttttaaattagtgattttgtgtcttaagtctttaacttccaatacttcatcatgtatgtaaccttccatgtttgcttctgataaatggaaatgtaggttcactgccacttcatgagatatctctgctcacgcttccaagttgttctcaatgacattagccaaagttgggtttgccattcatcccctaggcatggtaaatcttgtgttgttccctgctgtcctccgtattacgtgaccggcaaataaatctcatagcagttaatataaaacatctttggaggatgggagagaacaggagggaagatgggaaacaaaatagagaattcttaagattttgtttaaaccaaatgtttcatgtagaatgcaaaatgttggcacgtcaaaaatatgaatgtgtagacaactgtagttgtgctcagtttgtagtgatgggaagtgtattttactctgatcaaataaataatgctggaatactcaagaattgcaaaaaaaaaaaaaaaaa

SEQ ID NO: 2509 - protein, 436 aa, Homo sapien
MLLSPKFSLSTIHIRLTAKGLLRNLRLPSGFRRSTVVFHTVEKSRQKNPRSLCIQPQTAPDALPPEKTLELTQYKTKCENQSGFILQLKQLLACGNTKFEALTVVIQHLLSEREEALKQHKTLSQELVNLRGELVTASTTCEKLEKARNELQTVYEAFVQQHQAEKTERENRLKEFYTREYEKLRDTYIEEAEKYKMQLQEQFDNLNAAHETSKLEIEASHSEKLELLKKAYEASLSEIKKGHEIEKKSLEDLLSEKQESLEKQINDLKSENDALNEKLKSEEQKRRAREKANLKNPQIMYLEQELESLKAVLEIKNEKLHQQDIKLMKMEKLVDNNTALVDKLKRFQQENEELKARMDKHMAISRQLSTEQAVLQESLEKESKVNKRLSMENEELLWKLHNGDLCSPKRSPTSSAIPLQSPRNSGSFPSPSISPR

SEQ ID NO: 2510 - DNA, 2704 bp, Homo sapien
gggagaaacgttctcactcgctctctgctcgctgcgggcgctccccgccctctgctgccagaaccttggggatgtgcctagacccggcgcagcacacgtccgggccaaccgcgagcagaacaaacctttggcgggcggccaggaggctccctcccagccaccgcccccctccagcgcctttttttccccccatacaatacaagatcttccttcctcagttcccttaaagcacagcccagggaaacctcctcacagttttcatccagccacgggccagcatgtctgggggcaaatacgtagactcggagggacatctctacaccgttcccatccgggaacagggcaacatctacaagcccaacaacaaggccatggcagacgagctgagcgagaagcaagtgtacgacgcgcacaccaaggagatcgacctggtcaaccgcgaccctaaacacctcaacgatgacgtggtcaagattgactttgaagatgtgattgcagaaccagaagggacacacagttttgacggcatttggaaggccagcttcaccaccttcactgtgacgaaatactggttttaccgcttgctgtctgccctctttggcatcccgatggcactcatctggggcatttacttcgccattctctctttcctgcacatctgggcagttgtaccatgcattaagagcttcctgattgagattcagtgcatcagccgtgtctattccatctacgtccacaccgtctgtgacccactctttgaagctgttgggaaaatattcagcaatgtccgcatcaacttgcagaaagaaatataaatgacatttcaaggatagaagtatacctgattttttttccttttaattttcctggtgccaatttcaagttccaagttgctaatacagcaacaatttatgaattgaattatcttggttgaaaataaaaagatcactttctcagttttcataagtattatgtctcttctgagctatttcatctatttttggcagtctgaatttttaaaacccatttaaatttttttccttacctttttatttgcatgtggatcaaccatcgctttattggctgagatatgaacatattgttgaaaggtaatttgagagaaatatgaagaactgaggaggaaaaaaaaaaaaaagaaaagaaccaacaacctcaactgcctactccaaaatgttggtcattttatgttaagggaagaattccagggtatggccatggagtgtacaagtatgtgggcagattttcagcaaactcttttcccactgtttaaggagttagtggattactgccattcacttcataatccagtaggatccagtgatccttacaagttagaaaacataatcttctgccttctcatgatccaactaatgccttactcttcttgaaattttaacctatgatattttctgtgcctgaatatttgttatgtagataacaagacctcagtgccttcctgtttttcacattttccttttcaaatagggtctaactcagcaactcgctttaggtcagcagcctccctgaagaccaaaattagaatatccatgacctagttttccatgcgtgtttctgactctgagctacagagtctggtgaagctcacttctgggcttcatctggcaacatctttatccgtagtgggtatggttgacactagcccaatgaaatgaattaaagtggaccaatagggctgagctctctgtgggctggcagtcctggaagccagctttccctgcctctcatcaactgaatgaggtcagcatgtctattcagcttcgtttattttcaagaataatcacgctttcctgaatccaaactaatccatcaccggggtggtttagtggctcaacattgtgttcccatttcagctgatcagtgggcctccaaggaggggctgtaaaatggaggccattgtgtgagcctatcagagttgctgcaaacctgacccctgctcagtaaagcacttgcaaccgtctgttatgctgtgacacatggcccctccccctgccaggagctttggacctaatccaagcatccctttgcccagaaagaagatgggggaggaggcagtaataaaaagattgaagtattttgctggaataagttcaaattcttctgaactcaaactgaggaatttcacctgtaaacctgagtcgtacagaaagctgcctggtatatccaaaagctttttattcctcctgctcatattgtgattctgcctttggggacttttcttaaaccttcagttatgatttttttttcatacacttattggaactctgcttgatttttgcctcttccagtcttcctgacactttaattaccaacctgttacctactttgactttttgcatttaaaacagacactggcatggatatagttttacttttaaactgtgtacataactgaaaatgtgctatactgcatactttttaaatgtaaagatatttttatctttatatgaagaaaatcacttaggaaatggctttgtgattcaatctgtaaactgtgtattccaagacatgtctgttctacatagatgcttagtccctcatgcaaatcaattactggtccaaaagattgctgaaattttatatgcttactgatatattttacaattttttatcatgcatgtcctgtaaaggttacaagcctgcacaataaaaatgtttaacggtt

SEQ ID NO: 2511 - protein, 178 aa, Homo sapien
MSGGKYVDSEGHLYTVPIREQGNIYKPNNKAMADELSEKQVYDAHTKEIDLVNRDPKHLNDDVVKIDFEDVIAEPEGTHSFDGIWKASFTTFTVTKYWFYRLLSALFGIPMALIWGIYFAILSFLHIWAVVPCIKSFLIEIQCISRVYSIYVHTVCDPLFEAVGKIFSNVRINLQKEI

SEQ ID NO: 2512 - DNA, 1835 bp, Homo sapien
atccatccctgtggagctgcagagcatcttcatgtgagtagacggatggacataaatagattcatgctcatttaggaagctgggagtttcgtgaagctgagggtgagttcctgtgattcttgttcgcttcaacaaaaagtgggagaccaagtttttatagcaaaagaccaaattagctgtagagtcttgaatgcagaaaaaaattaccctagctttcttagcacttagggttttgtgaggattcagtgtttagcacagtgcttggcacatagtaagccctagtaaatgttaaatattgttattagtgtttcgtaaaacttgagaaatagagctgagctcattcccttcctgttgattcaaaaataatacctacatgaaaacatgattccaagttgattgaatgttgtaggaattactggtttagagtagcccagttctcggcctaccctgctggttgggatcttactgtattcttgaatgcactggtttgaaaatatgccagacttcagcccccaaggaaacaaggctgcaagaatttatgaactccagctggaaaaggtaaaggtgacctttggctagccacatactggaccttaccccactgacgtctttcagaacattccaagggttttcctcaaggaacatttttgagctagaaattaaaatgggttctctggcagactgcaccccttgagtcaaagttaacagtattcctttgaatgcaataatagaggcttttctgcgttaagggagaaggaatgaccaattgaacttacacattccccaggcaggtccctttgccggcccctacaggctggggtggcccctcctgtcctcagggatcagactcccagactggttagttctgcatgtttccatcaaattaaaggttattccctggccgcctcctggagaaaaccaaccccaccctgccagctgggggcaatggggcagggattttggcctctcagaacagctcctagaggctgctcatgactgaatgttttcccaaatcacctaaatatcggtttgctttttgttttgggggagaggatttagcctcttacttccctgatggattcaaagttttatctatctccttatctcctgccctgtcttggcacaactctggatagattgcaggtgtggaatttgctggagtttggtgacttcgtcaaattcctttggattctgttccgccaaatcagcagtctcgtcctgtggatgcagtgactggaatttcccatctgcaaagcatctctgtagcccagattttgtggagccttaagacactccctcaatgccaccctgaccccacggctggagaaccctgtgcttatgtggtgggcagggccactgttgatggaggatggcggggacggggtggtgctcaaaggatctgtggtgctggaggtctacacgcctctcaggacagcgtgtcaggaacctcagagcagcttcacatctgccaaagctgagagggagcgaacttgggaagcattttgctcattgtcctacccaagtattaatagcataatagttgatgccaaaggagatggtgacgtcccttccactgtagttgctgtcacaaccttgacgtctttaagctaatggccgtttgcatctgtgtcttcaaacagatcctggttacagccattttgtgtgattcacttcgggggttaagtaatgcaggattctgcaaacaaggtgtcgccgtccaaatgtactgtcctggcatagagagcactgctttgttttccactgttgtagagaaaactagggagaactttatttttcaataaacttttcttgtgtgaaaaaaaaaaaaaaaaaaa

SEQ ID NO: 2513 - protein, 63 aa, Homo sapien [sequence omitted]

SEQ ID NO: 2514 - DNA, 1602 bp, Homo sapien
ctcctacccggacaccgacgtcattctcatgtgcttctcggtggacagcccggactcgctggagaacatccccgagaagtgggtccccgaggtgaagcacttctgtcccaatgtgcccatcatcctggtggccaacaaaaaagacctgcgcagcgacgagcatgtccgcacagagctggcccgcatgaagcaggaaccccaccggcctgcctggcatctgtctgctgacgcctctggcttgcgccaggacttggcgtgggcaccgggcgcccccatcccagtgtctgtgtgcgtccagctgtgttgcacaggcctgggctccccactgagtgccaagggtcccctgagcatgcttttctgaagagccgggcctcagagtgtgtggctgtgtgtctgttcgactctcctcgccccattttcaccccacccccgcctctgatccccgggggcgagattggcgcgggagtgtggccgcgccccatcagatgttctcccttcaccagcgggagcttgatatcccttgtctgtaacatagaccccgggtactgcgggaggggagggctgctggggaggatggggggatgttatataaatatagatataattttattttcggagctaagatggtgttatttaagggtggtgatgggtgagcgctctggcccaggctgggccagactcccgcccaagcatgaacaggacttgaccatctttccaacccctggggaagacatttgcaactgacttggggaggacacagcttcagcacagcctctcctgcgggccagcccgctgcgaaccctccaccagctaccggagggaggagggaggatgcgctgtggggttgtttttgccataagcgaactttgtgcctgtcctagaagtgaaaattgttcagtccaagaaactgatgttatttgatttatttaaaggctaaaatttgtttttttattctttgcacaattgtttcattgtttgacacttaatgcactcgtcatttgcatacgacagtagcattctgaccacacttgtacgctgtaacctcatctacttctgatgtttttaaaaaatgacttttaacaaggagagggaaaagaaacccactaaattttgctttgtttccttgaagaatgtggcaacactgttttgtgattttatttgtgcaggtcatgcacacagttttgataaagggcagtaacaagtattggggcctattttttttttttttccacaaggcattctctaaagctatgtgaaattttctctgcacctctgtacagagaatacacctgcccctgtatatccttttttcccctcccctccctcccagtggtacttctactaaattgttgtcttgttttttattttttaaataaactgacaaatgacaaaatggtgagcttatgatgtttacataaaagttctataagctgtgtatacagttttttatgtaaaatattaaaagactatgatgatgacatttaaaaaaaaattcctctccacttctcattatcttctatttcttaaactatatcttacctttacaacccttctcattctcctattctctacctccctcttcctcaaaccctttttattaca

SEQ ID NO: 2515 - protein, 119 aa, Homo sapien
SYPDTDVILMCFSVDSPDSLENIPEKWVPEVKHFCPNVPIILVANKKDLRSDEHVRTELARMKQEPHRPAWHLSADASGLRQDLAWAPGAPIPVSVCVQLCCTGLGSPLSAKGPLSMLF

SEQ ID NO: 2516 - DNA, 4573 bp, Homo sapien
cgcgtgtctacgcggacgcaccggctaagctgcttctgccgccgccggccgcctgggaccttgcggtgaggctgcgcggggccgaggccgcctccgagcgccaggtttattcagtcaccatgaagctgctgctgctgcacccggccttccagagctgcctcctgctgaccctgcttggcttatggagaaccacccctgaggctcacgcttcatccctgggtgcaccagctatcagcgctgcctccttcctgcaggatctaatacatcggtatggcgagggtgacagcctcactctgcagcagctgaaggccctgctcaaccacctggatgtgggagtgggccggggtaatgtcacccagcacgtgcaaggacacaggaacctctccacgtgctttagttctggagacctcttcactgcccacaatttcagcgagcagtcgcggattgggagcagcgagctccaggagttctgccccaccatcctccagcagctggattcccgggcctgcacctcggagaaccaggaaaacgaggagaatgagcagacggaggaggggcggccaagcgctgttgaagtgtggggatacggtctcctctgtgtgaccgtcatctccctctgctccctcctgggggccagcgtggtgcccttcatgaagaagaccttttacaagaggctgctgctctacttcatagctctggcgattggaaccctctactccaacgccctcttccagctcatcccggaggcatttggtttcaaccctctggaagattattatgtctccaagtctgcagtggtgtttgggggcttttatcttttctttttcacagagaagatcttgaagattcttcttaagcagaaaaatgagcatcatcatggacacagccattatgcctctgagtcgcttccctccaagaaggaccaggaggagggggtgatggagaagctgcagaacggggacctggaccacatgattcctcagcactgcagcagtgagctggacggcaaggcgcccatggtggacgagaaggtcattgtgggctcgctctctgtgcaggacctgcaggcttcccagagtgcttgctactggctgaaaggtgtccgctactctgatatcggcactctggcctggatgatcactctgagcgacggcctccacaatttcatcgatggcctggccatcggtgcttccttcactgtgtcagttttccaaggcatcagcacctcggtggccatcctctgtgaggagttcccacatgagctaggagactttgtcatcctgctcaacgctgggatgagcatccaacaagctctcttcttcaacttcctttctgcctgctgctgctacctgggtctggcctttggcatcctggccggcagccacttctctgccaactggatttttgcgctagctggaggaatgttcttgtatatttctctggctgatatgttccctgagatgaatgaggtctgtcaagaggatgaaaggaagggcagcatcttgattccatttatcatccagaacctgggcctcctgactggattcaccatcatggtggtcctcaccatgtattcaggacagatccagattgggtagggctctgccaagagcctgtgggactggaagtcgggccctgggctgcccgatcgccagcccgaggacttaccatccacaatgcaccacggaagaggccgttctatgaaaaactgacacagactgtattcctgcattcaaatgtcagccgtttgtaaaatgctgtatcctaggaataagctgccctggtaaccagtctctagctagtgcctcttgccctctcctcacctccttttctctcagtgactctggaacctgaatgcagcttacaagacaagcctgacttttttctctgattaccttggcctcctcttggaaccagtgctgaaaggttttgaatcctttacccaacaatgcaaaaatagagccaatggttataacttggctagaaatatcaagagttgaatccatagtgtggggcccatgactctagctgggcaccttggacctccagctggccaatagaagagacaggagacaggaagccttcccattttttcaaagtctgtttaattgcctattacttctctcaaagagaacctgaagtcagaacacatgagcagggtgagaggtgaggcaaggttcatcctgaatgggagaggaagtcgaaccactgctgtgtgtcttgtcaggatgctcacttgttcctactgagatgctggatattgattttgtaacagcacctggtgtttcacggctgtccgagtgagctaacgtggcggtgtggctgcctggacctcctctttcaggttaacgctgacagaatggaggctcaggctgtctgcaagaaaacagttggtttggctgtgattttgacctcctcttccccactgccatcttctaagagactttgtagctgcctcctagaagcacattctgagcacatttgagacctctgtgttagaggggagactgcacaaactatcctcccccaggttgagacgtctgcagagtggcaagctgacttgtagaaatggggtgccatttatgctctacttagacaagggtaatcagaaatggaatcagtgcaggcaaaatttaggatttgccgcttccataaatcaaagcatgactaatagggggtctctgaaatgtaagggcacaaacttcacttagggcatcgcagatgtttgcagaatggttggcctaatgattatgctacagatgggttttaaatgacccgtctaggttactgcttccttgcaaaaaaagtcgaatcctgcattgaattgaatatgaatttctctaactctctccagaaaatggatggagataacttgtctttaaaactgtaggccagccttagccactgtggagcccttgcctccgagctctggcttcaaggggagctcttctccaggttcactaggtgaattgatttattattatcatattgataatgtgagattctttagccactttggggagcctgtctctccagaagcctttcttagtggtgcccacagttggagcccaggggccatgtttgcaaactgattcatgtgcatggctgacaggagtactggttcactaccaatgcctgagcttttctcttacatagaaaaactgtccactctcagtaatcacaagcagcatccgttttgttttctcttcttgggagacatctgtcaaaccaggaatattcttgaaaagaacgtgagcaggaaaaactgctggtgatactttttttaagttttgtttttatcttgcctgttggcttcaatacatttgagaatacgctgaagagggaaaatttcagtgatggagattctagattaaatatcaggactgatttcctggtgggattatggtccagttttaccaaagaaccaattccttgaatgttggaatctaactttttatattgtcattattattgttgtttttaaacggttctttgtcttttctgttttatttttctcaagctgctttcaggagctagcagaaaataactcaaagttgaagactctggaagattttgctttaacctaactcgcattgatgtattaaatttataattttagcattcccaatagatcctatcattccttaaacataataccctttgtcttggagtagaatactaagttagagttagtggatttctagtttaggagaggagctcaaaactataatctttaacaaattgaaaaatgaaatagggtgttttccctttttgtgcacacctatattaccttaagaaatttccttccatagacagctgcctcaaagggaaatcctctttaaaccgtagttggcgcagaggtcagtcctagtcggagcttaggaggggcggagacgctcacatcgtctgacttgagtcgccactgattgtggcaacagctttgcctcatgagtcaaaaattggcaatttcttttgatttttagttgttgaatttgctgtttcaagcatttgtacatattagaagtctaaggagtagcaagtcagtgggaggactttttcacccctggcattagcagcttcgacctcattttccagatgcaccagctcctattaataagttagcaaggaaagtgtatgtcacgtgcaggaacagtgaggcagggacaggggttctgctccttctcacttcaccaccggcacacagcttgcccctgtctttgcccccaaaggtattttgtgtctagtgtcaaattggagctattcttcactggtccttaaccttgggttttaaaaagaaggcttctctgtttgggtagcgtaagagctgagtatagtaagtcctcttccaaagagatggcaatatgctgggcatctactttaaaacaaagttgtctgatttttgcaagagaggttaggattttattgttcttatttccctttacagttctgcagttccatcacagtatttttttaaataactcaggtgtatgagcagaaattagaaaagaaaattaacttatgtggactgtaaatgttttatttgtaagattctataaataaagctatattctgt

SEQ ID NO: 2517 - protein, 531 aa, Homo sapien
RVYADAPAKLLLPPPAAWDLAVRLRGAEAASERQVYSVTMKLLLLHPAFQSCLLLTLLGLWRTTPEAHASSLGAPAISAASFLQDLIHRYGEGDSLTLQQLKALLNHLDVGVGRGNVTQHVQGHRNLSTCFSSGDLFTAHNFSEQSRIGSSELQEFCPTILQQLDSRACTSENQENEENEQTEEGRPSAVEVWGYGLLCVTVISLCSLLGASVVPFMKKTFYKRLLLYFIALAIGTLYSNALFQLIPEAFGFNPLEDYYVSKSAVVFGGFYLFFFTEKILKILLKQKNEHHHGHSHYASESLPSKKDQEEGVMEKLQNGDLDHMIPQHCSSELDGKAPMVDEKVIVGSLSVQDLQASQSACYWLKGVRYSDIGTLAWMITLSDGLHNFIDGLAIGASFTVSVFQGISTSVAILCEEFPHELGDFVILLNAGMSIQQALFFNFLSACCCYLGLAFGILAGSHFSANWIFALAGGMFLYISLADMFPEMNEVCQEDERKGSILIPFIIQNLGLLTGFTIMVVLTMYSGQIQIG

SEQ ID NO: 2518 - DNA, 1115 bp, Homo sapien
gggaggtgcagaggcatccggggcgggagcaagccccaggttgtgacaggtgcaggtagacaacgcccataaacagagatggtcctgaactctggagagatccttccctgatcctttcggacgactacttggagccataagtaacctcagcaaaaacgaggcctctgcaagccacttttccatgccaagcatccacccggcccacaggcatgtttctgccgccactccgcaagatggacagggagccagcaggcaggcgggaagggccaagtacaggcaatcacccccatcttcttggtttgaagctttatccatgtatcatgttccgtgtagccattttattttttaagaaactgctaatactttctccctaatggaagccctgatcccccagagagctacaggtctgctcccgacgggcctcgggcctgacccgtccacacagggccgtgtcaacagcagcgactcaagggacgtgtgtacatatgtaaatgagaaatagagacgtgtcaacagatgcattcatttctcttggaatgtgtattgtttttattttgcgaaacaaaacaaaacaaaaaaaaaagcttggaactccatcacgtggaaaaactagatcctgttggttatagcatttgtgagttctccacgtctgtctctctcgctcatgtaatatactctgaccctgagtggaaaggggtttttgttctgtttttattttacctacatgtactatttagcttcagtgtactagtcctgccacctgtgtatttttagggtgctatggaaataatgaaaagaaacggggatttcagaagaaaattgtaaccaaattcatactttgtataatttttgatatcatgatcacaggtgattcacacgtacacacataaacacacccaccagtgcagcctgaagtaactcccacagaaaccatcatcgtctttgtacatcgtatgtacaatgcaatcatttcatactttaaactggtcaaaaaactaattgtgatttctagtcttgcaaagctgtatgtagttagatgatgtgacaacctctaatatttatctaataaatatgtattcagatgaaacctgtaaaaaaaaaaaaaaaaaaaaaaa

SEQ ID NO: 2519 - protein, 10 aa, Homo sapien
MKPVKKKKKK

SEQ ID NO: 2520 - DNA, 3003 bp, Homo sapien
ggcacgaggggtgctggaagcgcgtgaggccgggagctcgagagagctaacagactagccggctggacatctggaccgctggatccggaggtggcgaccccggcctgacccggaccctaaatccgtccccgccccagagggcggaggcgcgcgctcgattcccccaacgcggcggcgccgcctgtttacgtctgcagatctccaggggagcccaccagcctagtcaacatggcctcggaagacattgccaagctggcagagacacttgccaagactcaggtggccgggggacagctgagtttcaaaggcaagagcctcaaactcaacactgcagaagatgctaaagatgtgattaaagagattgaagactttgacagcttggaggctctgcgtctggaaggcaacacagtgggcgtggaagcagccagggtcatcgccaaggccttagagaagaagtcggagttgaagcgctgccactggagtgacatgttcacgggaaggctgcggaccgagatcccaccagccctgatctcactaggggaaggactcatcacagctggggctcagctggtggagctggacttaagcgacaacgcattcgggcccgacggtgtgcaaggcttcgaggccctgctcaagagctcagcctgcttcaccctgcaggaactcaagctcaacaactgtggcatgggcattggcggcggcaagatcctggctgcagctctgaccgaatgtcaccggaaatccagtgcccaaggcaagcctctggccctgaaggtctttgtggctggcagaaaccgtctggagaatgatggcgccactgccttggcagaagcttttagggtcatcgggaccctggaggaggtccacatgccacagaatgggatcaaccaccctggcatcactgccctggcccaggctttcgctgtcaaccccctgctgcgggtcatcaacctgaatgacaacaccttcactgagaagggcgccgtggccatggccgagaccttgaagaccttgcggcaggtggaggtgattaattttggggactgcctggtgcgctccaagggtgcagttgccattgcagatgccatccgcggcggcctgcccaagctaaaggagctgaacttgtcattctgtgaaatcaagagggatgctgccctggctgttgctgaggccatggcagacaaagctgagctggagaagctggacctgaatggcaacaccctgggagaagaaggctgtgaacagcttcaggaggtgctggagggcttcaacatggccaaggtgctggcgtccctcagtgatgacgaggacgaggaggaggaggaggaaggagaagaggaagaagaggaagcagaagaagaggaggaggaagatgaggaagaggaggaagaagaggaggaggaggaggaagaagagcctcagcagcgagggcagggagagaagtcagccacgccctcacggaagattctggaccctaacactggggagccagctcccgtgctgtcctccccacctcctgcagacgtctccaccttcctggcttttccctctccagagaagctgctgcgcctagggcccaagagctccgtgctgatagcccagcagactgacacgtctgaccccgagaaggtggtctctgccttcctaaaggtgtcatctgtgttcaaggacgaagctactgtgaggatggcagtgcaggatgcagtagatgccctgatgcagaaggctttcaactcctcgtccttcaactccaacaccttcctcaccaggctcctcgtgcacatgggtctgctcaagagtgaagacaaggtcaaggccattgccaacctgtacggccccctgatggcgctgaaccacatggtgcagcaggactatttccccaaggcccttgcacccctgctgctggcgttcgtgaccaagcccaacagcgccctggaatcctgctccttcgcccgccacagtctgctgcagacgctgtacaaggtctagactcaaagcctctcccatcccttggcctggaccagtgagctggggagggactcggatgaactgaggcgcagcctacgccattgccttggacaggactctggccacaggcagggcgggtctgtgtcccatgtgtcctgtcagtcccctgagtatgtgtgtgggtgtggcgcatgtgcaggtctgtgcctcctgtcgggatttgggttttaacgtcttctgctggcccagccctgctctgttgtggggagttggcccccaggggaaagggctgtgagctgctccgccattaaactcacctccacctgagggcgctctgctgatctccgcctgggccctgatggccgtccccacccacctgccttccggcccggctccctggcggagccagaacccagggagttgcccgcgtgctgtccttcccctctgtgttgtgattgggttgtttcctgccctgcctggggctgcttctcgtcaccaagccctggtcctgcggcagctgtcacccctaccatccataccactgtgctgaccgctcagcctgaagagcagagaatgccatgggtgggactgtgggggtcggatcgtggggttgttggcagagggcaaccctgggccccacaccgtgtggacaggcagacaccagattgtccaggagcaggagctgctgggactgcgctggccccggacctagtgggccttctcctggctgctgagatgtcgtctgtgactggcctggctggagggggagtgttgacaacccaaagctgttctccagtctggggagggagaggcagggtccccaatgtccgagctgcatctggacgctgctcttaaaggacctcctggggcaggggagcggtagggtctggactgggcagatgctgtatgacctccctgagcacccgtgactgccccatgctttcccctttgtgctctgtgtgtgtctgggctgtgcccgggggcttcacaaataaagtcgtgtggcagcttcaaaaaaaaaaaaaaaaaaaa

SEQ ID NO: 2521 - protein, 587 aa, Homo sapien
MASEDIAKLAETLAKTQVAGGQLSFKGKSLKLNTAEDAKDVIKEIEDFDSLEALRLEGNTVGVEAARVIAKALEKKSELKRCHWSDMFTGRLRTEIPPALISLGEGLITAGAQLVELDLSDNAFGPDGVQGFEALLKSSACFTLQELKLNNCGMGIGGGKILAAALTECHRKSSAQGKPLALKVFVAGRNRLENDGATALAEAFRVIGTLEEVHMPQNGINHPGITALAQAFAVNPLLRVINLNDNTFTEKGAVAMAETLKTLRQVEVINFGDCLVRSKGAVAIADAIRGGLPKLKELNLSFCEIKRDAALAVAEAMADKAELEKLDLNGNTLGEEGCEQLQEVLEGFNMAKVLASLSDDEDEEEEEEGEEEEEEAEEEEEEDEEEEEEEEEEEEEEPQQRGQGEKSATPSRKILDPNTGEPAPVLSSPPPADVSTFLAFPSPEKLLRLGPKSSVLIAQQTDTSDPEKVVSAFLKVSSVFKDEATVRMAVQDAVDALMQKAFNSSSFNSNTFLTRLLVHMGLLKSEDKVKAIANLYGPLMALNHMVQQDYFPKALAPLLLAFVTKPNSALESCSFARHSLLQTLYKV

SEQ ID NO: 2522 - DNA, 451 bp, Homo sapien
aggaccacgcctcctccaagtcccagcgaacccgcgtgcaacctgtcccgactctagccgcctcttcagctcgccatggatcccaactgctcctgcgccgccggtgactcctgcacctgcgccggctcctgcaaatgcaaagagtgcaaatgcacctcctgcaagaaaagctgctgctcctgctgccctgtgggctgtgccaagtgtgcccagggctgcatctgcaaaggggcgtcggacaagtgcagctgctgcgcctgatgctgggacagccccgctcccagatgtaaagaacgcgacttccacaaacctggattttttatgtacaaccctgaccgtgaccgtttgctatattcctttttctatgaaataatgtgaatgataataaaacagctttgacttgaaaaaaaaaaaaaaaaaaaaaaaaaaaaaaaaaaaaaaaaaaaaaaaa

SEQ ID NO: 2523 - protein, 61 aa, Homo sapien
MDPNCSCAAGDSCTCAGSCKCKECKCTSCKKSCCSCCPVGCAKCAQGCICKGASDKCSCCA

SEQ ID NO: 2524 - DNA, 2129 bp, Homo sapien
ggcacgagggctgcccgggctgcgcggcgtctgcaggcgccaccgctgcctctttccggctgtgaccctcctcgccggcgccgcttggctgcgtcctccgactccccgcgccgccgagaccaggctcccgctccggttgcggccgcaccgccctccgcggccgccccctggggatccagcgagcgcggtcgtccttggtggaaggaaccatgaactggcatctccccctcttcctcttggcctctgtgacgctgccttccatctgctcccacttcaatcctctgtctctcgaggaactaggctccaacacggggatccaggttttcaatcagattgtgaagtcgaggcctcatgacaacatcgtgatctctccccatgggattgcgtcggtcctggggatgcttcagctgggggcggacggcaggaccaagaagcagctcgccatggtgatgagatacggcgtaaatggagttggtaaaatattaaagaagatcaacaaggccatcgtctccaagaagaataaagacattgtgacagtggctaacgccgtgtttgttaagaatgcctctgaaattgaagtgccttttgttacaaggaacaaagatgtgttccagtgtgaggtccggaatgtgaactttgaggatccagcctctgcctgtgattccatcaatgcatgggttaaaaatgaaaccagggatatgattgacaatctgctgtccccagatcttattgatggtgtgctcaccagactggtcctcgtcaacgcagtgtatttcaagggtctgtggaaatcacggttccaacccgagaacacaaagaaacgcactttcgtggcagccgacgggaaatcctatcaagtgccaatgctggcccagctctccgtgttccggtgtgggtcgacaagtgcccccaatgatttatggtacaacttcattgaactgccctaccacggggaaagcatcagcatgctgattgcactgccgactgagagctccactccgctgtctgccatcatcccacacatcagcaccaagaccatagacagctggatgagcatcatggtgcccaagagggtgcaggtgatcctgcccaagttcacagctgtagcacaaacagatttgaaggagccgctgaaagttcttggcattactgacatgtttgattcatcaaaggcaaattttgcaaaaataacaacagggtcagaaaacctccatgtttctcatatcttgcaaaaagcaaaaattgaagtcagtgaagatggaaccaaagcttcagcagcaacaactgcaattctcattgcaagatcatcgcctccctggtttatagtagacagaccttttctgtttttcatccgacataatcctacaggtgctgtgttattcatggggcagataaacaaaccctgaagagtatacaaaagaaaccatgcaaagcaacgactactttgctacgaagaaagactcctttcctgcatctttcatagttctgttaaatatttttgtacatcgcttctttttcaaaactagttcttaggaacagactcgatgcaagtgtttctgttctgggaggtattggagggaaaaaacagcaggatggctggaacactgtactgaggaatgaatagaaaggcttccagatgtctaaaagattctttaaactactgaactgttacctaggttaacaaccctgttgagtatttgctgtttgtccagttcaggaatttttgttttgttttgtctatatgtgcggcttttcagaagaaatttaatcagtgtgacagaaaaaaaaaatgttttatggtagcttttactttttatgaaaaaaaaattatttgccttttaaattcttttcccccatccccctccaaagtcttgatagcaagcgttattttgggggtagaaacggtgaaatctctagcctctttgtgtttttgttgttgttgttgttgttgttttatataatgcatgtattcactaaaataaaatttaaaaaactcctgtcttgctagacaaggttgctgttgtgcagtgtgcctgtcactactggtctgtactccttggatttgcatttttgtattttgtacaaagtaaaaataaactgttatgagtagtaaaaaaaaaaaaaaaaaa

SEQ ID NO: 2525 - protein, 398 aa, Homo sapien
MNWHLPLFLLASVTLPSICSHFNPLSLEELGSNTGIQVFNQIVKSRPHDNIVISPHGIASVLGMLQLGADGRTKKQLAMVMRYGVNGVGKILKKINKAIVSKKNKDIVTVANAVFVKNASEIEVPFVTRNKDVFQCEVRNVNFEDPASACDSINAWVKNETRDMIDNLLSPDLIDGVLTRLVLVNAVYFKGLWKSRFQPENTKKRTFVAADGKSYQVPMLAQLSVFRCGSTSAPNDLWYNFIELPYHGESISMLIALPTESSTPLSAIIPHISTKTIDSWMSIMVPKRVQVILPKFTAVAQTDLKEPLKVLGITDMFDSSKANFAKITTGSENLHVSHILQKAKIEVSEDGTKASAATTAILIARSSPPWFIVDRPFLFFIRHNPTGAVLFMGQINKP

SEQ ID NO: 2526 - DNA, 1110 bp, Homo sapien; identical to SEQ ID NO: 1865

SEQ ID NO: 2527 - protein, 211 aa, Homo sapien [sequence omitted]

SEQ ID NO: 2528 - DNA, 7820 bp, Homo sapien
  Unsure 4012-4049: Unknown base
gcgccccgccccgccgcgggactggggtggcgcgctacctctgcggagaaggatctgacagtgttccggagccggggcgagcagccaaaaggcccgcggagtcgcgctgggccgccccggcgcagctgaaccgggggccgcgcctgccaggccgacgggtctggcccagcctggcgccaaggggttcgtgcgctgtggagacgcggagggtcgaggcggcgcggcctgagtgaaacccaatggaaaaagcatgacatttagaagtagaagacttagcttcaaatccctactccttcacttactaattttgtgatttggaaatatccgcgcaagatgttgacgttgcagacttggctagtgcaagccttgtttattttcctcaccactgaatctacaggtgaacttctagatccatgtggttatatcagtcctgaatctccagttgtacaacttcattctaatttcactgcagtttgtgtgctaaaggaaaaatgtatggattattttcatgtaaatgctaattacattgtctggaaaacaaaccattttactattcctaaggagcaatatactatcataaacagaacagcatccagtgtcacctttacagatatagcttcattaaatattcagctcacttgcaacattcttacattcggacagcttgaacagaatgtttatggaatcacaataatttcaggcttgcctccagaaaaacctaaaaatttgagttgcattgtgaacgaggggaagaaaatgaggtgtgagtgggatggtggaagggaaacacacttggagacaaacttcactttaaaatctgaatgggcaacacacaagtttgctgattgcaaagcaaaacgtgacacccccacctcatgcactgttgattattctactgtgtattttgtcaacattgaagtctgggtagaagcagagaatgcccttgggaaggttacatcagatcatatcaattttgatcctgtatataaagtgaagcccaatccgccacataatttatcagtgatcaactcagaggaactgtctagtatcttaaaattgacatggaccaacccaagtattaagagtgttataatactaaaatataacattcaatataggaccaaagatgcctcaacttggagccagattcctcctgaagacacagcatccacccgatcttcattcactgtccaagaccttaaaccttttacagaatatgtgtttaggattcgctgtatgaaggaagatggtaagggatactggagtgactggagtgaagaagcaagtgggatcacctatgaagatagaccatctaaagcaccaagtttctggtataaaatagatccatcccatactcaaggctacagaactgtacaactcgtgtggaagacattgcctccttttgaagccaatggaaaaatcttggattatgaagtgactctcacaagatggaaatcacatttacaaaattacacagttaatgccacaaaactgacagtaaatctcacaaatgatcgctatctagcaaccctaacagtaagaaatcttgttggcaaatcagatgcagctgttttaactatccctgcctgtgactttcaagctactcaccctgtaatggatcttaaagcattccccaaagataacatgctttgggtggaatggactactccaagggaatctgtaaagaaatatatacttgagtggtgtgtgttatcagataaagcaccctgtatcacagactggcaacaagaagatggtaccgtgcatcgcacctatttaagagggaacttagcagagagcaaatgctatttgataacagttactccagtatatgctgatggaccaggaagccctgaatccataaaggcataccttaaacaagctccaccttccaaaggacctactgttcggacaaaaaaagtagggaaaaacgaagctgtcttagagtgggaccaacttcctgttgatgttcagaatggatttatcagaaattatactatattttatagaaccatcattggaaatgaaactgctgtgaatgtggattcttcccacacagaatatacattgtcctctttgactagtgacacattgtacatggtacgaatggcagcatacacagatgaaggtgggaaggatggtccagaattcacttttactaccccaaagtttgctcaaggagaaattgaagccatagtcgtgcctgtttgcttagcattcctattgacaactcttctgggagtgctgttctgctttaataagcgagacctaattaaaaaacacatctggcctaatgttccagatccttcaaagagtcatattgcccagtggtcacctcacactcctccaaggcacaattttaattcaaaagatcaaatgtattcagatggcaatttcactgatgtaagtgttgtggaaatagaagcaaatgacaaaaagccttttccagaagatctgaaatcattggacctgttcaaaaaggaaaaaattaatactgaaggacacagcagtggtattggggggtcttcatgcatgtcatcttctaggccaagcatttctagcagtgatgaaaatgaatcttcacaaaacacttcgagcactgtccagtattctaccgtggtacacagtggctacagacaccaagttccgtcagtccaagtcttctcaagatccgagtctacccagcccttgttagattcagaggagcggccagaagatctacaattagtagatcatgtagatggcggtgatggtattttgcccaggcaacagtacttcaaacagaactgcagtcagcatgaatccagtccagatatttcacattttgaaaggtcaaagcaagtttcatcagtcaatgaggaagattttgttagacttaaacagcagatttcagatcatatttcacaatcctgtggatctgggcaaatgaaaatgtttcaggaagtttctgcagcagatgcttttggtccaggtactgagggacaagtagaaagatttgaaacagttggcatggaggctgcgactgatgaaggcatgcctaaaagttacttaccacagactgtacggcaaggcggctacatgcctcagtgaaggactagtagttcctgctacaacttcagcagtacctataaagtaaagctaaaatgattttatctgtgaattcagattttaaaaagtcttcactctctgaagatgatcatttgcccttaaggacaaaaatgaactgaagtttcacatgagctatttccattccagaatatctgggattctactttaagcactacataaactgactttatcctcagactagctgaatgattttgtgctgtttcaggatgtttgcactgaagaaaaacagaaagcttatctgaaatttataaaactttttgttttgctacatagaaaacagaaggtatttgaataataagcagtgatatgcttagtgagcacagctatactgattttgattagaatagtcatcagagtggcttagggacagttaatataaaagaggagcaaggtgtagaccatcatctacttctgctaaaataacttaaaaagaggtccataggccataactacatgagcccagcttttgtaatctgacaaaaaaatgaggagcagcttcgtgtatatcagtgtacacggtattccttaggtcccttccattggtagtgatgctgcgagttattactggagaaaaggaattctagagctttaacttggcagattaaaagtactcattttttattcatcaataattagtaatctcactagttttcaaaaatttgcatattattgacaacctctttgaagatgcatttcacaaactcaacagagtgccatgataagagctagggatcccccaaactatctcaagcatctaaaaaattgccatttttaaaggcttaaattgtagtagtaaaggggaaaacaggaagtagtagtaaaggggaaaaaaaaccaataaagcatctaaaaaattggcatgttaaaaggcttaaattgctannnnnnnnnnnnnnnnnnnnnnnnnnnnnnnnnnnnnnacacacacatatcattgacttttcttaagacttcagagtactgggtagatgaacactttatacagtatatatcttcagcttaaatttgttttgagtattttttttatttttaaataagtaggcaaagatttaaatttttttatttttagtaaatgtttgaggcacactaagacaacttggggcaatatttgccaaaacaaaacagaaccccaaaaaatgtacatcttgttcttagcaaatatcattattgtagagacacttaataaagagatggtattttaatgtctgcagttctgaggtagggtggaacttagttctacattgtgatttaggaatttttaaaaccttttttcttcaagggagaagtgacccaggcctcgagtttagtgctaaagccgctagtgtacttatgctgtcccctaaccaccacgtgcgatatggaagcagatgctaaatataggggttttcttagaaagtaagaggaaattagcaagcgttattagtgattgactactgctatcaagtgaattcaaaggaaacaggtttttatgccatatttaagttacagaaaccaggcatgcttagaatagtttctagaggttattggagaatagaaagctaagaaaacttggtatacatttacaatggaaatataattacactttttactctcagaatattgttcacattagacttcctgtttatcttttatattcttgcatttatataatgcctcatcctttcaaagttctttcacatattatatgatcttctttatgaaaaaaatagatgtttcattctgatatattcagtttcccactttaggcaaaagtagattaatagaatgacgaattcaaagtagatgaggaaaatcaggcacagagaagtaaaggtagggatagacccaaatttacacaacaagataatgacatctccagcttttaagttgatcatcaaaggctgggctggatttgtcttgctgtatgtgtcaggaaatttatacctattacattttccattttctcaaaatttaagtcacatgactaatatttagctgcaactttcctcataacaaatagtgtcatgaagaatgttgtagtgtgaagtttgtacatttcagggtcagatatacaatatgaactcttaatctacaggaatgagaatggaggatcattgaaggccatgatataaacaaatttgcatgttgaagcctgtataaaacatggtacagtgagtgaatatacccccatccccaagaacactttatacatattaaatggatatatgattactgtgcaaaaattcattctggaaatgaacatatatttgagcactaatatgtaatgtacacctgccctaaggagaaaataaattataaaactttttacattcaaaattactttcccaagcatgtcttagaataatctatgtgttgatgcatgtaaattgtactttaggtaggcaaagaaatctggttatttatgtaaaaactagtctaataaagttagttagtggctttatcactttaaatctttagtgtccaaaagtggtgtttaaagtaatagcacatcagaaaaccttgtctggacaaaactagttcactcactgcttctgcacctgcagttgctccctttagggttataaaataatgacccaaatgttacatgtgttgatattataacttgtcagttactgatgtctgtggtatcctaccctcatctctgaaagggataatactgaataattattagaaaactataaaacttcacactttgtaccattaaaacctaaaattttaatcttgtccttttttactatggatcagtcggcactcgggaacagcagcaaggaaaaaaagcaaatttcattcacatgttctgtgttcatacctcttctctacctaattgttcatttaaatttcagccttattccttgataagggattttaccacatgaagtcatccagtgaccctagctcttattgtgaagttagtggagtatacttagaaatgttacaactttaaaatgttacaaaacattcattaaagctcatatttaaagtagagcatctagtttgagaaatagaaatcaattattaaagatgtcttttttctacccatttaactagttaaaaccatgacatgtaaatgtagaagtagaataatcatagaattccctaaaatatttctgtttactaacatatattgaccaagtacatcaagcaggagagatcttccttcattctgttatagtccacatcattctaattttgctcagttgttattaagagcatattcctaaaccatacacttttgtttcaataaagttttattttgttgagatgaataaaataacaaagttataagctgcataagacaaaagttcaattgttcaaaaaaaatttactgggatagctttctattacaggtattgttagattatattgtgctgataagattactttctaaaaaatttgtacttttctgtaaattaaaagaatatggagtcataaaatggcaagtgttttaggattagcctaaaattggacattgtcattgatttcaaagaaggtatgaactagcagtcttacagcctaattcttctttggactggtccttggcagcagttccttttcagactcgataaacagaattcagatgatgtaagtcaaaacaaaactttacaaagccaagcgtattatcttttgcattaacctatttttttccatcatacatgctactagtatgtgcattagcatgatattctcatatacattgcattaaaaattaaaaggtggcagctcagggtgagctcttctgttgctcatttgttcctaaatttttaagggctttttctcagtcaatagtttgtacaaactggttagtttaacttcattacccatttcattaaagttgatgggtcgtgtgatgagatgcatttaaggccgatagtgatagatgttttttttatttcttgaacacaggctttgtctgaatgatgttcttttatctcttgaacacaagctttgaatgataactacaggttttaagtgctgttacattaataccataatgtgatgtgttagaaacaaagggatatttcaaaggtagatatttgaaaattctctagtctcaatatgtatgtgtattgaatatactctaaaaataaatgtgcaatttgctagtaggacaatgcagtgactgactagcattaggtatgtttcttttatatcctagctatgtcccactttcttctaagtgcaatcctttcatgttcacttgctgttttaccccatctactctaacttcatttggaaggcttgtctagagtatagcatgtatttttacctttgcagtgaattgcatgtgctaattgtaaccacagctatttttatgttgacataactccaaatgttatattaaatgttctattatatattagctctaatcccttaagtaaattttaagaaataaatacttgttcaaattttttttctgtatgtggttactatcatctgactatgcatatttgtaacagcatttatcattagtggtgttagctaaataagcatcttagtgtaaatgagatgcttcgtgtgggttttgtgacattttaaatgacataatggaatgtgatttaaaagaaaaccagtacactatcttggtcttaataacatagaatggagatggcaaatttatccactagttttccagatttactatttaatagctgaggtctgaaatcgtagcatcctccctcctagtggacatt

SEQ ID NO: 2529 - protein, 918 aa, Homo sapien; identical to SEQ ID NO: 1236
  Unsure 4012-4049: Unknown amino acid

SEQ ID NO: 2530 - DNA, 1324 bp, Homo sapien; identical to SEQ ID NO: 518

SEQ ID NO: 2531 - protein, 113 aa, Homo sapien; identical to SEQ ID NO: 519

SEQ ID NO: 2532 - DNA, 3372 bp, Homo sapien
tacaaccaggctcaactgttgcatggtagcagatttgcaaacatgagtgctgaggggtaccagtacagagcgctgtatgattataaaaaggaaagagaagaagatattgacttgcacttgggtgacatattgactgtgaataaagggtccttagtagctcttggattcagtgatggacaggaagccaggcctgaagaaattggctggttaaatggctataatgaaaccacaggggaaaggggggactttccgggaacttacgtagaatatattggaaggaaaaaaatctcgcctcccacaccaaagccccggccacctcggcctcttcctgttgcaccaggttcttcgaaaactgaagcagatgttgaacaacaagctttgactctcccggatcttgcagagcagtttgcccctcctgacattgccccgcctcttcttatcaagctcgtggaagccattgaaaagaaaggtctggaatgttcaactctatacagaacacagagctccagcaacctggcagaattacgacagcttcttgattgtgatacaccctccgtggacttggaaatgatcgatgtgcacgttttggctgacgctttcaaacgctatctcctggacttaccaaatcctgtcattccagcagccgtttacagtgaaatgatttctttagctccagaagtacaaagctccgaagaatatattcagctattgaagaagcttattaggtcgcctagcatacctcatcagtattggcttacgcttcagtatttgttaaaacatttcttcaagctctctcaaacctccagcaaaaatctgttgaatgcaagagtactctctgaaattttcagccctatgcttttcagattctcagcagccagctctgataatactgaaaacctcataaaagttatagaaattttaatctcaactgaatggaatgaacgacagcctgcaccagcactgcctcctaaaccaccaaaacctactactgtagccaacaacggtatgaataacaatatgtccttacaaaatgctgaatggtactggggagatatctcgagggaagaagtgaatgaaaaacttcgagatacagcagacgggacctttttggtacgagatgcgtctactaaaatgcatggtgattatactcttacactaaggaaagggggaaataacaaattaatcaaaatatttcatcgagatgggaaatatggcttctctgacccattaaccttcagttctgtggttgaattaataaaccactaccggaatgaatctctagctcagtataatcccaaattggatgtgaaattactttatccagtatccaaataccaacaggatcaagttgtcaaagaagataatattgaagctgtagggaaaaaattacatgaatataacactcagtttcaagaaaaaagtcgagaatatgatagattatatgaagaatatacccgcacatcccaggaaatccaaatgaaaaggacagctattgaagcatttaatgaaaccataaaaatatttgaagaacagtgccagacccaagagcggtacagcaaagaatacatagaaaagtttaaacgtgaaggcaatgagaaagaaatacaaaggattatgcataattatgataagttgaagtctcgaatcagtgaaattattgacagtagaagaagattggaagaagacttgaagaagcaggcagctgagtatcgagaaattgacaaacgtatgaacagcattaaaccagaccttatccagctgagaaagacgagagaccaatacttgatgtggttgactcaaaaaggtgttcggcaaaagaagttgaacgagtggttgggcaatgaaaacactgaagaccaatattcactggtggaagatgatgaagatttgccccatcatgatgagaagacatggaatgttggaagcagcaaccgaaacaaagctgaaaacctgttgcgagggaagcgagatggcacttttcttgtccgggagagcagtaaacagggctgctatgcctgctctgtagtggtggacggcgaagtaaagcattgtgtcataaacaaaacagcaactggctatggctttgccgagccctataacttgtacagctctctgaaagaactggtgctacattaccaacacacctcccttgtgcagcacaacgactccctcaatgtcacactagcctacccagtatatgcacagcagaggcgatgaagcgcttactctttgatccttctcctgaagttcagccaccctgaggcctctggaaagcaaagggctcctctccagtctgatctgtgaattgagctgcagaaacgaagccatctttctttggatgggactagagctttctttcacaaaaaagaagtaggggaagacatgcagcctaaggctgtatgatgaccacacgttcctaagctggagtgcttatcccttctttttctttttttctttggtttaatttaaagccacaaccacatacaacacaaagagaaaaagaaatgcaaaaatctctgcgtgcagggacaaagaggcctttaaccatggtgcttgttaatgctttctgaagctttaccagctgaaagttgggactctggagagcggaggagagagaggcagaagaaccctggcctgagaaggtttggtccagcctggtttagcctggatgttgctgtgcacggtggacccagacacatcgcactgtggattatttcattttgtaacaaatgaacgatatgtagcagaaaggcacgtccactcacaagggacgctttgggagaatgtcagttcatgtatgttcagaagaaattctgtcatagaaagtgccagaaagtgtttaacttgtcaaaaaacaaaaacccagcaacagaaaaatggagtttggaaaacaggacttaaaatgacattcagtatataaaatatgtacataatattggatgactaactatcaaatagatggatttgtatcaataccaaatagcttctgttttgttttgctgaaggctaaattcacagcgctatgcaattcttaattttcattaagttgttatttcagttttaaatgtaccttcagaataagcttccccaccccagtttttgttgcttgaaaatattgttgtcccggatttttgttaatattcatttttgttatccttttttaaaaataaatgtacaggatgccagtaaaaaaaaaaatggcttcagaattaaaactatgaaatattttacagtttttcttgtacagagtacttgctgttagcccaaggttaaaaagttcataacagattttttttggactgttttgttgggcagtgcctgataagcttcaaagctgctttattcaataaaaaaaaaacccgaattcactgg

SEQ ID NO: 2533 - protein, 738 aa, Homo sapien
YNQAQLLHGSRFANMSAEGYQYRALYDYKKEREEDIDLHLGDILTVNKGSLVALGFSDGQEARPEEIGWLNGYNETTGERGDFPGTYVEYIGRKKISPPTPKPRPPRPLPVAPGSSKTEADVEQQALTLPDLAEQFAPPDIAPPLLIKLVEAIEKKGLECSTLYRTQSSSNLAELRQLLDCDTPSVDLEMIDVHVLADAFKRYLLDLPNPVIPAAVYSEMISLAPEVQSSEEYIQLLKKLIRSPSIPHQYWLTLQYLLKHFFKLSQTSSKNLLNARVLSEIFSPMLFRFSAASSDNTENLIKVIEILISTEWNERQPAPALPPKPPKPTTVANNGMNNNMSLQNAEWYWGDISREEVNEKLRDTADGTFLVRDASTKMHGDYTLTLRKGGNNKLIKIFHRDGKYGFSDPLTFSSVVELINHYRNESLAQYNPKLDVKLLYPVSKYQQDQVVKEDNIEAVGKKLHEYNTQFQEKSREYDRLYEEYTRTSQEIQMKRTAIEAFNETIKIFEEQCQTQERYSKEYIEKFKREGNEKEIQRIMHNYDKLKSRISEIIDSRRRLEEDLKKQAAEYREIDKRMNSIKPDLIQLRKTRDQYLMWLTQKGVRQKKLNEWLGNENTEDQYSLVEDDEDLPHHDEKTWNVGSSNRNKAENLLRGKRDGTFLVRESSKQGCYACSVVVDGEVKHCVINKTATGYGFAEPYNLYSSLKELVLHYQHTSLVQHNDSLNVTLAYPVYAQQRR

SEQ ID NO: 2534 - DNA, 5581 bp, Homo sapien
gtaagatttttaaaccaaggaatgactgggctatctataaacccagatgcactaagtggggagaaaagctcggagctgcagcatatcagctttgtcaacctgccaacagcagagcgtaccatgctgcaaggagtaataaacaaggaattagaaaactcgctgctggagaacagtcaaattaaacacctttttgaaaggatgagcatgtatatattgcagttctattaaatgtagcttcttagtgaggttggcattatgttaaggctggtatggaagagaactgatgaagcaggagtggtctggtgacatttttctgacttgattggctggggcgtgtgatgtaataggtttcagtgcagccccttataggttttaaaatgaattccaagacaccattacaaagaaagccggactcttttcttataactgagctcagccaaggaaactcttgcacaaatgtacaatactgtttggaatatggaagacctggatttagaatatgccaagacagatataaattgtggcacagacttgatgttttatatagaaatggacccaccagcactgcctcctaaaccaccaaaacctactactgtagccaacaacggtatgaataacaatatatccttacaagatgctgaatggtactggggagatatctcgagggaagaagtgaatgaaaaacttcgagatacagcagacgggacctttttggtacgagatgcgtctactaaaatgcatggtgattatactcttacactaaggaaagggggaaataacaaattaatcaaaatatttcatcgagatgggaaatatggcttctctgacccattaaccttcagttctgtggttgaattaataaaccactaccggaatgaatctctagctcagtataatcccaaattggatgtgaaattactttatccagtatccaaataccaacaggatcaagttgtcaaagaagataatattgaagctgtagggaaaaaattacatgaatataacactcagtttcaagaaaaaagtcgagaatatgatagattatatgaagaatatacccgcacatcccaggaaatccaaatgaaaaggacagctattgaagcatttaatgaaaccataaaaatatttgaagaacagtgccagacccaagagcggtacagcaaagaatacatagaaaagtttaaacgtgaaggcaatgagaaagaaatacaaaggattatgcataattatgataagttgaagtctcgaatcagtgaaattattgacagtagaagaagattggaagaagacttgaagaagcaggcagctgagtatcgagaaattgacaaacgtatgaacagcattaaaccagaccttatccagctgagaaagacgagagaccaatacttgatgtggttgactcaaaaaggtgttcggcaaaagaagttgaacgagtggttgggcaatgaaaacactgaagaccaatattcactggtggaagatgatgaagatttgccccatcatgatgagaagacatggaatgttggaagcagcaaccgaaacaaagctgaaaacctgttgcgagggaagcgagatggcacttttcttgtccgggagagcagtaaacagggctgctatgcctgctctgtagtggtggacggcgaagtaaagcattgtgtcataaacaaaacagcaactggctatggctttgccgagccctataacttgtacagctctctgaaagaactggtgctacattaccaacacacctcccttgtgcagcacaacgactccctcaatgtcacactagcctacccagtatatgcacagcagaggcgatgaagcgcttactctttgatccttctcctgaagttcagccaccctgaggcctctggaaagcaaagggctcctctccagtctgatctgtgaattgagctgcagaaacgaagccatctttctttggatgggactagagctttctttcacaaaaaagaagtaggggaagacatgcagcctaaggctgtatgatgaccacacgttcctaagctggagtgcttatcccttctttttctttttttctttggtttaatttaaagccacaaccacatacaacacaaagagaaaaagaaatgcaaaaatctctgcgtgcagggacaaagaggcctttaaccatggtgcttgttaatgctttctgaagctttaccagctgaaagttgggactctggagagcggaggagagagaggcagaagaaccctggcctgagaaggtttggtccagcctggtttagcctggatgttgctgtgcacggtggacccagacacatcgcactgtggattatttcattttgtaacaaatgaacgatatgtagcagaaaggcacgtccactcacaagggacgctttgggagaatgtcagttcatgtatgttcagaagaaattctgtcatagaaagtgccagaaagtgtttaacttgtcaaaaaacaaaaacccagcaacagaaaaatggagtttggaaaacaggacttaaaatgacattcagtatataaaatatgtacataatattggatgactaactatcaaatagatggatttgtatcaataccaaatagcttctgttttgttttgctgaaggctaaattcacagcgctatgcaattcttaattttcattaagttgttatttcagttttaaatgtaccttcagaataagcttccccaccccagtttttgttgcttgaaaatattgttgtcccggatttttgttaatattcatttttgttatccttttttaaaagtaaatgtacaggatgccagtaaaaaaaaaaaaatggcttcagaattaaaactatgaaatattttacagtttttcttgtacagagtacttggctgttagcccaaggttaaaaagttcataacagattttttttggactgttttgttgggcagtgcctgataagcttcaaagctgctttattcaataaaaaaaagaaatgaaaaagatatatgaatatgacaaagtattgctgagtccaacaatgttgttttaagactcttaaaatacggtacctggcaatgtttatttcataaagaattgtgaacttcttgaatctagggagggggaatgtagtgaagggatgtatcaagtggggtggtgggagggggaggcaaggttatatgcactttctcatgatttacagagaagtgaataactgcaaagtgaagttgcttcttctacttcagtcttctctcactttgatttgctagttgttatcaattaatgacaattacaaacctactgtatctctaatacagtgtgactggtcaggtatttcagttcttaggaaggaagtgccaagtttgtttttgggttcctggaacagcgctcacctttgtttagaacactggtttaaagggataatcatctctgtcacattagactatccatcatgaccagcaaatactcattttaggaaaaaaaaaagcatgatctgaaaaatacttttggtggtatgttggttaccctcctagctttccatttggtttagaacataaagcaaatagacacagtcatactgtcactgctctggactgtgtggagctcgctaaagtcatggtcattgcaggaatccaagtggcagtccttctcattcattctaatcattgtatgtgcttcactacgggggggagaaggaaacgttagcatcatgtttcccatttagggcaggagtgagaggtctctcttcctgatttagatatgcaaaagctggtatgttcagtaggaactgtacatgtgttgggaggcataaagactaattagcaaccataatatggtcactaccctaatagactaaatgaaatcttgcaatttcaaattactctttctccatattagatttacccacagctatatttctgtttaagtactagggtgagggttttctgttactttgttttttaatgttgttccttttgaaagaatcagtcttgcagctgagtgaaaaatctgtggaatgtattatttgtcctctttacatgaaactactcatacttaagcaaaagtcagtcttatagcaagactgttagccctcaaacttgactctactgatctgaccatttccctctcatcgccagacaactgacgatttccctggttttagtctgcgtctctgctttaaagttattgtgatatccttctagatcatacacaagtctaacagttaattagttaacagtttttaaactaggtttgtgggtatttttttggtagcacatgtatgctattacatacaaatttttatttctaaaatataagatctgagattgaatattttcattaaaagctacagttttgtgaatctttgtgcttcaacattctttgcaagatgatacggtatttaggcatttgccttatttttgcatctcacaaacataagtgcaatagatcttttcattgaacagcaaagtaggattcatcattccatatgacttgagttacaccagacctgttctgcccaatgcctttttgattacagtgtagcttgcccaccgcatttgtcgttttagatactttgctagccggccactttggatttcatcagacagtcctaacaatattgtctgaacggctgaatatgaatagatacagcagaggcactcctgatatatgatttttatccatgcgtcagtttttcccacccagtgtagcatcctaaagataaagccagaagctaagctgcagtgaggctgtgattgggcgtagaagtgggagcattgggacctcacattacacacacgagagatcataaccatgtgaaaaggcaaaaagcatgtgtttgcaacatctgataacttcatggcctttgataaatgtatatatgtatatgtgcatggactgtgtttccagtacacctttcagccaaaacagatccacagtagttgttgagttcaagtacataaagtacataacaagcgaacgtctagtacaattcttacttatgtgtatgggatttttccctttgaggttgctttgttttgtcttacaaaggtgaaaattgtttgtaagtgaagtgagaagttcatatttctttggcttttttgtgtttttaaaagttactccttttagggagctggtctgatgacttgcttagcttggaaatccttgttttcagtgtgtcgagtcaaaatgtgtttatgtgagctgtcactgtggggaaccaattgctttgtcatatagctggttatgaactagtaacatgtttgggaagtcctactgatgttcctttggaagaaaaaatctgctggttttaacaactgtgcttttgctatgtatggtatccaagttagttgaaatgcagacactgagatctgtttgagtttagggtcatttttagaaaggggcagtttaaagcacaatgtctcacatgggacaaagttccaaaatgccaaattcttattttttaaaaagctagttctataaaatactggtattatgggtggggaggaaatagaattgagtcaattggaaagactatccaacttaacatgaaacttgtcaccatgagatagcattagctgcccaggatgctgctatatatatatatgtatt

SEQ ID NO: 2535 - protein, 454 aa, Homo sapien [sequence omitted]

SEQ ID NO: 2536 - DNA, 3213 bp, Homo sapien; identical to SEQ ID NO: 1683

SEQ ID NO: 2537 - protein, 731 aa, Homo sapien; identical to SEQ ID NO: 1684

SEQ ID NO: 2538 - DNA, 5318 bp, Homo sapien
gcggccgcgggctcccgctaaccgcagcctccactcctctccccgcgcgccgcgcccccgccccgccccgcccggtctcgccggccgagcgtccgttggtccttgagcgcgtccgacagtctgtctgttcgcgatcctgccggagccccgccgccgccggcttggattctgaaaccttccttgtatccctcctgagacatctttgctgcaagatcgaggctgtcctctggtgagaaggtggtgaggcttcccgtcatattccagctctgaacagcaacatggggtgcaaagtcctgctcaacattgggcagcagatgctgcggcggaaggtggtggactgtagccgggaggagacgcggctgtctcgctgcctgaacacttttgatctggtggccctcggggtgggcagcacactgggtgctggtgtctacgtcctggctggagctgtggcccgtgagaatgcaggccctgccattgtcatctccttcctgatcgctgcgctggcctcagtgctggctggcctgtgctatggcgagtttggtgctcgggtccccaagacgggctcagcttacctctacagctatgtcaccgttggagagctctgggccttcatcaccggctggaacttaatcctctcctacatcatcggtacttcaagcgtagcgagggcctggagcgccaccttcgacgagctgataggcagacccatcggggagttctcacggacacacatgactctgaacgcccccggcgtgctggctgaaaaccccgacatattcgcagtgatcataattctcatcttgacaggacttttaactcttggtgtgaaagagtcggccatggtcaacaaaatattcacttgtattaacgtcctggtcctgggcttcataatggtgtcaggatttgtgaaaggatcggttaaaaactggcagctcacggaggaggattttgggaacacatcaggccgtctctgtttgaacaatgacacaaaagaagggaagcccggtgttggtggattcatgcccttcgggttctctggtgtcctgtcgggggcagcgacttgcttctatgccttcgtgggctttgactgcatcgccaccacaggtgaagaggtgaagaacccacagaaggccatccccgtggggatcgtggcgtccctcttgatctgcttcatcgcctactttggggtgtcggctgccctcacgctcatgatgccctacttctgcctggacaataacagccccctgcccgacgcctttaagcacgtgggctgggaaggtgccaagtacgcagtggccgtgggctccctctgcgctctttccgccagtcttctaggttccatgtttcccatgcctcgggttatctatgccatggctgaggatggactgctatttaaattcttagccaacgtcaatgataggaccaaaacaccaataatcgccacattagcctcgggtgccgttgctgctgtgatggccttcctctttgacctgaaggacttggtggacctcatgtccattggcactctcctggcttactcgttggtggctgcctgtgtgttggtcttacggtaccagccagagcagcctaacctggtataccagatggccagtacttccgacgagttagatccagcagaccaaaatgaattggcaagcaccaatgattcccagctggggtttttaccagaggcagagatgttctctttgaaaaccatactctcacccaaaaacatggagccttccaaaatctctgggctaattgtgaacatttcaaccagccttatagctgttctcatcatcaccttctgcattgtgaccgtgcttggaagggaggctctcaccaaaggggcgctgtgggcagtctttctgctcgcagggtctgccctcctctgtgccgtggtcacgggcgtcatctggaggcagcccgagagcaagaccaagctctcatttaaggttcccttcctgccagtgctccccatcctgagcatcttcgtgaacgtctatctcatgatgcagctggaccagggcacctgggtccggtttgctgtgtggatgctgataggcttcatcatctactttggctatggcctgtggcacagcgaggaggcgtccctggatgccgaccaagcaaggactcctgacggcaacttggaccagtgcaagtgacgcacagccccgccccccggaggtggcagcagccccgagggacgcccccagaggaccgggaggcaccccaccctccccaccagtgcaacagaaaccacctgcgtccacaccctcactgcagccaaaggtgcaattacttgacctgcagccccagcccaccctcggctctgcagccggttctccgggccctggtcacctccagacagctgcctggccggggccactaggctgcggctggccactgtgtctcctcacttctctgaacaaagcagttcctcccctaccagctcagccccgagctgccgcagcctcaggcagaacggaggtcaccttctctccttatcttgggaaccaggccttcctcccggggactgttctgggattgaaattgtgcatactccaaactttcgcagccatcttcccgctcagccccagacacccagcaatcaagccagatgagtaccacaaaacagtgtgtccccagcagctccccaccccagagccaaatgacagtagtgcacttaaaaaggaaaatcaggcctgttgtccttctccggttgcattcagttgggtcattagggccggaccctgcctgccccttggcttctcagggctttgctctgacaccatgacagctgcccggggctgagggcagctggctccactcaaatgaggaagaagggatcactcccattagggcctgctttgcttatgcatgtgtgtgcacatgcatgtaaaccaggaccttcagctcacggcctccaggcctgggccagttcttgctgctcctgccgtctcccccgactggctgtgtcctgagtaactggaacatgagactgtatctgcaggactggccccatggtggccgagtcagaagtctgtttcctgtgagtcgccaccgttcactcagtcttgccctcccatgctttggagccagtctggtggctcctgtaaggttctcaaggctggtggcagctcagtctggggtcaggacatgtcggggtcatgcgtttctggccctgacataagctgtctggcctctctgtgacatgatgaaattgaaatcaatccacagtccatgaaattgtgacactccaccagattaagttagggcataacattaacttggaaatggccatgtcatcacccctgcggctgtcctatagctgagatgcgtgggtcgcaggggaggtgatttctaggcatattgctgtcccttttgtgtatctgtcatccggatgcttcggaccccacgcctctgcaagtgggagagacccgagcatcctccccacccccatagctccagtgcacgccacccccgtcttgcctgggtcggggcctgcggccagcaccatttcacacacactccttgtagatgggagccagaggaaacctgaacgtgggtggagcgttccactgagtctacttcaggagacagaaggcccatgctgatgggggaggaggagggacgtgggcattttggacaccaggggaaatggaaatgctgctttcaaaacttagtttcctttccatttcttcctagtctggcctttgacacaaatctggtagaaagaagcctgataaattgagggcacttgtaccctccctgtgcccccagaaggttcttggagagaagtgcaagaatttgtgaacacggcggtggagggcgggtggatggccatgggctgggcctccgtatcaggcctgctcaccttgctgggagctttattctgatctcattttgaatgttccagagggagcatcataagagcccagagctccgatttccaaagagtgatattgacatttatggagattggtgttgtaacatattttgataaatactaacttattttgttggggttttggttgtctcttgtcttaggacctggtagttatttgcttgatttttttttccgttattttctacataggcaaagagaattcgagggatagacagtctccaagaaaagtgaagtggtgggagagaattgcttttttcttttttttcttttctctagtttttctttctggctgagatttccgtgcaagacagcacccaatagactatttagagttgacatttgacattttaatgggcgccatggctcattttgtagattgagaaggtgcgtctcccctgctccaagtctcatcatgacagcgtgctgacagctgggagtctgtggccttcctcacgcagaggccttaaagctggacacagaagcacgcctaggctgggcagggatgggacccatgccccctccttagaggacgggcttcctggttaggaaaggacacgtgggggtgccttgcataatagttcactggtcaccgtgcttttatgagtagtgtttttgtgcacttgccaggggttttctctctgtgtgcgaggggagtgatttaagcaatggtgtctggagtaagccttacaattttaatagactttttcttatcatatccctcatttctttccctgaaataaaaatacacacaaaccaaaaaaaaaaggatagtttcacatctcttagttccctggcccaaacaagaatattcttagttccacgggccaggattttcctacatagtcagaacttacacattactagaggcacacccaccaaggagtattgtgtctacttttatctgtgcaccagccacaaatacccacattggaaagacccatttgtgatgggtaaacatcccttcctgtctcccacaacccctgtgactgccctgcatgtgttcatgacctccgaaggcccaaattcatgaagcagcaaacccagcagatctccacccccctgcctcaggacctctgctgaagagggggatgaagtgggtctccagggaggcagtgggggccttgttggcagctggcatcgggaagccaggcttacagtgaggagcacgctctcgcagattgggaggggcttccgtccggaggagaccacggcctctacacaccccccactctacttatcatccctgctcacacacccttgtccaaggctttatgcatcggatttatttttccaaatcaagaggacagtgatagatgcattttccccaggctgtctcagaaaggtcgctaaatgtatactgttgtcttgatttggaaaaataaatccgatgcataaagccttggac

SEQ ID NO: 2539 - protein, 721 aa, Homo sapien
  unsure 77: unknown amino acid
GRGLPLTAASTPLPARRAPAPPRPVSPAERPLVLERVRQSVCSRSCRSPAAAGLDSETFLVSLLRHLCCKIEAVLWXEGGEASRHIPALNSNMGCKVLLNIGQQMLRRKVVDCSREETRLSRCLNTFDLVALGVGSTLGAGVYVLAGAVARENAGPAIVISFLIAALASVLAGLCYGEFGARVPKTGSAYLYSYVTVGELWAFITGWNLILSYIIGTSSVARAWSATFDELIGRPIGEFSRTHMTLNAPGVLAENPDIFAVIIILILTGLLTLGVKESAMVNKIFTCINVLVLGFIMVSGFVKGSVKNWQLTEEDFGNTSGRLCLNNDTKEGKPGVGGFMPFGFSGVLSGAATCFYAFVGFDCIATTGEEVKNPQKAIPVGIVASLLICFIAYFGVSAALTLMMPYFCLDNNSPLPDAFKHVGWEGAKYAVAVGSLCALSASLLGSMFPMPRVIYAMAEDGLLFKFLANVNDRTKTPIIATLASGAVAAVMAFLFDLKDLVDLMSIGTLLAYSLVAACVLVLRYQPEQPNLVYQMASTSDELDPADQNELASTNDSQLGFLPEAEMFSLKTILSPKNMEPSKISGLIVNISTSLIAVLIITFCIVTVLGREALTKGALWAVFLLAGSALLCAVVTGVIWRQPESKTKLSFKVPFLPVLPILSIFVNVYLMMQLDQGTWVRFAVWMLIGFIIYFGYGLWHSEEASLDADQARTPDGNLDQCK

SEQ ID NO: 2540 - DNA, 3141 bp, Homo sapien
gcctgaaaacatcatgctggttgatccagttcgccagccctaccgagtgaaggtcattgactttggttctgctagtcacgtttccaaagctgtgtgctcaacctacttacagtcacgttactacagagctcctgaaattattcttgggttaccattttgtgaagctattgatatgtggtcactgggctgtgtgatagctgagctgttcctgggatggcctctttatcctggtgcttcagaatatgatcagattcgttatatttcacaaacacaaggcttgccagctgaatatcttctcagtgccggaacaaaaacaaccaggtttttcaacagagatcctaatttggggtacccactgtggaggcttaagacacctgaagaacatgaactggagactggaataaaatcaaaagaagctcggaagtacatttttaattgcttagatgacatggctcaggtgaatatgtctacagacctggagggaacagacatgttggcagagaaggcagaccgaagagaatacattgatctgttaaagaaaatgctcacaattgatgcagataagagaattacccctctaaaaactcttaaccatcagtttgtgacaatgactcaccttttggattttccacatagcaatcatgttaagtcttgttttcagaacatggagatctgcaagcggagggttcacatgtatgatacagtgagtcagatcaagagtcccttcactacacatgttgccccaaatacaagcacaaatctaaccatgagcttcagcaatcagctcaatacagtgcacaatcaggccagtgttctagcttccagttctactgcagcagctgctactctttctctggctaattcagatgtctcactactaaactaccagtcagctttgtacccatcatctgctgcaccagttcctggagttgcccagcagggtgtttccttgcagcctggaaccacccagatttgcactcagacagatccattccaacagacatttatagtatgtccacctgcgtttcaaactggactacaagcaacaacaaagcattctggattccctgtgaggatggataatgctgtaccaattgtaccccaggcaccagctgctcagccactacagattcagtcaggagttctcacgcagggaagctgtacaccactaatggtagcaactctccaccctcaagtagccaccatcacaccgcagtatgcggtgccctttactctgagctgcgcagccggccggccggcgctggttgaacagactgccgctgtactgcaggcgtggcctggagggactcagcaaattctcctgccttcaacttggcaacagttgcctggggtagctctacacaactctgtccagcccacagcaatgattccagaggccatggggagtggacagcagctagctgactggaggaatgcccactcttatggcaaccagtacagcactatcatgcagcagccatccttgctgactaaccatgtgacattggccactgctcagcctctgaatgttggtgttgcccatgttgtcagacaacaacaatccagttccctcccttcgaagaagaataagcagtcagctccagtctcttccaagtcctctctagatgttctgccttcccaagtctattctctggttgggagcagtcccctccgcaccacatcttcttataattccttggtccctgtccaagatcagcatcagcccatcatcattccagatactcccagccctcctgtgagtgtcatcactatccgaagtgacactgatgaggaagaggacaacaaatacaagcccagtagctctggactgaagccaaggtctaatgtcatcagttatgtcactgtcaatgattctccagactctgactcttctttgagcagcccttattccactgataccctgagtgctctccgaggcaatagtggatccgttttggaggggcctggcagagttgtggcagatggcactggcacccgcactatcattgtgcctccactgaaaactcagcttggtgactgcactgtagcaacccaggcctcaggtctcctgagcaataagactaagccagtcgcttcagtgagtgggcagtcatctggatgctgtatcacccccacagggtatcgagctcaacgcggggggaccagtgcagcacaaccactcaatcttagccagaaccagcagtcatcggcggctccaacctcacaggagagaagcagcaacccagccccccgcaggcagcaggcgtttgtggcccctctctcccaagccccctacaccttccagcatggcagcccgctacactcgacagggcacccacaccttgccccggcccctgctcacctgccaagccaggctcatctgtatacgtatgctgccccgacttctgctgctgcactgggctcaaccagctccattgctcatcttttctccccacagggttcctcaaggcatgctgcagcctataccactcaccctagcactttggtgcaccaggtccctgtcagtgttgggcccagcctcctcacttctgccagcgtggcccctgctcagtaccaacaccagtttgccacccaatcctacattgggtcttcccgaggctcaacaatttacactggatacccgctgagtcctaccaagatcagccagtattcctacttatagttggtgagcatgagggaggaggaatcatggctaccttctcctggccctgcgttcttaatattgggctatggagagatcctcctttaccctcttgaaatttcttagccagcaacttgttctgcaggggcccactgaagcagaaggtttttctctgggggaacctgtctcagtgttgactgcattgttgtagtcttctcaaagtttgccctatttttaaattcattatttttgtgacagtaattttggtacttggaagagttcagatgcccatcttctgcagttaccaaggaagagagattgttctgaagttaccctctgaaaaatattttgtctctctgacttgatttctataaatgcttttaaaaacaaaaaaaaaaaaaaaaaaaaaaaaaaaaaaaaaaaaaaaaaaaaaaaaaaaaaaaaaaaaaaaaaaaaaaaaaaaaaaaaaaaaaaaaaaa

SEQ ID NO: 2541 - DNA, 2190 bp, Homo sapien
ggcttacaggagggcagctctgcagttgggaggggcaccgtccggaggagaccaggcctctacacaccccccactctacttatcatccctgctcacacacccttgtccaaggctttatgcatcggatttatttttccaaatcaagaggacagtgatagatgcattttccccaggctgtctcagaaaggtcgctaaatgtatactgttgtcagaattgctgagatctccccccacttttggtttttgcagcagtaaaaactctttccactgtgacttattttctctctcaggcagccagccacctggtcccttgtgctgactctagcacagtggccaggatccaatacgagtccaggggtgaccgcaggatggtgggggcagcgggcttctccacctaccccagccaccaaggccctgacgcactgcctcctgcaccttcagcacatccctgtgcacagctggaagggtgcatggcccgctcacctttgttcagatgggtggaaacgctgatgataccagctcctccctgccgtgcccctgccacggagcaggcattgtgaactggctggtgtttgcagtcccacgtggcatggcctccagcccaacccacagtggagactggagacagggcaatgagtctggtcgggggcacgtggacatgccccataggggccccacccagacttaacaggcaaggtcctgggcattgcgcgacgcaggactcaatgctaaagcaagcctgcctggctctgtgccagggcccctcttctgatttacacatcccatttttacacagacccttccttcttaataaaggctgacagttctgttggcagccaagaacccacaccatgaagacagggagtgaggggcctttgtgcccaactccagcacagctgcgttctggggtgtgtgagaggcatgttcgtgtctgtgcgctggtggtctcgtgagacagttccgaggacggggaaattgcagggtggtgggggcgtgaggcttatatgtggaactgatgcagagttcgcctgcagacggatctggatatacactatgtataattgttacgtgtaatttaaaatatatctgtttgccatcgtcatgagaagattatatgtaaggctctgaagggagagggagatgtacattctgccaggctcctggggaccttatccgagtcatgaaattgatgactgttgatccagtggtgcaagaagctacactccatgtgtcatcacgcttatgactcctaatgtatttttaaggcaaaaaatgtcagccgactccatcttcacccctcgattcctcgagtccagcctttctgtgccagtgcttcactgagccacaacgctctcgccatcgggacccggctgggcctggagtctcggggcacagttgccatggagccctcctgggtcattctacaaatgtgctgagtgccagctgaaaaccccacaggagatggagtaccttggccaagcttaaagagaagattttctcagggtatttattagtgtgtccagcagggtcaggaagcaggatggaaagatgcattcagactgttaatttattaacaaggcaaatgattttgtgtttcttgatgacagactattaagtttgggacttattttcccatttgagaagttataatatatatttaagatgataagtttcctgcttaagttgtgcctttcagcttcaatgagtttaaggagcactaagggtaatgataccaatgagggttggtttattatcaaacctgaatagctgtggtttctccagtaaatattttcttctactgaacatggagccattattaagagttgtgtgttttttattatgtacatttgtatatttttttgcttgtttgatgttctatttttctaatagttttcttttagtttcttaaagttgtgatactagatttagattctgatgctaactgcaaatcaggttggtctctgctgggtctctcctgcttttattttactttaaggacaagtgtagttgtcgtccaccacctttcaaaaaatgtgaaactgccctgcctcccctttttgctgacaacactgtgtacattgaccacttcctaccatactttatgttgtaaaatcaaactcttttgtggtacattatctcatgcttctgcaaattcgaataaattctatggcttccaaaaaaaaaaaaaaa

SEQ ID NO: 2542 - protein, 21 aa, Homo sapien
MKLMTVDPVVQEATLHVSSRL

SEQ ID NO: 2543 - DNA, 5186 bp, Homo sapien
ggctgcgtcatttttgaactgcttaccttaaagaggacgtttgatgctacaaacccacttaacctgtgtgtgaagatcgtgcaaggaattcgggccatggaagttgactctagccagtactctttggaattgatccaaatggttcattcgtgccttgaccaggatcctgagcagagacctactgcagatgaacttctagatcgccctcttctcaggaaacgcaggagagagatggaggaaaaagtcactctgcttaatgcacctacaaagagaccaaggtcaagcactgtgactgaagcacccattgctgtagtaacatcacgaaccagtgaagtctatgtttggggtggtggaaaatccaccccccagaaactggatgttatcaagagtggctgtagtgcccggcaggtctgtgcagggaatacccactttgctgtggtcacagtggagaaggaactgtacacttgggtgaacatgcaaggaggcactaaactccatggtcagctgggccatggagacaaagcctcctatcgacagccaaagcatgtggaaaagttgcaaggcaaagctatccatcaggtgtcatgtggtgatgatttcactgtctgtgtgactgatgagggtcagctctatgccttcggatcagattattatggctgcatgggggtggacaaagttgctggccctgaagtgctagaacccatgcagctgaacttcttcctcagcaatccagtggagcaggtctcctgtggagataatcatgtggtggttctgacacgaaacaaggaagtctattcttggggctgtggcgaatatggtaggggtagccttgtctctgtccacttcttcacaggtatacaacctgacttcaaagttgtatgcatctaaacccatcatgcagcccctaaatgagaagtgttaattcagtaaatctttttttttttttttttttttttttctcgagacagagtctctctctgtcacccaggctggagtgcaatggcatgatctgggctcattgcaaccaccacctcccgagttcgagtgattctcctgcctcagcctcccgagtagctgggattacaggcacacaccatcacacccagctaattttttgtatttttagtagagatggggtttcaccacactggccaggcttgtctcgctcgaacttctgacctcatgatccacctgcctcggcctcccaaagtgctgggattacaggtgtgagccaccgcacctggcaaaagagaatcttacagaacctattcactgggaaggaagccctcattataatgattttcattcttatgtgtgtttcaggacgactgggtttggattcagaagaggattattatacaccacaaaaggtggatgttcccaaggcctcgattattgttgcagttcaatgtggctgtgatgggacatttctgttgacccagtcaggcaaagtgctggcctgtggactcaatgaattcaataagctgggtctgaatcagtgcatgtcgggaattatcaaccatgaagcataccatgaagttccctacacaacgtcctttaccttggccaaacagttgtccttttataagatccgtaccattgccccaggcaagactcacacagctgctattgatgagcgaggccggctgctgacctttggctgcaacaagtgtgggcagctgggcgttgggaactacaagaagcgtctgggaatcaacctgttggggggacccttggtgggaagcaagtgatcagggtctcctgcggtgatgagtttaccattgctgccactgatgataatcacatttttgcctggggcaatggtggtaatggccgcctggcaatgacccccacagagagaccacatggctctgatatctgtacctcatggcctcggcctatttttggatctctgcatcatgtcccggacctgtcttgccgtggatggcataccattctcatcgttgagaaagtattgaattctaagaccatccgttccaatagcagtggcttatccattggaactgtgtttcagagctctagcccgggaggaggcggcgggggcggcggtggtgaagaagaggacagtcagcaggaatctggaactcctgacccaagtggaggcttccgaggaacaatggaagcagaccgaggaatggaaggtttaatcagtcccacagaggccatggggaacagtaatggggccagcagctcctgtcctggctggcttcgaaaggagctggaaaatgcagaatttatccccatgcctgacagcccatctcctctcagtgcagcgttttcagaatctgagaaagataccctgccctatgaagagctgcaaggactcaaagtggcctctgaagctcctttggaacacaaaccccaagtagaagcctcgtcacctcggctgaatcctgcagtaacctgtgctgggaagggaacaccactgactcctcctgcgtgtgcgtgcagctctctgcaggtggaggttgagagattgcagggtctggtgttaaagtgtctggctgaacaacagaagctacagcaagaaaacctccagatttttacccaactgcagaagttgaacaagaaattagaaggagggcagcaggtggggatgcattccaaaggaactcagacagcaaaggaagagatggaaatggatccaaagcctgacttagattcagattcctggtgcctcctgggaacagactcctgtagacccagcctctagtctcctgagcctatagagcccccaggagactgggacccaaagaacttcacagcacacttaccgaatgcagagagcagctttcctggctttgttcacttgcagaaaaggagcgcaaggcagaggctctgaagcactttccttgtacatttggagagtggcattgccttttagataggatctaggagtgattttattgttttggagaatggaagggcccccatggccctggctttgtcatcagtgactgccatagcaacagcagctctgtacctcatctgttgatcccacctttgaagaggagacacagtgctcaccttaattgcgctggtagcagcttatatcccatgtatcattttcaccattgattggaagctgccttgggaattcagtaccaggcattacccctctgggtgggagagggagaagtgtaaagttggagtgggctggaatcaggtgtggcccgcccagtgtcctctgcagagtggtgaagtagtctggccctcttgggagccctgagtccaggaaaatatgtctgatggagtcaatctagggcttgtttcgaaaaagttcagttactctgtgcagctaaatgctttaggaggaaaggtaggcttaggttgcttttcctctgagggttgattgaaatttcttcagtgaggaatagagaaagggcaggaccctcatcatcacacagctggtgtttcaggctgtgaccaatgcagggtgggatttcctaactgtggatgaggggatgaggtgtctctgagggatgaggtgtctcagagaattgagtccatggggcagtcagaatagccttaagagaaaatcatgaaggagaagaggtcctcctttagctgcctctacttggtatcttagagagggcttagagggctctcagtcttctgcccatgaaaagacttctttgagcctctgccttcatggctcttagggttctgatcttgatatcagcggccccaaccactttctttctgaatgtctagtcagtatttttccccttttggtgttttatgaagccatgtggtaacgaatgaatctgtatcatttttcctacctgagtggcccaaagccagcaccaaaccctgggagtccctgaagcctaacagaacaggtagaacttgcaaaaggaatttggctgagagctcacttctaatcctgtactcactgtgtctttgtagatagaaacaagctagctttaccaaagagaaatagtgtcatagaagaacaaaacttcatatagaaagttctaggcaagtatttgatggtttccttaaggatgtgagctttgtatttccacctagccttgtaaaatgttcctgtggtattttgtgtcacacatcctacctttgatgagtctcacatcccaccttcctataaacagctaaattaattttgtttcatcttccccagaccaaaatgtttgataatcttatcaacattgtgggaggtcttgtgcaatggaaattttgccatttctccaaaactggtggcataaaggctaatgcttggggagaaccccattgctcgggacaggcaactctgttcaatgggatcttctttggtttgatggtcccattgttttctcagttctgggaagcctagtacattagtactaatgtaatcactgaaaccttttcttgaaataagggaagcagccaaactttgattaaagttgcaagttctggggacttgcgggggttgtcataaactgtaacagtgggttttggttcagcatgtaaatgcaactttgattttcttgaggaccgattgacctgtcatgtccctgtatcctcatgctcatcatctcagcaggcctgagaggctgggtcagtttgggtgttcatcatgaggattgcttctgccatggagctgatggacgtgggcaggttgctgagaaggtggggtgaaagtgagtgccgggggtgggtgagtgccctggtcttgttcataggggagcctttccctagcagtggaacgctgtggtcattttctctagcatattcccttgggaagtctagatttgctattaatctggctgagaatctaagttctgtgccttagagacagtttgcactttcccatattgtgcctgggacagccatatgattttttttcccaccaaacaagtatgcaaacagaaaccagttcaaagggggatggagtaaaagatgaggcagtagaaatgcctttgaatggttttctgtagctaattctctttaaattttgtcctgctttttttctttatgcagtgctaggtgttttaagttttctagtagtattgcttttgagttacagtataacctgagttactcctctgctctaacattgttgcagaagaactagtttattgttagccaggttgcttgaaaggttgagagtggagtggtttggcatttctgttttaaataaacatttaagctcttaagaaaaaaaa

SEQ ID NO: 2544 - protein, 295 aa, Homo sapien
GCVIFELLTLKRTFDATNPLNLCVKIVQGIRAMEVDSSQYSLELIQMVHSCLDQDPEQRPTADELLDRPLLRKRRREMEEKVTLLNAPTKRPRSSTVTEAPIAVVTSRTSEVYVWGGGKSTPQKLDVIKSGCSARQVCAGNTHFAVVTVEKELYTWVNMQGGTKLHGQLGHGDKASYRQPKHVEKLQGKAIHQVSCGDDFTVCVTDEGQLYAFGSDYYGCMGVDKVAGPEVLEPMQLNFFLSNPVEQVSCGDNHVVVLTRNKEVYSWGCGEYGRGSLVSVHFFTGIQPDFKVVCI

SEQ ID NO: 2545 - DNA, 4355 bp, Homo sapien
  Unsure 4185, 4190: Unknown base
gcagcagcagcaaccccgccgctcgcggtcggccccgggccgcagcatggtcccgagtggcggagtcccccagggcctcggcggccgctctgcctgcgcgctgctcctgctctgctacctgaatgttgtaccatctttgggtaggcagacttccctgacgacatcagtgatacccaaagctgagcagagcgtggcttacaaagactttatttattttactgtctttgaaggaaacgttcgcaacgtttctgaagtctcggttgagtatttatgctctcagccttgtgttgtcaatttggaagcagttgtttcatctgagttcagaagtagcattcccgtgtacaaaaaaaggtggaagaatgagaaacatcttcacaccagcaggacacaaatagtacatgtgaaatttccaagcattatggtttacagagatgattatttcatcagacattccatctctgtatctgcagtgatagtacgcgcctggattactcacaaatacagtggcagagactggaatgttaaatgggaggaaaacttgctccatgctgtagcaaagaattataccctcctgcagaccatcccgccttttgaacgccctttcaaagatcatcaagtgtgccttgagtggaacatgggttatatttggaaccttcgggcaaacaggattccacagtgtcctctggaaaatgatgtggttgccctgcttggctttccttatgcctccagtggagaaaacacaggcattgtcaagaagttcccgaggtttcggaaccgagagctggaggccactcgacgccagaggatggattacccagtgtttactgtttcattgtggctttatttactccattattgcaaggccaacctctgtgggattctgtactttgttgactctaatgagatgtacggcacaccttctgtatttcttacggaagagggctatttgcatattcagatgcatcttgtcaaaggggaagaccttgctgtaaaaactaaattcatcatacctttgaaggagtggtttcgactggatatctcttttaacggaggccagatagtagtaaccactagcattggacaggatttgaaaagctaccacaatcagaccattagcttccgggaggatttccattataatgacacagctgggtacttcattattggagggagcaggtatgtggctggcattgaagggttttttggacccctgaagtactatcgccttcgcagtctgcaccccgcccagatttttaatcccctccttgagaagcaacttgctgaacaaatcaagttatattatgaaaggtgtgctgaggttcaagaaatagtatctgtgtatgcatctgcagcaaagcacgggggcgagagacaagaagcatgccacctccacaactcctacctggacctccagcgcaggtatgggagaccctcgatgtgcagagccttcccctgggagaaggagctgaaagacaaacaccccagcttgttccaggcattgctggagatggatctgctgaccgtgccaaggaaccaaaatgaatctgtatcagaaatcggtgggaagatatttgagaaggctgtaaagagactctctagcattgatggtcttcaccaaattagctctatcgtcccctttctgacggattccagctgctgtggataccataaagcatcctactaccttgcagtcttttatgagactggattaaatgttcctcgggatcagctgcagggcatgttgtatagtttggttggaggccaggggagtgagaggctgtcttcaatgaatcttgggtataaacactaccagggtattgacaactaccccctggactgggaactgtcgtatgcctactacagcaacattgccaccaagacaccccttgaccagcacacactgcaaggagatcaggcatatgttgaaacaattagactaaaagatgatgaaatactcaaggtacaaaccaaagaagatggagatgtctttatgtggttgaagcatgaagctacccgaggcaatgcagcagctcagcaacgattggcccagatgctgttctgggggcagcaaggtgtggccaagaatcccgaagcagcaattgagtggtacgccaagggcgccctggagacggaggatcctgcgttaatctatgactatgccattgtgctattcaagggtcaaggagtaaaaaagaacagacggcttgccttagagctgatgaagaaagcagcttccaagggattgcatcaggcagtcaatggcctgggatggtattaccacaaattcaagaaaaattacgccaaagcagcaaagtactggttaaaagcagaagaaatggggaacccagatgcgtcatacaatcttggagtcctgcatttggatggcatcttccctggagttcctggaaggaatcaaactttagctggtgaatatttccataaggctgcgcaaggtggacacatggaagggaccttgtggtgttctctctactatatcacaggcaacctggagacattccctagagatcctgagaaagctgttgtatgggcaaaacatgtagctgagaaaaatggctacttgggccatgtcatccgcaaaggcctcaatgcctacctggaaggttcatggcatgaagctttgctgtattatgttttagcagcagaaactggaattgaagtgtcacagacaaatttagcacacatctgtgaggagaggccagacctggccaggagatacttgggtgttaactgtgtttggagatactataatttctctgtttttcaaatcgatgctccttcctttgcatatttgaagatgggagacctttactactatggccaccaaaaccagtcacaagacctggagttgtctgtgcagatgtacgcccaagccgccctggatggagactcccagggattttttaacctggccctgctaatcgaggaaggtacgataatcccacaccatatcttggatttcttggaaattgactcaactctccattctaataacatctccattctccaggaactgtacgaaaggtgctggagccacagtaacgaggagtccttcagcccctgctccttggcctggctttacctgcacttgcggcttctctggggtgctatcctgcactcagccctgatctactttctgggaacctttctgctatccatattgatcgcctggactgtgcagtatttccagtctgtctcagcaagcgatccccctccaagaccatcccaggcctccccagacactgccacgtccactgcaagtccagctgtgactccagctgcagatgcctctgaccaagaccagcccacagtaactaataacccggagccacgtgggtgaactgtgcactccagttctctccagatgagagagaatcttttcaacagctggtattgggaagctggggccagggcatgatcctgataaacaccttaaatgtcttgtcaactggatgcaaattttgcaattggtgtcattttttttaaagtcaaattacaaggaagtacccagatcaggcagtggtaataccaaaggtcatcaaacacatacaaggaacatcttgatcatagggcatgtggggaagtttactgggccatcacagacttttgttctagtgattgtatgtattaggagtcatagcatgccctacggcagatctggattcttatacactaagatgtgtcttaagaatcacagtgcgtgcttcatccctttattgaagaacagaaaattatgactactctacaaggtggataatattttggtacctgtgcttgccacagccctgttcctcaaagctgaattgatagatttctctttgacttccaagacctagcagttataaggcaccttgaaataaattgtttgtgcctggaaatgcagggagggcaatagctttgtaaattggtttacatttttctccttgaatttttctagggtcctagtgcttccgaatcatttaatggcattgtcggatatcttttacatttcaattgcaatccatgaaattacatttagaagattcttagtacttaactgtagtcttctccatgaattacacgttagaatagactggcagcaactgaatatgcagcaagtaagcctctagcttatagtttcatccctacccctcatgcctgcgtgagtctgtacagggatattgtgtntgtgngtgtgtgtgtgtgtttagagaggaagaggaagagcagaatgtctgtatactacatgctgctaaggtagtgaataaatcagtaatgcaatattgtgggtccaaactactctttgcactactttatttacagtagtaaataaaattatttttatacaattgactacc

SEQ ID NO: 2546 - protein, 1118 aa, Homo sapien
  Unsure 4185, 4190: Unknown amino acid
QQQQPRRSRSAPGRSMVPSGGVPQGLGGRSACALLLLCYLNVVPSLGRQTSLTTSVIPKAEQSVAYKDFIYFTVFEGNVRNVSEVSVEYLCSQPCVVNLEAVVSSEFRSSIPVYKKRWKNEKHLHTSRTQIVHVKFPSIMVYRDDYFIRHSISVSAVIVRAWITHKYSGRDWNVKWEENLLHAVAKNYTLLQTIPPFERPFKDHQVCLEWNMGYIWNLRANRIPQCPLENDVVALLGFPYASSGENTGIVKKFPRFRNRELEATRRQRMDYPVFTVSLWLYLLHYCKANLCGILYFVDSNEMYGTPSVFLTEEGYLHIQMHLVKGEDLAVKTKFIIPLKEWFRLDISFNGGQIVVTTSIGQDLKSYHNQTISFREDFHYNDTAGYFIIGGSRYVAGIEGFFGPLKYYRLRSLHPAQIFNPLLEKQLAEQIKLYYERCAEVQEIVSVYASAAKHGGERQEACHLHNSYLDLQRRYGRPSMCRAFPWEKELKDKHPSLFQALLEMDLLTVPRNQNESVSEIGGKIFEKAVKRLSSIDGLHQISSIVPFLTDSSCCGYHKASYYLAVFYETGLNVPRDQLQGMLYSLVGGQGSERLSSMNLGYKHYQGIDNYPLDWELSYAYYSNIATKTPLDQHTLQGDQAYVETIRLKDDEILKVQTKEDGDVFMWLKHEATRGNAAAQQRLAQMLFWGQQGVAKNPEAAIEWYAKGALETEDPALIYDYAIVLFKGQGVKKNRRLALELMKKAASKGLHQAVNGLGWYYHKFKKNYAKAAKYWLKAEEMGNPDASYNLGVLHLDGIFPGVPGRNQTLAGEYFHKAAQGGHMEGTLWCSLYYITGNLETFPRDPEKAVVWAKHVAEKNGYLGHVIRKGLNAYLEGSWHEALLYYVLAAETGIEVSQTNLAHICEERPDLARRYLGVNCVWRYYNFSVFQIDAPSFAYLKMGDLYYYGHQNQSQDLELSVQMYAQAALDGDSQGFFNLALLIEEGTIIPHHILDFLEIDSTLHSNNISILQELYERCWSHSNEESFSPCSLAWLYLHLRLLWGAILHSALIYFLGTFLLSILIAWTVQYFQSVSASDPPPRPSQASPDTATSTASPAVTPAADASDQDQPTVTNNPEPRG

SEQ ID NO: 2547 - DNA, 4853 bp, Homo sapien
ttcgccgtttgaattgctgcgggcccgggccctcacctcacctgaggtccggccgcccaggggtgcgctatgccgtcgggaggtgaccagtcgccaccgcccccgcctccccctccggcggcggcagcctcggatgaggaggaggaggacgacggcgaggcggaagacgccgcgccgtctgccgagtcgcccacccctcagatccagcagcggttcgacgagctgtgcagccgcctcaacatggacgaggcggcgcggcccgaggcctgggacagctaccgcagcatgagcgaaagctacacgctggagggaaatgatcttcattggttagcatgtgccttatatgtggcttgcagaaaatctgttccaactgtaagcaaagggacagtggaaggaaactatgtatctttaactagaatcctgaaatgttcagagcagagcttaatcgaattttttaataagatgaagaagtgggaagacatggcaaatctacccccacatttcagagaacgtactgagagattagaaagaaacttcactgtttctgctgtaatttttaagaaatatgaacccatttttcaggacatctttaaataccctcaagaggagcaacctcgtcagcagcgaggaaggaaacagcggcgacagccctgtactgtgtctgaaattttccatttttgttgggtgctttttatatatgcaaaaggtaatttccccatgattagtgatgatttggtcaattcttatcacctgctgctgtgtgctttggacttagtttatggaaatgcacttcagtgttctaatcgtaaagaacttgtgaaccctaattttaaaggcttatctgaagattttcatgctaaagattctaaaccttcctctgaccccccttgtatcattgagaaactgtgttccttacatgatggcctagttttggaagcaaaggggataaaggaacatttctggaaaccctatattaggaaactttatgaaaaaaagctccttaagggaaaagaagaaaatctcactgggtttctagaacctgggaactttggagagagttttaaagccatcaataaggcctatgaggagtatgttttatctgttgggaatttagatgagcggatatttcttggagaggatgctgaggaggaaattgggactctctcaaggtgtctgaacgctggttcaggaacagagactgctgaaagggtgcagatgaaaaacatcttacagcagcattttgacaagtccaaagcacttagaatctccacaccactaactggtgttaggtacattaaggagaatagcccttgtgtgactccagtttctacagctacgcatagcttgagtcgtcttcacaccatgctgacaggcctcaggaatgcaccaagtgagaaactggaacagattctcaggacatgttccagagatccaacccaggctattgctaacagactgaaagaaatgtttgaaatatattctcagcatttccagccagacgaggatttcagtaattgtgctaaagaaattgccagcaaacattttcgttttgcggagatgctttactataaagtattagaatctgttattgagcaggaacaaaaaagactaggagacatggatttatctggtattctggaacaagatgcattccacagatctctcttggcctgctgccttgaggtcgtcactttttcttataagcctcctgggaattttccatttattactgaaatatttgatgtgcctctttatcatttttataaggtgatagaagtattcattagagcagaagatggcctttgtagagaggtggtaaaacaccttaatcagattgaagaacagatcttagatcatttggcatggaaaccagagtctccactctgggaaaaaattagagacaatgaaaacagagttcctacatgtgaagaggtcatgccacctcagaacctggaaagggcagatgaaatttgcattgctggctcccctttgactcccagaagggtgactgaagttcgtgctgatactggaggacttggaaggagcataacatctccaaccacattatacgataggtacagctccccaccagccagcactaccagaaggcggctatttgttgagaatgatagcccctctgatggagggacgcctgggcgcatgcccccacagcccctagtcaatgctgtccctgtgcagaatgtatctggggagactgtttctgtcacaccagttcctggacagactttggtcaccatggcaaccgccactgtcacagccaacaatgggcaaacggtaaccattcctgtgcaaggtattgccaatgaaaatggagggataacattcttccctgtccaagtcaatgttggggggcaggcacaagctgtgacaggctccatccagcccctcagtgctcaggccctggctggaagtctgagctctcaacaggtgacaggaacaactttgcaagtccctggtcaagtggccattcaacagatttccccaggtggccaacagcagaagcaaggccagtctgtaaccagcagtagtaatagacccaggaagaccagctctttatcgcttttctttagaaaggtataccatttagcagctgtccgccttcgggatctctgtgccaaactagatatttcagatgaattgaggaaaaaaatctggacctgctttgaattctccataattcagtgtcctgaacttatgatggacagacatctggaccagttattaatgtgtgccatttatgtgatggcaaaggtcacaaaagaagataagtccttccagaacattatgcgttgttataggactcagccgcaggcccggagccaggtgtatagaagtgttttgataaaagggaaaagaaaaagaagaaattctggcagcagtgatagcagaagccatcagaattctccaacagaactaaacaaagatagaaccagtagagactccagtccagttatgaggtcaagcagcaccttgccagttccacagcccagcagtgctcctcccacacctactcgcctcacaggtgccaacagtgacatggaagaagaggagaggggagacctcattcagttctacaacaacatctacatcaaacagattaagacatttgccatgaagtactcacaggcaaatatggatgctcctccactctctccctatccatttgtaagaacaggctcccctcgccgaatacagttgtctcaaaatcatcctgtctacatttccccacataaaaatgaaacaatgctttctcctcgagaaaagattttctattacttcagcaacagtccttcaaagagactgagagaaattaatagtatgatacgcacaggagaaactcctactaaaaagagaggaattcttttggaagatggaagtgaatcacctgcaaaaagaatttgcccagaaaatcattctgccttattacgccgtctccaagatgtagctaatgaccgtggttcccactgaggttagtctcttgtattaaactcttcacaaaatctgtttagcagcagcctttaatgcatctagattatggagcttttttccttaatccagctgatgagttacagcctgttagtaacatgaggggacattttggtgagaaatgggacttaactccttccagtgtccttagaacattttaattcatcccaactgtctttttttccctaccactcagtgattactgtcaaggctgcttacaatccaaacttgggtttttggctctggcaaagcttttagaaatactgcaagaaatgatgtgtacccaacgtgagcataggaggcttctgttgacgtctccaacagaagaactgtgtttcaagttcaatcctacctgttttgtggtcagctgtagtcctcataaaaagcaaaacaaaaattaggtattttgtcctaaaacacctggtaggagtgtgtgattttttgcattcctgacaaaggagagcacacccaggtttggaggtcctaggtcattagccctcgtctcccgttccctttgtgcacatcttccctctccccattcggtgtggtgcagtgtgaaaagtccttgattgttcgggtgtgcaatgtctgagtgaacctgtataagtggaggcactttagggctgtaaaatgcatgattttgtaacccagattttgctgtatatttgtgatagcactttctacaatgtgaactttattaaatacaaaacttccaggctaaacatccaatattttctttaatgcttttatatttttttaaaatgttaaaacccctatagccaccttttgggaatgttttaaattctccagttttttgttatatagggatcaaccagctaagaaaagattttaagtcaagttgaattgaggggattaatatgaaaacttatgacctcttcctttaggagggagttatctaaaagaaatgtctattaaggtgatatatttaaaaatatttttgggtgttcctggcagtttaaaaaaattggttggagaatttaggtttttattagtaccatagtaccatttatacaaattagaaaatgttatttaacagctgaattatctatacatatctttattaatcactattgttccagcagttttcaagtcaaattaataatcttattagggagaaaattcaattgtaaattgaatcagtataaacaaagttactaggtaacttcatattgctgagagaaatatggaacttacattgttcaattagaatagtgttctccccaaatatttataaaacttctcaagatactgctacgtgtaattttatatgaagataagtgtatttttcaataaagcatttataaattaaaaaaaaaaaaaaaaaa

SEQ ID NO: 2548 - protein, 1139 aa, Homo sapien
MPSGGDQSPPPPPPPPAAAASDEEEEDDGEAEDAAPSAESPTPQIQQRFDELCSRLNMDEAARPEAWDSYRSMSESYTLEGNDLHWLACALYVACRKSVPTVSKGTVEGNYVSLTRILKCSEQSLIEFFNKMKKWEDMANLPPHFRERTERLERNFTVSAVIFKKYEPIFQDIFKYPQEEQPRQQRGRKQRRQPCTVSEIFHFCWVLFIYAKGNFPMISDDLVNSYHLLLCALDLVYGNALQCSNRKELVNPNFKGLSEDFHAKDSKPSSDPPCIIEKLCSLHDGLVLEAKGIKEHFWKPYIRKLYEKKLLKGKEENLTGFLEPGNFGESFKAINKAYEEYVLSVGNLDERIFLGEDAEEEIGTLSRCLNAGSGTETAERVQMKNILQQHFDKSKALRISTPLTGVRYIKENSPCVTPVSTATHSLSRLHTMLTGLRNAPSEKLEQILRTCSRDPTQAIANRLKEMFEIYSQHFQPDEDFSNCAKEIASKHFRFAEMLYYKVLESVIEQEQKRLGDMDLSGILEQDAFHRSLLACCLEVVTFSYKPPGNFPFITEIFDVPLYHFYKVIEVFIRAEDGLCREVVKHLNQIEEQILDHLAWKPESPLWEKIRDNENRVPTCEEVMPPQNLERADEICIAGSPLTPRRVTEVRADTGGLGRSITSPTTLYDRYSSPPASTTRRRLFVENDSPSDGGTPGRMPPQPLVNAVPVQNVSGETVSVTPVPGQTLVTMATATVTANNGQTVTIPVQGIANENGGITFFPVQVNVGGQAQAVTGSIQPLSAQALAGSLSSQQVTGTTLQVPGQVAIQQISPGGQQQKQGQSVTSSSNRPRKTSSLSLFFRKVYHLAAVRLRDLCAKLDISDELRKKIWTCFEFSIIQCPELMMDRHLDQLLMCAIYVMAKVTKEDKSFQNIMRCYRTQPQARSQVYRSVLIKGKRKRRNSGSSDSRSHQNSPTELNKDRTSRDSSPVMRSSSTLPVPQPSSAPPTPTRLTGANSDMEEEERGDLIQFYNNIYIKQIKTFAMKYSQANMDAPPLSPYPFVRTGSPRRIQLSQNHPVYISPHKNETMLSPREKIFYYFSNSPSKRLREINSMIRTGETPTKKRGILLEDGSESPAKRICPENHSALLRRLQDVANDRGSH

SEQ ID NO: 2549 - DNA, 4853 bp, Homo sapien; identical to SEQ ID NO: 2547

SEQ ID NO: 2550 - protein, 1139 aa, Homo sapien; identical to SEQ ID NO: 2548

SEQ ID NO: 2551 - DNA, 2078 bp, Homo sapien
tgggcaattaaccaagccatagccaatgaatatgaagtccggagaaagctgctaataaaacgtttggatgtcactgtacaatcctttggctggtctgacagagctaagagccagacagaaaaattagccaaggtttaccagccgaaacgttcagtcttatcccctaaaactactatttctgttgcccatcttttggctgcaaggcaggacttgtcaaagattttaaggacaagcagcggctctataagagaaaagactgcctgtgccatcaataaggtgttgatgggcagggtgcctgacagaggtggtagacccaatgaaatcgaacctccacccccagagatgccaccgtggcagaagaggcaagatggcccccagcagcaaacaggaggccgagtaggagggagaggtggctatgaacattcctcatacggaggacgaggaggtcatgaacaaggaggcgggagaggtggacgtggtggctatgaccatggtggccgagggggaggaagaggaaataagcatcaaggaggctggacagatggagggagtggtggaggaggtggctaccaagatggtggttatcgagattcaggtttccagccaggtggctatcatggtggccacagcagtggtggctatcaaggcggaggttatggtggcttccaaacatcttcttcatatacaggaagtggataccagggtggtggctaccagcaggacaatagataccaagatggcgggcaccatggtgatcgtggtggtggtcgtggtgggcgaggtggtcgtggaggccgaggtggtcgtgcaggccagggaggaggctggggaggaagagggagccagaattatcaccaagggggtcaatttgaacagcatttccagcatggaggttatcagtataatcattctggatttggacagggaagacattacactagttgaggctaccgaactttacattttgctagagctcaagtaatagaaacttagtttcagaatcctgaattcagcacctattttgaattaatgtgagaccacaggtggcaggcagattcctgcttggcataagcatttgtaggtcttcattcaattctgttagatttttttattggacttacataatgccgtttatttgagaaacacataacatctctccttcctatgaaaaattttttaaaaggtggttaaaattgcctttaattgcccagtagactaattccacagtcagaacatgcaaacttttttgaagaaattacttgaataagtagttttcatgttttcaatatgcagttttgaaaatgaggattcacctagacttttttagatttactactaggaaaccttcctcatatgaataaccatttatatgtgttttgcttaaagtattccaatgcctattttccaagcacagttctgccccccggttgacttttatgccacgtgtgcttcatgatggaacttttaggtcagttcctattaaatgagctcttctgcagatagcacattcagtagccttattttgttgatggaatactgtatcatatgctcaactctgaaaaccttgaacacggccaaaatccataaagattataaaagcaaactaagttgtgaagctatagtacatgtaggcatttagttaagtatagcaattcaaactgacctgcatccatccaaaacaaattcctccttcaaccttatttttacttgaaatttgctagaagaaatagcaaaccgaaatttgttttatgcatgagttaataccactggctcagcaaatacaagttagtttgctttaagcaggtaactttttttgtaatggaagaaatgcactacaaagttaagacagatttttgctaagtgcaggaggccctttattattgctgcagaaaacaaaagcctggctgagttgatgttttacattctcccttactgaaatctacatgacatgatgcttcttgctgggtttttgtacatgtaaacattgtcaagctgtgaaagaaaatggctggaggtgtgctttgtgtgaaaggtgagcaataaagtatctgttaagttcaaaaaaaaaaaaaaaaaaa

SEQ ID NO: 2552 - protein, 314 aa, Homo sapien
WAINQAIANEYEVRRKLLIKRLDVTVQSFGWSDRAKSQTEKLAKVYQPKRSVLSPKTTISVAHLLAARQDLSKILRTSSGSIREKTACAINKVLMGRVPDRGGRPNEIEPPPPEMPPWQKRQDGPQQQTGGRVGGRGGYEHSSYGGRGGHEQGGGRGGRGGYDHGGRGGGRGNKHQGGWTDGGSGGGGGYQDGGYRDSGFQPGGYHGGHSSGGYQGGGYGGFQTSSSYTGSGYQGGGYQQDNRYQDGGHHGDRGGGRGGRGGRGGRGGRAGQGGGWGGRGSQNYHQGGQFEQHFQHGGYQYNHSGFGQGRHYTS

SEQ ID NO: 2553 - DNA, 2651 bp, Homo sapien
agagcagtaagcttgtgataaaggccaattccaggtagctcttgaaggtgatagccatctactttccagtggctgccaaccacagggagtgccagttaacactggaaggattaaggcaaggtcccttctcttgagactcccctctgagatctgaaaaatgaagtggcttaggaacatcagcagtgaagaactgccaagagttggtgaaggttgtctcttccgagggccttctgaagacagggctcttgaacagacaagtggaagggctgtaccagggataaaggaaagaagtgcctgtccagcagggagcttgaatttaagttccatgtatgaagtcattggctctatctgcatttttctgtcattctcttcatttgttttaaggtggaaaattttcttacagttgatgcaaagtatcaactactttaccctaccttctccccttttagatgggttcttcctgagttttggagtcttgtatgattatcagtattcccctgtcaaaatcaaatctattcaggtttcttcactgttgagaacacctaaatgtttttatttttgagaagtggggacagagtctcactatgtcacccaggctggagtgcaatggcatgatctcagctcactgcaaccttcgcctcctgggttcaagcgattctcctgcctccgcctcctgagtagctgggattataggcacgcaccaccacgcccagctaattttttgtatttttagtagagacagagtttcaccatgttggccaggctggtcttgaactcctgaccttgtgatccacccacctcggcctcccagagtgctgggattacaggcatgagccaccacgcttggctaagaacacctaaatttttatgtttcttggctcaaaaaccagttccatttctaatgttgtcctcacaagaaggctaattggtggtgagacagcaggggaggaggaagagctgtggtttgtaacttgttcaactcaggcaataagcgattttagctttatttaaagtcttctgtccagctttaagcactttgtaagacatggctgaaagtagcttttctatcagaattgcagatagtcatgttgggctaacagtcaattggatatattcctttacctcacatgaccccagcaactgtggtggtatctagaggtgaaacaggcaagtgaaatggacacctctgctgtgaatgttttagagaaggaaattcaaaaaatgttgtaactgaaagcactgttgaatatgggtatcggctttctttttcactttgactcttaacattatcagtcaacttccacattaatgaaagttgaccatagttatttccaaataaaaagaaaccaactcttaccaggtcttggactgtgatgtcatattattcagttttatgcttgttcctgagcagaactcataagagtgacatagtcagctgctgacggcacctcagccacgccactcttactcagttcagtgggtgtgcttgcgtggtaggatgtggtgcagccctctctacgctcttctatttttggtatatttcctatctaaccttcaaatagcttccaattctttttttcttggactggcttcattctgaatttgtgctaaaataatctttcataaagagacctcagtttatagcgtaacagactacacaatgcactgatgttttcataatgtttaagggacccactgcaagaagcttgctgcctccttttaattgtattcatttagattttgattttccatgttaagaaggtgaggtccatgttggtgcccttcagagtagagaaccatgtaaacattaggaatgaacagaggccttaggaatgaatagagagtttgccttatacaatttcctgttacaaagctctccctctcatgcaaagtagggaacaccttttgagcatctttgaatttgacaaatggtgctgttgcaaacactttttttttgagatgaagtctcgcggttgtcacccgggctggagtgcagtggcgtgatctcggctcactgcaacttccacctcctgggttccagcagttctcctgcctcagcctcccaagtagctgagattacaggcgcctgccaccccacctggctgatttttgtaattttagtagagacggggtttcaccatgttggccaggctgattaactcctgacctcaggtgatccacctttctcggcctcccaaagtgctgggattacgggtgtgagccaccgtgcccggcctgcaaacacattttaattgacaacactagggctgttgtacaaaatagtaatgatagccatggaagttttaccttattctgtgagaagtgttcttaaacttattaagtgtctaaactaaggtttagtgcttttttaaaggaaagttgtcccaggattcatcctaaagaaagcaaaagttaattcaactgatccaccaatggaattagatgggtagagttgggttcttgagttttaccaccacttagttcccactgaattttgtaacttcctgtgtttgcatcctctgttcctattctgcccttgctctgtgtcatctcagtcatttgacttagaaagtgcccttcaaaaggaccctgttcactgctgcacttttcaatgaattaaaatttatttctgttctaaaaaaaaaaaaaaa

SEQ ID NO: 2554 - protein, 134 aa, Homo sapien [sequence omitted]

SEQ ID NO: 2555 - DNA, 4774 bp, Homo sapien
  Unsure 3350-3629: Unknown base
gctcgagcggcgcagtgtgctgaagaatttttttttactggaataaaaaccttctagtttgaacaaaaatatacaacagggaggacaacacagagtgccaactcctccaggttcaggaagaactttctaactgcttacctcctagtaacagcagttctgacagcccaatcccaaaagacccacacatccagcagacgtgaagccaacaggatgtgtatgtgaggggagggccaacgataagcaggatgtctatatatttgtattgacagttgtcttatctcattccatagttctccaaatttgattataaatcccttgaaggcagagacctcattagtatctaaactccagccaccggccttcaaggcacggctttttattccttcggctggtcggcctctcgcccttcagctacctgtgcgtccctccgtcccgtcccgtcccggggtcaccccggagcctgtccgctatgcggctcctgcctctagccccaggtcggctccggcggggcagcccccgccacctgccctcctgcagcccagcgctgctactgctggtgctgggcggctgcctgggggtcttcggggtggctgcgggaacccggaggcccaacgtggtgctgctcctcacggacgaccaggacgaagtgctcggcggcatgacaccactaaagaaaaccaaagctctcatcggagagatggggatgactttttccagtgcttatgtgccaagtgctctctgctgccccagcagagccagtatcctgacaggaaagtacccacataatcatcacgttgtgaacaacactctggaggggaactgcagtagtaagtcctggcagaagatccaagaaccaaatactttcccagcaattctcagatcaatgtgtggttatcagaccttttttgcagggaaatatttaaatgagtacggagccccagatgcaggtggactagaacacgttcctctgggttggagttactggtatgccttggaaaagaattctaagtattataattacaccctgtctatcaatgggaaggcacggaagcatggtgaaaactatagtgtggactacctgacagatgttttggctaatgtctccttggactttctggactacaagtccaactttgagcccttcttcatgatgatcgccactccagcgcctcattcgccttggacagctgcacctcagtaccagaaggctttccagaatgtctttgcaccaagaaacaagaacttcaacatccatggaacgaacaagcactggttaattaggcaagccaagactccaatgactaattcttcaatacagtttttagataatgcatttaggaaaaggtggcaaactctcctctcagttgatgaccttgtggagaaactggtcaagaggctggagttcactggggagctcaacaacacttacatcttctatacctcagacaatggctatcacacaggacagttttccttgccaatagacaagagacagctgtatgagtttgatatcaaagttccactgttggttcgaggacctgggatcaaaccaaatcagacaagcaagatgctggttgccaacattgacttgggtcctactattttggacattgctggctacgacctaaataagacacagatggatgggatgtccttattgcccattttgagaggtgccagtaacttgacctggcgatcagatgtcctggtggaataccaaggagaaggccgtaacgtcactgacccaacatgcccttccctgagtcctggcgtatctcaatgcttcccagactgtgtatgtgaagatgcttataacaatacctatgcctgtgtgaggacaatgtcagcattgtggaatttgcagtattgcgagtttgatgaccaggaggtgtttgtagaagtctataatctgactgcagacccagaccagatcactaacattgctaaaaccatagacccagagcttttaggaaagatgaactatcggttaatgatgttacagtcctgttctgggccaacctgtcgcactccaggggtttttgaccccggatacaggtttgacccccgtctcatgttcagcaatcgcggcagtgtcaggactcgaagattttccaaacatcttctgtagcgacctcacacagcctctgcagatggatccctgcacgcctctttctgatgaagtgattgtagtaggtgtctgtagctagtcttcaagaccacacctggaagagtttctgggctggctttaagtcctgtttgaaaaagcaacccagtcagctgacttcctcgtgcaatgtgttaaactgtgaactctgcccatgtgtcaggagtggctgtctctggtctcttcctttagctgacaaggacactcctgaggtctttgttctcactgtattttttttatcctggggccacagttcttgattattcctcttgtggttaaagactgaatttgtaaacccattcagataaatggcagtactttaggacacacacaaacacacagatacaccttttgatatgtaagcttgacctaaagtcaaaggacctgtgtagcatttcagattgagcacttcactatcaaaaatactaacatcacatggcttgaagagtaaccatcagagctgaatcatccaagtaagaacaagtaccattgttgattgataagtagagatacattttttatgatgttcatcacagtgtggtaaggttgcaaattcaaaacatgtcacccaagctctgttcatgtttttgtgaattctaggctggtgctgcactgaaatagagcagtaagcttgtgataaaggccaattccaggtagctcttgaaggtgatagccatctactttccagtggctgccaaccacagggagtgccagttaacactggaaggattaaggcaaggtcccttctcttgagactcccctctgagatctgaaaaatgaagtggcttaggaacatcagcagtgaagaactgccaagagttggtgaaggttgtctcttccgagggccttctgaagacagggctcttgaacagacaagtggaagggctgtaccagggataaaggaaagaagtgcctgtccagcagggagcttgaatttaagttccatgtatgaagtcattggctctatctgcatttttctgtcattctcttcatttgttttaaggtggaaaattttcttacagttgatgcaaagtatcaactactttaccctaccttctccccttttagatgggttcttcctgagttttggagtcttgtatgattatcagtattcccctgtcaaaatcaaatctattcaggtttcttcactgttgagaacacctaaatgtttttatttttgagaagnnnnnnnnnnnnnnnnnnnnnnnnnnnnnnnnnnnnnnnnnnnnnnnnnnnnnnnnnnnnnnnnnnnnnnnnnnnnnnnnnnnnnnnnnnnnnnnnnnnnnnnnnnnnnnnnnnnnnnnnnnnnnnnnnnnnnnnnnnnnnnnnnnnnnnnnnnnnnnnnnnnnnnnnnnnnnnnnnnnnnnnnnnnnnnnnnnnnnnnnnnnnnnnnnnnnnnnnnnnnnnnnnnnnnnnnnnnnnnnnnnnnnnnnnnnnnnnnnnnnnnnnnnnnnnnnnnnnnnnntaagaacacctaaatttttatgtttcttggctcaaaaaccagttccatttctaatgttgtcctcacaagaaggctaattggtggtgagacagcaggggaggaggaagagctgtggtttgtaacttgttcaactcaggcaataagcgattttagctttatttaaagtcttctgtccagctttaagcactttgtaagacatggctgaaagtagcttttctatcagaattgcagatagtcatgttgggctaacagtcaattggatatattcctttacctcacatgaccccagcaactgtggtggtatctagaggtgaaacaggcaagtgaaatggacacctctgctgtgaatgttttagagaaggaaattcaaaaaatgttgtaactgaaagcactgttgaatatgggtatcggctttctttttcactttgactcttaacattatcagtcaacttccacattaatgaaagttgaccatagttatttccaaataaaaagaaaccaactcttaccaggtcttggactgtgatgtcatattattcagttttatgcttgttcctgagcagaactcataagagtgacatagtcagctgctgacggcacctcagccacgccactcttactcagttcagtgggtgtgcttgcgtggtaggatgtggtgcagccctctctacgctcttctatttttggtatatttcctatctaaccttcaaatagcttccaattctttttttcttggactggcttcattctgaatttgtgctaaaataatctttcataaagagacctcagtttatagcgtaacagactacacaatgcactgatgttttcataatgtttaagggacccactgcaagaaggttgctgcctccttttaattgtattcatttagattttgattttccatgttaagaaggtgaggtccatgttggtgcccttcagagtagagaaccatgtaaacattaggaatgaacagaggccttaggaatgaatagagagtttgccttatacaatttcctgttacaaagctctccctctcatgcaaagtagggaacaccttttgagcatctttgaatttgacaaatggtgctgttgcaaacactttttttttgagatgaagtctcgcggttgtcacccgggctggagtg

SEQ ID NO: 2556 - protein, 552 aa, Homo sapien; identical to SEQ ID NO: 953
  Unsure 3350-3629: Unknown amino acid

SEQ ID NO: 2557 - DNA, 3911 bp, Homo sapien
  Unsure 432, 847, 904, 1401, 1600, 1631: Unknown base
aaaccctgttcttgggtgggtgtgggtataatactaagttgagatgatatcatttacgggggaaggcgctttgtgaagtaggccttatttctcttgtcctttcgtacagggaggaatttgaagtagatagaaaccgacctggattactccggtctgaactcagatcacgtaggactttaatcgttgaacaaacgaacctttaatagcggctgcaccattgggatgtcctgatccaacatcgaggtcgtaaaccctattgttgatatggactctagaataggattgcgctgttatccctagggtaacttgttccgttggtcaagttattggatcaattgagtatagtagttcgctctgactggtgaagtcttagcatgtactgctcggaggttgggttctgctccgaggtcgccccaaccgaaatttttaatncaggtttggtagtttagggcctgtgggtttgttaggtactgtttgcattaataaattaaagctccatagggtcttctcgtcttgctgtgtcatgcccgcctcttcacgggcaggtcaatttcactggttaaaagtaagagacagctgtaccctcgtggagccattcatacaggtccctagttaaggaacaagtgattatgctacctttgcacggttagggtaccgcggccgttaaacatgtgtcactgggcaggcggtgcccctaatactggtgatgctagaggtgatgtttttggtaaacaggcggggtaagatttgccgagttccttttactttttttaacctttccttatgagcatgcctgtgttgggttgacagtgagggtaataatgacttgttggttgattgtagatantgggctgttaattgtcagttcagtgttttaatctgacgcaggcttatgcggaggagnatgttttcatgttacttatactaacattagttcttctatagggtgatagattggtccaattgggtgtgaggagttcagttatatgtttgggattttttaggtagtgggtgttgagcttgaacgctttcttaattggtggctgcttttaggcctactatgggtgttaaattttttactctctctacaaggttttttcctagtgtccaaagagctgttcctctttggactaatagttaaatttacaaggggatttagagggttctgtgggcaaatttaaagttgaactaagattctatcttggacaaccagctatcaccaggctcggtaggtttgtcgcctctacctataaatcttcccactattttgctaaaagagcacacccgtctatgtacggaattccgggaagaacttaagcgacaatcttgaacaccccttctcatgtgatgtgaaatgaaaccatttggaaaagtttcttctagccagtaatagattttttntttaattgctctgccttgtgccgagagatgttcttttaagatgaatcttttgatgtctgataccaccaaatataggtggtagggagagttggaggctggccctttgagcaggccattagcttacttgctgggcatttccgatagcttattgcctacccttttgctggaaacaagctgatttgaaaaaccaaatctatgnagactgcagctaaggattttatcggtagacntaagagcttttgtccttgtggatattttagtggaaccacatcagtctcaatactgtcattttacactgactcagagcagctgacttcattccttgccacgatatatatttaaggcaggcattgtaacagacataaagacaacttatctgtttcagcaggaaggattcagtttatgaactctcagaccagatcatgttgaacaaggagactttgatgtgtgtcatgaggaaactcattctttacttcccagtcaatttaaaggccagctatcctgagctactcgaatgaatgcactggttaaacattggaaatagtttgtttatatccttgtctctctctaggccaattgtgattacatgactcgactctacatctcgtcaaacaaggcctaggtctggttgctgtagactgctcgccctcaacaaataaaatctggttgactagcctccttgtatatacaactattatttgttaagaagaaattatcgtcaattttctactaccttccaattgtcagctctttttttcctctctggtttttcctacactttacagaaaaagacattgatctatactgccattccctctaatcctgccatactcagtcaaaaggaatgacttaagatgaagatgatcatctgctcgagtcaaaatatacattgtatataagaattggtgattagaaaagcaaaaaacctaaaacttaaatctaggagtctgtatactgtctccatgtctccatgcctcagatctcatctaaatctttgaacagcaccattcaaccaatctgaggccttgacttgcttgtaagatgattctcagagatcggctgagttaaaaaagatgacgacttgattaccaaagaaagtagggccaactttgacaaatctggctctgctgaccctgtcactcccagatgtagcatagactcctaaacagaacctcaagtctgattgaggataaggccttctcctgagctgaaagttctttggcagatgagcaagaaactgaaagctgatgtacctgactggctctgtaagatcagaaaactgtatccagaataagccctatggattaacccctgagtacccagagtaaaaactaatttacagaacttccttattgatctgctggttcttccagatcatattctggctattggtatggctggcctttctgaaggtaccctgcttgtctattttcctgactcagctcttgcctgcctttttcacatgttgctgcaattagactcaccgtgaggactacagtcaatttcagtctatcttgtgcccaatacaacaaggatttttaatagtaacaacccacacctcacccactaggactcaatgttcacaacaggaaggaccattgctgcatactccttgaccagcaacttttttgaagatatttttaagtgcagagtaggcctctattcctgtatgtaattgttcattttcagcacctggaacctcatctatcgggtctggaaggaatacagcagttcgaaagccgcgtccatttctctccttcagtagtgcagaaatgagtccgattcaccagtacacacagaactgtaccagttcaacctagcaaaagaagaaaagtttccactgtacttaaaatttacagctgactcaaattgcctcacagaattacttgatgtagaaggctagtcgtcttacttcggatcagcaggacagttgggctctcagactcatgaccactgagtttgcttgtgttgaaactgtggtttcatccaacatatgctattggacatgattattattccattcaaatggattacagacttcttgaggacaggacaaacttatctctcatggtgtttttttagaatacttttataaccaaggaagaaaccatgccagctgttaccattcaacttcttaagcagagattaagctttttcatatctgttcttatcctggacatcagtagtttttaattgcccagcatccgttccatcttgtaacaactccctgatgtttcttaaaaccacctcttcctattttcagtctgtggtttggacagtctgacccaaccttgagctttgtgggtgaacatgtaattcagacctcatcaatcagcaaatccatctgaactgtggaggagaagctctctttactgagggtgctttagctttgtaggatgaaaacctcaaactaacagggcctaccatgtagagaatgaagccagtgcaggggaaagcagagccaaaatatggagagacttgaatcctgatgacagcgtttgtgcccctgg

SEQ ID NO: 2558 - DNA, 1344 bp, Homo sapien
gtctagtttatacccgggtccaggactggggcatggccactcccctggcctgcacccctacactgctctacagccccacctgccctgtagccctcagtatctcactcacccagctcaccctgcccaccccatgcctcacatgccccggcctgccgtcttccctgtgcccagctctgcatacccacagggtgtgcatcctgcattcctaggggctcagtacccttattcagtgactcctccctcacttgctgccactgctgtgtctttccccgttccttccatggcacccatcacagtacatccctaccacacagagccagggcttccactgcccaccagtgtggcctgtgagttgtggggccagggaacagtgagcagtgtccatccagcatccacgtttccagccatccaaggtgcctcactgcctgccctgaccacacagcccagccctctggtgagcggaggttttccaccgcccgaggaggagacacacagtcagccagtcaatccccacagcctgcaccacctgcatgctgcctaccgtgtcggaatgctggcactggagatgctgggtcgccgggcacacaacgatcaccccaacaacttctcccgctcccccccctacactgatgatgtcaaatggttgctggggctggcagcaaagctgggagtgaactacgtgcaccagttctgtgtgggggcagccaagggggtgctgagcccgtttgtgctgcaggagatcgtcatggagacgctgcagcggctgagtcccgctcatgcccacaaccacctgcgtgccccggccttccaccaactggtgcagcgctgccagcaggcatacatgcagtacatccaccaccgcttgattcacctgactcctgcggactacgacgactttgtgaatgcgatccggagtgcccgcagcgccttctgcctgacgcccatgggcatgatgcagttcaacgacatcctacagaacctcaagcgcagcaaacagaccaaggagctgtggcagcgggtctcactcgagatggccaccttctccccctgagtctttcacccttagggtcctatacagggacccaggcctgtggctatgggggcccctcacacagggggagtgaaacttggctggacagatcatcctcactcagttccctggtagcacagactgacagctgctcttgggctatagcttggggccaagatgtctcacaccctagaagcctagggctgggggagacagccctgtctgggagggggcgttgggtggcctctggtatttatttggcatttataaatatataaactccttttttactctagtcgaaaaaaaaaaaaaaa

SEQ ID NO: 2559 - DNA, 6578 bp, Homo sapien
ggtgaacagctcaaatccattttttacatcacagaccaaagccaatgggaatcctgcttgttcggcccagttgcagcatgtctcgccacccatttttccagctcatttagcaagtgtgtcaactccattgttgtcctcaatggaaagtgtcataaatccaaatataacttctcaggataaaaatgaacaaggtggtatgttatgttcccaaatggaaaatttacctagtactgccttgccagcacaaatggaagatctaaccaaaacagttctgcctttgaatattgacagtggctcagatcctttccttcctttacctgcagaaagtagttcaatgtctctcttcccttcaccagcagatagtgggactaattctgttttttcccaactggaaaataatacaaatcattattcctcacagattgaaggaaacactaattcctcctttctaaaggggggtaatggtgaaaatgcagtttttccttcacaagtgaatgttgcaaataacttcagtagcaccaatgcccaacagtctgcacctgaaaaagttaaaaaagaccgtgggcggggcccaaatgggaaggaaagaaaacctaagcacaacaaaagggctaaatggcctgcaattatcagagatgggaaatttatctgtagcaggtgttacagggcttttactaatcccagatcactgggtgggcacttatccaagcgatcttactgtaaaccactggatggagccgaaattgctcaagaacttctacagagtaatggacagccttctcttcttgccagcatgattctctccacaaatgcagtaaatttgcagcagccacaacaatctaccttcaatccagaagcatgttttaaagatccatcatttctacagcttcttgctgaaaatcgctcgccagcatttttaccaaatacatttcctcgatctggtgtgactaactttaataccagtgtcagtcaagaaggtagtgaaattattaaacaggctttggaaactgctggcattcccagtacatttgagggtgccgaaatgctttctcatgtttcaacaggttgtgtctctgatgcatcacaagtaaatgcaacggtgatgccaaatccaactgtaccacccctgttgcacactgtatgccatccaaacaccttgctgaccaaccagaataggacgtcaaactccaaaacttcctccattgaggaatgtagcagcttgcctgtttttccaacgaatgacttactactgaagactgttgaaaatggtttgtgctctagttcatttcctaattctggtgggccatcacaaaattttaccagtaacagttctcgtgtttctgttataagtggtcctcagaacacaagatccagtcatttaaataaaaagggaaacagtgcttctaagagaagaaagaaagttgctcctccactaattgcacctaacgcttcccaaaacttggtaacaagtgacttaacaacaatgggactcatagcaaagagtgttgaaatcccaactactaaccttcattcaaatgtaattccaacttgtgaacctcagagtttggtggaaaatctaacacagaaattaaataatgttaacaatcagttatttatgactgatgtaaaagagaatttcaaaaccagtcttgagtcccatacagtgttagcccctttaacattaaaaactgaaaatggtgattcccaaatgatggctttgaattcatgcacaacttcagtaaattctgatttgcagatttctgaagacaatgttatacaaaactttgaaaagactcttgaaattattaaaactgctatgaattctcaaatacttgaggtaaaaagtggatctcagggtgctggtgaaacttcacaaaatgctcaaataaattataacattcagcttccttcagtaaacactgtgcaaaataacaaattacccgattcttctccgttttcctcctttataagtgtcatgccaacaaaaagtaacattcctcagtctgaagtatcacataaggaggatcaaatacaggaaattttagaaggcttacagaaattaaaattagaaaatgacctatccactccagcatcccaatgtgtactgataaatacatcagtgacactgactcccacgcctgttaaatcaactgcagatatcacagttattcagccagtttctgaaatgataaacattcaatttaatgacaaagttaataaaccctttgtgtgtcaaaaccaaggctgtaactacagtgctatgacaaaggatgcactatttaagcactatggtaaaattcatcaatacactccagaaatgattcttgaaattaagaagaatcaattgaaatttgctccctttaaatgtgtagtacctacatgtacaaaaacatttacaagaaattctaacctccgggcacactgtcagttggtgcatcattttacaactgaagaaatggtaaagttaaaaattaaaaggccttatggaagaaaatctcagagtgaaaatgtgccggcctcacgaagtacacaagtgaaaaaacagctagctatgacagaggaaaataaaaaggaatctcagcctgctttagaattgagagcagagacccaaaatacccacagtaatgtagcagtgatcccagaaaaacaacttatagaaaaaaaaagtcctgacaaaacagaaagttctttacaagtgattacagttacttcagaacaatgtaatacaaatgcactcacaaacacacaaaccaaaggacggaagattaggaggcataaaaaagaaaaggaggagaaaaaacgaaagaagccagtttcccaatcccttgagtttccaacaagatacagtccttacagaccttatcgatgtgttcaccagggatgctttgctgcctttacgatacagcaaaatttgattctccattaccaggctgtacacaaatcagatctacctgcattttcagcagaggtcgaagaggaaagtgaagctggtaaagaaagtgaagaaactgaaactaaacaaactttgaaagaatttcgatgtcaggtaagtgactgttctcgaattttccaagcaattactggcctaatacaacactacatgaaacttcatgaaatgactcctgaagaaattgaaagtatgactgcttcagtggatgttgggaagtttccatgtgaccagttagagtgtaaatcttcatttactacatatttgaactatgttgttcatctagaggcagaccacgggattggactaagggcaagtaaaacagaagaagatggtgtatacaaatgtgattgtgaaggctgtgaccgtatatatgcaacccggtcgaatctcctccgacacatttttaataagcataatgacaaacataaggctcatttgattcgtccaagaagattaacaccaggccaggaaaatatgtcaagcaaggcaaaccaagaaaaatcaaagtctaaacatcgggggacgaagcacagcagatgtggaaaggaaggaataaaaatgcccaagaccaaacgaaagaaaaaaaataatttagaaaacaagaatgcaaagattgtgcagattgaagaaaataagccttattctctgaaacgtgggaagcatgtatattctataaaggctagaaatgatgccctgtctgagtgtacaagcagatttgtaacccagtatccatgtatgataaagggatgtacttcagttgttacaagtgaaagcaatataattagacattataagtgccataaattatctaaggcatttacatcacaacaccgaaatcttcttattgtattcaaacggtgttgcaactcacaagtaaaggaaacgtctgagcaagaaggtgctaagaatgatgtgaaagattctgacacgtgtgtatcagagagcaatgataattcaagaacaacagctacagtttcacaaaaggaagttgaaaaaaatgaaaaagatgaaatggatgaactaacagaattgtttattacaaaattaataaatgaagatagcacaagtgtagagacccaagctaatacttcttcaaatgtaagtaatgattttcaggaagataacctctgccagtcagaaagacaaaaagcaagtaatttgaagagagttaataaggaaaaaaatgtctcacaaaataaaaaaaggaaagttgaaaaagctgaaccagcatcagcagctgagttaagtagcgtgcgtaaagaagaagaaactgctgttgccattcaaaccattgaggagcatcctgcatcttttgactggagctcttttaagccaatgggatttgaagtatcatttctgaagtttcttgaggagtctgcagtgaagcagaagaaaaatactgacaaagaccatccgaatactggaaacaaaaaaggatcccattcaaattcaagaaaaaatattgataagactgctgtgactagtggaaatcatgtatgtccttgtaaagaaagcgaaacgtttgtacagtttgccaatccatcacagcttcagtgcagtgataatgtaaaaattgttttagacaagaatcttaaagattgcactgagcttgtcttaaagcaacttcaggaaatgaaacctaccgtcagtctgaaaaaacttgaagtacattcaaatgatccagatatgtctgttatgaaagatatcagtataggtaaagccacaggcagaggtcagtactgataattaatgtagtataaatacatcatttaccattttattttaaataggaagccatcaagcatgctagaattgtgaaactttcattatatttttttgttgttgacatgaattaacctggccaaaaacaaaaaagaaaaaaaaaacatgacatttgtcatgtaaaacttttttttatccctatgggacttgaggaacagaatcagtacttcagttattgtaaatagtgagctaaacctcaaatttctatcacccagttgcccttttcatgaactaaacaattatctgtgtgattggtatgtttcaccaggtcactgctcatgtataacagtactctttatttgtagataccttttttgtatatatttattattgtaaatcatgtgctgccaccagcagtctgtaagtctaaactattaaatgacacatttatatttggaattttaatttttaactaagcgatcaagttttttaaattgttcttttattgttttaaattaagaactttttgaactaaaaccagaaactctgccatagttcattgatttttacatgaaacatttatttacaagatgatatcaagattacttttcacaaaataggcacattatatcaacactttgctctgctttgtaaatttgccatccaggattttggggtggtattcatgtgaaattaaagcagattctctagcagtttcctatagctacagtttttttttttcattgcttctaattggatatagttactatgagtccatgaaatacaatggaaatgtgaataaagaatttactacattgaagattttaaacatttggtattaaaaaaaaatcctttgtgaatgtgatagaaaactagtagtgtggagcagtgtaaatatttgaggtggtgatttgtgaagtagcccagtattgccttaaataaaatcacatttcatttcttgttttatacatgtgatcttataaagattttttgttttgttttgttttccattttctgagatttatagattggtgtatagctttaaactgtataaagttttgtggaaagatttttttaaacatttttataaatcttaaaattgatatcatcaaagtgagcccatcttgtgtttataaaatacaagagtccttaacatttataattacatagataaaacactttctataaggaagttggatgttttgattttactgtttatagatgttagattgtacagatttgtctgtatttctcaccatatctaatgatacttttttcattagattggtcttcaagaacagtattagttataattattttggttattcagtatatagttagctcttacagtttagctttattcaccatatttatactgtggattcacagcgagaggtagaggttattccaggagagttgatgaccttcatttaaagtccaactaaaatcagtagtagaaacataagaaaacatctttgcaatatttacttttgtttctgtttgccgtaaatagtaacattgtttttttttattttgtgtttgttataaaacagttgcattcacaatattattggcctgagatattgatgatattgtgatggtatgaaaatgtgtacattccctgtgcaacatcagatttgcaggaaaaatgaagcacttactgaaatcgctggtactctgaataaataagcatggtcaaggagtgaactattttcttttggaaatttctttttaatttttattattaaagtattttatttttagggccttttgggttttattgaatagttcatttcacctgtttaagacttactaccaataagcataaaacctgacacgttaaaatccctgccctttggtgagcccactgttatttattaaaataaaagttattttatgggtgatt

SEQ ID NO: 2560 - protein, 1563 aa, Homo sapien
VNSSNPFFTSQTKANGNPACSAQLQHVSPPIFPAHLASVSTPLLSSMESVINPNITSQDKNEQGGMLCSQMENLPSTALPAQMEDLTKTVLPLNIDSGSDPFLPLPAESSSMSLFPSPADSGTNSVFSQLENNTNHYSSQIEGNTNSSFLKGGNGENAVFPSQVNVANNFSSTNAQQSAPEKVKKDRGRGPNGKERKPKHNKRAKWPAIIRDGKFICSRCYRAFTNPRSLGGHLSKRSYCKPLDGAEIAQELLQSNGQPSLLASMILSTNAVNLQQPQQSTFNPEACFKDPSFLQLLAENRSPAFLPNTFPRSGVTNFNTSVSQEGSEIIKQALETAGIPSTFEGAEMLSHVSTGCVSDASQVNATVMPNPTVPPLLHTVCHPNTLLTNQNRTSNSKTSSIEECSSLPVFPTNDLLLKTVENGLCSSSFPNSGGPSQNFTSNSSRVSVISGPQNTRSSHLNKKGNSASKRRKKVAPPLIAPNASQNLVTSDLTTMGLIAKSVEIPTTNLHSNVIPTCEPQSLVENLTQKLNNVNNQLFMTDVKENFKTSLESHTVLAPLTLKTENGDSQMMALNSCTTSVNSDLQISEDNVIQNFEKTLEIIKTAMNSQILEVKSGSQGAGETSQNAQINYNIQLPSVNTVQNNKLPDSSPFSSFISVMPTKSNIPQSEVSHKEDQIQEILEGLQKLKLENDLSTPASQCVLINTSVTLTPTPVKSTADITVIQPVSEMINIQFNDKVNKPFVCQNQGCNYSAMTKDALFKHYGKIHQYTPEMILEIKKNQLKFAPFKCVVPTCTKTFTRNSNLRAHCQLVHHFTTEEMVKLKIKRPYGRKSQSENVPASRSTQVKKQLAMTEENKKESQPALELRAETQNTHSNVAVIPEKQLIEKKSPDKTESSLQVITVTSEQCNTNALTNTQTKGRKIRRHKKEKEEKKRKKPVSQSLEFPTRYSPYRPYRCVHQGCFAAFTIQQNLILHYQAVHKSDLPAFSAEVEEESEAGKESEETETKQTLKEFRCQVSDCSRIFQAITGLIQHYMKLHEMTPEEIESMTASVDVGKFPCDQLECKSSFTTYLNYVVHLEADHGIGLRASKTEEDGVYKCDCEGCDRIYATRSNLLRHIFNKHNDKHKAHLIRPRRLTPGQENMSSKANQEKSKSKHRGTKHSRCGKEGIKMPKTKRKKKNNLENKNAKIVQIEENKPYSLKRGKHVYSIKARNDALSECTSRFVTQYPCMIKGCTSVVTSESNIIRHYKCHKLSKAFTSQHRNLLIVFKRCCNSQVKETSEQEGAKNDVKDSDTCVSESNDNSRTTATVSQKEVEKNEKDEMDELTELFITKLINEDSTSVETQANTSSNVSNDFQEDNLCQSERQKASNLKRVNKEKNVSQNKKRKVEKAEPASAAELSSVRKEEETAVAIQTIEEHPASFDWSSFKPMGFEVSFLKFLEESAVKQKKNTDKDHPNTGNKKGSHSNSRKNIDKTAVTSGNHVCPCKESETFVQFANPSQLQCSDNVKIVLDKNLKDCTELVLKQLQEMKPTVSLKKLEVHSNDPDMSVMKDISIGKATGRGQY

SEQ ID NO: 2561 - DNA, 4623 bp, Homo sapien
gtcacgccccgggcagcttggctggggctaggcttccggggctctgcggtcctcggcctgtgctggcagcctcggagcccaccgagccgggcggctgggatgatgaaccggacgacccccgaccaggagctggtgccggcgtcggagcccgtgtgggagcggccgtggtcggtggaggagatccgcaggagcagccagagctggtcgctggcggccgacgcgggcctactacagtttctacaggaattctcacagcaaactatctctaggacccatgaaatcaagaaacaagtggacggactaatccgggaaaccaaagccacagattgtcgcctgcataatgtcttcaatgacttccttatgctctctaatacccagttcatagagaatcgtgtatatgatgaagaagtggaggagccagtactcaaggctgaggcagaaaaaacagagcaggagaagacacgagagcagaaagaagtagatctcattcctaaagtccaggaggctgtgaactatggcttacaagtattggacagtgcctttgagcaacttgatatcaaagcaggaaactcagactccgaggaagatgatgctaatgggcgggtggaactgatccttgaaccaaaggatctatacattgatcgtcctttaccatatctcattgggtcaaagctgttcatggaacaagaagatgtaggtcttggagagctgtccagtgaagaaggctctgtaggcagtgatcgtggcagtattgtggacactgaggaagagaaagaagaggaggagtcagatgaagattttgcccatcacagtgacaatgaacaaaaccagcacaccacacaaatgagtgatgaggaagaggatgatgatggctgtgacctttttgctgactctgagaaggaggaggaagatattgaggacattgaagaaaatactagacctaaaagaagcagacctacatcgtttgcagatgagctggctgcccgcatcaagggggatgccatgggtcgagtggacgaggagccgacaaccttaccctcaggagaagcaaaacctcggaagacactcaaagagaagaaggaaaggagaactccttcagacgatgaagaggataacttattcgcaccccccaagctgaccgacgaggacttctcgccatttggctctggaggtggcctgttcagtggcggcaaggggctatttgatgatgaggacgaggagagtgacctcttcacggaagcctcccaggatcggcaagctggagcctctgttaaggaggagtcttcatcatccaaacctggaaagaaaatcccagcaggagctgtttctgtatttttaggagacacggatgtgtttggtgctgcctccgttccatcactgaaggagccacagaagcctgagcagcccactccaaggaaaagcccctatggtccccctcccactggcctctttgatgatgatgatggtgatgatgatgacgactttttctcggcaccccacagcaaaccttctaaaacacgcaaagtccaatccactgccgatatctttggtgacgaagaaggagatctgttcaaagaaaaagccgtagcatcgccagaagccactgtgagtcagacagatgaaaataaagcaagagcagaaaaaaaggttaccttatcttccagcaagaatctcaagccctcatcagaaacaaagactcaaaaaggcttattttcagatgaggaggactctgaggatttgttttcttctcaaagtgcgagtaacttaaaaggtgcatctctgctgcctggcaagctccccacgtcggtttccctgtttgatgatgaagatgaagaggataatctttttgggggtacagctgctaagaagcagacattgtctctacaagctcagagagaagagaaagcaaaagcctccgagctctccaaaaagaaagcatctgccctgttgttcagcagtgatgaggaggaccagtggaatattcctgcttcacagacccacttagcatctgacagcaggtctaaaggagaacccagggattctgggaccctccagagccaggaggccaaggctgtgaaaaagaccagtctctttgaggaagacaaagaagatgatctttttgccattgccaaggacagccaaaagaagacccagagagtgtcactcctctttgaagacgatgttgatagcggaggctctctgtttggctctcctcccacatctgttcctcctgcaacaaagaaaaaagagactgtctctgaggcaccacctttgctgttcagcgatgaagaagagaaggaggcacaacttggagtgaagtctgtggataagaaggttgagagtgccaaggagtcattaaaatttgggagaactgatgtggctgagtcagaaaaggaaggacttttgactagatctgctcaggaaacagtcaagcattctgatttattttcttcatcatccccatgggacaaaggaaccaagcctagaaccaaaactgttcttagcttgtttgatgaggaagaggataaaatggaagatcaaaacattatccaggctccacagaaagaagtaggaaagggctgcgatcctgatgcccaccccaagagcacaggtgtcttccaggatgaagagctgcttttcagccacaagctccaaaaggacaatgacccagatgttgacctttttgctggcaccaaaaaaaccaagctgttagagccaagtgttgggagcctgtttggggatgatgaagatgatgatcttttcagctctgccaagtcccagcctttggtacaagagaaaaagagagtagtgaaaaaagaccactctgttaactctttcaaaaaccagaaacatcctgaatccattcaaggtagtaaagaaaaaggcatatggaagccggaaacacctcaggcaaatttagcgatcaacccagcggccttgctgcccacagcggcttcccagatctctgaagtaaagcctgttttgccagaattggcttttccttcatctgaacacagaaggagccacggtctggaaagtgtgcctgtccttcccgggagtggggaggccggtgtgagttttgatcttccagctcaggcagacaccttacacagtgcaaacaagagccgtgtcaagatgagagggaagcgtagaccgcagacccgtgcagctaggcggctggctgctcaggagtccagcgaggctgaggacatgagcatccccagaggacccattgcacagtgggctgatggcgccatttccccaaatggccatcggccacagctcagagcagccagtggagaagacagcactgaggaggccctggcagctgccgctgcaccttgggaaggtggtcctgtgcctggagtggacacaagcccctttgcaaagtctctgggtcattccagaggggaggctgacctttttgattctggggacattttttccacgggcactggatctcagtccgtggagagaacaaaacccaaggcaaagatagcagagaatcctgccaacccaccagtgggtggtaaagcaaagagccccatgtttcctgctctaggcgaggccagcagtgatgatgatctctttcagtctgctaaaccaaaaccagcaaagaaaacaaatccctttcctctcctggaagatgaggatgacctctttacagatcagaaagtcaagaagaatgagacaaaatccagtagtcagcaggatgtcatattaacaacacaagatatttttgaggatgatatatttgctacggaagcaattaaaccctctcagaaaaccagagagaaggagaaaacattggaatctaatttatttgatgataacattgatatctttgctgacttaactgtaaaaccaaaagaaaagtccaaaaagaaagtggaagccaagtctatatttgatgatgatatggatgacatcttctcctctggtatccaggctaagacaaccaaaccaaaaagccgatctgcacaggccgcacctgaaccaagatttgaacacaaggtgtccaacatctttgatgatcccctgaatgcctttggaggccagtagagcacacagggtatccacatgttaccctgcagctacattgttgagttagtgatgatgttgtatatgctgatggtcttaactggattacaaaaagcaaatactagaacagctagctcatcgttcacccaatgtacttggtatttttctgcactggtttaatcatgcttaatactacaaaacaaaaataaatatttcacagtggttggtttgttttgtttttaaaccacagtttgatttagttagccttgctggggccataatatgcttcagggtgtgtaaaagaagaaatctctttgtggctttcatgggcagggaatctcagagatagcaaatgccacctgaccagaagtctttgttatatggatgggaaccctaacttagggcttgggcaggggaaagagaaagaagatgagagattatacttcatgagtcttagcaatatgggagcaggttttcactgaattctgagggtgcctctgcatgtcctccaaggcaaagtttggcaaactgtggcccccccactgtcatattttgttaataaaattttattggaacacaatc

SEQ ID NO: 2562 - protein, 1353 aa, Homo sapien
VTPRAAWLGLGFRGSAVLGLCWQPRSPPSRAAGMMNRTTPDQELVPASEPVWERPWSVEEIRRSSQSWSLAADAGLLQFLQEFSQQTISRTHEIKKQVDGLIRETKATDCRLHNVFNDFLMLSNTQFIENRVYDEEVEEPVLKAEAEKTEQEKTREQKEVDLIPKVQEAVNYGLQVLDSAFEQLDIKAGNSDSEEDDANGRVELILEPKDLYIDRPLPYLIGSKLFMEQEDVGLGELSSEEGSVGSDRGSIVDTEEEKEEEESDEDFAHHSDNEQNQHTTQMSDEEEDDDGCDLFADSEKEEEDIEDIEENTRPKRSRPTSFADELAARIKGDAMGRVDEEPTTLPSGEAKPRKTLKEKKERRTPSDDEEDNLFAPPKLTDEDFSPFGSGGGLFSGGKGLFDDEDEESDLFTEASQDRQAGASVKEESSSSKPGKKIPAGAVSVFLGDTDVFGAASVPSLKEPQKPEQPTPRKSPYGPPPTGLFDDDDGDDDDDFFSAPHSKPSKTRKVQSTADIFGDEEGDLFKEKAVASPEATVSQTDENKARAEKKVTLSSSKNLKPSSETKTQKGLFSDEEDSEDLFSSQSASNLKGASLLPGKLPTSVSLFDDEDEEDNLFGGTAAKKQTLSLQAQREEKAKASELSKKKASALLFSSDEEDQWNIPASQTHLASDSRSKGEPRDSGTLQSQEAKAVKKTSLFEEDKEDDLFAIAKDSQKKTQRVSLLFEDDVDSGGSLFGSPPTSVPPATKKKETVSEAPPLLFSDEEEKEAQLGVKSVDKKVESAKESLKFGRTDVAESEKEGLLTRSAQETVKHSDLFSSSSPWDKGTKPRTKTVLSLFDEEEDKMEDQNIIQAPQKEVGKGCDPDAHPKSTGVFQDEELLFSHKLQKDNDPDVDLFAGTKKTKLLEPSVGSLFGDDEDDDLFSSAKSQPLVQEKKRVVKKDHSVNSFKNQKHPESIQGSKEKGIWKPETPQANLAINPAALLPTAASQISEVKPVLPELAFPSSEHRRSHGLESVPVLPGSGEAGVSFDLPAQADTLHSANKSRVKMRGKRRPQTRAARRLAAQESSEAEDMSIPRGPIAQWADGAISPNGHRPQLRAASGEDSTEEALAAAAAPWEGGPVPGVDTSPFAKSLGHSRGEADLFDSGDIFSTGTGSQSVERTKPKAKIAENPANPPVGGKAKSPMFPALGEASSDDDLFQSAKPKPAKKTNPFPLLEDEDDLFTDQKVKKNETKSSSQQDVILTTQDIFEDDIFATEAIKPSQKTREKEKTLESNLFDDNIDIFADLTVKPKEKSKKKVEAKSIFDDDMDDIFSSGIQAKTTKPKSRSAQAAPEPRFEHKVSNIFDDPLNAFGGQ

SEQ ID NO: 2563 - DNA, 7596 bp, Homo sapien
gtggtcgcggctggggacgtgcgcccgcgccaccatcttcggctgaagaggcaattgcttttggatcgttccatttacaatggcgcagagaactggactcgaggatccagagaggtatctctttgtggacagggctgtcatctacaaccctgccactcaagctgattggacagctaaaaagctagtgtggattccatcagaacgccatggttttgaggcagctagtatcaaagaagaacggggagatgaagttatggtggagttggcagagaatggaaagaaagcaatggtcaacaaagatgatattcagaagatgaacccacctaagttttccaaggtggaggatatggcagaattgacatgcttgaatgaagcttccgttttacataatctgaaggatcgctactattcaggactaatctatacttattctggactcttctgtgtagttataaacccttacaagaatcttccaatttactctgagaatattattgaaatgtacagagggaagaagcgtcatgagatgcctccacacatctatgctatatctgaatctgcttacagatgcatgcttcaagatcgtgaggaccagtcaattctttgcacgggtgagtcaggtgctgggaagacagaaaatacaaagaaagttattcagtaccttgcccatgttgcttcttcacataaaggaagaaaggaccataatattcctggggaacttgaacggcagcttttgcaagcaaatccaattctcgaatcatttggaaatgcgaagactgtgaaaaatgataactcatctcgttttggcaaatttattcggatcaactttgatgtaactggctatatcgttggggccaacattgaaacataccttctggaaaagtctcgtgctgttcgtcaagcaaaagatgaacgtacttttcatatcttttaccagttgttatctggagcaggagaacacctaaagtctgatttgcttcttgaaggatttaataactacaggtttctctccaatggctatattcctattccgggacagcaagacaaagataatttccaggagaccatggaagcaatgcacataatgggcttctcccatgaagagattctgtcaatgcttaaagtagtatcttcagtgctacagtttggaaatatttctttcaaaaaggagagaaatactgatcaagcttccatgccagaaaatacagttgcgcagaagctctgccatcttcttgggatgaatgtgatggagtttactcgggccatcctgactccccggatcaaggtcggccgagactatgtgcaaaaagcccagaccaaagaacaggcagattttgcagtagaagcattggcaaaagctacctatgagcggctctttcgctggctcgttcatcgcatcaataaagctctggataggaccaaacgtcagggagcatctttcattggaatcctggatattgctggatttgaaatttttgagctgaactcctttgaacaactttgcatcaactacaccaatgagaagctgcagcagctgttcaaccacaccatgtttatcctagaacaagaggaataccagcgcgaaggcatcgagtggaacttcatcgatttcgggctggatctgcagccatgcatcgacctaatagagagacctgcgaaccctcctggtgtactggcccttttggatgaagaatgctggttccctaaagccacagataaaacctttgttgaaaaactggttcaagagcaaggttcccactccaagtttcagaaacctcgacaattaaaagacaaagctgatttttgcattatacattatgcagggaaggtggactataaggcagatgagtggctgatgaagaatatggaccccctgaatgacaacgtggccacccttttgcaccagtcatcagacagatttgtggcagagctttggaaagatgtggaccgtatcgtgggtctggatcaagtcactggtatgactgagacagcttttggctccgcatataaaaccaagaagggcatgtttcgtaccgttgggcaactctacaaagaatctctcaccaagctgatggcaactctccgaaacaccaaccctaactttgttcgttgtatcattccaaatcacgagaagagggctggaaaattggatccacacctagtcctagatcagcttcgctgtaatggtgtcctggaagggatccgaatctgtcgccagggcttccctaaccgaatagttttccaggaattcagacagagatatgagatcctaactccaaatgctattcctaaaggttttatggatggtaaacaggcctgtgaacgaatgatccgggctttagaattggacccaaacttgtacagaattggacagagcaagatatttttcagagctggagttctggcacacttagaggaagaaagagatttaaaaatcaccgatatcattatcttcttccaggccgtttgcagaggttgcctggccagaaaggcctttgccaagaagcagcagcaactaagtgccttaaaggtcttgcagcggaactgtgccgcgtacctgaaattacggcactggcagtggtggcgagtcttcacaaaggtgaagccgcttctacaagtgactcgccaggaggaagaacttcaggccaaagatgaagagctgttgaaggtgaaggagaagcagacaaaggtggaaggagagctggaggagatggagcggaagcaccagcagcttttagaagagaagaatatccttgcagaacaactacaagcagagactgagctctttgctgaagcagaagagatgagggcaagacttgctgctaaaaagcaggaattagaagagattctacatgacttggagtctagggttgaagaagaagaagaaagaaaccaaatcctccaaaatgaaaagaaaaaaatgcaagcacatattcaggacctggaagaacagctagacgaggaggaaggggctcggcaaaagctgcagctggaaaaggtgacagcagaggccaagatcaagaagatggaagaggagattctgcttctcgaggaccaaaattccaagttcatcaaagaaaagaaactcatggaagatcgcattgctgagtgttcctctcagctggctgaagaggaagaaaaggcgaaaaacttggccaaaatcaggaataagcaagaagtgatgatctcagatttagaagaacgcttaaagaaggaagaaaagactcgtcaggaactggaaaaggccaaaagaaaactcgacggggagacgaccgacctgcaggaccagatcgcagagctgcaggcgcagattgatgagctcaagctgcagctggccaagaaggaggaggagctgcagggcgcactggccagaggtgatgatgaaacactccataagaacaatgcccttaaagttgtgcgagagctacaagcccaaattgctgaacttcaggaagactttgaatccgagaaggcttcacggaacaaggccgaaaagcagaaaagggacttgagtgaggaactggaagctctgaaaacagagctggaggacacgctggacaccacggcagcccagcaggaactacgtacaaaacgtgaacaagaagtggcagagctgaagaaagctcttgaggaggaaactaagaaccatgaagctcaaatccaggacatgagacaaagacacgcaacagccctggaggagctctcagagcagctggaacaggccaagcggttcaaagcaaatctagagaagaacaagcagggcctggagacagataacaaggagctggcgtgtgaggtgaaggtcctgcagcaggtcaaggctgagtctgagcacaagaggaagaagctcgacgcgcaggtccaggagctccatgccaaggtctctgaaggcgacaggctcagggtggagctggcggagaaagcaagtaagctgcagaatgagctagataatgtctccacccttctggaagaagcagagaagaagggtattaaatttgctaaggatgcagctagtcttgagtctcaactacaggatacacaggagcttcttcaggaggagacacgccagaaactaaacctgagcagtcggatccggcagctggaagaggagaagaacagtcttcaggagcagcaggaggaggaggaggaggccaggaagaacctggagaagcaagtgctggccctgcagtcccagttggctgataccaagaagaaagtagatgacgacctgggaacaattgaaagtctggaagaagccaagaagaagcttctgaaggacgcggaggccctgagccagcgcctggaggagaaggcactggcgtatgacaaactggagaagaccaagaaccgcctgcagcaggagctggacgacctcacggtggacctggaccaccagcgccaggtcgcctccaacttggagaagaagcagaagaagtttgaccagctgttagcagaagagaagagcatctctgctcgctatgccgaagagcgggaccgggccgaagccgaggccagagagaaagaaaccaaagccctgtcactggcccgggccctcgaggaagccctggaggccaaggaggagtttgagaggcagaacaagcagctccgagcagacatggaagacctcatgagctccaaagatgatgtgggaaaaaacgttcacgaacttgaaaaatccaaacgggccctagagcagcaggtggaggaaatgaggacccagctggaggagctggaagacgaactccaggccacggaagatgccaagcttcgtctggaggtcaacatgcaggccatgaaggcgcagttcgagagagacctgcaaaccagggatgagcagaatgaagagaagaagcggctgctgatcaaacaggtgcgggagctcgaggcggagctggaggatgagaggaaacagcgggcgcttgctgtagcttcgaagaaaaagatggagatagacctgaaggacctcgaagcccaaatcgaggctgcgaacaaagctcgggatgaggtgattaagcagctccgcaagctccaggctcagatgaaggattaccaacgtgaattagaagaagctcgtgcatccagagatgagatttttgctcaatccaaagagagtgaaaagaaattgaagagtctggaagcagaaatccttcaattgcaggaggaacttgcctcatctgagcgagcccgccgacacgccgagcaggagagagatgagctggcggacgagatcaccaacagcgcctctggcaagtccgcgctgctggatgagaagcggcgtctggaagctcggatcgcacagctggaggaggagctggaagaggagcagagcaacatggagctgctcaacgaccgcttccgcaagaccactctacaggtggacacactgaacgccgagctagcagccgagcgcagcgccgcccagaagagtgacaatgcacgccagcaactggagcggcagaacaaggagctgaaggccaagctgcaggaactcgagggtgctgtcaagtctaagttcaaggccaccatctcagccctggaggccaagattgggcagctggaggagcagcttgagcaggaagccaaggaacgagcagccgccaacaaattagtccgtcgcactgagaagaagctgaaagaaatcttcatgcaggttgaggatgagcgtcgacacgcggaccagtataaagagcagatggagaaggccaacgctcggatgaagcagcttaaacgccagctggaggaagcagaagaagaagcgacgcgtgccaacgcatctcggcgtaaactccagcgggaactggatgatgccaccgaggccaacgagggcctgagccgcgaggtcagcaccctgaagaaccggctgaggcggggtggccccatcagcttctcttccagccgatctggccggcgccagctgcaccttgaaggagcttccctggagctctccgacgatgacacagaaagtaagaccagtgatgtcaacgagacgcagccaccccagtcagagtaaagttgcaggaagccagaggaggcaatacagtgggacagttaggaatgcacccggggcctcctgcagatttcggaaattggcaagctacgggattccttcctgaaagatcaactgtgtcttaaggctctccagcctatgcatactgtatcctgcttcagacttaggtacaattgctcccctttttatatacagacacacacaggacacatatattaaacagattgtttcatcattgcatctattttccatatagtcatcaagagaccattttataaaacatggtaagaccctttttaaaacaaactccaggcccttggttgcgggtcgctgggttattggggcagcgccgtggtcgtcactcagtcgctctgcatgctctctgtcatacagacaggtaacctagttctgtgttcacgtggcccccgactcctcagccacatcaagtctcctagaccactgtggactctaaactgcacttgtctctctcatttccttcaaataatgatcaatgctatttcagtgagcaaactgtgaaaggggctttggaaagagtaggaggggtgggctggatcggaagcaacacccatttggggttaccatgtccatcccccaaggggggccctccccctcgagtcgatggtgtcccgcatctactcatgtgaactggccttggcgagggctggtctgtgcatagaagggatagtggccacactgcagctgaggccccaggtggcagccatggatcatgtagacttccagatggtctcccgaaccgcctggctctgccggcgccctcctcacgtcaggagcaagcagccgtggacccctaagccgagctggtggaaggcccctccccgtcgccagccgggccctcatgctgaccttgcaaattcagccgctgctttgagcccaaaatgggaatattggttttgtgtccgaggcttgttccaagtttgtcaatgaggtttatggagcctccagaacagatgccatcttcctgaatgttgacatgccagtgggtgtgactccttcatttttccttctcccttccctttggacagtgttacagtgaacacttagcatcctgtttttggttggtagttaagcaaactgacattacggaaagtgccttagacactacagtactaagacaatgttgaatatatcattcgcctctataacaatttaatgtattcagttttgactgtgcttcatatcatgtacctctctagtcaaagtggtattacagacattcagtgacaatgaatcagtgttaattctaaatccttgatcctctgcaatgtgcttgaaaacacaaaccttttgggttaaaagctttaacatctattaggaagaatttgtcctgtgggtttggaatcttggattttccccctttatgaactgtactggctgttgaccaccagacacctgaccgcaaatatcttttcttgtattcccatatttctagacaatgatttttgtaagacaataaatttattcattatagatatttgcgcctgctctgtttacttgaagaaaaaagcacccgtggagaataaagagacctcaataaacaaaaaaaaaaa

SEQ ID NO: 2564 - protein, 1976 aa, Homo sapien
MAQRTGLEDPERYLFVDRAVIYNPATQADWTAKKLVWIPSERHGFEAASIKEERGDEVMVELAENGKKAMVNKDDIQKMNPPKFSKVEDMAELTCLNEASVLHNLKDRYYSGLIYTYSGLFCVVINPYKNLPIYSENIIEMYRGKKRHEMPPHIYAISESAYRCMLQDREDQSILCTGESGAGKTENTKKVIQYLAHVASSHKGRKDHNIPGELERQLLQANPILESFGNAKTVKNDNSSRFGKFIRINFDVTGYIVGANIETYLLEKSRAVRQAKDERTFHIFYQLLSGAGEHLKSDLLLEGFNNYRFLSNGYIPIPGQQDKDNFQETMEAMHIMGFSHEEILSMLKVVSSVLQFGNISFKKERNTDQASMPENTVAQKLCHLLGMNVMEFTRAILTPRIKVGRDYVQKAQTKEQADFAVEALAKATYERLFRWLVHRINKALDRTKRQGASFIGILDIAGFEIFELNSFEQLCINYTNEKLQQLFNHTMFILEQEEYQREGIEWNFIDFGLDLQPCIDLIERPANPPGVLALLDEECWFPKATDKTFVEKLVQEQGSHSKFQKPRQLKDKADFCIIHYAGKVDYKADEWLMKNMDPLNDNVATLLHQSSDRFVAELWKDVDRIVGLDQVTGMTETAFGSAYKTKKGMFRTVGQLYKESLTKLMATLRNTNPNFVRCIIPNHEKRAGKLDPHLVLDQLRCNGVLEGIRICRQGFPNRIVFQEFRQRYEILTPNAIPKGFMDGKQACERMIRALELDPNLYRIGQSKIFFRAGVLAHLEEERDLKITDIIIFFQAVCRGCLARKAFAKKQQQLSALKVLQRNCAAYLKLRHWQWWRVFTKVKPLLQVTRQEEELQAKDEELLKVKEKQTKVEGELEEMERKHQQLLEEKNILAEQLQAETELFAEAEEMRARLAAKKQELEEILHDLESRVEEEEERNQILQNEKKKMQAHIQDLEEQLDEEEGARQKLQLEKVTAEAKIKKMEEEILLLEDQNSKFIKEKKLMEDRIAECSSQLAEEEEKAKNLAKIRNKQEVMISDLEERLKKEEKTRQELEKAKRKLDGETTDLQDQIAELQAQIDELKLQLAKKEEELQGALARGDDETLHKNNALKVVRELQAQIAELQEDFESEKASRNKAEKQKRDLSEELEALKTELEDTLDTTAAQQELRTKREQEVAELKKALEEETKNHEAQIQDMRQRHATALEELSEQLEQAKRFKANLEKNKQGLETDNKELACEVKVLQQVKAESEHKRKKLDAQVQELHAKVSEGDRLRVELAEKASKLQNELDNVSTLLEEAEKKGIKFAKDAASLESQLQDTQELLQEETRQKLNLSSRIRQLEEEKNSLQEQQEEEEEARKNLEKQVLALQSQLADTKKKVDDDLGTIESLEEAKKKLLKDAEALSQRLEEKALAYDKLEKTKNRLQQELDDLTVDLDHQRQVASNLEKKQKKFDQLLAEEKSISARYAEERDRAEAEAREKETKALSLARALEEALEAKEEFERQNKQLRADMEDLMSSKDDVGKNVHELEKSKRALEQQVEEMRTQLEELEDELQATEDAKLRLEVNMQAMKAQFERDLQTRDEQNEEKKRLLIKQVRELEAELEDERKQRALAVASKKKMEIDLKDLEAQIEAANKARDEVIKQLRKLQAQMKDYQRELEEARASRDEIFAQSKESEKKLKSLEAEILQLQEELASSERARRHAEQERDELADEITNSASGKSALLDEKRRLEARIAQLEEELEEEQSNMELLNDRFRKTTLQVDTLNAELAAERSAAQKSDNARQQLERQNKELKAKLQELEGAVKSKFKATISALEAKIGQLEEQLEQEAKERAAANKLVRRTEKKLKEIFMQVEDERRHADQYKEQMEKANARMKQLKRQLEEAEEEATRANASRRKLQRELDDATEANEGLSREVSTLKNRLRRGGPISFSSSRSGRRQLHLEGASLELSDDDTESKTSDVNETQPPQSE

SEQ ID NO: 2565 - DNA, 8144 bp, Homo sapien
  Unsure 116-139, 3058-3093: Unknown base
ggatgatgatgatgagacacctctaaacttggaacaagtttaagactttatgagagaagaaaaaaaatcaccaacaagaattgtttgaggaaaaattataactatcctgtgttcannnnnnnnnnnnnnnnnnnnnnnnaaagttgttggatttttttttaatgatttcttttttgggggagggaattttgttgcagttttatggtggaaaatgcaaaaaccagagccaggtgcataatcttgtaatctgtggatatccctggagcaggactgagtaccagttaaaatactttttggggatacacatgtgagatactaagtacttgcagaagatttttgtctctctttttaaagtctctttccttggaatattgtgagaatatttgtggccatttaaggtttgtgtgattttgctaaaatgcatcaccaacagcgaatggctgccttagggacggacaaagagctgagtgatttactggatttcagtgcgatgttttcacctcctgtgagcagtgggaaaaatggaccaacttctttggcaagtggacattttactggctcaaatgtagaagacagaagtagctcagggtcctgggggaatggaggacatccaagcccgtccaggaactatggagatgggactccctatgaccacatgaccagcagggaccttgggtcacatgacaatctctctccaccttttgtcaattccagaatacaaagtaaaacagaaaggggctcatactcatcttatgggagagaatcaaacttacagggttgccaccagcagagtctccttggaggtgacatggatatgggcaacccaggaaccctttcgcccaccaaacctggttcccagtactatcagtattctagcaataatccccgaaggaggcctcttcacagtagtgccatggaggtacagacaaagaaagttcgaaaagttcctccaggtttgccatcttcagtctatgctccatcagcaagcactgccgactacaatagggactcgccaggctatccttcctccaaaccagcaaccagcactttccctagctccttcttcatgcaagatggccatcacagcagtgacccttggagctcctccagtgggatgaatcagcctggctatgcaggaatgttgggcaactcttctcatattccacagtccagcagctactgtagcctgcatccacatgaacgtttgagctatccatcacactcctcagcagacatcaattccagtcttcctccgatgtccactttccatcgtagtggtacaaaccattacagcacctcttcctgtacgcctcctgccaacgggacagacagtataatggcaaatagaggaagcggggcagccggcagctcccagactggagatgctctggggaaagcacttgcttcgatctattctccagatcacactaacaacagcttttcatcaaacccttcaactcctgttggctctcctccatctctctcagcaggcacagctgtttggtctagaaatggaggacaggcctcatcgtctcctaattatgaaggacccttacactctttgcaaagccgaattgaagatcgtttagaaagactggatgatgctattcatgttctccggaaccatgcagtgggcccatccacagctatgcctggtggtcatggggacatgcatggaatcattggaccttctcataatggagccatgggtggtctgggctcagggtatggaaccggccttctttcagccaacagacattcactcatggtggggacccatcgtgaagatggcgtggccctgagaggcagccattctcttctgccaaaccaggttccggttccacagcttcctgtccagtctgcgacttcccctgacctgaacccaccccaggacccttacagaggcatgccaccaggactacaggggcagagtgtctcctctggcagctctgagatcaaatccgatgacgagggtgatgagaacctgcaagacacgaaatcttcggaggacaagaaattagatgacgacaagaaggatatcaaatcaattactaggtcaagatctagcaataatgacgatgaggacctgacaccagagcagaaggcagagcgtgagaaggagcggaggatggccaacaatgcccgagagcgtctgcgggtccgtgacatcaacgaggctttcaaagagctcggccgcatggtgcagctccacctcaagagtgacaagccccagaccaagctcctgatcctccaccaggcggtggccgtcatcctcagtctggagcagcaagtccgagaaaggaatctgaatccgaaagctgcgtgtctgaaaagaagggaggaagagaaggtgtcctcagagcctccccctctctccttggccggcccacaccctggaatgggagacgcatcgaatcacatgggacagatgtaaaagggtccaagttgccacattgcttcattaaaacaagagaccacttccttaacagctgtattatcttaaacccacataaacacttctccttaacccccatttttgtaatataagacaagtctgagtagttatgaatcgcagacgcaagaggtttcagcattcccaattatcaaaaaacagaaaaacaaaaaaaagaaagaaaaaagtgcaacttgagggacgactttctttaacatatcattcagaatgtgcaaagcagtatgtacaggctgagacacagcccagagactgaacggcaatctttccacactgtggaacaatgcatttgtgcctaaacttcttttggaaaaaaaaaatataattaatttgtaagtctgaaaaaaaaatatttaatttaaaaaaaattgtaaacttgcaataatgaaaaagtgtacttctgaagaaaactacatgaacgtttttgttggtattcaagtcagctagtgtttataattactggatattgaattaggggaagctcggctgccctagtaacaaaaccagcaaacgtcctgatgacaacgaagtgatgacattagccattccttagggtaggaggaacagatggatcttatagacctatgnnnnnnnnnnnnnnnnnnnnnnnnnnnnnnnnnnnntaaaaatttagtgactatggtaagcttttgttcatttgtttcagacttttttctcctgtaaaaaaatagtactgattaacttttttaaaagaaagattttactgtaaatatggattttttttttttggtcttatttctgtccctttccctggtttgttatcgtaacctgtagtgccaactctgcttccagaggggtagtgcaggatgaaatgctgaccctgatgttgcttctcattcataaataagtagaaagttgtttctccagtcttttgggaacacaggacttaaaagtcacatcatgtgtagatattacaagcagcattaccaagacatggcaaaaagagtttgtctgaattgtaatgttgcgtttgtgaacctattctgggattttcagaggtacaaggttagaatgctacaatgttaccactgtgccttccaatgtttatatcatcggaaacataacataatcaaagtggctgtgatttaacaaaatgattaaagtgttacctacctgtgtagccgaagtagtgtgcagtgaggcgtttctgaatacatggtcagatttttggaaaaaaacaaaaacaaaaaaaacaagtaaagttcaaaaaccgtcaaatgagaaaattgcaagtagtgtgacagagctgattgattttgttgctttcttgatttttttttttcaaaatgggtttactaaaatgtagatgacttaactgcctcctccttcgtctgaaaaatgccaatattcaatcatcatgcagcattataacaagccttataagtcctaaagcattaagttgcacttttttgaggaggggtagtgcagtatttctctggccagtatgaatgaagtttatacttaccatatttgatagaaacatagatcaagctatggcacagcgactcatcagatagctagctttgacgtctgggcacaattgaaccaacttccatcgtgaatctttataatgattgactttggtgtatagtgcagtaaacaaatagtgctcctagttaagtatttgtcagcatccttttgtctctaacttgtttctatttttacagccacacaattcttggcatgtattaagaaaaaaaaaaatccctgttcaagtagtttttccacctatcagcactgagtaaatgccataaatccattgaaatggtctaaatgttccatctgttctcctgttttgccagttatatagtaatgaaatacatttgtaaattttatgcaacaaatggcaaacgtatcattattttgaaattgtgtatgtaaaagttatatttttacatgtagactcttgttattatgtgttttaatacattgtatcagtttttgtttttttttaaaaactgtggtttaaaaagaagtctcatttaaatgaaatagctacaagaatcagaattttatgttcatttctgaaaatgtaagaacaaataagatagttaccacgtggtcatcttttacaaacccataaacattttgattagctgtgtgtgtgttgaaaaactgtaaatatgttcagtagcgataaaactaaaataactttgatttgttgataagttcctaaaatgtggaggtggattaaaaccttaggagaatagcagaaatcaaacttcatgaaaagttattttggggctttcctgtgaaatgtatgaacaaagaggctcagagaaggacatggaagacaataatgtatactctctcctcctccctgaataatgaaaaccatgtgtatttgttccctccgtatgttaaagatttccttttagtggtacattctgcactcattttgtatagtctaccaaggcgggtatccctaggaacaatattatataggaagcaggtatactctgatcacattcaggataagtgtacagaagaaaatacggtgtttactctttagggaactggaaacactccctgcattgatgtacattttaagaatggcacttttgatacatgttatcataaaggtgcttaatagagctgaattaaagtttttcaaatctgtaaacaaagcaaaaaagtaaattgtagtcatttgattattttttaaattggtgctttatattttgttctcactcagagtaaaagctgcaatttattgttcaccagctttgatgtattcattactcagtaatgcaatacctctattgttgaattccctttggaaataagtgaaaattctaacggccactgaaagctgctcgctaggttttgcttggtggagaaacataatctgcacctatccatattaattgggttgtatccccattaaaaaagaaaaaaagggaatgtggcctttttagtgtgttttttattgttgttgttttgtaattatcaaacccaggtaagatattggtatcctgcactggattttcaaatgaagttcagcagaagacagttaagattaaagtactatacaaaaatttcaaaagggtccatactacgctatctgtatgacgacacttaggctggggatctctttcagaaactcggactttaaaagcaacttggagcagttgatccacctccacattcaagtaatttatgaatatgcagaatagggatctgttcatctagaaatttttaccatttgtcttctgtgtagctgcaaggaacactaatgtttatacaactgtcagtccacccagtggtgcaactggttctgattcagtcttccgattcctttttatttttcactttttcctatttctgaatttttttttttatttgtgatcttgattttgatgaggggttggggagtggggagggagtcgaaccaagacttggagttaagaggattttcatcttttgcatccaacaggcagaatatgatctgtgtccaaaagtgaacttgagtcaggaatgaatcaatttcagcataaacaagcacaaaaatttagtctgctggctgactggaagcaaaaaaagtcaagatggaatatgatgaattccaacacaatggggcaccaaggcctttaggcctctctttttattttgctttggttttgtttgtttttctttagagacatgctctttctcatgggacttgaagtggactcatctttgtgcagtgctggttttgccatactcatttcaagtattatagacatatgtaatggtgaaaatatatgaactgtggcctttttcattcttgttacttgtgatgcaattaagtgaagataaggaaaaaaaaaaaaaaagcagagatttaccatgtatcagtgcctggctttttgttataaagctttgtttgtctagtgctcttttgctataaaatagactgtagtacaccctagtaggaaaaaaaaaaaactaaatttaaaaataaaaaatatatttggcttatttttcgcaggagcaatccttttataccatgaatattacaaaaaaattgtcagattctgaatatttcttctttgtagatttttggaatcattatgagtaaaagtttgttactttattttactatttaaaagatgttattttaccatgtgttaccaagatgaaactgtatgggtagcttttttgtttgttttttgttttgtttttgtttttgtttttgtttttagttgtaggtcgcagcggggaaattttttgcgactgtacacatagctgcagcattaaaaacttaaaaaaattgttaaaaaaagaaaaaaagggaaaacatttcaaaaaaaaaaaaagataaacagttacaccttgttttcaatgtgtggctgagtgcctcgattttttcatgtttttggtgtatttctgatttgtagaagtgtccaaacaggttgtgtgctggagttccttcaagacaaaaacaaacccagcttggtcaaggccattacctgtttcccatctgtagttattcgatgaagtcatgtacatgaccgttctgtagcaataaatgtgccatttttataaactgtttctgacacttgtttcatttcattttgcattgtccatatagctatgattctcttctgtaagtaaaacgcatctatatttcattttccaagtgttggaggtattgacagcttaacaaacaaaacatacaaaaaaaatcacaaaaacaaattgaaaagcaaagcacatgattgatcaaggaagagatgcccttaatgaaaatggaacgggatgcatgcaaaacaaaaagaaaactgtctagaggattaactaattgaaggaatataattaatgtgtgtgtaacactgaagctatgcatttgaagagctctgaactgcaccagtgttttcggttgtgctgcaggttgctaagtcaagtcagccttaaccttttgcaccagttggtcggctgtttggcagaacattctcagatcttttcagtcaaaaatctaagatgatttattttgtatcactttgttaaaagctgaatattgttaactacagttaatattaacactgtatttatactttctcaaactacacccgccccaccacttctggttgcctctgttgactattaatccagatgtaaacaaccagatgtttttttctaacttgtacaaactgacgtgtgtcaactatcatggaaggaaaaaaatgtacagattaaaattattcagtgttatgtactgtaagttaatatttttgtagaatggacatcaatctactttgcaaaatttggaggctatttcaacattgcactgtagaaatgtaaagtaatgtatgcaatgtaaaggaaagcccgcggtagctgagcgcttcataacagaatgttctaatcaagtacgtggtatttggggatgtctccaatattgctcttgtattctttctaattgggtttagtgactagttgaaggaaaatgttataacgccatttggttcacatgtgaagtgccctccatagccaaatgttgggattttttgtattttattcgtttttggttaggactgtttgcagatatttaaattttatgaaatttccaaagattttggttgataacccccttttaccttctaaatgatttgagatgttcttatgttcttactgtgtgttttaaatatatataaaagagccacaagcattt

SEQ ID NO: 2566 - protein, 671 aa, Homo sapien
  Unsure 116-139, 3058-3093: Unknown amino acid
MHHQQRMAALGTDKELSDLLDFSAMFSPPVSSGKNGPTSLASGHFTGSNVEDRSSSGSWGNGGHPSPSRNYGDGTPYDHMTSRDLGSHDNLSPPFVNSRIQSKTERGSYSSYGRESNLQGCHQQSLLGGDMDMGNPGTLSPTKPGSQYYQYSSNNPRRRPLHSSAMEVQTKKVRKVPPGLPSSVYAPSASTADYNRDSPGYPSSKPATSTFPSSFFMQDGHHSSDPWSSSSGMNQPGYAGMLGNSSHIPQSSSYCSLHPHERLSYPSHSSADINSSLPPMSTFHRSGTNHYSTSSCTPPANGTDSIMANRGSGAAGSSQTGDALGKALASIYSPDHTNNSFSSNPSTPVGSPPSLSAGTAVWSRNGGQASSSPNYEGPLHSLQSRIEDRLERLDDAIHVLRNHAVGPSTAMPGGHGDMHGIIGPSHNGAMGGLGSGYGTGLLSANRHSLMVGTHREDGVALRGSHSLLPNQVPVPQLPVQSATSPDLNPPQDPYRGMPPGLQGQSVSSGSSEIKSDDEGDENLQDTKSSEDKKLDDDKKDIKSITRSRSSNNDDEDLTPEQKAEREKERRMANNARERLRVRDINEAFKELGRMVQLHLKSDKPQTKLLILHQAVAVILSLEQQVRERNLNPKAACLKRREEEKVSSEPPPLSLAGPHPGMGDASNHMGQM

SEQ ID NO: 2567 - DNA, 8018 bp, Homo sapien
cgccgctctgagtccagcctcctactgagaacagtccctcccttgtgcgggtcgcacggctagccgcaggttcggccacgtcaaatccattttctaaaaaagcagggagcagagctctctcttcgccgccgacgcagaaaggagctggggaggaaaaagctgctgccttttgcgctggagattcgtgggcaaggcttctcattttcccaggctgcttcccctcccgggtgaggagcgtcctgagactaaggaaagagcctggaaaatggagcagacctggacgagagattattttgcagaggatgatggggagatggtacccagaacgagtcacacagcagcttttcttagtgacactaaagatcgaggccctccagtgcagtcacagatctggagaagtggtgaaaaggtcccgtttgtgcagacatattccttgagagcatttgagaaaccccctcaggtacagacccaggctcttcgagactttgagaagcacctcaatgacctgaagaaggagaacttcagcctcaagctgcgcatctacttcctggaggagcgcatgcaacagaagtatgaggccagccgggaggacatctacaagcggaacattgagctgaaggttgaagtggagagcttgaaacgagaactccaggacaagaaacagcatctggataaaacatgggctgatgtggagaatctcaacagtcagaatgaagctgagctccgacgccagtttgaggagcgacagcaggagacggagcatgtttatgagctcttggagaataagatccagcttctgcaggaggaatccaggctagcaaagaatgaagctgcgcggatggcagctctggtggaagcagagaaggagtgtaacctggagctctcagagaaactgaagggagtcaccaaaaactgggaagatgtaccaggagaccaggtcaagcccgaccaatacactgaggccctggcccagagggacaagagaattgaagaactgaatcagagcctggctgcccaggagaggcttgtagaacagctatctcgggagaaacaacaactgctacatctgttggaggagccaactagcatggaagtgcagcccatgactgaagagttgctgaaacaacaaaagctgaattcacatgagaccactataactcagcagtctgtatctgattcccacttggcagaactccaggaaaaaatccagcaaacagaggccaccaacaagattcttcaagagaaacttaatgaaatgagctatgaactaaagtgtgctcaggagtcgtctcaaaagcaagatggtacaattcagaacctcaaggaaactctgaaaagcagggaacgtgagactgaggagttgtaccaggtaattgaaggtcaaaatgacacaatggcaaagcttcgagaaatgctgcaccaaagccagcttggacaacttcacagctcagagggtacttctccagctcagcaacaggtagctctgcttgatcttcagagtgctttattctgcagccaacttgaaatacagaagctccagagggtggtacgacagaaagagcgccaactggctgatgccaaacaatgtgtgcaatttgtagaggctgcagcacacgagagtgaacagcagaaagaggcttcttggaaacataaccaggaattgcgaaaagccttgcagcagctacaagaagaattgcagaataagagccaacagcttcgtgcctgggaggctgaaaaatacaatgagattcgaacccaggaacaaaacatccagcacctaaaccatagtctgagtcacaaggagcagttgcttcaggaatttcgggagctcctacagtatcgagataactcagacaaaacccttgaagcaaatgaaatgttgcttgagaaacttcgccagcgaatacatgataaagctgttgctctggagcgggctatagatgaaaaattctctgctctagaagagaaagaaaaagaactgcgccagcttcgtcttgctgtgagagagcgagatcatgacttagagagactgcgcgatgtcctctcctccaatgaagctactatgcaaagtatggagagtctcctgagggccaaaggcctggaagtggaacagttatctactacctgtcaaaacctccagtggctgaaagaagaaatggaaaccaaatttagccgttggcagaaggaacaagagagtatcattcagcagttacagacgtctcttcatgataggaacaaagaagtggaggatcttagtgcaacactgctctgcaaacttggaccagggcagagtgagatagcagaggagctgtgccagcgtctacagcgaaaggaaaggatgctgcaggaccttctaagtgatcgaaataaacaagtgctggaacatgaaatggagattcaaggcctgcttcagtctgtgagcaccagggagcaggaaagccaagctgctgcagagaagttggtgcaagccttaatggaaagaaattcagaattacaggccctgcgccaatatttaggagggagagactccctgatgtcccaagcacccatctctaaccaacaagctgaagttacccccactggccgtcttggaaaacagactgatcaaggttcaatgcagataccttccagagatgatagcacttcattgactgccaaagaggatgtcagcatacccagatccacattaggagatttggacacagttgcagggctggaaaaagaactgagtaatgccaaagaggaacttgaactcatggctaaaaaagaaagagaaagtcagatggaactttctgctctacagtccatgatggctgtgcaggaagaagagctgcaggtgcaggctgctgatatggagtctctgaccaggaacatacagattaaagaagatctcataaaggacctgcaaatgcaactggttgatcctgaagacataccagctatggaacgcctgacccaggaagtcttacttcttcgggaaaaagttgcttcagtagaatcccagggtcaagaaatttcaggaaaccgaagacaacagttgctgctgatgctagaaggactagtagatgaacggagtcggctcaatgaggccttacaagcagagagacagctctatagcagtctggtgaagttccatgcccatccagagagctctgagagagaccgaactctgcaggtggaactggaaggggctcaggtgttacgcagtcggctagaagaagttcttggaagaagcttggagcgcttaaacaggctggagaccctggccgccattggaggtgcagctgcaggggatgacaccgaagatacaagcactgagttcactgacagtattgaggaggaggctgcacaccatagtcaccagcaacttgtcaaggtggctttggagaaaagtctggcaactgtggagacccagaacccatctttttcccctccttctccgatgggaggggacagtaacaggtgtcttcaggaagaaatgctccacctgagggctgagttccaccagcacttagaagagaagaggaaagctgaggaggaactgaaggagctaaaggctcaaattgaggaagcaggattctcctcagtgtcccacatcaggaacaccatgctgagcctttgccttgagaatgcggagctgaaagagcagatgggagaagcaatgtctgatggatgggagatcgaggaagacaaggagaagggcgagttggataaccagtcccagcctcgtgaccctgggcctcagtcagcgtttagcctaccagggtccacccagcacctgcgctcccagctgtcacaatgcaaacaacgctatcaagatctccaggagaagctgctgctatcagaagccactgtctttgctcaggctaacgagctggagaaatacagagttatgcttacaggtgaatccttggtgaagcaggacagcaagcagatccaggtggacctccaggacctgggctatgagacttgtggccgaagcgagaatgaggctgaacgggaggaaaccaccagtcctgagtgtgaggagcacaacagcctcaaggaaatggtcctgatggaggggctgtgctctgagcagggacgccggggctcaacactggctagttcctctgagaggaagcccttggagaaccagctagggaagcaggaagagttccgggtatatggaaagtcagaaaacatcttggtcctacgaaaggacatcaaagatctgaaggcccagctgcagaatgccaacaaggtcattcaaaacctcaagagccgggtccggtccctctcagttacaagtgattattcgtctagtctggaaagaccccggaagctgagagctgttggcaccttggaggggtcttcacctcatagtgtccctgatgaggatgaggggtggctgtctgatggcactggggctttctactctccagggcttcaggccaaaaaggacctggagagtctcatccagagagtatcccagctggaggcccagctcccaaaaaatggactagaagagaagctggctgaggagctgagatcagcctcgtggcctgggaaatatgattccctgattcaggatcaggcccgggaactgtcttacctacggcaaaaaatacgagaagggagaggtatttgttatcttatcacccggcatgcaaaagatacagtaaaatcttttgaggatctcctaaggagcaatgacattgactactacctgggacagagcttccgggagcaactcgcccagggaagccagctgacagagaggctcaccagcaaactcagcaccaaggatcataaaagtgagaaagatcaagctggacttgagccactggccctcaggctcagcagggagctgcaggagaaggagaaagtgattgaagtcctgcaggccaagctggatgctcggtccctcacaccctccagcagccatgccttgtctgactcccaccgctctcccagcagcacctctttcctgtctgatgaactggaagcctgctctgacatggacatagtcagcgagtacacacactatgaagagaagaaagcttctcccagtcactcagattccatccatcattcgagtcattctgctgtgttgtcttctaaaccatcatcaaccagtgcatctcagggggctaaggccgaatccaacagcaaccccatcagcttgccaactccccagaatacccccaaggaggccaaccaggcccattcaggtgccagcactgttcctcctgcttccacagctacattgctgagcaacgacttggaagccgactcttcctactacctcaactctgcccagcctcactctcctccaaggggcaccatagaactgggaagaatcctagagcctgggtacctgggcagcagtggcaagtgggatgtgatgaggcctcagaaagggagtgtatctggggacctatcctcaggctcctctgtgtaccagcttaactccaaacccacaggggctgacctgctggaagagcatcttggtgaaatccggaacctgcgccagcgcctggaggaatccatctgcatcaatgaccgcctacgggagcaactggaacaccggctgacctctactgctcgtggaaggggatccacttctaacttctacagtcagggcctggagtccatacctcagctctgcaatgagaacagagtcctcagggaagacaatcgaagacttcaggctcaactgagtcatgtttccagagagcactcccaggaaacagaaagcctgagggaggctctgctgtcctctcgatcccaccttcaagagctggaaaaggagctggagcaccagaaggtggaaaggcagcagcttttggaagacttgagggagaagcagcaagaggtcttgcatttcagggaggaacgtctttccctccaggaaaacgactccagactgcagcacaagctggttctcctgcagcaacagtgtgaagagaaacagcagctctttgagtccctccagtcagagctacaaatctacgaggcactttatggcaattccaagaaggggctgaaagcttacagcctggatgcctgtcaccaaatccctttgagcagtgacctgagccacctggtggcagaggtacgagctctgagagggcagctggagcagagcattcaggggaacaattgtctgcgactgcagctgcaacagcagctggagagcggtgctggcaaagccagcctcagcccctcctccattaaccagaacttcccagccagcactgaccctggaaacaagcagctgctcctccaagattcagctgtgtcccctccagtccgggatgttggtatgaattccccagctctggtcttccccagctctgcttcctctactcctggctcagaaacgcccataatcaacagagcaaatggcttgggtttggatacttctccagtaatgaagacccctcccaagctagagggtgatgctactgatggctcctttgccaataagcatggccgccatgtcattggccacattgatgactacagtgccctaagacagcagattgcggagggcaagctgctggtcaaaaagatagtgtctcttgtgagatcagcgtgcagcttccctggccttgaagcccaaggcacagaggtgctaggcagcaaaggtattcatgagcttcggagcagcaccagtgccctgcaccatgccctagaggagtcagcttccctcctcaccatgttctggagagcggccctgccaagcacccacatccctgtgctgcctggcaaagtgggagaatcaacagaaagggaacttctggaactgagaaccaaagtatccaaacaggagcgactccttcagagcacaactgagcatctgaagaacgccaaccagcagaaggagagcatggagcagttcattgtcagccagctaaccagaacacatgatgttttaaagaaggcaaggactaacttagaggtgaaatccctaagggctctgccatgtactccagccttgtgacccttgccttccaggaaccatgcaagaagcgcagccaccagaagtccttaaaacagcaggaaaggtgggcctgtcccccttttgtgcagctacctatctgctgaggagcatctgggcctcattcctccaagtccacgggagggtccagaagagggagtcagagatgtatcctggtggagctgggagaaaggcagaaagcctttctgacggctatggaatacgattagccaaggtccacttggcccagcactaagaaaaagatgcgtagtttgcacagaaggttttgtgatcctgcctctcaacagccccagcagcttgggaactagcaagagcacatttcttgcctcatcagctgtcctgagatggaaaactcagtgaatataggaccctgattccgatgaaaggggcacgtggtcccaatgctggagctcctctggcaggttctaaaagcacactactgagcagcggtgccctgccggacactgctggcgggggctcagtgagcactactcacagatccacacctgaccctgttgggtcgagtcaggctgggccttggtctgcactgtagcacctgtgttctttgagttcacatcatgaatgtggtgacttcccagataccatctcaggcttaacctagcacatcctatttcttttcttctatgatatccaaattggactgacctcacttcaaagttgctgtcccattttgtcaccctatcttatctcggggaaattgcagactgatggccagaccaactctgttgaaattcttgcatagagcaaacctgtgctcatttttaagtggcatgggagaggccccaagcctagtaaagcctagtctgtgtcttcacagtgctggtagaatgtgtttgtgtgtataaatatatgatatagatttatatatgttgctaacgccatatattgaaggccaacataactggtggacagggtgggtgacagaaaatgaaagtctttttggtgattgttaaagcaaaatgtgtataaagaaataaatagtttttctttc

SEQ ID NO: 2568 - DNA, 4221 bp, Homo sapien
aattcggcacgagacaaaaagagaaagaaaatgccgaaaccaatcaacgtaagagtaactacaatggatgctgagctggaatttgccattcagcccaatacaactggcaaacaactttttgaccaggtggtgaaaacagttggtttgcgtgaggtctggttttttgggctgcagtatgtagacagcaaaggttattctacatggcttaaactaaataaaaaggtaacacagcaggatgttaaaaaagagaatcctttacagttcaagtttagagctaaattctttcctgaagatgtttctgaggaattaattcaagaaataacccagagactcttcttcttgcaagttaaagaagccatcttaaatgatgagatatattgcccgccagaaactgcagttcttttggcttcctatgctgtccaagccaagtatggagattacaataaagagattcataagccaggctacctggctaatgatagactcctaccccagcgtgtattggaacaacacaaactaacaaaagaacagtgggaagaaagaatacagaactggcatgaagaacatagaggaatgttaagggaggattctatgatggaatacctgaagattgcacaagatctagaaatgtatggagtcaactattttgaaataaaaaataaaaaaggaactgaattgtggctaggtgttgatgctttgggtctgaatatttatgagcatgacgacaagttaacacctaaaattggttttccctggagtgaaatcagaaatatttcatttaatgacaaaaaatttgttataaagccaatcgacaaaaaggcacctgattttgtgttttatgcacctcgtctgagaatcaataagcggattttggccttatgtatgggaaaccatgaactatacatgcgaagaaggaagcctgatactattgaagtacaacagatgaaggctcaggctagggaggagaaacatcagaagcagttggaaagggcacaattagagaatgaaaagaagaaaagagaaatagcagaaaaggaaaaggaaagaatagaacgtgaaaaggaagagctaatggaacgtctaaaacaaattgaagagcagacaattaaagctcagaaagaactagaagaacagactcgaaaagctctagaactggatcaagaacgaaaacgagcaaaagaagaagcagaacgacttgaaaaggagcgtcgagctgctgaagaggcaaagtctgccatagcaaaacaagctgccgaccagatgaagaatcaggagcagctagcagcagaacttgctgaattcactgccaagattgcacttctagaggaagccaagaagaaaaaggaagaggaagcaactgagtggcaacacaaagcttttgcagcccaggaagacttggaaaagaccaaagaagagttaaaaactgtgatgtctgccccccctccacctccaccaccaccagtcattcctccaacagaaaacgaacatgatgaacacgatgagaataatgctgaagctagtgctgaattatcaaatgaaggggtaatgaaccatagaagcgaggaagaacgtgtaaccgaaacacagaaaaatgagcgtgttaagaagcaacttcaggcattaagttcagaattagcccaagccagagatgaaaccaagaaaacacaaaatgatgttcttcatgctgagaatgttaaagcaggccgtgataagtacaagactctgcgacagattcgacaaggcaatacaaagcagcgtatcgatgagtttgaagcaatgtgagagctgttattttgcatatatgttcttcataagctgaaccaccaacagagaaaagcaggcctttgcagatatgatggaatgcatcccaccttgccaaagcacttacaccagtttgactgtgctagctaaaagacaaatttaaggggagctcttcaacattaaggcagtatgatatcatgcttggttttcttttttcttttggtccagggaatggagaatggtgttccattgcctcttttcacattttttttctttttcttttttttttctgttgaagattaacactaattatcacgtctgacaaatgtgtatgtgtggtttcagttctgtgtacattttaaaggataatggtgaacattttaatgggtttcccttgccctttccatatttaacctatttccacattctctctcactcacattttctcagtgtgcccttctcttatctgccatgtccatagccataattccaccatcatacagatcaggcagtgtttaaaatgatggtaggtagcacagtggacagtctttgatcatcatgtagaatatggctatgaatcaggaaagagattagaacatttaataatgtatgtacagctggtgcttagtttttttttaatctaaatttaattaccttattggatatttgatatttggttatttaatcacagtcatctttaacagcttacactgattggtgttttatctcctgtgatcctttgatggctttttttgcctaccatttcacagaggtttagacagcagtagtagctccctaggagagtttactgatgaaacagcctctgcaagattttaaaagttttgttcttttatagactgatttagaaaaacaaatgattagttaaaaaaagaaaatatacatttgttggtaactaatgttattttttaaaacctggacctttctggaagggcagcatataaaaacatcagtcccgaggaggggacaacaatactacctcactactacatctgtgatgactggttgttcaaacacaatggagtgtgtaaggtatatgttttataattcataaccatagcctcgatcatcaagaaatactttcgaaatttcattttccttcagaatatcttaagagtgctaaatttttaactgcctttttgtcgagtcaaactgtgggattctgatttgtattaaaattgtaagctcctcactggtatactatcatcctggaggggtgttgtatggctgagcaagagagagagagaatgagagagagactgtgtgtgtgtgtgtgtgtgtgtgtactctgtgtgtgtatgagagagagagagaaatgctaaccttgtagcatgtgaagaatgtctgtaccttgatacgatagttacataatcagtatatttggtttctagatcactgtgcttattttgtttcaatctctgactaaaaatacttaaatttggtttgttaattcttattttagaaattataattttagtttatattaatttcggttatagcttactgaagaaatctttccagttagaaggaggttctaatattcacatgttctaatactttgtttattgtaaaacagctaaatttggagatacgtaaagccttgttttctctgtgtggttcagctactttccatttggtattacacagtcaaatttacatttatctattaaaattgccattttattaaacattttcatgcacagtagattcaagttgtgtctgaaaatatctcttgtgcttttttgattttgctgactttaaaaggattaatctgggcagacattatgtaaaagaaaggttgcgtttaatatattttttgaactttgtaggacaaaacatagctggttaaccttgaagtgactgttgtaccatggttgtgcacatgcttcagaatcctatggaagagaatattcctacttgcagtacatcaaaggaatggatggtggaccctactattcatgttttgagacataaatgttcactttaaagcaattgcataatagataaaaacctgaactttcattggatttttgttaattttcctcattttgaattatgtgcactaccatagctacatcagtttgatacagtattgaaaaattatcagttatattttgctgtttatgatctatttgtagattaggattaaaatggatttaatccatttttaaggctgtgtgaatttttctaaacaagaaccatttgcaatatggatttcttagagattaaaccaattataacttattagcagtcgcgagcacatgttcatatagtcaatgtaaaaatacactaatgagtatttggtaaatcccagtaggcttttaccattagcataattttgtgttgtacaattaagttacaattacatctctaattttggataatattcattggttaacaataaagtgacaaaagctcatgcaaaaaaaaaaaaaaaaaaaa

SEQ ID NO: 2569 - protein, 583 aa, Homo sapien
MPKPINVRVTTMDAELEFAIQPNTTGKQLFDQVVKTVGLREVWFFGLQYVDSKGYSTWLKLNKKVTQQDVKKENPLQFKFRAKFFPEDVSEELIQEITQRLFFLQVKEAILNDEIYCPPETAVLLASYAVQAKYGDYNKEIHKPGYLANDRLLPQRVLEQHKLTKEQWEERIQNWHEEHRGMLREDSMMEYLKIAQDLEMYGVNYFEIKNKKGTELWLGVDALGLNIYEHDDKLTPKIGFPWSEIRNISFNDKKFVIKPIDKKAPDFVFYAPRLRINKRILALCMGNHELYMRRRKPDTIEVQQMKAQAREEKHQKQLERAQLENEKKKREIAEKEKERIEREKEELMERLKQIEEQTIKAQKELEEQTRKALELDQERKRAKEEAERLEKERRAAEEAKSAIAKQAADQMKNQEQLAAELAEFTAKIALLEEAKKKKEEEATEWQHKAFAAQEDLEKTKEELKTVMSAPPPPPPPPVIPPTENEHDEHDENNAEASAELSNEGVMNHRSEEERVTETQKNERVKKQLQALSSELAQARDETKKTQNDVLHAENVKAGRDKYKTLRQIRQGNTKQRIDEFEAM

SEQ ID NO: 2570 - DNA, 4221 bp, Homo sapien; identical to SEQ ID NO: 2568

SEQ ID NO: 2571 - protein, 583 aa, Homo sapien; identical to SEQ ID NO: 2569

SEQ ID NO: 2572 - DNA, 4319 bp, Homo sapien
gggtggtgggaccagcagtgggggcagcagcaccaactccctgactgggtcccggccccccaaggctcggcccactattctcagctcagggctgccagaggaacccgaccagaacctgtccagccctgaggaggtgttccactctggccactcccgcaactccagctatgccagccagcagtccaagatctccggctacagcacagagcactcgcgctcctccagcctctcagacctgacgcaccgccgcaacacgtccaccagcagcagcgcctctgggggccttggcatgaccgtggagggccctgagggcagtgagcgggagcaccggcccccggagaagccgccgcggccaccccggcccctgcatctgtccgatcgctctttcaggcggaagaaggactcggtggagagccacccgacctgggtggacgacacgcggatcgatgcggatgccatcgtggagaagatcgtgcagagccaggacttcacagatggcagcaacaccgaggacagcaacctccggctgttcgtgagccgcgatggctctgccacgctgagcggcatccagcttgccaccaggtagggcaggcttagggaggggtcgtcggggcggctggggcttgggggtgagagcagagtccccacagtccactcacctggccttgaacgccaaatcttgtcgccacagtgtgaccctgggcctgtcatgtctctgaacctccctttccccatctgtcaggctgtgtggacaccaccacctcacctgggagcctggggcagtgagggcacggacaggttcggtggtttcccacagttcacaaggtcacctccagcaatgcctggtgcagggctcagcacatggcaggggcctcacacgcatttatttagaaccctcccttctacttcctcccagctccagggactcgggaagaatggtggtggtgatgcctcatgggtttactgaacaaatctttccctagcaccagctaggcactaggccctaagtgaaggcctggttcaatgcaggctgctgcctacacagcatccacagatggcaggggtagatgggaccaaagttgcgggaacgacagtttatagagtgctgcgtcacagacattcatttggagcatgttgactatgtgcctggctctccatgtgctttggctaaccaaatgaatgagcgagtgagcgaatgagcttcccacaggcgggctgctgagggcaggtggggagcccgcctaacatccacatccccagggaagaggcgtggccaggccgctgcgcagaggctaccctctcaagctgctctgctgactcctgctggccacggcctggaatggcagccatcacctcccagtagcctcctgggctgctctggggtgggggtgagggggcggtgagcaagaaggaaactgaggggctggcttccttatgggtttgtaaacacacccctccctggccccctctgaaaatgaggaagcatcttggggaaagaaaccaatctggttgggagcgagatcacagcagagctacatgctgagccccgagagtccccgactccagggctgggcctgggctcggcagggaaaggagctgaccaggtttcctgacttcccactgccctcttggtcaccctcacatccctctgagcctcagtttcttcacctgtcaagtggggcaggatgcagtgactccctgccgaggtgaccgtgaggatggggtggcacagccagatgtgcccggaagggctctgcaggccccacagactctgatgcttactatctgtgtcactgtgggcaagggacttaccatcgctggggcacggttttagcccctttgcaacacagggctggttaacagtacctgcttgtgaaacacctccagaggcctggtccagtggagcgctcaggaaatggggtatcgagggggacatgctgacctgtctctcacctgcagggtctcttctggggtctacgagccagttgtgattgaaagccattgaggagcaggtgtccgggctggagaagagtcctgctttctctggagtccagacctgtatcattccatgaggaactttccccttcagatcacctctgcgccacatctcatccatgcctcctccatgcactccagtccacactccccgtagcatcattccattgcccctcctatccatgctgggaccctcctggcccaccaaggcccaggcaccactgtgaatattctcctctgaaccactagagggcaggccaggcaggccaggcgggcccgtgcagcttgtgggcaagaaggagctggcaaggaccggcgctgctggagactgacccagccctctggctgaggacatgcagcagctcctaaatgtagagatgcctgtggctgagggggcctctctacctgtgtccccactcactccaggagcactggctttggtcacgtcttagcagcagggccttgctccgttgttcccttgccctggtggtgggggggccagaccgcctccggaatcctgccacctgtgactgtctgactgcttagtgcttcagctgtcccttccttgtgtcctgggggacctgctggcggcctcttcctgggagccatgacctcagaccccacccacactccagatcgagacccctgcctccccccggcaaatgtcctcccgctgccttgcagcctgcactttgcacatgctcacccccagcacagtcccactggcccctcacctccccttccctgagctccttcccaaggactcctggtcactgcctgctgtgcagtcagaggcccagggtccagcagcccggcgggaacgggtgctgcctcttcctccagttagctccagctcaggtctgagacccgtgctgagaaaggtctgagcaccgaccgtgccctctgcccagggctgggtcctgagcagctggttttcctgcaggaaggttggagcaagcaaagtccttctctgccctcagggtcagctgcccagactggggcggatgccagagaggcaggtgggctgtggctggactggtccggagctggcttccttaccagaaaagcctcagccttcctctggaagcatcccccgttctgggcaagggggaagggctcctttaaggggtgtgctttcccagtggggagcagtctggccctgccccctactaaagcctctgctctcagcactttcccccaagtccttgtaacttgcttgaaggtgggttctggctgccagccagtccctggacaaactctcctgccccttttaaatttcactcattttgtataaacccagcaggctggtgtttacttagccctgtagcttttttcattttttctttccgtctttcttcttgagttcacggttcaatattgcctcctcgccctggtgaggggaggtgctgcttttctgccccacctgccggctggttccagcagcgctggggcccagctggggggccgggatgggggcttctctctctgggaggggtgcaggtgccctccccaggctgggagggttccttccctagctccccatctgcccccgctggtgagagttgggcttcttggtcttggaactccctggcattgggaacagagcatttccagcatttgttgttgttgttttactcacctaacccttagaaaatgaatgttagaaggtgcctgccgaggcgggacagagtgtttgctcgcgctggagaaggctctgctcagccctgagagtcccttcctgccccaccgatactggcactttaaaaaggaagctgaccgcacagtgtccagacgaattggcccccagaagatggggagttctgtcctgcccttctgtgtctgcgtgacctcacccagcctaggagggaggtgcattcagggtagatttgcctctcattcaaagttctggggctttgggcggaaaacagccagctttggcgctgttggggagactcctccagaccaggaaccccagaaggagacagagcctgccacatcctcccacgccaggccctgggccagggtgattggactgagaatttggccacaaccaaattgatgctggctggaaccagaggccagaaagcctggccttgtccccatgtgggagccctgtcctcagccctcttgtccccttgagctcagtgaattcccaccaggtgcccacagctcctggacttcaaattctatatattgagagagttggagagtatatcagagatatttttggaaaggagttggtctatgcaatgtcagtttggaatcttcttgaaagtttaatgtttttattaggagatttaaagaaaataaaggtctacaatatc

SEQ ID NO: 2573 - DNA, 3655 bp, Homo sapien
gttggagcggcgctgctcggccgcggacacacgagggacgcgcccgaggagctgcaggtggcagcccaggcggtccgaacccgtcggccggccgagcctggagtattgcctaagtgtaatcttgaacatgggcggtgctgtgagtgctggtgaagacaatgaagagctgatagataatttgaaagaagcacagtatatccggactgagctggtagagcaggctttcagagctatcgatcgtgcagactattatcttgaagaatttaaagaaaatgcttataaagacttggcatggaagcatggaaacattcacctctcagccccgtgcatctactcggaggtgatggaagccctagatctgcagcctggactctcgtttctgaacctgggcagtggcactgggtatctcagctccatggtgggcctcattctaggtccttttggtgtgaaccatggggtggaacttcactcagatgtgatagagtatgcaaagcagaaactggacttcttcatcagaacaagtgatagttttgacaagtttgacttctgtgaaccttcctttgttactgggaattgcctggagatttctccggattgttctcagtatgatcgtgtatactgtggggctggcgtgcagaaagagcatgaagagtacatgaagaatcttctcaaagtgggagggatccttgtcatgccactggaagagaagttgactaagataacacgcacaggtccttcagcttgggaaaccaaaaagattcttgctgtttcttttgctcctctgatccagccctgccattcagagtcaggaaaatcaagacttgtccagttaccaccagtggcagttcgcagcctccaggacttggctcgcatcgccatccggggcaccattaaaaagattattcatcaggaaactgtgagcaaaaacggaaacggactaaagaacacccccaggtttaaacgaaggagagttcgccgccgtcgaatggaaacgattgtctttttggacaaagaagtctttgccagtcggatttccaacccctcagatgacaacagctgtgaagacttggaagaggaacggagggaagaagaagagaagaccccgccggaaacaaagccagaccccccagtgaacttcctacgccagaaggtcctgagcctccctctgccagatcccctgaaatactacttgctttattacagagaaaaataagtctcctgtttgaaagggggaaataggaagagcagattgctgagtgtgaagttcgtgctgcctgtgtgctgttgaagggtcacctggaggcagacgttgtggggaagggaactgctgggctcatccacaccatggttttcttctagttcctgattgacctctaaaattctattcagttgtatgatttgtttacatagttccacaagaccttcattgcatagaagattgttttcccaaagtggagagaatcttcatagagaaaaagagaaggctgtttctttttcggctctgacgaaacactgaagtctgcgtaagagagactgtttgatgaccgtccctcatgcaacatgcacggtactcactaaaaatgaaaactgaagtggaaactaacctgtgttgcttataaagtgtgaaagcacaagcttataaatgtataaaatcttttctgggtgtgacgcacctgcgtccaagtttgaatttttatgatatgtaccacttaattactggcactgagtatcactgaatttcttagttttctagtggggaaacattattgagaagccctcccttattttaagtaagttgattaaatcttatgtgagttgccagttgtaatttttcaaaggaaaaattttgatggggtggaggaatgaattgccagataatctttctggaattccgagagaattccaaagagggtttttttttttttttttttaggacatcttttgatacctttaaaagaaccactgtcaagtaatccttaaaaaaatatcttggaaaaggaaacagattttttcctgtgtgtaagcaataagtgaagttacatttgccctaaccctagggatgattctttacccagttttaaagcccatcatggtattctaaggtgttgacaccctccatcctcagagcaggtcgaaaatattaaatagactggggactctatgatgggcagcctgtgctttttgacttcagtttgctatttttctgtgatcacattagtactgattcatagattctatcttttataattctggagaaaaagatttgttagttttgtaatttttttgtaagaccaaatgtatgtattttagtagctccattgcatgagaagagtgtaactcacactgacttgtgatatcagccttctctgggccttgtgtgtggagagctttctatcttaccaagtggtagggctaaaagaacaacagcctttttggtagtcacatagcagaatgatcagagttacattgcttattccaaaacattggttctttttaaaacatttttttttacccaaagaaaagaataatagaaattactaacaataaatataaattcagagtgttgatataggattcagtatccagagtttatttttaatcttaatcctcagcttcttgggagttgctgggcttcagtgtctctgtggtttcaccagcttagcttgagctctggttattttggatcttttctgctttttttaagtaactgagtcatttttaccacacagtccagtttgcatgtatagctaggaaacatgtattgctctagattgggcagtttaagtcattttaaagaaagttagttcatagttgttgccttttaactcatagtcaagcttcagtctttcaaagagaaatgtgtgattttcatttacttgctgatattttgtagtttggagatccttgtgggcattattctaactgatacgtagacacttacttggaaatttttggacattatattaaatgagtgctatctgtgaaattggttatattaggtggcttgactaatgttttttctataattgtatatggactgcatttttaaaaaaaccgcatttgcctttatgctagattgtaaaaaattatattagaatgcataagacatgtttttccttcatatgctagacttttcctagcatttcgtatttctgtgttgtcagtgtgtgatttttaaaccggaatttggtttaaaaaaaatctggtggtaatatatgtgagaaatactttggtgtttaccttatgaaaataaaggattgtaagtaaagtttcctgcgcaccttataccagaattcagtataatacactactttctgttttcaaacagataaatcataatatagtctgtattatctgtaagatctgtcttgtaaaccacattcttgacaactatttgcttttgagtagtttgtattttaatatgtgacttttgtcttgaaaagtagtaaagccatagacttgtgcaaaacaagtttcaagtttatagatattaagtttgtaatgtgagcatcaaatgtgtatgtaaaaatactttttaccagtctggaacttgggaaaatccagggaatttgaaacatagattttaatgagctggtaaacacaaatcatgtcaataaaggtagtcaggatattttatccttagcattgcttctgc

SEQ ID NO: 2574 - protein, 361 aa, Homo sapien
MGGAVSAGEDNEELIDNLKEAQYIRTELVEQAFRAIDRADYYLEEFKENAYKDLAWKHGNIHLSAPCIYSEVMEALDLQPGLSFLNLGSGTGYLSSMVGLILGPFGVNHGVELHSDVIEYAKQKLDFFIRTSDSFDKFDFCEPSFVTGNCLEISPDCSQYDRVYCGAGVQKEHEEYMKNLLKVGGILVMPLEEKLTKITRTGPSAWETKKILAVSFAPLIQPCHSESGKSRLVQLPPVAVRSLQDLARIAIRGTIKKIIHQETVSKNGNGLKNTPRFKRRRVRRRRMETIVFLDKEVFASRISNPSDDNSCEDLEEERREEEEKTPPETKPDPPVNFLRQKVLSLPLPDPLKYYLLYYREK

SEQ ID NO: 2575 - DNA, 3275 bp, Homo sapien
gtactaccttcggtctaggcagcggaggcagccgcgaccccaggaaaccgaggaaatgaagacgcgaaggactacccgccttcagcagcagcactcagagcagcctccgctacagccgtctcctgttacgaccaggagagggctgcgggactctcattcctctgaagaggatgaagcatcttcccaaactgatttaagccaaacgatctcaaagaaaactgtcaggagcatacaagaggctccagtgagtgaagatcttgtaatcaggttacgtcgaccccctctaagatgcccaagatatgaagccaccagtgtccaacagaaggtcaatttctctgaagaaggagaaactgaagaagatgatcaagacagctctcacagcagtgtcactactgttaaggccagatccagggattctgatgaatctggagataaaaccaccagatcatctagtcaatatatagaatcattttggcagtcatcacaaagtcaaaacttcacagctcatgataagcaacgttcagtgctaagctcaggatatcaaaaaactccccaggaatgggccccacaaactgcaagaataaggaccaggatgcaaaatgacagcattctgaaatcagagcttggaaaccagtcaccatcaacctccagccgacaagtgactggacaaccccaaaatgcatcttttgtcaagaggaaccggtggtggctacttcctctgatagctgctcttgcctctgggagtttttggttctttagtactcctgaggtagaaaccactgctgttcaagagttccagaaccagatgaatcaacttaagaataagtaccaaggtcaagatgagaagctgtggaaaaggagccaaacattcctggaaaaacatcttaatagctcccatcctcggtctcagcctgctatcttactgctcactgctgcccgagatgctgaagaagcacttaggtgtctgagtgaacaaattgctgatgcctattcttcttttcgtagtgtccgtgccatccggattgatgggacagataaagctactcaagacagtgatactgtcaaactagaggtagaccaagaactgagcaatggatttaagaatggccagaatgcagctgtggtacaccgctttgagtcatttcccgcaggctctactttgatcttctacaaatattgtgaccatgaaaacgcagccttcaaagatgtagccttagtcctgactgtcttattggaggaagagacacttggaacaagtctaggcctaaaggaagttgaagaaaaagtaagagattttcttaaagtcaagttcaccaattctaacacacccaactcctacaatcatatggacccagacaaactgaatggcctctggagccgtatttctcacttagttctgcctgtgcaacctgaaaatgccctgaaaaggggcatctgcttataagaagtgagagagaagaaaaatcatgtcccaagttctgagaattgttcacactttctaaccagagacagaattcagagctctttttgaaagaactagtttctttttaaagaagttaagtgcttacataaacatggaacatataaatcattcattcaacctaattatctgtgatatgagagaatcatttcagtttccattgagagctctgttaaaggtatcttaggagtgcagattatatgcagttccttagagaatctgttttgattctgggctgagttattacaattatggtatgaccagtgagagcgatttgtgtcctttcttatgaaccttcctgattttttaacttagatttctcactaagtttcctgagttattagtaagattgctccctaaatgtaaccagggatttttccattatgttcccttttataccatttaggtgtgagttccttagcttctgcctataggaacataagtaatgaaaggtcatctaggtgtgtgtttggaatttttttcttttgttttttggaaaatggaaagaacaaggcaaggaaggaaaattaatggggaagctgaagggaggaaatgttacagtaatccactgagatgtagtttagtcaaacataggtatatgaactgttaatcttggtggattccgttgggatttgttttttacatctcctttttccttccttgaagaaaaattcttggctgtcccaaggattcttcatgtatattgcaaaatttaatatatttgttcacttgagtcttaagagtaggtcaggccaaggcaggtggatcacctgaggtcagaagttcaagaccagcctggccaacatggtgaaaccccctctctactaaaaatacaaaaattagctgggcgtggtggtgcatgcctgaaatcccagctacttgggaggctgaggcaggagaattgcttgaacccgggaggcggaggttgcagtaagccgagaccatgcttattgccctccagtctgggcaacaaaaatgaaactccgtctcaaaaaaaaaaaagtaggtcaattcgtaacagtttattttggacacaccctgaagcttttgttttgaattaagaaatgagtttcaggaattgacaaaccatttgttaaccagctgtcctgggctattgaagaagatttcattttccgcgcatccacttgttgcagtccaagtcctctagtgcaacgccatagcaaatataaagatttactatgcacgtgatacattttatggagtgcctcaagccaagatagtgaatttatatgaagggtgtgaaatgtatttctttactactatagtagtttagttataactttgcatctataattgagctttctcatctgtcaaatgctatggttttcttaaaatgttacaattctagatctatccaccttgtttttttattgtctacaaaccattaaatgtaaatattgtttttagagtcagtcattggctttgtcatttaccctttgagagttccacaagtggtagtagagtggtttaacgtctttcctctagtactaccagtattcataaatgtataccccttactgtaatttgttcctcttagaagtcagatcatctgatttatagaggattatgaaaaccagagtttttgaaaaggcttattttatacatacgtattatatagagaaacaaatgtttttattaaatgtttcattgacccaagtaatttaaaagtaatatgttacctatgtctttcaggaaaaataattatagcagctgatctgtaaatgactttaaaagctattttagtaatttaaataaatttactttcttggtttat

SEQ ID NO: 2576 - protein, 462 aa, Homo sapien
MKTRRTTRLQQQHSEQPPLQPSPVTTRRGLRDSHSSEEDEASSQTDLSQTISKKTVRSIQEAPVSEDLVIRLRRPPLRCPRYEATSVQQKVNFSEEGETEEDDQDSSHSSVTTVKARSRDSDESGDKTTRSSSQYIESFWQSSQSQNFTAHDKQRSVLSSGYQKTPQEWAPQTARIRTRMQNDSILKSELGNQSPSTSSRQVTGQPQNASFVKRNRWWLLPLIAALASGSFWFFSTPEVETTAVQEFQNQMNQLKNKYQGQDEKLWKRSQTFLEKHLNSSHPRSQPAILLLTAARDAEEALRCLSEQIADAYSSFRSVRAIRIDGTDKATQDSDTVKLEVDQELSNGFKNGQNAAVVHRFESFPAGSTLIFYKYCDHENAAFKDVALVLTVLLEEETLGTSLGLKEVEEKVRDFLKVKFTNSNTPNSYNHMDPDKLNGLWSRISHLVLPVQPENALKRGICL

SEQ ID NO: 2577 - DNA, 3181 bp, Homo sapien
ctcccttccacagcactaccccacctctgtgaataaaagctttcccaactttgtgatcacaattgaaaatgggtcacttattattgagagaaaaccaccaaaagtctcaaattcatcacatcctctgacccatcttttaatttttaaatgcagaagaagaaaccaaacggaaccaaaaaaaaaagagagagagagaataaatagaaaagaatgtggctgggaattgtgaatcagaagattataccccccaattgtttttcaatccccttttctcaaataataaattagttaaatcagtttctgagttatgccactggctgatgaagagttgagaggtctctttgcagaatgatctttttgtttcgttttgtttcttcttctgcatttaaaaattaaaagattggtttgaggatgtgatgaaattgagactttttgtggttttctctcaataataagtgaaccaatttcaaatgtgatcacaaagtttggaaagcttttattcacagaggttgggtagtgttgggaggggagtttaattactcagattggcctgttatttgatttcctcctttgggaaaagaattatgtagataccacatggagacagggaaacaattgtggtaaaactgtggatcctgttgctatttgcccagtgagaaaacagattctggtatttgatttggtttttctctttgtttccagaatggatgaaagtccatgaacctcctaagttataatttaaatttgtttggggcaaggtgattttatagtcgagacagagccctcggtccttcctgccccatcactcacttacgacatcacttccattgtgtgcatgtttgttatagaggaggttttaggctacaatatttgtttaacctccctaagaactttcaaggcatctgtcctgaaagctgttaatttatggtctagcagatttatattatatgcagataataattaactggggataaaagaatggcaaggggtgacacaaagtagcaaactgaatacttctccaatagcaaccccaagctacctcctcaccctgcatcttggagggaggcaggaaatttcttttgaaataaagtgctggagctgaattctgcattacttatcgttgctgctgaaaccacctataaaagacttgctggctaatgtgcattgtcatataatgtacactgtcacatctttacagtcttgtatgttatagaatacaaaataagttgatggttttgtttggtgtgagctttttgtttgtttgtttagttttgccttcataggttatatgccaagatagtatttgataagtcaatgacatttggatgttttcttcaaagaattttatttgacccagatttcttataaagttatcttacattaaggatgtcattttcatcagaccttctttctacatattattcatgaagcataatgttgcatttctccaaattttatgcctgaaagggtagtgttgcttcctaaggtatcatgttgtctttgtgctttgtccatctcttccgtggcgaagctttatatctgttcctaaaacagttaatcctgtgaaataaatattgaacataatccagaagaatctctctgtttcccttggggaatgccatatttaattcaccagcagtaatcctttaataactggcagagcactttattcttctggtgagctccctgaatatttatttttctgattataaattttctatattagtagcattttttaattattacttcttcactatagagcatttacttttagtctctagatgtatattttggaatgctatacttggcataacatagattaaaatcataatgcatgactaaaaactccttggatttatttcccattttaaaatttttagcggtaagttcagatttataatctttctctagacttccatggtctgaatgttgcctgctgaagtagcaacctaaaaagtatcccctgcttatgcttctccagttggccctccatgtccataggcttcgcatctgtgattcagcccactgtgggtcaaaaatatttggggaaaaaaatggatggttgcgcctttgctgaacatgtacaaacttttttttgtcattaaacaatatagtataacaactatttacaaagcatttacattgtattaggctattataggtaatctagagatgatttaaagtgtatggtaggatgtgcataggttatatgcaaatactacaccatttttctataagggacttgaacatcatggactttagtatcctagggggttcttggaacccatcacccataggggcaccataggacaactatagtaccgtgtttatttcctattaattcaggttccgtttagagtctaaaactaaaacctaatcatttagtcacagtgtaaaaacaaatggaaataacagctcaaatcttcaaaatattactatagcattatgtttaaaataatctacaacaaaaatgtaccattttcaagcagtactacattaggagcccttttatagaaaataatttcttctttacccccgttccagtgtgaatctagtattctgttaacatttgtgtggcatttggagtttgtcatccccattgaagggagagccttctcagacatgaagcaagggaaacatactgaatagttttacacaaatttgatctggcttccatttgtccccctcatttcccaaatgtttaaatgtattggatttggattctcaatgtataagttgccttatctgttaatgtctatcttctgtctctttaattttgtatatctgctgttttgcttttggatacattttctaattagaagtcacatgataaatataatcagtatagtaataataccataatgtgcacatactcaataaataaatgactgcattgttgtaaatgagctctcctttttgttgttgttggttggcgagtggtttccatcaagtcatcatgggaaaataatcaagttccatattcacaggttaggataggatgtaatgattctcagaagaacccttctagtatgatatttgcttatcaaaatgtctcagaaacaaaatatttgaaaatactgtcacatttattgtatttctctctgttcttatgccgtgcatgtagaatgtacccaatgtttatgaattaatagataaataaggtctattgtcttttgaaaat

SEQ ID NO: 2578 - protein, 75 aa, Homo sapien
SLPQHYPTSVNKSFPNFVITIENGSLIIERKPPKVSNSSHPLTHLLIFKCRRRNQTEPKKKERERINRKECGWEL

SEQ ID NO: 2579 - DNA, 2376 bp, Homo sapien
cgagggcagcgccggtcgggagcgcagcgcggcgcagctcggcgcgcacggcgggagcggcgcgcgagtggtcgggcctggcggctggacgggcgcccctcgctgccccgcgcgctccccgccgccccccatgagcgcagccccgcgcggcccgggtccgtaggcggcggggcgccccccatgctgctgcagcccgcgccgtgcgccccgagcgcgggcttcccgcggcccctggccgcccccggcgccatgcacggctcgcagaaggacaccacgttcaccaagatcttcgtgggcggcctgccgtaccacactaccgacgcctcgctcaggaagtacttcgagggcttcggcgacatcgaggaggccgtggtcatcaccgaccgccagacgggcaagtcccgcggctacggcttcgtgaccatggccgaccgggcggcagctgagagggcttgcaaagacccgaaccccatcatcgacggccgcaaggccaacgtgaacctggcatatctgggcgccaagccgcggagcctccagacgggctttgccattggggtgcagcagctgcaccccaccttgatccagcggacttacgggctgaccccgcactacatctacccaccagccatcgtgcagcccagcgtggtgatcccagccgcccctgtcccgtcgctgtcctcgccctacattgagtacacgccggccagcccggcctacgcccagtacccaccggccacctatgaccagtacccatacgccgcctcgcctgccacggctgccagcttcgtgggctacagctaccctgccgccgtgccccaggccctctcagccgcagcacccgcgggcaccactttcgtgcagtaccaggcgccgcagctgcagcctgacaggatgcagtgaggggcgttcctgccccgaggactgtggcattgtcaccttcacagcagacagagctgccaggccatgatgggctggcgacagcccggctgagctttagtgaggtgccaccagcacccgtgcctccgaagaccgctcgggcattccgcctgcgccctgggacagcggagagatggcttctctttaatctaggtcccattgtgtcttgagggaggactttaagaatgactgagaactatttaaagacgcaatcccaggttccttgcacaccatggcagcctcttcttgcaccttctcctgcctctccacactccaggttccctcaggcttgtgtccccactgctgcatcgtggcggggtgtcacagaccctctgcagcccctggctgccctggactgtgcagagatgcctgactccagggaaacctgaaagcaagaagttaatggactgtttattgtaacttgatcctcccgagctgtgagcgcagtctgaggtgtgaggacacggcctcctgttggagtcccattttctccatcagggcacgtgggcggcttcctcaagcccggaggagctcccaggcgcacaggggccgccggtaacaggggccgccggccaaaggcccctttccagtcatagcactgaagttgcaacttttttcttgtaattgttttgctactaagataatttcagaagttcagtctattttttcagcggatactgccgccaccaagaatccaaaacctatttttgacttggagagacttgcttttgttggttccgcccgtggagacgacgacagtgtttctgtataataaagtgtctgccggctcgcgggccaggatcctctcggtgggatgggcaccacagacaggaggcccctcaggcccgtgcgggccactgtctgctgccgcctgccggggtggcagagtgagttgtctcaggaccccgtcactgcgacgttgacactctctccttccttccttccccaactccccaaacactgtggaagggaagaaggaagtgatccacagcattcaggccacttggggtctagaccatggtggtgccagcctggggggggcagtggccctcagctctgcccgctggagcggttgagtgcagaagggtgcgcctcttccctctacccccgcaccacctgctgtgtgccagcctgagacggttcctgcctgtcttgggggttggtggagggtggaggcagttctgccagccgtggcagggctgctatggggcatccagggctgtgggggtctggaggaggggacatgaggtgagaggtatcctggccgagggcggggggcagcggggggtctccctccggacctacctcagggagctgagcgtgcaggcgctccagggcaggcctgggacagagtcaaggctcagagaataaaggtagctaatctcatcataatatttttattagaatgttctgatgataaaaataaaacttgttttcttt

SEQ ID NO: 2580 - protein, 216 aa, Homo sapien
MHGSQKDTTFTKIFVGGLPYHTTDASLRKYFEGFGDIEEAVVITDRQTGKSRGYGFVTMADRAAAERACKDPNPIIDGRKANVNLAYLGAKPRSLQTGFAIGVQQLHPTLIQRTYGLTPHYIYPPAIVQPSVVIPAAPVPSLSSPYIEYTPASPAYAQYPPATYDQYPYAASPATAASFVGYSYPAAVPQALSAAAPAGTTFVQYQAPQLQPDRMQ

SEQ ID NO: 2581 - DNA, 1524 bp, Homo sapien
agcgggctgggtgcgtgcgcggcgactgcgacgggcagtggcagtcatggcggctcagtgcgtgaggttggcgcggcgcagtcttcctgctttggcgttgtctctcaggccatctccccggttgttgtgcacagccacgaaacaaaagaacagtggccagaacctggaagaggacatgggtcagagtgaacagaaggcagatcctcctgctacagagaagaccctcctggaagagaaggtcaagttggaggaacagctgaaggagactgtggaaaaatataaacgagctttggcagacactgagaacttacggcagaggagccagaaattggtggaggaggcaaaattatacggcattcaagccttctgcaaggacttgttggaggtggcagacgttctggagaaggcaacacagtgtgttccaaaagaagaaattaaagacgataaccctcacctgaagaacctctatgaggggctggtcatgactgaagtccagatccagaaggtgttcacaaagcatggcttgctcaagttgaaccctgtcggagccaagttcgacccttatgaacatgaggccttgttccacacaccggttgaggggaaggagccaggcacagtggccctagttagcaaagtggggtacaagctgcatgggcgcactctgagacccgccctggtgggggtggtgaaggaagcttagctgctgttgatggggtgggtgtttttaaactcacttgatgtaactctcaaggctggttcattgtttctcatctatgagtacgtgtgaccttttcccaaaccttattggaaaccttaagtaaccagtggctaaacagaaaagccggttgcccaactgcattaatgaactctaattcgggagtctgttcccttttagtgccacgcgttgaatagttccacatactttcagaagagctcagcagggccctgcctggtctcccgagcatcatgagtaacgtgtctgctcagactctgctgacaccaaagtattttaaacaaataaaaggtcttggggaattctgtttggctacctgggcacgccagtctgcaccatgtgtccctgcggcgcatgagtgactggcgtatttagcccgtcacatttcattcgctgaaggaaaggcaagagagttgaaacatttttcttacttaaaaaaaatgatctttgtgaagaacatagtgagttcgtttgtcttcagtcaacagcggctgaaactgaccactgagaaatgggtgtgggcactgacagttctcccccattatttggccaggaattgagcttggcttggcaaagttccttttaccctgttctgttcatctaaatgcagacatatttaaatcatattcaactagttactaatgacctcaagttgtattccctggcaaaatggactttctcaaaataggactgcacgcttggtgtactttaaatgttaatgtttaatttaaaatttttatttaagaggattaaagccctaatgtttattttcctacaaaaaaaaaaaaaaa

SEQ ID NO: 2582 - protein, 217 aa, Homo sapien
MAAQCVRLARRSLPALALSLRPSPRLLCTATKQKNSGQNLEEDMGQSEQKADPPATEKTLLEEKVKLEEQLKETVEKYKRALADTENLRQRSQKLVEEAKLYGIQAFCKDLLEVADVLEKATQCVPKEEIKDDNPHLKNLYEGLVMTEVQIQKVFTKHGLLKLNPVGAKFDPYEHEALFHTPVEGKEPGTVALVSKVGYKLHGRTLRPALVGVVKEA

SEQ ID NO: 2583 - DNA, 6815 bp, Homo sapien
  Unsure 1846-1877: Unknown base
tcggctcgcggctttctgattatgcagaacttaaatctatgcctcagtgacccatacagcattccagttcctatcacctactgtcttgtccctatacttgcagcagttgtccagggttattctttgtctgtattagaattttttttcaggttgcttaaggaatcttgcagatacttgtgacaaagaatcataaatgctgttgttaaactgaataatgaattgagtcccaaatgttcgtgctaattaatgctttttgagttggagatgaaatgagagtaatatcatcaagctgtggattaaagttatcctcaaagccccatcatctacaaaaagaataggacaggaactgcctttgtgcaggtgcaagaccatgttacttttgagcagtgagcttgagatgtctgggatacaaattgggttccctattaactactaatcattccttttttttctttcaccttcagccactcacaactgaccttcactactattacatcctggagctgtcgttttattggtctttgatgttttctcagttcactgatatcaaaagaaaggactttggcattatgttcctgcaccaccttgtatctattttcttgattaccttttcatatgtcaacaatatggcccgagtaggaacgctggtcctttgtcttcatgattcagctgatgctcttctggaggctgccaaaatggcaaattatgccaagtttcagaaaatgtgtgatctcctgtttgttatgtttgccgtggtttttatcaccacacgactgggtatatttcctctctgggtgttaaataccacattatttgaaagctgggagatcgttggaccttacccttcctggtgggtttttaacctactgctattgctagtacaagggttgaactgcttctggtcttacttgattgtgaaaatagcttgcaaagctgtttcaagaggcaaggctgggaagtggaacccttacatgtgtccaaggatgatcgaagtgatattgagtctagctcagatgaggaggactcagaacctccgggaaagaatccccacactgcgacaaccaccaatgggaccagtggtaccaacgggtatctcctgactggctcctgctccatggatgattaattactcaaaactacaagtcccaagcaaagtgaactatttgttcctggaagtatttaataagttgcaaatgcagttcctttcataatatctcagcaccagaaacaaaaattaagattatcaaagcattttgaatagtgcactgccatgtgtcctgtctgtgaatgaagaagaattaccattctctctttgtaggcatgctgtatgtaattgacacaagggaacagtatttgcatttgtactgtcttagaatattatttatttttttgtatttgtaaatctgtggacaaaagagggtttcctcactccttttactcactgggctcatgacagtgaaggagatgctccatctgcttctccccctttctcttgctgtagtccaatgtgctatgagcatcagcttactttgtcacttagagcaagcaaaacccagtgcaagagtctcgttcagctctaaataggtttgctttcttttagttacagtgcccattttgaaattgcctatacagtcttagtgaccatttaaaccggacgaactaggtgtttaattttcactcttcatgttcaattagcagttcaaattaaagaagatggttattggagaacttttttgaatggttttgtattaaattgctttgaaatagatttcatttcttgtgcacacagccaagatttcttcaatgggtgtgagctagttgagggttaaccttgtaggttgcagannnnnnnnnnnnnnnnnnnnnnnnnnnnnnnngatgaggtcagtgctctgattttgaaggaggatattcactgaagctcatagttataaacaaggaaatcactgttaagaatgggaatttgtcctgtgttctgggaataacataaagagagcaactgatttcagccaggttttgccactaccctataattagtgcagtcttatgttataaaagaaagaagttaactatatttggggacaaaaaaatatttcaagagttgataaagattacctgtgcagtgcagagcactttaatgcaaccagctttcaagaaaaagccctatctagtacttgatgttgatgtttttattttgctgagcaaaataaagccaatgggagaaagactattttaccctttgcttttctccttaaacgtaatccagatgactttcctgttactaaacactgagcagcattacactacaatgcttctttggtttccaggaatttttttcaaatggggctgtttctggaaaaatgaaaaattctattggacaatggcaatatcaacaatgaggaaaattactgaagaataagtttccataagtctcctacatagcagtgttatttatgtacagataagaaaaccatatgtcagccaaagattttatctcttcttctaacttttagtaagaggaaaaagggattataaaacccttcataaatcaagaaggccatcacttagaacgaaccccaaacaaaaatgccataatataaatgtgtgaatcagggctgtgaagacaacagcagaaatgctaacaagcgtgcagaaacaccagagagtgcgtatcctgctcagaaccattcacatttaattcaattcttggaaaaaattaaagctttttgcccacaatttgcaatctgtgggttaatagttaaaagaatgttcccaaccaaaaaattcttaccgtaatattatatcttgccctacttatttacaaaataatatgtttctgttatggtccttagtaataattgaagaggcttagaaatacatctgcttgtttattgagaaaacgatgcaaataattctgcttttagagccttgttattttatttcacaaaacaggcatatgtctaggagtgtaatttgtggatggttgagtttgtaagaacaatcataaaaggacttgttagtctccagaacatctgctaaaatgcaagtatatgtataaggtaatagcatattacagctgaaaattttgagaaggtaaaagtttcttaattaaaatatgaacatatttagcttgctttagtgtctggggcaagtcctctcaatggctaaaattaactttagagatccatgtgttcaggtttagatcatatgacactcgagcacagaagaataatttcaaggaggtcatcttgtaaattaaaggtttagaagaattgcataaaacgtagtaaatggggtctgtcattagcaaaggcaaatctaagcaatcatttttccccccagaagttacttagaaggagaactgggaacacttggggtctctctaactgatggcattcacttcacacagtcgtctatgttatccagagatttttatttcattttacattttagggcacagttctttggggctaattaaaatggggtttgcaggctttttatggtgaagaataatatatctctgtctatagctttcccatggtagcctgataaggctgagagagaaaaatatgtgcagtatctcatcctccccctgtaccaggccatagctttgaagtgtattttgtaaattcaactataggttagtcagaatgctgtttttcgttaattaacttagcctgtgttgatatctcctccttcctggtcacattcaaaccttcccagagtacaaaggggtatgtagaaaggattccagaagaagtaatactttattctctaatgttaatagcttttctggatctcttagtagggggaaagtagaaaatcgagtagaatttggcctcaggtcaataaatgatataaaaacatgtgttctatttatgtatatatatgtatgtttctccaaaaagtgataaaaccaaaatatcactgactcatccctacccatattcttttcataaaacccactcaccaggtacaatagaaacttccctccttgtttgtcagcctcctgttcatgttccccacacacctgaaggtggtagaatcttttcagcctcttagccagtgagctaaatatggctaagcacaggtcataagagcacctaaggccagcatataagccaactacagttcacctttccaaatttggtcctatggatgttgagcatagggaagcaactctcagtattttggattattcaagtgtatgtggtaaaaatgcagatgattgctgctttaccccagggtttattagcatcctacttctgctgggctgcatcattatataatgccacaggcatctagtcaaggtaaagaagccagaaaggttaggcaagaagtgagataaaatcagatcacctttgatcaaaatggttggtgaacctccacatgtccagttctgttgccaaactttccattcagagtatttggtggagtttgaatttgagcaaactaaatgccttcatcttaggtagaaagggcctgaatcttccattttatattcaaacctcattgttatttggcctaagtaaaaagtcagatttcatttccatttacctgagttcgctttaaagagcttttcaaagagagctttatagacacccacaattgtccccaatctcttcatgatgttgcattaatagttgtttttgtccctttcttggaaatgttaatgccaaagttgcctgaacattgggcggttttcttaatttgaagtataaaaattataaagagtaattccaaaggtattaaaagattgtttaacagtatgtgtggtgatgtcattatctccagagaggcttcaagaaatcctttggaaataaaaagttaaatgtttacatttcatgtggtatttcaggtcttcaggttctgattagcttacttttttcctttgtctttggctgatttctgctttgtagataaataataatagccctgagatgtttctaacatttaaataagaaaaaaatcaaatcgaagtcagcctgctggaaaagtgatcacatggcagttgcagtaacttgtatggaaagagaaaatgcaatgagcccagttactgcacttgccactaccatgctgtccatggaaggaataatcagcagttcagttgtcacaagccgcccttgaagaaaacgcagcaaaatattttaaaatgaagatattgcagtccccagagccagtgaaggtttcttttggtaaaatgaaattgtgccattgtcaaagtaccccgtagtgatgagcactgactggttcactggccacattttagttcttcataataataggccacaaaagggctctgtggtttgcctccatgtgcactggcccctccccacccctagggggcactcagtagctgctgagaaggcctgtccacgaggctgttggaacccctccaataaatacttagaggtagtgtatctgatgcttgttttcgtggagaaaattgtattggagaacttaaaacatcacgaatatttttaataggatccgcagacacccaaaggagaagcttggtcttttccaggtatttccaacttgagttcaacccaaagcctttgaaaggaatgcattaccacatgaccacatgctgagaccccatggggtctaacacgggacctaagaaagtctctgcagccagatagtacatggtgtctccacaaaactaggcattctggagattgcccagaaagggatgtgaggggaccgttaagatctgtcttgcttatctcatgcactcacattccttcagcctcctggagttcctgataaaaggaagccagggtgttgacattttttagctattgatttcccaatagcttgtggatcagttgtacacccacacttccttctctgcctaattccgtttttctggaaaaagtagtatgcccatgtatgtgtgtttttcttaacacaggtccatgaaagtttggcttcctggtttgatgtctgttgcgtggcctggaaaccagggagcagcaactattgagatggtttctgtgttcagtgaaaaattctatttcattgagacaattttttctttatccacagtaattttttgacactgtcatcatgaaactacccttaggaaaataagattacctgcaaaaaaaaaaaagaaatgagttatggaataggaacagttatgtgatgattctgaaactttaacttagagcttcattactttaagaatggaaaacaacctctgagtttgatttcccaaagtttcataaagcccctaagctcatgattttcatcaactctttgcccacatagtcatttacctccacagccgtttgttgtcatagaaggggtggtggtgtttggatttgatttttttcaacttgcagtgagaaataggataggtgacaaaaccttacttgttttcttaagacaattcagtgcttgagcatctctgtcagaaatggaatgaaatactgttagccaattagaattattttatgtattgttattgtgttttgctgatttttatatgaaaatataattattcattcttgatctctggaagcaatcattattatgaggatcattttactttggaaacactttcataataaagataagtattaagagtgcagtgtaagtgccctttactgtaaatgctaaccagctcgtgtgggtaaaacatcacatctcacctgatgaggttaataaaggctcacatcatcccagtagattgttacaagcctcgtcaactcccagtatcattgtgatcattgagaaagtaatgttacgttaacttggatagactgtagtatctctttgaaaattaagattaaaacctcaatgctaaa

SEQ ID NO: 2584 - protein, 191 aa, Homo sapien
  Unsure 1846-1877: Unknown amino acid
MFSQFTDIKRKDFGIMFLHHLVSIFLITFSYVNNMARVGTLVLCLHDSADALLEAAKMANYAKFQKMCDLLFVMFAVVFITTRLGIFPLWVLNTTLFESWEIVGPYPSWWVFNLLLLLVQGLNCFWSYLIVKIACKAVSRGKAGKWNPYMCPRMIEVILSLAQMRRTQNLRERIPTLRQPPMGPVVPTGIS

SEQ ID NO: 2585 - DNA, 1488 bp, Homo sapien
tttatacttggggaaaaaacaaggccatatgtaaaaacccttccaatgcctaagtgtctttctcctgcaactccaaacccagactcgccactttgggtgcacaggtggttaggtcagccaactggttctgcctgtcgccttgccacggaggaggcttctaattagctggaaaagagtatttttctaatacgttgcaaggattagccaaatcttcttattgaagaaagaagaaaagtgaagagtggttacctatacctagcatagtacaatcagaacctcgtggagaccaccggggacaggcttgcggacgccggctgttcttcccgccacgatctttctgtggtagcggccagcagaagacacggcctgctccccactccctttccccactccttctttattgcacacaggacaccagtcttcaaggaaagggacttttttccagtctgccaatcatattgggaaagtgctagctgtgctcaccttcatggggctgtttccagctcgtccacaagctcatcgattttctttagtagattaccggtgtaaatacccagtgtgcttatgagtcagttagtagacgtcttcattcattggagtaactggtttaggctttccagtttggaaaaggagcagagagctgtccatctggattgatggaagaaaagagaacctcatccatgcctggagaacatctagaaaaccttcagccagcctccagtgctgtcgagagaccaccttcccccgacccggaggcacttccttggggtctttctctagggtctcttctctacaaagcacaacactaatgttcgtttccttagacctcagttcaagtgcccctatttatttcaataagaacgcacatatcccagctgttttttgtttgtcacctctatttagttgttacctgtttctctcttctttcaccccttgtccttttccacccttttaagagttacgctagcagatcttactccacgtatactttttggtttgtgaaggcatcggttaagggcacaaagacagccatggggacatttatgtaaatacgtctctaattgccacactgcagctgaacagtgtgtagtattttcccagtcagctttgccatactgacgtcaatcatttgagagaaattattcagattttatttttgtatctgtggtaacaaaacattaaccaaaagattttctgtccagaagcctccccgaccccccaagctatttgctcacattaacaaattaaagtgcctgaagcataattcattctttacctgtatactaaaaaccctgttgtattgatttttttataataagcctttttacctctgtgtaaaaaatatatatacaagtgtatgatgtacattttagttcttaacttttttttatggtttctaatatgtatgaccaatgtagccattgctttaaaatgtaccgtgtaaatataaacacatcctatcagaaaaaaaaaaaaaaaaaaaaaaaa

SEQ ID NO: 2586 - protein, 54 aa, Homo sapien
FILGEKTRPYVKTLPMPKCLSPATPNPDSPLWVHRWLGQPTGSACRLATEEASN

SEQ ID NO: 2587 - DNA, 2199 bp, Homo sapien
gggggtatttcctgaaagatgctaatctatttgccaaacttggtcttgaatgtactgggggcttcaaggtatgggtatatttttcttgtgtccttgcagttagcccccatgtcttatgtgtgtcctgaaaaaataagagcctgcccaagactttgggcctcttgacagaattaaccacttttatacatctgagttctcttggtaagttctttagcagtgttcaaagtctactagctcgcattagtttctgttgctgccaacagatctgaactaatgctaacagatccccctgagggattcttgatgggctgagcagctggctggagctagtactgactgacattcattgtgatgagggcagctttctggtacaggattctaagctctatgttttctatacattttcatctgtacttgcacctcactttacacaagaggaaactatgcaaagttagctggatcgctcaaggtcacttaggtgagttggcaagtccatgcttcccactcagctcctcaggtcagcaagtctacttctctgcctattttgtatactctctttaatatgtgcctagctttggaaagtctagaatgggtccctggtgcctttttactttgaagaaatcagtttctgcctctttttggaaaagaaaacaaagtgcaattgttttttactggaaagttacccaatagcatgaggtgaacaggacgtagttaggccttcctgtaaacagaaaatcatatcaaaacactatcttcccatctgtttctcaatgcctgctacttcttgtagatatttcatttcaggagagcagcagttaaacccgtggattttgtagttaggaacctgggttcaaaccctcttccactaattggctatgtctctggacaagtttttttttttttttttttttaaaccctttctgaactttcactttctatgtctacctcaaagaattgttgtgaggcttgagataatgcatttgtaaagggtctgccagataggaagatgctagttatggatttacaaggttgttaaggctgtaagagtctaaaacctacagtgaatcacaatgcatttacccccactgacttggacataagtgaaaactagccagaagtctctttttcaaattacttacaggttattcaatataaaatttttgtaatggataatcttatttatctaaactaaagcttcctgtttatacacactcctgttattctgggataagataaatgaccacagcaccttaatttctaggtgggtgcctgtgatggttcattgtaggtaaggacattttctctttttcagcagctgtgtaggtccagagcctctgggagaggaggggggtagcatgcacccagcaggggactgaactgggaaactcaaggttctttttactgtggggtagtgagctgcctttctgtgatcggtttccctagggatgttgctgttcccctccttgctattcgcagctacatacaacgtggccaaccccagtaggctgatcctatatatgatcagtgctggtgctgactctcaatagccccacccaagctggctataggtttacagatacattaattaggcaacctaaaatattgatgctggtgttggtgtgacataatgctatggccagaactgaaacttagagttataattcatgtattagggttctccagagggacagaattagtaggatatatgtatatatgaaagggaggttattagggagaactggctcccacagttagaaggcgaagtcgcacaataggccgtctgcaagctgggttagagagaagccagtagtggctcagcctgagttcaaaaacctcaaaactggggaagctgacagtgcagccagccttcagtctgtggccaaaggcccaagagcccctggcaaccaacccactggtgcaagtcctagattccaaaggctgaagatcctggagtctgatgtccaagagcaggaagagtggaagaaagccagaagactcagcaaacaaggtagacagagtctaccaccacagtggccataccaaagaggctaccgattccttcctgctacctggatccctgaagttgccctggtctctgcaccttctaaacctagttcttaagagctttccattacatgagctgtctcaaagccctccaataaattctcagtgtaagcttcaaaaaaaaaaaaaaaaaaa

SEQ ID NO: 2588 - protein, 33 aa, Homo sapien
MLLFPSLLFAATYNVANPSRLILYMISAGADSQ

SEQ ID NO: 2589 - DNA, 1704 bp, Homo sapien
agagtcgctgtttgcttaggagagatgaacctttctggtgggcagcaccgacacccagggggtggacccccgaggatgaatgcctctaggcctccgcaacatattcaagaatgaatgggagacgctagagtaaaatgggggcagagaggatatcagggagcaagatgcaaactgtgtgcatccactctcgtaaacaagtagctggtcacaaccagaaaggttcatctctcctaagcaaacagcgactctttcagaggaagtttccctctttcaatcgtggccttattttcaactccggtgccttctcgtgatgttaatcatttccttttttccccacactaagctctcttttctatctttctctctctttccaatcttacgccatggccatcagttcatttcagccttccagtgctacacccacttcttggctgacacacttctgctctaaggtgactggttttcttgccaattttcaaagagtggtactaacccccaacccgctttccgcaccccgtcctctccgccagcagtactggttgcactaactgtgagtgtcttgcatactgatggactcatttggtggcatggttggctaacagcatggcggggggtgttcagcttgagacccatgcctgtgttcatttcccatggagctggcagcctggtctaccccaagtgcatgccccgcctctcctctctcccttgggtctgcctgcgtgcatgcttctccagttgcgtctgcgaagctacctactttcttgggagggtcgaccttgatcatgaaacaataccatgagggggcctctgtcacctttgaaaagaacactttttgagcagcctcaaaaagctcatacataccagcgccttcttaaattggctctaatgtaaagattgttaatgtcatttatcaaaaccataggtgattatttggagggatttaaaaaacttaattactctcaggcctcatcccaagcttgacacatgctctgtaggttgaacacataatcacaaatattctagcaaatgctgccttggttgcagcctgcactgtagacccaagggttttgctgtggctcttcttatctcccttggctcataaagccccagatgatgccagagcttcaattagagccatcatcatcccaggcagggatatctttgagaaatgactcagttcagccccaggcccctgtgactctgcttaaagcacacatttctgctgactcttgtacctggggcagcaggataatcaccaacacactcttaacgagaaacaacacaccaagcacagtggagctgtcctaggcaacactcgcggtctcaggctgcggtgggcgtctgtcctgcatgtggcccagaccaccctgacccccgggcctgcctgcctggccctgcatgctgcacgctcactgtatttgtgcagatcctggccagtacaaagtcgttgctcttgtcttatcttctcttacagagtctccctccctttatagaatgtcaaccaaagagtgccctcctcccctctcagcctcctctttagctagcctccccatctcatcacaacgcatgtctgtgacctttggtaatcatttacagtgccacacggaaccctgtattttgcacacagcaaaacaaacaatgtttagctttatttatggtatttgatgctgtaaatggaaataaatattgttctttataaagctc

SEQ ID NO: 2590 - protein, 37 aa, Homo sapien
RVAVCLGEMNLSGGQHRHPGGGPPRMNASRPPQHIQE

SEQ ID NO: 2591 - DNA, 3885 bp, Homo sapien
ccgggccgcctcgctcgctcccagctctgtcagtggcccgcggggcccgatcgctgcgcccgcggccagggccgaggcaggcctgacccggggccgggcagcccgcgcgactttcggaacatggcaacccgtgtgtgtctcatcccagaaagagaagactttaaccactgtgatgcctgagaatccagtgtgacgtttctccagatacttcatgctgttcacctgtgtcctcgccgcaccactgccgcacacgactcctgaaccatgggggaaaacgaggatgagaagcaggcccaggcggggcaggtttttgagaactttgtccaggcatccacgtgcaaaggtaccctccaggccttcaacattctcacacgacacctggacctagaccctctggaccacagaaacttttattccaagctcaagtccaaggtgaccacctggaaagccaaagccctgtggtacaaattggataagcgtggttcccacaaagagtataagcgagggaagtcgtgcacgaacaccaagtgtctcatagttgggggaggaccctgtggcttgcgcactgccattgaacttgcctacctgggagccaaagtggtcgtggtggagaagagggactccttctcccggaacaacgtgctacacctctggcctttcaccatccatgaccttcggggcctgggagccaagaagttctatgggaagttctgtgctggctccatcgaccatatcagtattcgccaactacagctcatcctattcaaggtggccctgatgctgggagttgaaatccatgtgaatgtggagttcgtgaaggttctagagcctcctgaagatcaagaaaatcaaaaaattggctggcgggcagaatttctccctacagaccattctctgtcggagtttgagtttgacgtcatcattggtgccgatggccgcaggaacaccctggaagggttcagaagaaaagaattccgtgggaagctggcgattgccatcaccgccaacttcataaacagaaacagcacagcggaagccaaggtggaagagattagtggtgtggctttcatcttcaatcagaaattttttcaggaccttaaagaagaaacaggcatagatcttgagaacattgtttactacaaggactgcacccactattttgtaatgacagccaagaagcagagcctgctcgacaaaggtgtcatcattaacgactacatcgacacagagatgctgctgtgtgcggagaacgtgaaccaagacaacctgctatcctatgcccgggaagctgcagactttgccaccaactaccagctgccatccttagactttgccatgaaccactatgggcagcctgatgtggccatgtttgactttacctgcatgtatgcctcagagaacgcggccctggtgcgggagcggcaggcgcaccagctgctcgtggcccttgtgggtgacagcttgcttgagccattttggcccatgggtacaggctgtgcccgtggcttcctggcagcctttgacacggcatggatggtgaagagctggaaccagggcacccctcccctggagctgctggctgaaagggaaagtctctaccggctgttacctcagacaaccccggagaacatcaacaagaactttgagcagtacacgttggacccagggacacggtacccaaacctcaactcacactgtgtcaggccccatcaggtgaagcatttgtatatcactaaggagctggagcactaccctctcgagagactgggctcggtgaggagatctgtcaacctctccaggaaggagtcagatatccggcccagcaagctcctgacctggtgccagcagcagacagagggctaccagcatgtcaacgtcaccgacctgaccacatcctggcgcagtgggttggccctgtgtgccatcatccaccgcttccggcctgagctcatcaactttgactctttgaatgaagatgatgctgtggagaacaaccagctcgcatttgatgtggccgagcgagagtttgggatccctccagtgaccacgggcaaagagatggcatctgcccaggagcctgacaagctcagcatggtcatgtacctctccaagttctacgagctcttccggggcaccccactgaggcccgtggattcttggcgcaaaaactatggagaaaatgctgacctcagcttggccaaatcatccatttctaataactatctcaacctcacatttccaaggaagaggactccacgggtggatggtcaaaccggagagaatgacatgaacaaacggagacggaagggcttcaccaacctggacgagccttcaaacttttccagccgtagcttgggctccaatcaagagtgtgggagcagtaaggaaggtggaaatcagaacaaagtcaagtccatggcgaatcagctgctggccaagtttgaggagagcactcggaacccctcactcatgaagcaggaacgccgtgtctcagggataggtaagccggtcctgtgctcttcctccggccctcctgttcactcttgctgccccaagccggaggaggccacacccagcccatcacctcctctgaaaaggcagttcccctctgtggtcgtgacggggcacgtgctcagagagctcaagcaagtgtctgctggcagtgagtgcctgagcagaccttggagagccagagccaagtctgacctacagctgggtgggacagaaaatttcgctaccctgccttctacccgcccgagggcgcaggctctttccggggtgctgtggcggctgcagcaagtggaggaaaagattctccagaagagggctcagaacttggccaacagggaatttcacacaaagaacattaaggagaaggcggctcaccttgcctccatgtttggacacggggatttcccgcagaataaactgctctctaaaggcctgtctcatactcatcctccatctcctccctctcgccttccgtctcctgatccagctgcttcttcctctccatcaactgttgactctgcttctcctgccagaaaggaaaagaagtcaccttcagggttccattttcatcccagccatttgagaacagtgcatcctcagctgacggtagggaaagtgtccagcggaataggggctgcagctgaagtcctggtcaatctgtacatgaatgatcacagacctaaggcccaggccacctctccagacctggaatctatgcgaaagtcatttccccttaacctgggaggcagcgacacgtgttacttctgtaagaaacgtgtgtacgtgatggaacggctgagcgccgagggccacttcttccaccgggagtgtttccgctgcagcatctgtgccaccaccttgcgcctggccgcctacacctttgactgcgatgaaggcaaattttactgcaagcctcacttcattcactgtaaaaccaatagcaaacaacggaagagacgggcagagttgaagcaacaaagagaggaggaggcaacatggcaagagcaggaagcccctcggagagacactcccaccgaaagttcttgcgcagtggccgccattggcaccctggaaggcagccccccagttcatttcagccttccagtgctacacccacttcttggctgacacacttctgctctaagagtctccctccctttatagaatgtcaaccaaagagtgccctcctcccctctcagcctcctctttagctagcctccccatctcatcacaacgcatgtctgtgacctttggtaatcatttacagtgccacacggaaccctgtattttgcacacagcaaaacaaacaatgtttagctttatttatggtatttgatgctgtaaatggaaataaatattgttctttataaagct

SEQ ID NO: 2592 - protein, 1124 aa, Homo sapien
MGENEDEKQAQAGQVFENFVQASTCKGTLQAFNILTRHLDLDPLDHRNFYSKLKSKVTTWKAKALWYKLDKRGSHKEYKRGKSCTNTKCLIVGGGPCGLRTAIELAYLGAKVVVVEKRDSFSRNNVLHLWPFTIHDLRGLGAKKFYGKFCAGSIDHISIRQLQLILFKVALMLGVEIHVNVEFVKVLEPPEDQENQKIGWRAEFLPTDHSLSEFEFDVIIGADGRRNTLEGFRRKEFRGKLAIAITANFINRNSTAEAKVEEISGVAFIFNQKFFQDLKEETGIDLENIVYYKDCTHYFVMTAKKQSLLDKGVIINDYIDTEMLLCAENVNQDNLLSYAREAADFATNYQLPSLDFAMNHYGQPDVAMFDFTCMYASENAALVRERQAHQLLVALVGDSLLEPFWPMGTGCARGFLAAFDTAWMVKSWNQGTPPLELLAERESLYRLLPQTTPENINKNFEQYTLDPGTRYPNLNSHCVRPHQVKHLYITKELEHYPLERLGSVRRSVNLSRKESDIRPSKLLTWCQQQTEGYQHVNVTDLTTSWRSGLALCAIIHRFRPELINFDSLNEDDAVENNQLAFDVAEREFGIPPVTTGKEMASAQEPDKLSMVMYLSKFYELFRGTPLRPVDSWRKNYGENADLSLAKSSISNNYLNLTFPRKRTPRVDGQTGENDMNKRRRKGFTNLDEPSNFSSRSLGSNQECGSSKEGGNQNKVKSMANQLLAKFEESTRNPSLMKQERRVSGIGKPVLCSSSGPPVHSCCPKPEEATPSPSPPLKRQFPSVVVTGHVLRELKQVSAGSECLSRPWRARAKSDLQLGGTENFATLPSTRPRAQALSGVLWRLQQVEEKILQKRAQNLANREFHTKNIKEKAAHLASMFGHGDFPQNKLLSKGLSHTHPPSPPSRLPSPDPAASSSPSTVDSASPARKEKKSPSGFHFHPSHLRTVHPQLTVGKVSSGIGAAAEVLVNLYMNDHRPKAQATSPDLESMRKSFPLNLGGSDTCYFCKKRVYVMERLSAEGHFFHRECFRCSICATTLRLAAYTFDCDEGKFYCKPHFIHCKTNSKQRKRRAELKQQREEEATWQEQEAPRRDTPTESSCAVAAIGTLEGSPPVHFSLPVLHPLLG

SEQ ID NO: 2593 - DNA, 6926 bp, Homo sapien
cggaggcaggatgaagatgactgtggatttcgaggagtgtctgaaggactcgccccgcttcagggcagctttggaagaagtagaaggtgatgtggcagaattggaactaaaacttgataagcttgtgaaactttgtattgcaatgattgatactggaaaagccttttgtgttgcaaataaacagttcatgaatgggattcgagacctggctcagtattctagtaatgatgctgtcgttgagacaagtttgaccaagttttctgacagtcttcaagaaatgataaattttcacacaatcctgtttgaccaaactcagagatcaattaaggcacagcttcagaactttgttaaagaagatcttagaaaattcaaagatgccaagaagcaattcgaaaaagtcagtgaagaaaaagaaaatgcgttagtaaaaaatgcccaagtacaaagaaacaaacaacatgaagttgaagaagccaccaacattctgacagcaacaagaaaatgtttccgacacatagccctcgattatgtgcttcagattaatgttcttcaatcaaaaaggagatcagaaatcctaaaatcaatgttgtcatttatgtatgcccatttggccttctttcatcaaggatatgatctgtttagtgaacttggaccctacatgaaggatcttggtgcacagttggatcgactggttgtggatgcagcaaaggagaaaagagaaatggagcaaaaacattccaccattcaacaaaaggatttctccagtgatgattctaagttagaatataacgtagatgctgcaaatggcatagttatggaaggatatctgttcaaacgagccagcaatgccttcaaaacttggaacaggcgctggttttcaatacagaataatcagttggtttaccagaaaaaatttaaggataatccgactgtggtagttgaagacctcaggctttgcacagtgaaacattgtgaagacatagagcgacgattctgctttgaggtggtctcgccaacaaaaagttgcatgctccaggcagattccgaaaagctgcgccaggcatggattaaggctgttcagaccagtattgctactgcttatagagagaagggtgatgaatcagagaagctggataagaaatcatctccatccacaggaagcctagattctggaaatgagtccaaagagaaattattgaaaggagaaagtgcgcttcagcgggtccagtgtatccctggcaatgccagctgttgtgactgtggcctggcagatccacggtgggccagcatcaacctgggcatcaccttgtgtatcgagtgctccggaattcaccggagccttggggttcatttttcaaaagtacgatctttaactttagacacctgggagccagaacttttaaagcttatgtgtgagttggggaatgatgttataaatcgagtttatgaagctaatgtggaaaaaatgggaataaagaaaccccaaccaggacaaagacaggagaaggaggcatatatcagagcaaaatatgtggagaggaaatttgtggataaatattctatatcattatcacctcctgagcagcaaaaaaagtttgtctctaaaagttctgaagaaaagaggctgagcatttctaaatttgggccaggggaccaagtcagagcatctgcccaaagttcagtcagaagtaatgacagtggaattcagcagagctctgatgatggaagagaatctttaccctccacggtgtcagccaatagtttatatgagcctgaaggagaaaggcaagattcttctatgtttcttgactcgaaacatcttaatccaggacttcagctttatagggcgtcatatgaaaaaaaccttcctaaaatggctgaggctttggctcatggtgcagacgtgaactgggccaattcagaggaaaacaaagcgacaccacttattcaggctgtattagggggctctttggtgacgtgtgagttcctcctacagaatggtgctaatgtcaaccaaagagatgtccaagggcggggaccattgcaccatgccaccgtcttagggcacacagggcaggtatgtttattcctaaaacgaggtgccaatcaacatgccactgatgaagaagggaaagaccctttgagcatagctgtggaagcagccaatgctgatatagtcaccttgttacgtttagcaagaatgaatgaagagatgcgggaatcagaaggactttatggacagccaggtgatgaaacttatcaggacatatttcgtgatttttcccaaatggcatccaataatccagagaaactaaatcgtttccagcaagattcacagaaattctgaatttttttaaaaatgggaaaatatgaaatctggtgaccccctaatgtatacagctaaaaattcacaatttttttactgctttaattctacttaattttggtagatattgaatggcttggaaaagaggtacccattcatatatttataaattaaaacatagttatctagtagtaggagaggaacctagtttaggacctcttttattaaaaaagcctatttaaagggctatttctgtagacagaagttcagtctagatttaggccatctctaggttacaagatgataggaggttagacaaaagtgattcttttgccaatgggtggtggcattgatttttttcctccatgcatcttgcccaggatcactcagtcaagcatgtcttcatcaagtggaagccaactgtcctgcctgcctcaagaatatgtgttttctttagcttccctgaggatttttggtggttcagaaataggtgtgtgtgttgatgtgtttttggtaacctagctttcatacacataatatatgatttattagaactagagaatgtgttttccccgtttgttcataaatgcggtcggttatacttcttaggtgacaggttattgtccagtactttaatgtatgtatgtataatggctgtacaggtagaccataattcagtcctttagatttattttatgcagcaaaaagaagctctttttttttttaatcacaaaaaaaaaccccagttcaaaatgtgtagttcttcattgttgggttgattccccaaaaccttgacagatgtatcgatggaataaaagtatgttttaaaggttacttgaatgtcacaaaattatgccttcatcaaaactttaaaggaaaaatcaatttataaaatcatgtaggccatttttatatttgaaatttgtccttttaaagatagttttgctgttgctcctagtgaaagaaaaatctctgtacaaaggagaaaaagaaccccacttattcttagttaatactaaaatatatagcaataaattgctgtttattttttctacatctattttgtgtacttgtacacagtgtacattcttttaaattatatcgtgtatatagctttagtattcggttacatgattcacagacccctgaattccaaaatattatggataaacattaccatttatatgctacaaattagtctgattccatctttgaaaatgtcttaaagtataaaataattaatttgctttttttttttttttcccgagatggcgtcttgctgtgtcacccaggctggagtgcagtggcacgatctcagctcactgcagcctcctcctcttgggttcaagcaattctcctgcctcagcctcccgagtagctgggactacaggcacccgccaccattccgagctaatttctatatttttagtaaagacgggtttcaccattttggccaggttggtctcgaactcctgacctcaggtgatcagcctgctttagcctcccagagtgctgggattacaggcgtgagccaccgcacccagcctaatttgccttttgattccttcccattgttgtcaaaaattaagtctattcttcttttagaaattatatgtaaatgatattattgatactctttctaaataagaggttttaaaatatataaaaactttatgatccaattatagataaattttctaacatttcccagtcactagggttttataagttgattaaacatcaaatcagaatctagccaagcaggaattatattgaaataagttcacattacagaaaaggttccataatttggccaaactgcatgcatgtaatgcttatttagtaatggtcactgtatgttagataaggataaaaatatatttgtgaattacttctgaggaaatgctaacttccacagcattgtatttaattataacaataacaggaacattaaatctttatctttgctgtttcacctcaaagtcatagatcatctggctttttaggcaccttcactaaaggcaaaaatctgatttgtagtttttattagcatgtaccttgaaattatttgaccaagaagctcaaagaaaagaagtacgttaaagaaaaagaaaaaacctcacttttcctttatagtgtcccttcctgttttaattcctaaagatcctgacttttatctgaggaagtctaggtagttttccttttggatctggccattggtgcgtgtttcattcagatcacctctggaatctctgtggttgtgaaggcaattccttatgagactcttgcctcctgtggcttacgtgatgaattgttaatatggcagtaattaattagtatctacttaaatttagtggtcagaaatgtatttgaagtgccttaaagatgatcatggttcagaatatcttcagagaaagcaaaatctttaatattgcagggagcctagcaatacaaatacacatttctgtggcttgatttcttgaatatgctgagacccaatttggactacatttggcagaaatcatggagtaaacagcaaggctttaaattaaattaatagttacaaggtaggttggctcttaggtgaatttagccatgtcaactaatagcttttatatggtatgtaacaaatctgaattatgttatgctgtgaattattcagtgcattataagaaatcttagttaatcatgcttttgggcttcattagtcaatgtgattggccttttattttctttccataacttatctgctattattagtttcttattccttattattaatctgttagctcattatcattagcttactaacttgaaagttagattaatatcaaaataagaatagcagcactatgaagagttaataaaatgcaatttcatgttagagctagaataaaagtaattgagcagtcatttgcaaatgcttcattataacatttatgtgcttaagatttctaaggttttaaaaagttacctttaatacaatccttagaaactcagaaatttcctgatattcattagattatggtgtttgcctaatttataccggttttcactgtatattttaatgaactttgattggttacttttccagacatacagatttaatttggaatatgaactttggttcttcatgagtgcattttgaaaaagaaaaaaagtacacattcagaatctggccaatttaagtttgtattttaaaaatattttatgcatgttaagtatggtcgcagtaaatgaaattgtgtttaagactaaatttactaccgttttgaacagacattcccagatcattcttatattgtcagataacacttgtgtataatatcactttggaccatggacatgagctggaaaaatgatgtatttttgtagattgtatgtccagaatgactttagaaccgcatgatacggtggaaggagcactggactagtcgtcactaccctttttggattcagggctcctcacaattaaaatgagtgtaatgaaacaaggtgaaaatatagaagcatccctttgtatactgttttgctacttacagtgtacttggcattgctttatctcactggattctcatggtaggatttctgagatcttaatctaagctccaaagttgtctacttttttgatcctagggtgctccttttgttttacagagcagggtcacttgatttgctagctggtggcagaattggcaccattacccaggtctgactgaccaccagtcagaggcactttatttgtatcatgaaatgatttgaaatcattgtaaagcagcgaagtctgataatgaatgccagctttccttgtgctttgataacaaagactccaaatattctggagaacctggataaaagtttgaagggctagattgggatttgaagacaaaattgtaggaaatcttacatttttgcaataacaaacattaatgaaagcaaaacattataaaagtaattttaattcaccacatacttatcaatttcttgatgcttccaaatgacatctacagatatggttttgtggacatctttttctgtttacataaatttatccacttaaaatgtgataatgtggagacaaagcaagatttgattacataaacttttctctgcattggtcttttcactatcttatttgctaacttttcttatttttcttcaacctccccaccctccattttttggatattaaacagggaaagcttgctacattataaagattgttggcaccatttattttacacaaaggctaaaggttaacttttggaaatgatgagctacttttatatatgtgtttactcatgctttgtgatatttctggatcattccagtcataaagacttattacatgtactatttcttgctacctgtgaaaaggtatattttaaagaatgtataaccaacagtccatttactttttattagtatgtagaggatttgtatctaattcatgaatgtagttttacagtagtttgtcattgtaaatggagcaaagtacattatcttctaaaatgtacattatgtaagaattgtaaatatacttaagtaatttgtatgccaaaaaattacaataagtcaataaagatctcacctctggctt

SEQ ID NO: 2594 - DNA, 8124 bp, Homo sapien
gtttgtcgcagcaagaacaaacagcattccttccagcaaatcaagtgcctgttttacaacagaacacttcagttgctgcaaaacaaccccagacttctgtggtacagaatcaacaacagatatcacaacagggacctatatatgatgaagtggaattggatgcattggctgaaattgagcgaatagagagagaatcagctattgaaagggagcgcttctcaaaagaagttcaagataaagataagcctttgaaaaaaagaaaacaagattcttacccacaggaggctgggggtgctacaggaggtaatagaccagcttctcaggagacgggttctacgggaaatgggtcaaggccagcattaatggttagcattgatcttcatcaggcaggaagagtggactctcaggcttctataactcaggattcagactccataaaaaagcctgaagaaatcaaacaatgtaatgatgcacctgtttctgttcttcaggaagatattgttggaagtcttaaatctacaccagaaaaccatcctgagacacctaaaaaaaagtctgatcctgagctttcaaagagtgaaatgaaacaaagtgaaagtagattagcagaatctaaaccaaatgaaaaccgattggtggagacaaaatcaagtgaaaataagttagaaactaaagttgagacccaaacagaagaacttaaacagaatgagagcagaacaactgaatgcaaacaaaacgagagcaccatagttgagcctaaacaaaatgaaaatagactgtctgacacaaaaccaaatgacaacaaacaaaataatggcagatcagaaacaacaaaatcaaggcctgaaaccccaaagcaaaagggtgaaagccggcctgagactccaaaacaaaagagtgatgggcatcctgaaaccccaaaacagaagggtgatggaaggcctgaaactccaaagcaaaaaggtgagagccgccctgaaactccaaagcaaaaaaatgaagggcgacctgaaacaccaaaacacaggcatgacaataggagggattctggaaagccatctacagagaaaaaacctgaagtgtctaaacataaacaagatactaaatctgactcacctcggttaaaatcagaacgagctgaagccttaaagcagagacctgatgggcgatctgtttctgagtcactaagacgtgaccatgataataaacaaaaatcagatgacaggggtgaatcagagcgacatcgaggggatcagtctagggttcgaagaccagaaacattgagatcctctagtagaaatgaacatggcattaaatctgatagttcaaaaactgataaactagaacgaaaacacaggcatgaatcaggggactcaagggaaagaccatcttctggggaacaaaaatcaagacctgacagtcctcgtgttaaacaaggagattctaataaatcaagatctgataaacttggttttaaatcaccaactagtaaagatgacaaaaggacagagggtaacaagagtaaagtagacactaataaagcacaccctgacaataaggcagaatttccaagttatttgttggggggcaggtctggtgcgttgaaaaattttgtcattccgaaaatcaagagggataaagatggcaatgttactcaggagacaaagaaaatggaaatgaaaggagagccgaaagacaaagtagaaaaaataggattagttgaagatctaaataaaggagctaagcctgtagttgtgctacaaaaactgtctttggatgatgttcagaaacttattaaagatagagaggacaaatcaagaagttcccttaaacctatcaagaataaaccatcaaagtcaaataaaggtagtatagatcaatcagtgttaaaagaattaccccctgaactcctggcagaaattgagtccaccatgccactttgtgaacgtgtgaaaatgaacaaacgcaagcgtagcacagttaatgaaaagccaaaatatgctgaaatcagttcagatgaagataatgatagtgatgaagcttttgaatcctctaggaaacgacataaaaaagatgatgataaagcttgggaatatgaagagcgtgacagaagaagctctggggatcataggagaagtggccactctcatgaaggaagaaggagttcaggtggtggtcgttatcgaaaccgaagtccgtcagattctgacatggaagattattctcctcctcccagccttagtgaggttgctaggaaaatgaagaaaaaagaaaaacagaagaaaaggaaagcatatgaaccaaaactaacacctgaagaaatgatggactcttcaacttttaagagattcacagcctcaatagagaatattttggataatttggaagatatggattttactgcgtttggtgatgatgatgaaattcctcaggaactgctcttaggaaaacatcagcttaatgaacttggcagtgaatctgctaaaataaaagcaatgggtataatggataagctttcaactgacaaaactgtgaaagtcttaaatatcttggagaagaatattcaggatgggtcaaagctttccactttgttaaatcataataacgatactgaagaagaagaaaggttatggagagaccttattatggagagagttacaaaatcagcggatgcttgtcttacaactatcaacattatgacatcccctaacatgccaaaagctgtgtacattgaggatgtaattgaaagagttatacagtacactaaatttcatttgcagaatacactttatcctcagtatgatcctgtttacagattagatcctcatggaggaggcttattaagttcaaaagcaaaacgggctaaatgttctacccataagcagagagtaatagtaatgctttataacaaagtttgtgacattgttagcagcttatcagaattgctagagatacaacttcttacagacacaacaattcttcaggtttcatctatgggaataacaccattttttgtggaaaatgtcagtgaactacagttgtgtgccattaagttagtcactgcagtattctcaagatatgaaaaacataggcagttaattttggaagaaatttttacttcacttgcaagattaccaaccagcaagaggagtttaaggaacttcaggttaaacagtagtgatatggatggagaacctatgtatattcagatggttacagcactggttttacaacttattcagtgtgtggtacacttaccatcatcagagaaggactctaatgcagaagaagattcaaataaaaaaattgaccaggatgttgtcattactaactcttatgaaacagctatgcgaacagcccaaaacttcctctccatcttccttaaaaaatgtggtagtaagcaaggtgaagaagattacagaccactgtttgaaaattttgttcaagaccttctttcaacagtcaataagcctgaatggccagctgctgaactactccttagtttgttagggagactgttggttcatcagttcagtaacaagtcaacagagatggctttaagagtggcatctcttgattaccttggaactgttgctgcacggctaagaaaagatgctgttacaagcaaaatggatcaaggatctatagaacgcattttaaaacaggtttcaggaggggaagatgaaatccaacaattacaaaaagcattgcttgattacttggatgaaaacactgagactgatccttcactagtgttttctcgtaaattctatatagcccagtggtttcgagacacaactctggaaacagaaaaagcaatgaaatcacaaaaagatgaagaatcatctgaaggaacacatcatgcaaaggaaattgagacaactggccaaattatgcatcgagctgaaaaccgaaaaaagtttcttagaagcattatcaaaaccacaccttctcagtttagcacattaaagatgaactctgatactgtggactatgatgatgcttgcttgattgttcgatacttggcctccatgaggccgtttgcccagagctttgatatttatttgacacagatcctacgagttcttggtgaaaatgcaattgctgttcgaacaaaagccatgaagtgtttgtctgaggttgttgctgtagaccccagtattctagcaaggcttgatatgcaacgaggtgttcatggacgattgatggataattcgactagtgtccgagaagcagcagtagaattactaggtcgatttgtcctttgtcgacctcagcttgctgaacagtattatgatatgctgattgaaagaatattggatactggtatcagtgtcaggaaaagagtaataaagattctcagagacatttgtattgaacaaccaacatttccaaaaatcacagaaatgtgtgtaaaaatgattcgcagagtcaatgatgaagagggcattaagaaattagtaaatgaaacattccagaaactctggtttactccaactccacacaatgacaaagaagcaatgacaaggaaaattttaaacattaccgatgtggttgcagcatgcagagatactggatatgactggtttgagcaactgcttcaaaacttgttgaagtccgaagaggattcctcatataaacctgtgaagaaagcttgtactcaacttgttgataacctagttgagcacattcttaaatatgaggaatctctagctgactctgacaataaaggtgtgaattctggaagattggtagcttgcataaccactttgttcttattcagcaaaataagaccccagctcatggttaaacatgcaatgactatgcaaccataccttaccactaaatgtagtacgcaaaatgatttcatggttatctgcaatgttgcaaaaatcctagagctagttgtaccactgatggagcatccaagtgaaacttttcttgccactattgaggaagatctaatgaagctcatcatcaaatatggcatgactgtagtgcaacattgtgtgagctgtcttggagctgttgtaaataaagtgacacaaaattttaaatttgtgtgggcttgtttcaatagatactatggtgccatttcaaaattaaaaagtcaacaccaagaggacccaaataacacttcacttctaacaaacaaaccagcacttcttagatcccttttcaccgttggagcactatgtcggcattttgattttgatctggaagattttaaaggcaacagcaaggttaacataaaagataaagtacttgaactattgatgtattttacaaaacactcagatgaagaagtacaaacaaaagctatcattggtctaggatttgcctttattcagcatccaagtctaatgttcgagcaagaagtgaagaatctatataataatattttatctgataagaactcctcagtcaatttaaaaatacaagtgttaaaaaacctccagacctacctacaagaagaagatacacgtatgcagcaggcagatagagactggaagaaagttgcaaaacaggaagacttaaaagaaatgggtgatgtttcctcagggatgagtagttccatcatgcagctttatctcaaacaggtgcttgaggcattttttcacacccagtcaagtgtacgccactttgccctaaatgtcattgcattgactctaaatcaaggtcttattcatccagttcagtgtgtgccatatttaattgctatgggcacagacccagaacctgctatgcggaacaaggctgatcagcaacttgtggaaatagacaaaaaatatgctggattcattcatatgaaagcagtggctggtatgaagatgtcttaccaggtacaacaggcaatcaacacatgcctaaaagatcctgtaaggggtttcagacaagacgagtcctctagcgctttgtgttcacacctttactccatgatccgtggaaaccgccaacacagacgagcctttcttatttctttactcaacctctttgatgacacagcaaaaacagacgtgactatgctcttgtatatagcagacaatctagcctgttttccataccagacacaggaagagccgttgtttataatgcatcatatagacattacactctcagtttctggtagtaacctactgcagtcattcaaggagtctatggtaaaggacaaaaggaaagagagaaaatcatcacctagtaaggaaaatgagtcaagcgacagtgaagaagaagtttccaggcctcggaagtcacggaaacgtgtagattcagattcagattcagattcagaagacgatataaattcagtgatgaaatgtttgccagaaaattcagctcctttaatcgaatttgcaaatgtgtcccagggtattttattacttctcatgttaaaacaacatttgaagaatctttgtggattttctgatagtaaaattcagaagtactctccatctgaatctgcaaaagtatatgataaagcgataaaccgaaaaacaggagttcattttcatccaaaacaaacactggacttcctgcggagtgacatggctaattccaaaatcacagaagaggtgaaaaggagtatagtaaaacagtatctagatttcaaacttctcatggaacatctggaccctgatgaagaagaagaagaaggggaggtttcagctagcacaaatgctcggaacaaagcaattacctcactgcttggaggaggcagccctaaaaataatacagcagcagagacagaagatgatgaaagtgatggggaggatagaggaggaggcacttcagggtcattgagaaggtcaaaacgaaattcagactctacggagttggcagcacagatgaatgaaagtgttgacgtcatggatgtcatcgctatttgctgtccaaagtacaaagatcgaccacaaattgcaagagtagtgcagaaaaccagcagtggcttcagtgttcagtggatggcaggctcctacagtggctcctggactgaggctaagcgccgtgatggccgcaaactggtgccttgggtagacactattaaagagtcagacattatttacaaaaaaattgctctaacgagtgctaataagctgactaataaagttgttcagactttacgatccctgtatgccgccaaggatgggacttccagctaatgaatttgtacatgcagccaaatttacaggaattttttttaaaaggcagaaaaacttgaaataccaacattctggcaaaaaaaaatcagttttatgaagagtaagtggaacctgggatgcaggaacaaaagaaggaaatgttgggcaaacatttttgtgggagctcccttcgctgttgtgcagcagaaacagattctcagttcatttttactcccactgtattatagtttaacaaaaattgtttatatcttggaaaaaaaactttctgtttaaaaaaaataaacaagtgaatgttggaaattagtctgttaatgttcttaataaagtgttcttggagtttaacctagcagcggatggctttctttagcttagcccagtttccagggaagcattgttttttccaggctgtaaaatggcagaatctcctggatatataatttattctgttgaaaaaaaaaaaagcatgcagtatctatgacctatctgcagaaggagtttttgtaaatgtagattttgatgtattaggtcaccctgaaaacaatacaagaaaagggatccccaggtaatctggtggagcgaatactgcaataaatttttttacttctctttgttacttgtctgtttccatttgaatttcttattgtaaaaatctgtttaaatccatttatattattttacagtcttttatgtaaaatttattatatcactggttttcaaagcaaaacataaaatattgtttatacagtttgtataggctgacttctgaataattggtatctattattttcattcccataagagggtgtaaacaattaactccagggttttattgtatcctgcaatatttagtattaactatatatgatttagcactgtgccaaacacattttcaagagtacattttgatataaaaagaaactatagtttaaaaaaaaaaaaaaaaaaaaaaaaaaaaaaaaaaaaa

SEQ ID NO: 2595 - protein, 2000 aa, Homo sapien
MVSIDLHQAGRVDSQASITQDSDSIKKPEEIKQCNDAPVSVLQEDIVGSLKSTPENHPETPKKKSDPELSKSEMKQSESRLAESKPNENRLVETKSSENKLETKVETQTEELKQNESRTTECKQNESTIVEPKQNENRLSDTKPNDNKQNNGRSETTKSRPETPKQKGESRPETPKQKSDGHPETPKQKGDGRPETPKQKGESRPETPKQKNEGRPETPKHRHDNRRDSGKPSTEKKPEVSKHKQDTKSDSPRLKSERAEALKQRPDGRSVSESLRRDHDNKQKSDDRGESERHRGDQSRVRRPETLRSSSRNEHGIKSDSSKTDKLERKHRHESGDSRERPSSGEQKSRPDSPRVKQGDSNKSRSDKLGFKSPTSKDDKRTEGNKSKVDTNKAHPDNKAEFPSYLLGGRSGALKNFVIPKIKRDKDGNVTQETKKMEMKGEPKDKVEKIGLVEDLNKGAKPVVVLQKLSLDDVQKLIKDREDKSRSSLKPIKNKPSKSNKGSIDQSVLKELPPELLAEIESTMPLCERVKMNKRKRSTVNEKPKYAEISSDEDNDSDEAFESSRKRHKKDDDKAWEYEERDRRSSGDHRRSGHSHEGRRSSGGGRYRNRSPSDSDMEDYSPPPSLSEVARKMKKKEKQKKRKAYEPKLTPEEMMDSSTFKRFTASIENILDNLEDMDFTAFGDDDEIPQELLLGKHQLNELGSESAKIKAMGIMDKLSTDKTVKVLNILEKNIQDGSKLSTLLNHNNDTEEEERLWRDLIMERVTKSADACLTTINIMTSPNMPKAVYIEDVIERVIQYTKFHLQNTLYPQYDPVYRLDPHGGGLLSSKAKRAKCSTHKQRVIVMLYNKVCDIVSSLSELLEIQLLTDTTILQVSSMGITPFFVENVSELQLCAIKLVTAVFSRYEKHRQLILEEIFTSLARLPTSKRSLRNFRLNSSDMDGEPMYIQMVTALVLQLIQCVVHLPSSEKDSNAEEDSNKKIDQDVVITNSYETAMRTAQNFLSIFLKKCGSKQGEEDYRPLFENFVQDLLSTVNKPEWPAAELLLSLLGRLLVHQFSNKSTEMALRVASLDYLGTVAARLRKDAVTSKMDQGSIERILKQVSGGEDEIQQLQKALLDYLDENTETDPSLVFSRKFYIAQWFRDTTLETEKAMKSQKDEESSEGTHHAKEIETTGQIMHRAENRKKFLRSIIKTTPSQFSTLKMNSDTVDYDDACLIVRYLASMRPFAQSFDIYLTQILRVLGENAIAVRTKAMKCLSEVVAVDPSILARLDMQRGVHGRLMDNSTSVREAAVELLGRFVLCRPQLAEQYYDMLIERILDTGISVRKRVIKILRDICIEQPTFPKITEMCVKMIRRVNDEEGIKKLVNETFQKLWFTPTPHNDKEAMTRKILNITDVVAACRDTGYDWFEQLLQNLLKSEEDSSYKPVKKACTQLVDNLVEHILKYEESLADSDNKGVNSGRLVACITTLFLFSKIRPQLMVKHAMTMQPYLTTKCSTQNDFMVICNVAKILELVVPLMEHPSETFLATIEEDLMKLIIKYGMTVVQHCVSCLGAVVNKVTQNFKFVWACFNRYYGAISKLKSQHQEDPNNTSLLTNKPALLRSLFTVGALCRHFDFDLEDFKGNSKVNIKDKVLELLMYFTKHSDEEVQTKAIIGLGFAFIQHPSLMFEQEVKNLYNNILSDKNSSVNLKIQVLKNLQTYLQEEDTRMQQADRDWKKVAKQEDLKEMGDVSSGMSSSIMQLYLKQVLEAFFHTQSSVRHFALNVIALTLNQGLIHPVQCVPYLIAMGTDPEPAMRNKADQQLVEIDKKYAGFIHMKAVAGMKMSYQVQQAINTCLKDPVRGFRQDESSSALCSHLYSMIRGNRQHRRAFLISLLNLFDDTAKTDVTMLLYIADNLACFPYQTQEEPLFIMHHIDITLSVSGSNLLQSFKESMVKDKRKERKSSPSKENESSDSEEEVSRPRKSRKRVDSDSDSDSEDDINSVMKCLPENSAPLIEFANV

SEQ ID NO: 2596 - DNA, 2113 bp, Homo sapien
  Unsure 1838-1860, 2078: Unknown base
aacttgattatattaattttgggttttttgttttgttttgttttgttttttaatttttcaaagaatttgtggatcttggtataaagtcattggaacatatctgttttaacagcaagagatcctaggcagatacttcaaaaggttaaaaattcttaatcctacagaattttaaatgaatcttatcaatgttttgtaaacaaacaatatgaatggccaaaaaattgccctccattttactggcaggtaatttatattgtcttacttaagaattctcccctagtttttcaattgtactttatcgtgttgttttcaatgagataagtattttcatagggaaagcattttccagcataatatttgcttgggtagcatccgggttttagtatttaaccaagagccttttaaatattgaaaacccatagttcagaaaatgttagtattgctgcccttcttcacataaatttttttttaaattatactattattttgcttaattttatattgggttaaaacaaccttcaagaaggttaactaggaaagaagacctttttgttttatttttactatttatatatagaagacaaatcagcatttggtgatagttttacatgaccagttatcaaacggtcatagtatgaagtgtgcagttgttcattattagtaaattatgtttgatttttaaactatttagtactaatagttgagatgaaaactgaagaaaaatgccaatgtgacgtttgtgtatagctagccttaaaaaacttcccatgtttttaggtgacttttttccccctcttagtactctggagaaacaatgaagatgggccatctcaattccagatgtaaacaaaaagtaatttttatttcaacatttaatgtaactgctattattgtggattcttgtcttgtgtattttctttcccttattcaagtaatatagaataactttccttaaaatgatttgatccaagatacgtcatttctgtattggcaaaatgccactattaaagtgtaattcttgaatttaggttgaattgatgactttttaaaacaaaacaaacactggacagttctacattgtattgcgtttgcgaatgtgcgtgaacacacgcacacgtgcaggagaatgtagtgccataagaacactggcgctttttaaaactttccaagctagctacttattttcattttcagggttgagtactctaagctctctacttactgtgagaagttttctacattgtaaaattaaaagattatatttaaaatacttctttaggatgttattcagccatcaaaaaaaaacccaactaaaatgtcttaccagtaaagtattattaaaagcctcatttgtggagattcgctgacttccttggttaagctgtcttgtatttacttaatttgtcccctcaaccaggtgttttcttttcagcctgttactgtcctgtgccatttttaaaaatagccatcatgagtaagggcttctttaaaataatccctgacaatatctttggcattaatacgacataaagacaagacagtatatgtatgttttcattcctgttttgtacgagtgcctcattttgtagtcatgaaagtaacatagtaccttaaataaaaatgtaatgactaatctaaggtctaggaataactattgtagaagctaagtagaacacttagtttggggtgtcaattttctatcaacgcaaacaccttagggtacccagaccaattttatgtatatatattctgaaatgctccctttttaatgtggtcatttgttgccttctaagttgagaggacaaaactgaataaagtgaatgttaattgtagtctannnnnnnnnnnnnnnnnnnnnnnattgcaagattgctttaagattgcagaaatatgcattattagccagcatagataatccagatgttataataggaaggaaaaacaactccagttaaaatgtgactgtggcgactcccttttatgtatacatttaaatgcatagttgcagaggacacatccctccccttctgtctccctaacttgaactgtagaccgtcctcactgggaagaggtagggncacattttgtgcaatagcaagctatggccacttct

SEQ ID NO: 2597 - protein, 43 aa, Homo sapien
  unsure 33: unknown amino acid
  Unsure 1838-1860, 2078: Unknown amino acid
MYTFKCIVAEDTSLPFCLPNLNCRPSSLGRGRXTFCAIASYGH

SEQ ID NO: 2598 - DNA, 1837 bp, Homo sapien
gagccgcgcacgggactgggaaggggacccacccgagggtccagccaccagccccctcactaatagcggccaccccggcagcggcggcagcagcagcagcgacgcagcggcgacagctcagagcagggaggccgcgccacctgcgggccggccggagcgggcagccccaggccccctccccgggcacccgcgttcatgcaacgcctggtggcctgggacccagcatgtctccccctgccgccgccgccgcctgcctttaaatccatggaagtggccaacttctactacgaggcggactgcttggctgctgcgtacggcggcaaggcggcccccgcggcgccccccgcggccagacccgggccgcgcccccccgccggcgagctgggcagcatcggcgaccacgagcgcgccatcgacttcagcccgtacctggagccgctgggcgcgccgcaggccccggcgcccgccacggccacggacaccttcgaggcggctccgcccgcgcccgcccccgcgcccgcctcctccgggcagcaccacgacttcctctccgacctcttctccgacgactacgggggcaagaactgcaagaagccggccgagtacggctacgtgagcctggggcgcctgggggccgccaagggcgcgctgcaccccggctgcttcgcgcccctgcacccaccgcccccgccgccgccgccgcccgccgagctcaaggcggagccgggcttcgagcccgcggactgcaagcggaaggaggaggccggggcgccgggcggcggcgcaggcatggcggcgggcttcccgtacgcgctgcgcgcttacctcggctaccaggcggtgccgagcggcagcagcgggagcctctccacgtcctcctcgtccagcccgcccggcacgccgagccccgctgacgccaaggcgcccccgaccgcctgctacgcgggggccgcgccggcgccctcgcaggtcaagagcaaggccaagaagaccgtggacaagcacagcgacgagtacaagatccggcgcgagcgcaacaacatcgccgtgcgcaagagccgcgacaaggccaagatgcgcaacctggagacgcagcacaaggtcctggagctcacggccgagaacgagcggctgcagaagaaggtggagcagctgtcgcgcgagctcagcaccctgcggaacttgttcaagcagctgcccgagcccctgctcgcctcctccggccactgctagcgcggcccccgcgcgcgtccccctgccggccggggctgagactccggggagcgcccgcgcccgcgccctcgcccccgcccccggcggcgccggcaaaactttggcactggggcacttggcagcgcggggagcccgtcggtaattttaatattttattatatatatatatctatatttttgtccaaaccaaccgcacatgcagatggggctcccgcccgtggtgttatttaaagaagaaacgtctatgtgtacagatgaatgataaactctctgcttctccctctgcccctctccaggcgccggcgggcgggccggtttcgaagttgatgcaatcggtttaaacatggctgaacgcgtgtgtacacgggactgacgcaacccacgtgtaactgtcagccgggccctgagtaatcgcttaaagatgttcctacgggcttgttgctgttgatgttttgttttgttttgttttttggtctttttttgtattataaaaaataatctatttctatgagaaaagaggcgtctgtatattttgggaatcttttccgtttcaagcattaagaacacttttaataaacttttttttgagaatggttacaaagcc

SEQ ID NO: 2599 - protein, 345 aa, Homo sapien
MQRLVAWDPACLPLPPPPPAFKSMEVANFYYEADCLAAAYGGKAAPAAPPAARPGPRPPAGELGSIGDHERAIDFSPYLEPLGAPQAPAPATATDTFEAAPPAPAPAPASSGQHHDFLSDLFSDDYGGKNCKKPAEYGYVSLGRLGAAKGALHPGCFAPLHPPPPPPPPPAELKAEPGFEPADCKRKEEAGAPGGGAGMAAGFPYALRAYLGYQAVPSGSSGSLSTSSSSSPPGTPSPADAKAPPTACYAGAAPAPSQVKSKAKKTVDKHSDEYKIRRERNNIAVRKSRDKAKMRNLETQHKVLELTAENERLQKKVEQLSRELSTLRNLFKQLPEPLLASSGHC

SEQ ID NO: 2600 - DNA, 3614 bp, Homo sapien
agcggagttgcgggcgcgtggctgctgaggttggcggcggtgccgcgcgcccgacgggccggtggttgcggggcctcccgcctcgacccgggctgggggcagccgtggcggccgccggggaccgcaaggggcggaggaaaggagggggccggtcccggcacgcagaggagcagccgaccatgccccgagacaacatggcctccttgatccaacggatcgcccgccaggcttgcctcaccttccggggcagctggggcggccgcggcgcttccgatcgcgacgcggcttctggcgcggaggcgccgatgcagccgggcttccccgagaacctgagcaagctgaagagcctcctgacccagctccgcgccgaggacttgaacatcgccccgcgcaaggccacactgcagccgctgccgcccaacctgccgccagtcacctacatgcacatctacgagacggacggcttcagcctgggcgtgttcctgctcaagagcggcacgtccatcccgctgcacgaccacccgggcatgcacggcatgctcaaggtgctgtacggcaccgtgcgcatcagctgcatggacaagctagacgcgggcggcgggcaacggccgcgggccttgccgcccgagcagcagttcgagccgccgctgcagccccgggagcgagaagccgtgcggccgggcgtgctgcgttcgcgggccgagtacaccgaggccagcggcccctgcatcctcacaccgcaccgggacaacctgcaccagatcgacgccgtggaagggcctgccgccttcctggacatcctggccccgccctacgacccggacgatggccgggactgccactattaccgggtgctggagccggtcaggcccaaggaggcctccagctcggcctgtgacctgcctcgagaggtgtggctcctggagaccccacaggccgatgacttctggtgcgagggagaaccctatccaggtcccaaggtcttcccttgaagccactggcgcccaggagcggtgggccgaagacgtgccctaccctaccacaagggctgtgtctctaccccctagcctgggcgttggatctactggaatgagcagcagccgcttcctcggcagccttgggaagcacgggcgactggacagcagccgccgggcacggttatgggggcggggtgggcggggaggctagattgtttcctggtactgtcactgccactggggctttgatttggaggaatggggcaggggactatctgaagcgcttccatcctaaagccataatgaaaatatcttcctctcttccccattctatacaaaatactaagtggttttcttgctcccactccctaccccttagttaaatagggtttattttccactcatgcccttatgcctttttttcttatagttttttaacttattgactgtgcatgacccagtggtttgaattgtttttagttcaagtcattggtaaaaactaggtttaaggagatgagctactgtttaaagtgagctggcctgcctaattaattccttgtgaaaactaaatgattttttcagtttggggatcattctcacaacataactatgcatgtagaggacgagatttattttctttcctccctttgcccagtagccacatctggtttactcaggcagcatctactaagaaattcagcacctgcatatctctgtgacatggtcacttagagcttatcttccctatgaatctccagatctgtgagtcgagcagatttcatgttgcagattcacctttaatgcaaagactgtattatcctcacatgactttttttcttgtcttactgtaccttaaaaggtgatagagtaattctgtattttctaacgggaagattcaaaggagctgaatgtgttatgcttccaaacaactgaatgtaaaacactcctagccagttgttgcattccctatatttatttacttccaatattttactgtaaaagtagggagaaatattatgttgatagttgtttcatattctctcaggaactttaatgttcccgactcgggtgattccagctgtgttgctggcagtgttgtctcaaccctctccctaaaatgactgagccctgggttcatctaatgtggttttccttaggaagagatagaaggcacagaagatcacagctagagaattgagaattaactatactactagccattttagggcaccaaaacttgggattaaacacttcctacttcccactcccaactcctgaaatgaagtcttgctatctgtgactagttttatttttgtgcttttaatagtccgagcagtcttaccttgtttacacatgtattgacaccatttgcttcaggccatggagcactgtttctccctttttactatttataggattccgttttttcacaagacttttaataaaaagaaattgtagaaataaacacattaaaatttgcccagctgtcgtctaagccctcttgattgacttgcccaagtggcaatagagttctaatatctataataaagggagatttgctattattagtggaatgttgaccccgtatgtagagaaacagtacgtgcctttgcctctttatgcacacagagacccagggtgagggagtatttgttcccagtttttaagatagtataaaaaagcaaatacttggtgagtgatttaaaaataaaaccaaaacaaaacacaaaaagatattccacaggacatgccactttattataaaacctgacacaggcatagtaccaagtatttcctgcattgttgctaaaattgttttattgtagctccacattctggtgtagtttaaaatgcctttgggggcagtttgaagcagttcttcatgccacttagtttgaaaataaaattctagatatgcaaatgattttcttagaaaacttcacaaaataaaagatcttgtttttttttccatagcacagtaatgaatgtggttatcaatcacatacttttttggattatattgtagcaaaaagttgattagcttaccaagattattaatagcaatgtatgtgttataatacaacttagtacattaaagctacgaaaactcatcctggctgtaggatagtaataaaggaagaattatgacttcattatgaaaaaaagaagttttaaagttttcaattacgagcaatttggaagaaaaaacctaaggtgcttttcaaaagagtaactgaaattgttgcaggccaaaacagcaatatgatatctcagatttagttcaataagaacagtgaaacttttggttcactaataaattctgagtaaattagtggtgaagacaaaatataacttgttttagtgagccactgaggaaagaatatgcttattacaaagacaaaatgtggtgcagaaactatcttgcacctgtgtgcataaactgttagtcgtgactgacttggtgtgttgctattgtgtttctatatactccgtccaatatagataatgttttaataacaactgtgggataaaagttatcttccccttggaaagactaatgagcacaatgatattaatcacttttatggtgaataataaatgcaataattgcctcatgggtgaaaaaaaaaaaaaaaa

SEQ ID NO: 2601 - protein, 228 aa, Homo sapien
MQPGFPENLSKLKSLLTQLRAEDLNIAPRKATLQPLPPNLPPVTYMHIYETDGFSLGVFLLKSGTSIPLHDHPGMHGMLKVLYGTVRISCMDKLDAGGGQRPRALPPEQQFEPPLQPREREAVRPGVLRSRAEYTEASGPCILTPHRDNLHQIDAVEGPAAFLDILAPPYDPDDGRDCHYYRVLEPVRPKEASSSACDLPREVWLLETPQADDFWCEGEPYPGPKVFP

SEQ ID NO: 2602 - DNA, 2935 bp, Homo sapien
ttaaatgttttgcttcatgcaaaatcttgtaattttagatgtgcttagttttttaaagattatctgcatataaaattaaggtaaaagataagcaaagatttctgtaatgaagcatattttcagttcagtgtgagttgctcatttgttaattttgtcagtaggatgattttgttagggaaaacgcaatcactgcgaaaaatgtgatatagaaaacattttgcttgaaggattggctttgtttttgtgtggggaatttagtgcattttccattctattagtcatcatatattaaatagtcgtaaatgtagagttattaaataattgagcttttttccattttaggtttactcaggattcactccttctccagttgcacagccacacccttcagctggccttaatgttgactttgaatctgtgtttggaaataaatctacaaatgttattgtagattctgggggtggacttctcaaaccaacagtggcctctcagaaccagaaccttcctgttgccaaactcccacctagcaagttagtatctgatgacttggattcatctttagccaaccttgtgggcaatcttggcatcggaaatggaaccactaagaatgatgtaaattggagtcaaccaggtgaaaagaagttaactgggggatctaactggcaaccaaaggttgcaccaacaaccgcttggaatgctgcaacaatgaatggcatgcattttccacaatacgcaccccctgtaatggcctatcctgctactacaccaacaggcatgataggatatggaattcctccacaaatgggaagtgttcctgtaatgacgcaaccaaccttaatatacagccagcctgtcatgagacctccaaacccctttggccctgtatcaggagcacagatacagtttatgtaacttgatggaagaaaatggaattactccaaaaagacaagtgctcaagcagcaaaatccttacttccagcaaaatccaaactgctgtctcttaaatctcttaaactctcttcttccattagaatgctacaagtaactcagtgaaggcccatgaaggaaattgggactagtttataggagaacgtatcaatacagtttataaagccaagaattgctatgatttaagactaagatctgtctttttggtgactaacccttcaattctttcaactcctgttaatacccataatcagtaacctatcaagaaaagcccttatttggaaagtgtgaaatttgtatttggaaaagctgcctggagagaagaactgtgtcctttactgtatttcaacaggactcttttgggggatcaaaattaaaattcctaattatgcattatctttcttttctccagtcctcacaaatacagaaacaataactgaaattaacttttctttttttaaaaaaaattatattcagtttgcagtagacattccttaagtatttgtatttatttatgattatcaattttacataacattaatattgtatcagacctccttatgaaaatgagtatggatgtgcacagtatgtttgatttttatccacaagaatgaatctgattcagaatgcttttctcagctgacatacagagcactaaatattttaaggcaagtccataggtctgaatctcttaagaattctcggcctctgtgggatttagggaagcattataaatgcattaatccttatagtcaattctgtgcctaggattttgccagggaacagttcactgactaggaaaagcactacattttaaattcagcattagtgcattgggaaggatctttactgctttgtgcttggcatgtcattattttccatttgacattagggcctttccaaaatgaatgtgaggaattgctttcacttcaagactttccttcttttcactaaaactctagaaggtgttacaagggggagggaaggggggcaaagtccttgaacattttctttggctcgtgccatgttatgatcatataccttttaaataaggggaaatagtatctttaaagttaatgtctagccaagagtttagtaaacgaagaattaaactgcactgttgatcggtgctttgtgtaaatacatctttaacatttgggtggagaggggccttaagaaggacagttcattgtaggaaagcaattctgtacatgagtttaagcattcttgttgcattgtctctgcagattctatttttgtttacaatattaaaatgtatgttagcaaaatgggtggattttcaaataaaatgcagcttccacaaaagttttgttatggtattctggtctgagatgcattttcatttttcctttctctttttattatcaatattgtcatttttccctaataaaatatacccaggtgattatatttgttgatctaataacatggaaggtttgttttatatgaattttcaaaaagatgtctctttacactttttgttaccttgtagactcttattgataaatgcaactacttattaaaattgttcactttttgtcttttgatcagatgcctttagtcaggtaagtttaagggaaaatacgcagtttaatgttttggtacatataattatgtctgccaaagaaacctttgattgtatcatattgcctatttagtagtgcatagggttcagagtacatgataaaggatcaaaagctttgcattgataagtgtctcataatatttgctgtgattggagaaaaaatgtagtcgtagccaataaattttatcagcttttaagtttcagtattattaaaccattttcatataaactgggaagttgtacttttataagttaccctccttaactttacaaatttttgtctcttgtggtgtttgaggaggtgtttatatttaaggtctgtggcttgttttctttcatattgcctttttttttttaagtatgtttcagtatgcatagcgg

SEQ ID NO: 2603 - protein, 15 aa, Homo sapien [sequence omitted]

SEQ ID NO: 2604 - DNA, 3880 bp, Homo sapien
gctcgccgccgcccgcccaggcggcgatgacacggcgcccgcggcggcccggaggcgccgggtgggccgtttgctgaccggatcgcggctacccgccagcgtgtccgcggcgccgccgccagcatgggctgtgccccgagcatccacatttccgagcgcctggtggccgaggacgcgcctagccccgcggcaccgccgctgtcgtccggcgggccgcgcctcccgcagggccagaagacggccgccttgccccggacccgcggcgccggcctcttggagtcggagcttcgcgacggcagcggcaagaaggtagcagtagctgatgtgcagtttggccccatgagatttcatcaagatcaacttcaggtacttttagtgtttaccaaagaagataaccaatgtaatggattctgcagggcatgtgaaaaagcagggtttaagtgtacagttaccaaggaggctcaggctgtccttgcctgtttcctggacaaacatcatgacattatcatcatagaccacagaaatcctcgacagctggatgcagaggcactgtgcaggtctatcagatcatcaaaactctcagaaaacacagttattgttggtgtagtacgcagggtggatagagaagagttgtccgtaatgcctttcatttctgctggatttacaaggaggtatgtagaaaaccccaacatcatggcctgctacaatgaactgctccagctggagtttggagaggtgcgatcacaactgaaactcagggcttgtaacagtattcactgcattagaaaacagtgaagatgcaattgaaattacaagcgaagaccgttttatacagtatgcaaatcctgcatttgaaacaacaatgggctatcagtcaggtgaattaatagggaaggagttaggagaagtgcctataaatgaaaaaaaggctgacttgctcgatactataaattcatgcatcaggataggcaaggagtggcaaggaatttactatgccaaaaagaaaaacggagataatatacaacaaaatgtgaagataatacctgtcattggacagggaggaaaaattagacactatgtgtccattatcagagtgtgcaatggcaacaataaggctgagaaaatatccgaatgtgttcagtctgacactcatacagataatcagacaggcaaacataaagacaggagaaaaggctcactagacgtcaaagctgttgcctcccgtgcaactgaagtttccagccagagacgacactcttccatggcccggatacattccatgacaattgaggcgcccatcaccaaggtaatcaatattatcaatgctgcccaggaaagtagtcccatgcctgtgacagaagccctagaccgtgtgctggaaattctaagaaccactgagttatattcaccacagtttggtgctaaagatgatgatccccatgccaatgaccttgttgggggcttaatgtctgatggtttgcgaagactatcagggaatgaatatgttctttcaacaaaaaacactcaaatggtttcaagcaatataatcactcccatctcccttgatgatgtcccgccacggatagctcgggccatggaaaatgaggaatactgggactttgatatttttgaactggaggctgccacccacaataggcctttgatttatcttggtctcaaaatgtttgctcgctttggaatctgtgaattcttacactgctccgagtcaacgctaagatcatggttacaaattatcgaagccaattatcattcctccaatccctaccacaattctacacattctgctgatgtgcttcatgccactgcctattttctctccaaggagaggataaaggaaactttagatccaattgatgaggtcgctgcactcatcgcagccaccattcatgatgtggatcaccctgggagaaccaactccttcctgtgtaatgctggaagtgagctggccattttgtacaatgacactgctgtgctggagagccaccatgcggccttggccttccagctgaccactggagatgataaatgcaatatatttaaaaacatggagaggaatgattatcggacactgcgccaggggattatcgacatggtcttagccacagaaatgacaaagcactttgagcatgtcaacaaatttgtcaacagcatcaacaaacccttggcaacactagaagaaaatggggaaactgataaaaaccaggaagtgataaacactatgcttaggactccagagaaccggaccctaatcaaacgaatgctgattaaatgtgctgatgtgtccaatccctgccgacccctgcagtactgcatcgagtgggctgcacgcatttcggaagaatatttttctcagactgatgaagagaagcagcagggcttacctgtggtgatgccagtgtttgacagaaatacctgcagcatccccaaatcccaaatctctttcattgattacttcatcacagacatgtttgatgcttgggatgcctttgtagacctgcctgatttaatgcagcatcttgacaacaactttaaatactggaaaggactggacgaaatgaagctgcggaacctccgaccacctcctgaatagtgggagacaccacccagagccctgaagctttgttccttcggtcatttggaattcctgagggcagccagagctccttggtcctttcagtactaggcagaacagcccccgatctgcatagcctgtgaaagcccacggggacatcagtaaccttctgcagccaccatccaatgccattactgtcaagtgagacttggccactgtagcctgggcctgctgcaggagctcttcagaaaggcacatgaggaccacggtttgcctcagtttctggtaaaacacaaggtctggagtgcccctgcaaagggtattgatggacttcctgccagtgacagagcatgtctattgcaaacaattctctcagttacgttcagcacttaagaacggctaatggcaataggatctttagcaactttttcacatcatagaaggtgcaatcgctcacttgggaacactactgagagtgacttctcttttaaaattgagtagcagatgaaaaattaaaatttgaacttgattattaatatcaattaaaatgttttatttattttattaaaagctcaatattttctatgaattcaaaaatacttcagagccaaagccaacttcaaataccgtgaccaaatttacatgattcatattcattatgcattacttggtatacagacttattttcataatgcaaattaataaaatgacacttttactgcactatagaaatattcatgtatgttaaacttttctgattgaggctaactggaaaaagctggggtcgtattctaagtgctaaagaaggctgcttctactgtatagaacccagggctctgaaacagctctagccgcctaatgcacttcacaggtaactccccaaggtaaaactagactctcttgttggttcgcaaagaaaagttaggacttaacacttttttctaaaattttataattcaatttccaaaagtctactctattttatactgtttctacaaaatattccttataaaaacaaagaacaaaaattgaatatttaatgaattgacattttataaccaacctgtttttatctacggtgggaatctttgatgccagaaatttataaagaggttctgtatcttcacaccttgaataagcataataccataaaaaatgacacttgacatgtcaatgtatttgtcatttcattttaaactcgtatttgtggtttttttcccagataaaaatgaaattaaaccatttctttttaagaaaaaaaaaaaaaaaaaaaaaaaaaaaaaaaaa

SEQ ID NO: 2605 - protein, 828 aa, Homo sapien
MGCAPSIHISERLVAEDAPSPAAPPLSSGGPRLPQGQKTAALPRTRGAGLLESELRDGSGKKVAVADVQFGPMRFHQDQLQVLLVFTKEDNQCNGFCRACEKAGFKCTVTKEAQAVLACFLDKHHDIIIIDHRNPRQLDAEALCRSIRSSKLSENTVIVGVVRRVDREELSVMPFISAGFTRRYVENPNIMACYNELLQLEFGEVRSQLKLRACNSIHCIRKQEDAIEITSEDRFIQYANPAFETTMGYQSGELIGKELGEVPINEKKADLLDTINSCIRIGKEWQGIYYAKKKNGDNIQQNVKIIPVIGQGGKIRHYVSIIRVCNGNNKAEKISECVQSDTHTDNQTGKHKDRRKGSLDVKAVASRATEVSSQRRHSSMARIHSMTIEAPITKVINIINAAQESSPMPVTEALDRVLEILRTTELYSPQFGAKDDDPHANDLVGGLMSDGLRRLSGNEYVLSTKNTQMVSSNIITPISLDDVPPRIARAMENEEYWDFDIFELEAATHNRPLIYLGLKMFARFGICEFLHCSESTLRSWLQIIEANYHSSNPYHNSTHSADVLHATAYFLSKERIKETLDPIDEVAALIAATIHDVDHPGRTNSFLCNAGSELAILYNDTAVLESHHAALAFQLTTGDDKCNIFKNMERNDYRTLRQGIIDMVLATEMTKHFEHVNKFVNSINKPLATLEENGETDKNQEVINTMLRTPENRTLIKRMLIKCADVSNPCRPLQYCIEWAARISEEYFSQTDEEKQQGLPVVMPVFDRNTCSIPKSQISFIDYFITDMFDAWDAFVDLPDLMQHLDNNFKYWKGLDEMKLRNLRPPPE

SEQ ID NO: 2606 - DNA, 921 bp, Homo sapien
ccggtagcgggtgtgggggcgcgagcagcgcagggcggcctctcccccacccctcagcccgggcccgggctcggtcccccctctccctccgcttcgcactcccgtcgggtacgggaaggtccaagccgctgccgggtgcccgagggccgtcgtggccgccgtcgccacgggtcccaatggagccgccgaatctctatccggtgaagctctacgtgtacgacctgtccaaaggcctggcccggcggctcagccccatcatgctggggaaacaactggaaggcatctggcacacatccatagttgtgcacaaggatgagttcttcttcggcagtggtggtatctccagctgccccccgggagggacattgcttgggcctccagactctgtggttgatgtggggagtacagaagtcacagaagaaatctttctggagtacctctcctccctgggggagtccctgttccgaggtgaggcctacaacctctttgaacacaattgtaacaccttcagcaacgaagtggcacagttcctgactgggcggaagattccttcttacatcacagacctgccctctgaagttctctccacgccctttggacaggcacttcggcccctcctggactccattcagatccagcctccaggagggagctccgtgggcagacccaacggccagagctaacaggactgcctgggaccgccctgcctcaccagggcttttcctttttaaacaaaacaaaccctaccagatttctattttataattttacatcagagctaacaaccaggggacggctttttaaatttcccagggaaggagaccgtcaggccgcatgtagacaatgctgctaagaaacagaacaaaatgccaccccttctaatagtattatactaatttattaaaaaaaaaaaaaaaaaaa

SEQ ID NO: 2607 - protein, 226 aa, Homo sapien
GSGCGGASSAGRPLPHPSARARARSPLSLRFALPSGTGRSKPLPGARGPSWPPSPRVPMEPPNLYPVKLYVYDLSKGLARRLSPIMLGKQLEGIWHTSIVVHKDEFFFGSGGISSCPPGGTLLGPPDSVVDVGSTEVTEEIFLEYLSSLGESLFRGEAYNLFEHNCNTFSNEVAQFLTGRKIPSYITDLPSEVLSTPFGQALRPLLDSIQIQPPGGSSVGRPNGQS

SEQ ID NO: 2608 - DNA, 1667 bp, Homo sapien
gaaaactggccatgactacagccagaactgttatgagattaacatttctattgagaagcttttgagtaaagtactgtatttgttcatgaagatgactgagatggtaacacttcgtgtagcttaaggaaatgggcagaatttcgtaaatgctgttgtgcagatgtgttttccctgaatgctttcgtattagtggcgaccagtttctcacagaattgtgaagcctgaaggccaagaggaagtcactgttaaaggactctgtgccatcttacaaccttggatgaattatcctgccaacgtgaaaacctcatgttcaaagaacacttccctttagccgatgtaactgctggttttgtttttcatatgtgtttttcttacactcatttgaatgctttcaagcatttgtaaacttaaaaaatgtataaagggcaaaaagtctgaacccttgttttctgaaatctaatcagttatgtatggtttctgaagggtaattttattttggaataggtaaaggaaacctgttttgtttgtttttcctgagggctagatgctttttttttctcacactcttaatgacttttaacatttatactgagcatccatagatatattcctagaagtatgagaagaattattcttattgaccattaatgtcatgttcattttaatgtaatataattgagatgaaatgttctctggttggaacagatactctctttttttttcttgcaatctttaagaatacatagatctaaaattcattagcttgacccctcaaagtaacttttaagtaaagattaaagcttttcttctcagtgaatatatctgctagaaggaaatagctgggaagaatttaatgatcagggaaattcattatttctatatgtggaaactttttgcttcgaatattgtatctttttaaatctaaatgttcatatttttcctgaagaaaccactgtgtaaaaatcaaattttaattttgaatggaataatttcaaagaactatgaagatgatttgaagctctaatttatatagtcacctataaaatgttctttatatgtgttcataagtaaattttatattgattaagttaaacttttgaattgatttgaggagcagtaaaatgaaagctatatctattctaaaccttatttagacattggtaccagttacccaggtgaaaatatggagtaactttgttttgtatggtaaggtttaggaatggtggatgaagggtatctctatataaataaagtgctcaacaatgtgcaatgattgtaaatttagtaagatattacagccatttcatgaatgctttaccattcaacatagtatctattacaaaacacctttcttgtatccatatacttcaggtgttgctgttaacatttactatgatatttattttaaccaaaatgttactcacattaaatgtttattctttaaaatgaatgtattatgtttttaacccacaaatgcatacttaccctgtgcctcatatttcaatagtactgtaatatggacatcttttgtgaaatacttttattttgttatgctttaaatatacatacaaaaagatttctgttattagctttgaaaattgtataatatcctaatataaacaaaaatataaaaataaaaatgaatacagtaaaaaaaaaaaaaaaaa

SEQ ID NO: 2609 - protein, 40 aa, Homo sapien
KTGHDYSQNCYEINISIEKLLSKVLYLFMKMTEMVTLRVA

SEQ ID NO: 2610 - DNA, 7522 bp, Homo sapien
gcggccgggccgggccgcgggagcaggcggaggcggaggcggcgggggcaggaggatgtcgcagccgccgctgctccccgcctcggcggagactcggaagttcacccgggcgctgagtaagccgggcacggcggccgagctgcggcagagcgtgtctgaggtggtgcgcggctccgtgctcctggcaaagccaaagctaattgagccactcgactatgaaaatgtcatcgtccagaagaagactcagatcctgaacgactgtttacgggagatgctgctcttcccttacgatgactttcagacggccatcctgagacgacagggtcgatacatatgctcaacagtgcctgcgaaggcggaagaggaagcacagagcttgtttgttacagagtgcatcaaaacctataactctgactggcatcttgtgaactataaatatgaagattactcaggagagtttcgacagcttccgaacaaagtggtcaagttggataaacttccagttcatgtctatgaagttgacgaggaggtcgacaaagatgaggatgctgcctcccttggttcccagaagggtgggatcaccaagcatggctggctgtacaaaggcaacatgaacagtgccatcagcgtgaccatgaggtcatttaagagacgatttttccacctgattcaacttggcgatggatcctataatttgaatttttataaagatgaaaagatctccaaagaaccaaaaggatcaatatttctggattcctgtatgggtgtcgttcagaacaacaaagtcaggcgttttgcttttgagctcaagatgcaggacaaaagtagttatctcttggcagcagacagtgaagtggaaatggaagaatggatcacaattctaaataagatcctccagctcaactttgaagctgcaatgcaagaaaagcgaaatggcgactctcacgaagatgatgaacaaagcaaattggaaggttctggttccggtttagatagctacctgccggaacttgccaagagtgcaagagaagcagaaatcaaactgaaaagtgaaagcagagtcaaacttttttatttggacccagatgcccagaagcttgacttctcatcagctgagccagaagtgaagtcatttgaagagaagtttggaaaaaggatccttgtcaagtgcaatgatttatctttcaatttgcaatgctgtgttgccgaaaatgaagaaggacccactacaaatgttgaacctttctttgttactctatccctgtttgacataaaatacaaccggaagatttctgccgatttccacgtagacctgaaccatttctcagtgaggcaaatgctcgccaccacgtccccggcgctgatgaatggcagtgggcagagcccatctgtcctcaagggcatccttcatgaagccgccatgcagtatccgaagcagggaatattttcagtcacttgtcctcatccagatatatttcttgtggccagaattgaaaaagtccttcaggggagcatcacacattgcgctgagccatatatgaaaagttcagactcttctaaggtggcccagaaggtgctgaagaatgccaagcaggcatgccaaagactaggacagtatagaatgccatttgcttgggcagcaaggacattgtttaaggatgcatctggaaatcttgacaaaaatgccagattttctgccatctacaggcaagacagcaataagctatccaatgatgacatgctcaagttacttgcagactttcggaaacctgagaagatggctaagctcccagtgattttaggcaatctagacattacaattgataatgtttcctcagacttccctaattatgttaattcatcatacattcccacaaaacaatttgaaacctgcagtaaaactcccatcacgtttgaagtggaggaatttgtgccctgcataccaaaacacactcagccttacaccatctacaccaatcacctttacgtttatcctaagtacttgaaatacgacagtcagaagtcttttgccaaggctagaaatattgcgatttgcattgaattcaaagattcagatgaggaagactctcagccccttaagtgcatttatggcagacctggtgggccagttttcacaagaagcgcctttgctgcagttttacaccatcaccaaaacccagaattttatgatgagattaaaatagagttgcccactcagctgcatgaaaagcaccacctgttgctcacattcttccatgtcagctgtgacaactcaagtaaaggaagcacgaagaagagggatgtcgttgaaacccaagttggctactcctggcttcccctcctgaaagacggaagggtggtgacaagcgagcagcacatcccggtctcggcgaaccttccttcgggctatcttggctaccaggagcttgggatgggcaggcattatggtccggaaattaaatgggtagatggaggcaagccactgctgaaaatttccactcatctggtttctacagtgtatactcaggatcagcatttacataattttttccagtactgtcagaaaaccgaatctggagcccaagccttaggaaacgaacttgtaaagtaccttaagagtctgcatgcgatggaaggccacgtgatgatcgccttcttgcccactatcctaaaccagctgttccgagtcctcaccagagccacacaggaagaagtcgcggttaacgtgactcgggtcattattcatgtggttgcccagtgccatgaggaaggattggagagccacttgaggtcatatgttaagtacgcgtataaggctgagccatatgttgcctctgaatacaagacagtgcatgaagaactgaccaaatccatgaccacgattctcaagccttctgccgatttcctcaccagcaacaaactactgaagtactcatggtttttctttgatgtactgatcaaatctatggctcagcatttgatagagaactccaaagttaagttgctgcgaaaccagagatttcctgcatcctatcatcatgcagtggaaaccgttgtaaatatgctgatgccacacatcactcagaagtttcgagataatccagaggcatctaagaacgcgaatcatagccttgctgtcttcatcaagagatgtttcaccttcatggacaggggctttgtcttcaagcagatcaacaactacattagctgttttgctcctggagacccaaagaccctctttgaatacaagtttgaatttctccgtgtagtgtgcaaccatgaacattatattccgttgaacttaccaatgccatttggaaaaggcaggattcaaagataccaagacctccagcttgactactcattaacagatgagttctgcagaaaccacttcttggtgggactgttactgagggaggtggggacagccctccaggagttccgggaggtccgtctgatcgccatcagtgtgctcaagaacctgctgataaagcattcttttgatgacagatatgcttcaaggagccatcaggcaaggatagccaccctctacctgcctctgtttggtctgctgattgaaaacgtccagcggatcaatgtgagggatgtgtcacccttccctgtgaacgcgggcatgactgtgaaggatgaatccctggctctaccagctgtgaatccgctggtgacgccgcagaagggaagcaccctggacaacagcctgcacaaggacctgctgggcgccatctccggcattgcttctccatatacaacctcaactccaaacatcaacagtgtgagaaatgctgattcgagaggatctctcataagcacagattcgggtaacagccttccagaaaggaatagtgagaagagcaattccctggataagcaccaacaaagtagcacattgggaaattccgtggttcgctgtgataaacttgaccagtctgagattaagagcctactgatgtgtttcctctacatcttaaagagcatgtctgatgatgctttgtttacatattggaacaaggcttcaacatctgaacttatggatttttttacaatatctgaagtctgcctgcaccagttccagtacatggggaagcgatacatagccagaacaggaatgatgcatgccagattgcagcagctgggcagcctggataactctctcacttttaaccacagctatggccactcggacgcagatgttctgcaccagtcattacttgaagccaacattgctactgaggtttgcctgacagctctggacacgctttctctatttacattggcgtttaagaaccagctcctggccgaccatggacataatcctctcatgaaaaaagtttttgatgtctacctgtgttttcttcaaaaacatcagtctgaaacggctttaaaaaatgtcttcactgccttaaggtccttaatttataagtttccctcaacattctatgaagggagagcggacatgtgtgcggctctgtgttacgagattctcaagtgctgtaactccaagctgagctccatcaggacggaggcctcccagctgctctacttcctgatgaggaacaactttgattacactggaaagaagtcctttgtccggacacatttgcaagtcatcatatctgtcagccagctgatagcagacgttgttggcattgggggaaccagattccagcagtccctgtccatcatcaacaactgtgccaacagtgaccggcttattaagcacaccagcttctcctctgatgtgaaggacttaaccaaaaggatacgcacggtgctaatggccaccgcccagatgaaggagcatgagaacgacccagagatgctggtggacctccagtacagcctggccaaatcctatgccagcacgcccgagctcaggaagacgtggctcgacagcatggccaggatccatgtcaaaaatggcgatctctcagaggcagcaatgtgctatgtccacgtaacagccctagtggcagaatatctcacacggaaagaagcagtccagtgggagccgccccttctcccccacagccatagcgcctgcctgaggaggagccggggaggcgtgtttagacaaggatgcaccgccttcagggtcattaccccaaacatcgacgaggaggcctccatgatggaagacgtggggatgcaggatgtccatttcaacgaggatgtgctgatggagctccttgagcagtgcgcagatggactctggaaagccgagcgctacgagctcattgccgacatctacaaacttatcatccccatttatgagaagcggagggattttgagaggctggcccatctgtatgacacgctgcaccgggcctacagcaaagtgaccgaggtcatgcactcgggccgcaggcttctggggacctacttccgggtagccttcttcgggcaggcagcgcaataccagtttacagacagtgaaacagatgtggagggattctttgaagatgaagatggaaaggagtatatttacaaggaacccaaactcacaccgctgtcggaaatttctcagagactccttaaactgtactcggataaatttggttctgaaaatgtcaaaatgatacaggattctggcaaggtcaaccctaaggatctggattctaagtatgcctacatccaggtgactcacgtcatccccttctttgacgaaaaagagttgcaagaaaggaaaacagagtttgagagatcccacaacatccgccgcttcatgtttgagatgccatttacgcagaccgggaagaggcagggcggggtggaagagcagtgcaaacggcgcaccatcctgacagccatacactgcttcccttatgtgaagaagcgcatccctgtcatgtaccagcaccacactgacctgaaccccatcgaggtggccattgacgagatgagtaagaaggtggcggagctccggcagctgtgctcctcggccgaggtggacatgatcaaactgcagctcaaactccagggcagcgtgagtgttcaggtcaatgctggcccactagcatatgcgcgagctttcttagatgatacaaacacaaagcgatatcctgacaataaagtgaagctgcttaaggaagttttcaggcaatttgtggaagcttgcggtcaagccttagcggtaaacgaacgtctgattaaagaagaccagctcgagtatcaggaagaaatgaaagccaactacagggaaatggcgaaggagctttctgaaatcatgcatgagcagctgggatgatctgccccctggaggagaagacgagcgtcttaccgaattcccttcacatcttcaacgccatcagtgggactccaacaagcacaatggttcacgggatgaccagctcgtcttcggtcgtgtgattacatctcatggcccgtgtgtggggacttgctttgtcatttgcaaactcaggatgctttccaaagccaatcactggggagaccgagcacagggaggaccaggggaaggggagagaaaggaaataaagaacaacgttatttcttaacagactttctataggagttgtaagaaggtgcacatatttttttaaatctcactggcaatattcaaagttttcattgtgtcttaacaaaggtgtggtagacactcttgagctggacttagattttattcttccttgcagagtagtgttagaatagatggcctacagaaaaaaaaggttctgggatctacatggcagggagggctgcactgacattgatgcctgggggaccttttgcctcgaggctgagctggaaaatcttgaaaatattttttttttcctgtggcacattcaggttgaatacaagaactatttttgtgactagtttttgatgacctaagggaactgaccattgtaatttttgtaccagtgaaccaggagatttagtgcttttatattcatttccttgcatttaagaaaatatgaaagcttaaggaattatgtgagcttaaaactagtcaagcagtttagaaccaaaggcctatattaataaccgcaactatgctgaaaagtacaaagtagtacagtatattgttatgtacatatcattgttaatacagtcctggcattctgtacatatatgtattacatttctacatttttaatactcacatgggcttatgcattaagtttaattgtgataaatttgtgctgttccagtatatgcaatacactttaatgttttattcttgtacataaaaatgtgcaatatggagatgtatacagtctttactatattaggtttataaacagttttaagaatttcatccttttgccaaaatggtggagtatgtaattggtaaatcataaatcctgtggtgaatggtggtgtactttaaagctgtcaccatgttatattttcttttaagacattaatttagtaattttatatttgggaaaataaaggtttttaattttatttaactggaatcactgccctgctgtaattaaacattctgtaccacatctgtattaaaaagacattgctgacc

SEQ ID NO: 2611 - protein, 2000 aa, Homo sapien
MSQPPLLPASAETRKFTRALSKPGTAAELRQSVSEVVRGSVLLAKPKLIEPLDYENVIVQKKTQILNDCLREMLLFPYDDFQTAILRRQGRYICSTVPAKAEEEAQSLFVTECIKTYNSDWHLVNYKYEDYSGEFRQLPNKVVKLDKLPVHVYEVDEEVDKDEDAASLGSQKGGITKHGWLYKGNMNSAISVTMRSFKRRFFHLIQLGDGSYNLNFYKDEKISKEPKGSIFLDSCMGVVQNNKVRRFAFELKMQDKSSYLLAADSEVEMEEWITILNKILQLNFEAAMQEKRNGDSHEDDEQSKLEGSGSGLDSYLPELAKSAREAEIKLKSESRVKLFYLDPDAQKLDFSSAEPEVKSFEEKFGKRILVKCNDLSFNLQCCVAENEEGPTTNVEPFFVTLSLFDIKYNRKISADFHVDLNHFSVRQMLATTSPALMNGSGQSPSVLKGILHEAAMQYPKQGIFSVTCPHPDIFLVARIEKVLQGSITHCAEPYMKSSDSSKVAQKVLKNAKQACQRLGQYRMPFAWAARTLFKDASGNLDKNARFSAIYRQDSNKLSNDDMLKLLADFRKPEKMAKLPVILGNLDITIDNVSSDFPNYVNSSYIPTKQFETCSKTPITFEVEEFVPCIPKHTQPYTIYTNHLYVYPKYLKYDSQKSFAKARNIAICIEFKDSDEEDSQPLKCIYGRPGGPVFTRSAFAAVLHHHQNPEFYDEIKIELPTQLHEKHHLLLTFFHVSCDNSSKGSTKKRDVVETQVGYSWLPLLKDGRVVTSEQHIPVSANLPSGYLGYQELGMGRHYGPEIKWVDGGKPLLKISTHLVSTVYTQDQHLHNFFQYCQKTESGAQALGNELVKYLKSLHAMEGHVMIAFLPTILNQLFRVLTRATQEEVAVNVTRVIIHVVAQCHEEGLESHLRSYVKYAYKAEPYVASEYKTVHEELTKSMTTILKPSADFLTSNKLLKYSWFFFDVLIKSMAQHLIENSKVKLLRNQRFPASYHHAVETVVNMLMPHITQKFRDNPEASKNANHSLAVFIKRCFTFMDRGFVFKQINNYISCFAPGDPKTLFEYKFEFLRVVCNHEHYIPLNLPMPFGKGRIQRYQDLQLDYSLTDEFCRNHFLVGLLLREVGTALQEFREVRLIAISVLKNLLIKHSFDDRYASRSHQARIATLYLPLFGLLIENVQRINVRDVSPFPVNAGMTVKDESLALPAVNPLVTPQKGSTLDNSLHKDLLGAISGIASPYTTSTPNINSVRNADSRGSLISTDSGNSLPERNSEKSNSLDKHQQSSTLGNSVVRCDKLDQSEIKSLLMCFLYILKSMSDDALFTYWNKASTSELMDFFTISEVCLHQFQYMGKRYIARTGMMHARLQQLGSLDNSLTFNHSYGHSDADVLHQSLLEANIATEVCLTALDTLSLFTLAFKNQLLADHGHNPLMKKVFDVYLCFLQKHQSETALKNVFTALRSLIYKFPSTFYEGRADMCAALCYEILKCCNSKLSSIRTEASQLLYFLMRNNFDYTGKKSFVRTHLQVIISVSQLIADVVGIGGTRFQQSLSIINNCANSDRLIKHTSFSSDVKDLTKRIRTVLMATAQMKEHENDPEMLVDLQYSLAKSYASTPELRKTWLDSMARIHVKNGDLSEAAMCYVHVTALVAEYLTRKEAVQWEPPLLPHSHSACLRRSRGGVFRQGCTAFRVITPNIDEEASMMEDVGMQDVHFNEDVLMELLEQCADGLWKAERYELIADIYKLIIPIYEKRRDFERLAHLYDTLHRAYSKVTEVMHSGRRLLGTYFRVAFFGQAAQYQFTDSETDVEGFFEDEDGKEYIYKEPKLTPLSEISQRLLKLYSDKFGSENVKMIQDSGKVNPKDLDSKYAYIQVTHVIPFFDEKELQERKTEFERSHNIRRFMFEMPFTQTGKRQGGVEEQCKRRTILTAIHCFPYVKKRIPVMYQHHTDLNPIEVAIDEMSKKVAELRQLCSSAEVDMIKLQLKLQGSVSVQVNAGPLAYARAFL

SEQ ID NO: 2612 - DNA, 2335 bp, Homo sapien
gctttgcagagtgattatcagcacagttccctgccctggataaggaacagctacagtcgctgttaaatgtgcctgaaaagcaatttgcaatctttgcattaggatttcagatgcatgccaggtttccactgattgccagaactcgagatcactacacatggatccccaaaatcaacatggcagtggcagttcgttagttgtgatccagcagccttctttggatagccgtcagagattagactatgagagagagattcagcctactgctattttgtccttagaccagatcaaggccataagaggcagcaatgaatacacagaagggccttcggtggtgaaaagacctgctcctcggacagcaccaagacaagaaaagcatgaaaggactcatgaaatcataccaattaatgtgaataataactacgagcacagacacacaagccacctgggacatgcagtactcccaagtaatgccaggggccccattttgagcagatcaaccagcactggaagtgcagccagctctgggagcaacagcagtgcctcttctgaacagggactgttaggaaggtcaccaccaaccagaccagtccctggtcataggtctgaaagggcaatccggacccagcccaagcaactgattgtggatgacttgaagggttccttgaaagaggacctgacacagcacaagttcatttgtgaacagtgtgggaagtgcaagtgtggagaatgcactgctcccaggaccctaccatcctgtttggcctgtaaccggcagtgcctttgctctgctgagagcatggtggaatatggaacctgcatgtgcttagtcaagggcatcttctaccactgctccaatgacgacgaaggggattcctattcagataatccttgctcctgttcacaatcacactgctgctctagatacctgtgtatgggagccatgtctttatttttaccttgcttactctgttatcctcctgctaaaggatgcctgaagctgtgcaggaggtgttatgactggatccatcgcccagggtgcagatgtaagaactccaacactgtctattgtaagctggagagctgcccctcccggggtcagggtaaaccatcatgatttttggaggtgggttgtacctcctgaacttttagctttcaagttgtggctgttttttgtttttgtttttgtttttgttttctttagaatttttccctgtttcccaccttctcttcccctgttgccaaggtctaactcatggatttttctctttcctcatggatgatcttcagcaagagtggactgggaagctgcacctggctcccactttcaacaagagcctctgccatccacttgagggtattgagagccagtgggcttttgtgtagcctttttgttctgcaagcaactttctaaagttgtgtacatgaacatacacccacatccagactacagtgatttagagttgttttgattgggtaccgtgggagcagggaaattggttttttaaaaagcaactgtttaattgcttaaataagctatgtattaaatctgtctccagttagggctatcttcctagcataggccccttaagtagcatgggggatatattttttgctataacgtaaaaattttcctttaaccactgccctctccttctttctccttcaaggttctttccccctcagttttgttgttgtcttactctggagatgccaagtgtattttttctttctatgtaattttagattcgccttacaatgtaaatcttcacattggagataatattggttggaccttgcccatcttcactctagccttcgtatttgtgaaggactcagccaccttccttcttcaccccatgcttctcaccaaatttttgttgtcattgagggcacttggataactcaagttgatatttatagctgatcaatctatatgtgtcacagaactatgctgcctaaagtgatcttggctccttaatggtccttttggccccttggatagttaacagctgagtaattctaatctcttctgtgttttccttgccttaaccacaaattgtggtgctttttgtatattttatgtataaatcacaaagttgaattctgactatttttaagacaaaagtctgttaaacttttttattgtaaagaatatttattatgcgaatctctattattttatggtatttattgcaaaagactgttgaaatgtactcatgtttgaatataacaaaatatcaatacttaacggaaaataaggtgacacgaagaaagtacatatgttaactataatgcagaaaatatattaattaatgaaaaaaaaaaaaaaaaa

SEQ ID NO: 2613 - protein, 319 aa, Homo sapien
MDPQNQHGSGSSLVVIQQPSLDSRQRLDYEREIQPTAILSLDQIKAIRGSNEYTEGPSVVKRPAPRTAPRQEKHERTHEIIPINVNNNYEHRHTSHLGHAVLPSNARGPILSRSTSTGSAASSGSNSSASSEQGLLGRSPPTRPVPGHRSERAIRTQPKQLIVDDLKGSLKEDLTQHKFICEQCGKCKCGECTAPRTLPSCLACNRQCLCSAESMVEYGTCMCLVKGIFYHCSNDDEGDSYSDNPCSCSQSHCCSRYLCMGAMSLFLPCLLCYPPAKGCLKLCRRCYDWIHRPGCRCKNSNTVYCKLESCPSRGQGKPS

SEQ ID NO: 2614 - DNA, 11043 bp, Homo sapien
  Unsure 6964-6995: Unknown base
ttgctgcgtcaactgtgttccctttggcctggctgagtttgatactgtggggattcagtttaggcgctggcccgaggatatcccagcggtggtacttcggagacacctgtctgcatctgactgagccggctctcctggcctcgcgctgcacattctctcctggcggcggcgccacctgcagtagcgttcgcccgaacatggcgacacggagcagcaggagggagtcgcgactcccgttcctattcaccctggtcgcactgctgccgcccggagctctctgcgaagtctggacgcagaggctgcacggcggcagcgcgcccttgccccaggaccggggcttcctcgtggtgcagggcgacccgcgcgagctgcggctgtgggcgcgcggggatgccaggggggcgagccgcgcggacgagaagccgctccggaggaaacggagcgctgccctgcagcccgagcccatcaaggtgtacggacaggttagtctgaatgattcccacaatcagatggtggtgcactgggctggagagaaaagcaacgtgatcgtggccttggcccgagatagcctggcattggcgaggcccaagagcagtgatgtgtacgtgtcttacgactatggaaaatcattcaagaaaatttcagacaagttaaactttggcttgggaaataggagtgaagctgttatcgcccagttctaccacagccctgcggacaacaagcggtacatctttgcagacgcttatgcccagtacctctggatcacgtttgacttctgcaacactcttcaaggcttttccatcccatttcgggcagctgatctcctcctacacagtaaggcctccaaccttctcttgggctttgacaggtcccaccccaacaagcagctgtggaagtcagatgactttggccagacctggatcatgattcaggaacatgtcaagtccttttcttggggaattgatccctatgacaaaccaaataccatctacattgaacgacacgaaccctctggctactccactgtcttccgaagtacagatttcttccagtcccgggaaaaccaggaagtgatccttgaggaagtgagagattttcagcttcgggacaagtacatgtttgctacaaaggtggtgcatctcttgggcagtgaacagcagtcttctgtccagctctgggtctcctttggccggaagcccatgagagcagcccagtttgtcacaagacatcctattaatgaatattacatcgcagatgcctccgaggaccaggtgtttgtgtgtgtcagccacagtaacaaccgcaccaatttatacatctcagaggcagaggggctgaagttctccctgtccttggagaacgtgctctattacagcccaggaggggccggcagtgacaccttggtgaggtattttgcaaatgaaccatttgctgacttccaccgagtggaaggattgcaaggagtctacattgctactctgattaatggttctatgaatgaggagaacatgagatcggtcatcacctttgacaaagggggaacctgggagtttcttcaggctccagccttcacgggatatggagagaaaatcaattgtgagctttcccagggctgttcccttcatctggctcagcgcctcagtcagctcctcaacctccagctccggagaatgcccatcctgtccaaggagtcggctccaggcctcatcatcgccactggctcagtgggaaagaacttggctagcaagacaaacgtgtacatctctagcagtgctggagccaggtggcgagaggcacttcctggacctcactactacacatggggagaccacggcggaatcatcacggccattgcccagggcatggaaaccaacgagctaaaatacagtaccaatgaaggggagacctggaaaacattcatcttctctgagaagccagtgtttgtgtatggcctcctcacagaacctggggagaagagcactgtcttcaccatctttggctcgaacaaagagaatgtccacagctggctgatcctccaggtcaatgccacggatgccttgggagttccctgcacagagaatgactacaagctgtggtcaccatctgatgagcgggggaatgagtgtttgctgggacacaagactgttttcaaacggcggaccccccatgccacatgcttcaatggagaggactttgacaggccggtggtcgtgtccaactgctcctgcacccgggaggactatgagtgtgacttcggtttcaagatgagtgaagatttgtcattagaggtttgtgttccagatccggaattttctggaaagtcatactcccctcctgtgccttgccctgtgggttctacttacaggagaacgagaggctaccggaagatttctggggacacttgtagcggaggagatgttgaagcgcgactggaaggagagctggtcccctgtcccctggcagaagagaacgagttcattctgtatgctgtgaggaaatccatctaccgctatgacctggcctcgggagccaccgagcagttgcctctcaccgggctacgggcagcagtggccctggactttgactatgagcacaactgtttgtattggtccgacctggccttggacgtcatccagcgcctctgtttgaatggaagcacagggcaagaggtgatcatcaattctggcctggagacagtagaagctttggcttttgaacccctcagccagctgctttactgggtagatgcaggcttcaaaaagattgaggtagctaatccagatggcgacttccgactcacaatcgtcaattcctctgtgcttgatcgtcccagggctctggtcctcgtgccccaagagggggtgatgttctggacagactggggagacctgaagcctgggatttatcggagcaatatggatggttctgctgcctatcacctggtgtctgaggatgtgaagtggcccaatggcatctctgtggacgaccagtggatttactggacggatgcctacctggagtgcatagagcggatcacgttcagtggccagcagcgctctgtcattctggacaacctcccgcacccctatgccattgctgtctttaagaatgaaatctactgggatgactggtcacagctcagcatattccgagcttccaaatacagtgggtcccagatggagattctggcaaaccagctcacggggctcatggacatgaagattttctacaaggggaagaacactggaagcaatgcctgtgtgcccaggccatgcagcctgctgtgcctgcccaaggccaacaacagtagaagctgcaggtgtccagaggatgtgtccagcagtgtgcttccatcaggggacctgatgtgtgactgccctcagggctatcagctcaagaacaatacctgtgtcaaagaagagaacacctgtcttcgcaaccagtatcgctgcagcaacgggaactgtatcaacagcatttggtggtgtgactttgacaacgactgtggagacatgagcgatgagagaaactgccctaccaccatctgtgacctggacacccagtttcgttgccaggagtctgggacttgtatcccactgtcctataaatgtgaccttgaggatgactgtggagacaacagtgatgaaagtcattgtgaaatgcaccagtgccggagtgacgagtacaactgcagttccggcatgtgcatccgctcctcctgggtatgtgacggggacaacgactgcagggactggtctgatgaagccaactgtaccgccatctatcacacctgtgaggcctccaacttccagtgccgaaacgggcactgcatcccccagcggtgggcgtgtgacggggatacggactgccaggatggttccgatgaggatccagtcaactgtgagaagaagtgcaatggattccgctgcccaaacggcacttgcatcccatccagcaaacattgtgatggtctgcgtgattgctctgatggctccgatgaacagcactgcgagcccctctgtacgcacttcatggactttgtgtgtaagaaccgccagcagtgcctgttccactccatggtctgtgacggaatcatccagtgccgcgacgggtccgatgaggatgcggcgtttgcaggatgctcccaagatcctgagttccacaaggtatgtgatgagttcggtttccagtgtcagaatggagtgtgcatcagtttgatttggaagtgcgacgggatggatgattgcggcgattattctgatgaagccaactgcgaaaaccccacagaagccccaaactgctcccgctacttccagtttcggtgtgagaatggccactgcatccccaacagatggaaatgtgacagggagaacgactgtggggactggtctgatgagaaggattgtggagattcacatattcttcccttctcgactcctgggccctccacgtgtctgcccaattactaccgctgcagcagtgggacctgcgtgatggacacctgggtgtgcgacgggtaccgagattgtgcagatggctctgacgaggaagcctgccccttgcttgcaaacgtcactgctgcctccactcccacccaacttgggcgatgtgaccgatttgagttcgaatgccaccaaccgaagacgtgtattcccaactggaagcgctgtgacggccaccaagattgccaggatggccgggacgaggccaattgccccacacacagcaccttgacttgcatgagcagggagttccagtgcgaggacggggaggcctgcattgtgctctcggagcgctgcgacggcttcctggactgctcggacgagagcgatgaaaaggcctgcagtgatgagttgactgtgtacaaagtacagaatcttcagtggacagctgacttctctggggatgtgactttgacctggatgaggcccaaaaaaatgccctctgcatcttgtgtatataatgtctactacagggtggttggagagagcatatggaagactctggagacccacagcaataagacaaacactgtattaaaagtcttgaaaccagataccacgtatcaggttaaagtacaggttcagtgtctcagcaaggcacacaacaccaatgactttgtgaccctgaggaccccagagggattgccagatgcccctcgaaatctccagctgtcactccccagggaagcagaaggtgtgattgtaggccactgggctcctcccatccacacccatggcctcatccgtgagtacattgtagaatacagcaggagtggttccaagatgtgggcctcccagagggctgctagtaactttacagaaatcaagaacttattggtcaacactctatacaccgtcagagtggctgcggtgactagtcgtggaataggaaactggagcgattctaaatccattaccaccataaaaggaaaagtgatcccaccaccagatatccacattgacagctatggtgaaaattatctaagcttcaccctgaccatggagagtgatatcaaggtgaatggctatgtggtgaaccttttctgggcatttgacacccacaagcaagagaggagaactttgaacttccgaggaagcatattgtcacacaaagttggcaatctgacagctcatacatcctatgagatttctgcctgggccaagactgacttgggggatagccctctggcatttgagcatgttatgaccagaggggttcgcccacctgcacctagcctcaaggccaaagccatcaaccagactgcagtggaatgtacctggaccggcccccggaatgtggtttatggtattttctatgccacgtcctttcttgacctctatcgcaacccgaagagcttgactacttcactccacaacaagacggtcattgtcagtaaggatgagcagtatttgtttctggtccgtgtagtggtaccctaccaggggccatcctctgactacgttgtagtgaagatgatcccggacagcaggcttccaccccgtcacctgcatgtggttcatacgggcaaaacctccgtggtcatcaagtgggaatcaccgtatgactctcctgaccaggacttgttgtatgcaattgcagtcaaagatctcataagaaagactgacaggagctacaaagtaaaatcccgtaacagcactgtggaatacacccttaacaagttggagcctggcgggaaataccacatcattgtccaactggggaacatgagcaaagattccagcataaaaattaccacagtttcattatcagcacctgatgccttaaaaatcataacagaaaatgatcatgttcttctgttttggaaaagcctggctttaaaggaaaagcattttaatgaaagcaggggctatgagatacacatgtttgatagtgccatgaatatcacagcttaccttgggaatactactgacaatttctttaaaatttccaacctgaagatgggtcataattacacgttcaccgtccaagcaagatgcctttttggcaaccagatctgtggggagcctgccatcctgctgtacgatgagctggggtctggtgcagatgcatctgcaacgcaggctgccagatctacggatgttgctgctgtggtggtgcccatcttattcctgatactgctgagcctgggggtggggtttgccatcctgtacacgaagcaccggaggctgcagagcagcttcaccgccttcgccaacagccactacagctccaggctggggtccgcaatcttctcctctggggatgacctgggggaagatgatgaagatgcccctatgataactggattttcagatgacgtccccatggtgatagcctgaaagagctttcctcactagaaaccaaatggtgtaaatattttatttgataaagatagttgatggtttattttaaaagatgcactttgagttgcaatatgttatttttatatgggccaaaaacnnnnnnnnnnnnnnnnnnnnnnnnnnnnnnnnggaatgaataaactttgtagtaatcaactgtgaacttcaaaccaggttgattttagtaacccaattgctttgatttgacattaatgtagtcttacagggctgtgcttgctgggcatgcttttacgtctgtgagataatttcggttcagtaaattggccaatctttttatttttctaagacacagaaatgtatttaataaaaacctcgagagagtgatgggtggaaccccttctccttgaaagtgtgtacagatattccattttgtttggatatagtttataggaaagtgtgtggatgtattatggcggaaggtttctttatgttattttgttaatttattgggactctgtgtaaggccaggctttagtggtcattagacaccacatgtgttatgagccccttacccatagggttgggggtgggaagagaagcatatttttttgccattccggaagcaatccatttttattcacttgtgtgtcatgtaatggtctttggcaggagagagcactgagtcattgctggagttcagttcaacagagctgcagcttgggaagccctgtaagcccacagcttcctctcttatattaattgatggaattttactgtatgtgcctctgtacaagatgtagctttgagagctacaaaatgataacactgctttattacacactggtttcattgtcattgcaaaaacttaccctggttgtgggggagagttctagatctgtgccatgatccatacactggctaatagagtacataatttttccattttccattttttgtttttacttactactgaaggatctcagatgtaaaattatgtatttggtttgagatggccacttattgtccttaaaaatccatactgatatatgcagtcattttgaattggacagtgccttctctttttttttctcctcttcttccatctccctcacccatgcccccacccaatctaaagagacagtgctgtacattctcatagagatagagaagatctaaaaagttgagactactcaatccagttaacaacagcaggagcactagagtttgttcatttattctctctgtaaaacaagctgtgctttttttcttctgcctttaaaatgccacccgtgtattcaaaccatggccacttgatacttatgtagaatccatcgtgggctgatgcaagccctttatttaggcttagtgttgtgggcaccaatgtcgagcatcgttgtgacttgtgctgtatgattctcactgaagaatttcctttcagccaagaagcagtgaggtctgggaatattccaaagtcatgtctctgaatatgtgtccttgacgtgcaagctttgtaaaaccccatccccgcttaggtgcgaggcatcaccttctcacaagtgtttagtttcttttaaccacaagtatcattcttgggtgataatatagtttcattctacttagggattgtttagaaaacaaagaaagagccaattaaattttttagtttttgaaatttttatttatatgtatacttagatgagtattttaagctgtcgacctttagtttgccatacgggtaggactgtatttcatgttaacaactggtggtaatgataagccttcttctagcgtattttctcttctttcctgtcactttcctaagtttttttttttaaagactggaattttttttggctttatcttgtcttaccgtagagatttgttcaaaactctaagccctaccacctcccctttaataagctctttaaatagttgaatcattaacaacctggtgggaggcaagtcatttaattgaaccactaggaagtgtattttcttttctttttctgccaactttttggtggcatttgtaaaagctgatataaaaggctctgagatgttattttcagttattccataggcaagcctttttacagagcatatgtctccagttggcagcttgagatatttccgagcatccggttctagctaccagtgcctcccaatgcttagtgcacagtactgtagactggccatcacccctctccttggaaaatgccactgtgctgtttgaaaaaaagcagccttttagggctagagtattttatataaacagaagagctaagttcctgaagactaagctagatagctgcagctatatgtaaattgtatatttttatgaacttttgaagcacacactcctgtttccctctgtgtagctttgtggggatttcatgtatatatgctgtctgaaagaatccagaggttggagtgccaatagaaaatgaaaacaaatgccttgtactacaggcagcctctgaaggtgaccacataactgtcttcactgtgaccaatcggagtccctgcttgcttgtgaagaaggggcttttgtaccttgttggagatgccacctcagaagttcacactgtgcaggaaaaaggttttattctctcctggcatacattagaatgtcagatgcctgcatccatgtggaccacgatgggcctctaaaaattggtgggcagggggtttgcttatgagttttctctggaaaccgattttactcctggatgtattgaatgccccttgagctttatgagatacgagtccacatggataaaatgttagagagtggagttctacagaggattccaggaagaggccatgtctgtgcagtcctagttccagacaggtgagaagctccaggaactactggctaccttgacaagctgggtaaatagttatcattctgggtaactggttgaaactctgacttttggacaagtaattcctggggttctgtctttggtagcatcaccagggatatttgggtgggacagacagaagacacacagctgcctgttctctcctgcccatcatgtttggcccactagatgaagctgtactcagcaatttagggaatgtaacccttctcagaactggccattttcaggggaagcttgggagagcaatagtatggtgagccccttagagatgagcgcctactccttcttggcgaatgctgccttcagatgcttaccaagtggtcactgcatctagtaagattatatttccagtacacttccttagggcagaaacaccatcctatcaggtttggtcagtcccttcttcatgaagggagtcatggggaattcctgaaaattttcttccttctgcagacagttggatgagtcccttagagaaggcatccagagacataactaaactgaatatcatcccatattgattttaggaattgactctaaaactctgtgcagaatcttgtgttgggattgtatcttgacattcctgttgtgttatttttcttaactggagtgtgtgctgcctttcaggtacaatttttgtgtaataaaagccagtgcattaagtttatatagactactttctatgcaagactgagatatggaatagataggaagagatatgtactgctgggtacatggacagtaagtgtgttttcagatggagtaccagcaccgaaaatgggttgagggaggatgggttgtatgtatgtttctgcccactaattttgagcagccatattatgaattaaatcgtcacagccaagtaataacccaagaatggtatgagtttcatgtgtaatagctcaaatggaataagcatgaatgctggagtggaccattatcctcaaatattctatgtcacttctcatttaaagactcttgttatgaactattagaaactttaggcaaaatcaaaagtatttgcggcaaaataaaggcctattctactcttatttaaagtgaaacactgtatacttgtttctctccaaagcgaaattaagtatttataatttcaattgcctcgataagtttccaagtcactgaaatctgctgaaggttttactgtattgttgcacaactttaagataatttttgtctcaatgtcaacttttttcactgaataaaaatttaactgggtcaagaaaacacctctttgaaaatccactgtctctgtgtgtctcgagctgttctttagagcgcaataaagatggctgacgcagtctccaaacccc

SEQ ID NO: 2615 - protein, 2279 aa, Homo sapien [sequence omitted]

SEQ ID NO: 2616 - DNA, 4735 bp, Homo sapien
cggccccggcgccatgagtggcggcggcggcggagggggctcggcgcccagtcgcttcgccgactactttgtcatctgcggactggacacggagaccgggctggagccggacgagctgtcggcattatgccagtacatacaggcttctaaagccagggatggtgccagccctttcatttcaagtacgactgaaggagaaaattttgagcagacaccattgagaagaacattcaaatctaaggtccttgcacgatatcctgagaacgtagaatggaatccctttgaccaagatgcagtaggaatgctatgtatgccgaaagggctggcattcaagacccaggctgatcccagggagccccaattccatgcctttattatcacaagggaggatggctctcggacatttgggtttgccctcacattttatgaagaggtgactagcaagcagatctgcagtgcaatgcagaccctctaccacatgcacaatgctgagtatgatgtcctacatgctccccctgctgatgacagagaccagagcagcatggaggatggtgaagacactcctgtgaccaaactgcagcgcttcaactcctatgacattagccgggacactctctacgtctctaagtgcatctgcctcatcacacccatgtctttcatgaaggcatgtcggagcgtgctggagcaactccaccaggcagtcacttcacctcagccccctccactgccccttgagagctacatatacaacgtactctacgaggtgccgctcccacctcctggccggtccttgaagttttctggggtctatgggccaataatctgccagagaccaagtaccaatgagcttcccctatttgactttcctgtcaaagaggtttttgaactgctcggggtggagaatgtgtttcagctttttacttgtgcccttctggagtttcaaatcctgctctactcacagcattaccagagactgatgactgtggcggagacgattacagctctcatgtttcctttccagtggcagcatgtctatgtccctattctcccagcttctctcctgcatttcttagatgctcctgttccatacctgatgggtttgcattccaatggcctggatgaccggtcaaagctggagctgcctcaagaggctaacctctgctttgtggacattgacaaccacttcattgagttgccagaggacttgccacagttccccaacaaattggagtttgtccaggaagtctctgagattctcatggcatttggaattccccctgaagggaatcttcattgcagtgagagtgcctccaagctgaagaggctgcgggcctctgagcttgtctcggacaagaggaatgggaacattgctggctcccctttgcattcctacgagcttcttaaggagaatgaaactattgcccggctgcaagccttggtcaagagaactggggtgagcctggaaaagttggaagtgcgtgaagaccccagcagcaataaggatctcaaagttcagtgtgatgaagaagaactcaggatttaccagctaaacattcagatccgggaagtttttgcaaatcgtttcactcagatgtttgcagattatgaggtgtttgtcatccaacccagccaggataaggaatcctggtttaccaacagggagcaaatgcaaaactttgataaagcatcttttctgtcagatcagcctgagccctacctgcccttcctctcaagattcctggagacccagatgtttgcatctttcattgacaacaaaataatgtgtcatgatgatgatgataaagaccctgtactccgggtatttgattcccgagttgacaagatcaggctgttgaatgttcggacacctactctccgtacatccatgtaccagaagtgtaccactgtggatgaagcagagaaagcaattgagctgcgtctggcaaaaattgaccatactgcaattcacccacatttacttgacatgaagattggacaagggaaatatgagccgggcttcttccctaagctgcagtctgatgtactttccactgggccagccagcaacaagtggacgaaaaggaatgcccctgcccagtggaggcggaaagatcggcagaagcagcacacagaacacctgcgtttagataatgaccagagggagaagtacatccaggaagccaggactatgggcagcactatccgccagcccaaactgtccaacctctctccatcagtgattgcccagaccaattggaagtttgtagagggcctgctgaaggaatgccgcaataagaccaagaggatgctggtggaaaagatgggccgagaagctgtggagctagggcatggggaggtgaacatcacaggggtggaagagaacaccctgattgccagcctttgtgatctcctggaaaggatctggagtcatggactacaagtgaaacaggggaaatcagccttatggtcccacctgttacattatcaggacaaccggcagagaaaactcacatcaggaagcctcagtacctcaggaatacttcttgattcagaacgtaggaagtctgatgccagctcactcatgcctcccctgaggatctccctgattcaggatatgaggcacatccagaacatcggggaaatcaagactgatgtgggaaaggccagagcatgggtgcgactgtccatggaaaaaaagttactttccagacacctgaagcagctcctctcagaccatgagctcaccaaaaagttatataagcgctatgccttcctgcgctgtgatgacgagaaggagcagttcctctatcacctcctgtctttcaatgccgtcgattacttttgcttcaccaatgtcttcacaactatcctgatcccgtaccacattctgatcgtaccaagcaagaagctggggggctccatgttcactgccaacccatggatctgtatatcaggagaattgggtgagacacagatcatgcagattcccaggaatgtgctagagatgaccttcgagtgccagaacttggggaagcttactactgtccagattggccatgataactctgggctgtatgccaaatggctggtggagtatgtgatggtcaggaatgagatcacaggacatacctacaagttcccgtgtggccggtggttagggaagggcatggatgatggaagcctggagcggatcctagttggggagctgctcacatcccagcctgaggtggatgagaggccatgccggaccccgccgctgcagcagtcccccagtgtcatccggaggcttgttaccatctcacccaacaacaagcccaagctgaacactgggcagatccaggagtccatcggggaggcagtcaatggcattgtgaagcacttccataagcctgagaaagagcgaggcagtctgacgctgttgctctgtggagagtgtggccttgtctcggccttggaacaggctttccagcatggatttaaatcgccccggctcttcaaaaatgtcttcatttgggatttcctggaaaaagcacaaacctattatgagacattagagaagaatgaagtagtccctgaggaaaactggcatacaagagcccggaacttctgccgatttgtcactgcaatcaacaatactccccggaacatcggcaaggatggcaagtttcagatgctggtgtgcttgggagccagagatcacctcctacaccactggattgccctgctggctgactgccccatcactgcacacatgtatgaggatgtggcactgatcaaagaccatacacttgtcaattccttgattcgtgtgctgcagacattgcaggagttcaacatcacgctggagacgtcccttgtcaagggcatcgacatctgacctcccagcaccagccagcagcaggactgagaaagactcaccctgcagctctgaccttttttcccaaagggacttaagcgattgtgcaggagtaggagacaaaatgtacactcactgtaaaaagaaaactagaggatttttggaataaataatctattttagagtttatttgctgatttgctttttacacactttcatgtgaaagagtgatagggagagggagcgaggctggtgccgcttattttgaagctggtgccctccctcgccgtggccacatgctggaagcctgaggcctccctggactgagcctgtggcactgcgtgcgggacagttatgtttccttgccccgtcgcattaatgaggcccttccacatcatttttaaactaatgtttttctatattaacattattatggatatttggctttcataggccacacacaggtgtgctgcgcgggaagccccatgctccaatcaaagggatttttagtagtgcctctaagcaagcaccgatgagtcagtcccacgtattttcttttttgtcagtattgtttgggaaggagacatgccgggatgtgtcatcgtgccaaataccacatttcctgttggcacagtttcacagaagtaaacataagcatgttttaacaggtttttcttttcttttttcttttttaaaatgttttatttatttaacccgccattgtgtgtttttaagtattttctttttttaaggaaaggaaaagcttgtcacaatctaactggctatgttattattattaaatttatgttttgcaacttagaaaccagctacagtatggcccacttaataaaacacctgaaacaaaaaaaaaaaaaaaaa

SEQ ID NO: 2617 - DNA, 2396 bp, Homo sapien
ggcacgagggctgtgcgggtggcggccggcgcgcggtggggcatggcgggttcgcggggtgcggggcgcacggcggcgccgagcgtgcggccggagaagcggcggtctgagcccgaactggagcctgagcccgagccggagccccccctcctctgcacctctcctctcagccacagcaccggcagcgattctggcgtctccgacagcgaggagagtgtgttctcaggcctggaagattccggcagtgacagcagtgaggatgatgacgaaggcgacgaggagggagaggacggagcccttgatgacgagggccacagtgggattaaaaagaccactgaggagcaggtgcaggccagcactccttgcccgaggacagagatggcgagcgcccggattggggatgagtatgcggaggacagctctgatgaggaggacatccggaacacggtgggcaacgtgcccttggagtggtacgatgacttcccccacgtgggctacgacctggatggcaggcgcatctacaagcccctgcggacccgggatgagctggaccagttcctggacaagatggacgatcctgactactggcgcaccgtgcaggacccgatgacagggcgggacctgagactgacggatgagcaggtggccctggtgcggcggctgcagagtggccagtttggggatgtgggcttcaacccctatgagccggctgtcgacttcttcagcggggacgtcatgatccacccggtgaccaaccgcccggccgacaagcgcagcttcatcccctccctggtggagaaggagaaggtctctcgcatggtgcacgccatcaagatgggctggatccagcctcgccggccccgagaccccacccccagcttctatgacctgtgggcccaggaggaccccaacgccgtgctcgggcgccacaagatgcacgtacctgctcccaagctggccctgccaggccacgccgagtcgtacaacccaccccctgaatacctgctcagcgaggaggagcgcttggcgtgggaacagcaggagccaggcgagaggaagctgagctttttgccacgcaagttcccgagcctgcgggccgtgcctgcctacggacgcttcatccaggaacgcttcgagcgctgccttgacctgtacctgtgcccacggcagcgcaagatgagggtgaatgtagaccctgaggacctcatccccaagctgcctcggccgagggacctgcagcccttccccacgtgccaggccctggtctacaggggccacagtgaccttgtccggtgcctcagtgtctctcctgggggccagtggctggtttcaggctctgacgacggctccctgcggctctgggaggtggccactgcccgctgtgtgaggactgttcccgtggggggcgtggtgaagagtgtggcctggaaccccagccccgctgtctgcctggtggctgcagccgtggaggactcggtgctgctgctgaacccagctctgggggaccggctggtggcgggcagcacagatcagctgttgagcgccttcgtcccgcctgaggagccccccttgcagccggcccgctggctggaggcctcagaggaggagcgccaagtgggcctgcggctgcgcatctgccacgggaagccagtgacgcaggtgacctggcacgggcgtggggactacctggccgtggtgctggccacccaaggccacacccaggtgctgattcaccagctgagccgtcgccgcagccagagtccgttccgccgcagccacggacaggtgcagcgagtggccttccaccctgcccggcccttcctgttggtggcgtcccagcgcagcgtccgcctctaccacctgctgcgccaggagctcaccaagaagctgatgcccaactgcaagtgggtgtccagcctggcggtgcaccctgcaggtgacaacgtcatctgtgggagctacgatagcaagctggtgtggtttgacctggatctttccaccaagccatacaggatgctgagacaccacaagaaggctctgcgggctgtggccttccacccgcggtacccactctttgcgtcaggctcggacgacggcagtgtcatcgtctgccatggcatggtgtacaatgaccttctgcagaaccccttgctggtgcccgtcaaggtgctgaagggacacgtgctgacccgagatctgggagtgctggacgtcatcttccaccccacccagccgtgggtcttctcctcgggggcagacgggactgtccgcctcttcacctagctgttctgcctgcctggggctggggtggtcgtgctgaagtcaacagagcctttaccctgtgcaaaaaaaaaaaaaaaaaaaaaaaaaaaaaaaaaaaaaaaaaaaaaaaaaaa

SEQ ID NO: 2618 - protein, 746 aa, Homo sapien
MAGSRGAGRTAAPSVRPEKRRSEPELEPEPEPEPPLLCTSPLSHSTGSDSGVSDSEESVFSGLEDSGSDSSEDDDEGDEEGEDGALDDEGHSGIKKTTEEQVQASTPCPRTEMASARIGDEYAEDSSDEEDIRNTVGNVPLEWYDDFPHVGYDLDGRRIYKPLRTRDELDQFLDKMDDPDYWRTVQDPMTGRDLRLTDEQVALVRRLQSGQFGDVGFNPYEPAVDFFSGDVMIHPVTNRPADKRSFIPSLVEKEKVSRMVHAIKMGWIQPRRPRDPTPSFYDLWAQEDPNAVLGRHKMHVPAPKLALPGHAESYNPPPEYLLSEEERLAWEQQEPGERKLSFLPRKFPSLRAVPAYGRFIQERFERCLDLYLCPRQRKMRVNVDPEDLIPKLPRPRDLQPFPTCQALVYRGHSDLVRCLSVSPGGQWLVSGSDDGSLRLWEVATARCVRTVPVGGVVKSVAWNPSPAVCLVAAAVEDSVLLLNPALGDRLVAGSTDQLLSAFVPPEEPPLQPARWLEASEEERQVGLRLRICHGKPVTQVTWHGRGDYLAVVLATQGHTQVLIHQLSRRRSQSPFRRSHGQVQRVAFHPARPFLLVASQRSVRLYHLLRQELTKKLMPNCKWVSSLAVHPAGDNVICGSYDSKLVWFDLDLSTKPYRMLRHHKKALRAVAFHPRYPLFASGSDDGSVIVCHGMVYNDLLQNPLLVPVKVLKGHVLTRDLGVLDVIFHPTQPWVFSSGADGTVRLFT

SEQ ID NO: 2619 - DNA, 3321 bp, Homo sapien
ttggacagcgtggggggttggtggcactatgtggcgcgtctgtgcgcgacgggctcagaatgtagccccatgggcgggactcgaggctcggtggacggccttgcaggaggtacccggaactccacgagtgacctcgcgatctggcccggctcccgctcgtcgcaacagcgtgactacagggtatggcggggtccgggcactgtgcggctggacccccagttctggggccacgccgcggaaccgcttactgctgcagcttttggggtcgcccggccgccgctattacagtcttcccccgcatcagaaggttccattgccttctctttcccccacaatgcaggcaggcaccatagcccgttgggaaaaaaaagagggggacaaaatcaatgaaggtgacctaattgcagaggttgaaactgataaagccactgttggatttgagagcctggaggagtgttatatggcaaagatacttgttgctgaaggtaccagggatgttcccatcggagcgatcatctgtatcacagttggcaagcctgaggatattgaggcctttaaaaattatacactggattcctcagcagcacctaccccacaagcggccccagcaccaacccctgctgccactgcttcgccacctacaccttctgctcaggctcctggtagctcatatccccctcacatgcaggtacttcttcctgccctctctcccaccatgaccatgggcacagttcagagatgggaaaaaaaagtgggtgagaagctaagtgaaggagacttactggcagagatagaaactgacaaagccactataggttttgaagtacaggaagaaggttatctggcaaaaatcctggtccctgaaggcacaagagatgtccctctaggaaccccactctgtatcattgtagaaaaagaggcagatatatcagcatttgctgactataggccaaccgaagtaacagatttaaaaccacaagtgccaccacctaccccacccccggtggccgctgttcctccaactccccagcctttagctcctacaccttcagcaccctgcccagctactcctgctggaccaaagggaagggtgtttgttagccctcttgcaaagaagttggcagtagagaaagggattgatcttacacaagtaaaagggacaggaccagatggtagaatcaccaagaaggatatcgactcttttgtgcctagtaaagttgctcctgctccggcagctgttgtgcctcccacaggtcctggaatggcaccagttcctacaggtgtcttcacagatatcccaatcagcaacattcgtcgggttattgcacagcgattaatgcaatcaaagcaaaccatacctcattattacctttctatcgatgtaaatatgggagaagttttgttggtacggaaagaacttaataagatattagaagggagaagcaaaatttctgtcaatgacttcatcataaaagcttcagctttggcatgtttaaaagttcccgaagcaaattcttcttggatggacacagttataagacaaaatcatgttgttgatgtcagtgttgcggtcagtactcctgcaggactcatcacacctattgtgtttaatgcacatataaaaggagtggaaaccattgctaatgatgttgtttctttagcaaccaaagcaagagagggtaaactacagccacatgaattccagggtggcacttttacgatctccaatttaggaatgtttggaattaagaatttctctgctattattaacccacctcaagcatgtattttggcaattggtgcttcagaggataaactggtccctgcagataatgaaaaagggtttgatgtggctagcatgatgtctgttacactcagttgtgatcaccgggtggtggatggagcagttggagcccagtggcttgctgagtttagaaagtaccttgaaaaacctatcactatgttgttgtaactaactcaagaatttctaaactctcccaggtcacactgattcattcttaacaagatatttatatgttattaaacaggtggttctttttattttaaccagttatttttattattgagtctgtccagataagttatttataatgggcattactgaatttttaaaatgccgattacacccaaatattgtgcacatttaataatcagacaccagatttttagctctgtactcctaattaagggacatgtatgtggccttgcctagccctttggtgataagtacttcctctaggaaatgtacgataggtagaattgtggttccctaaagacaagtacataaaggtgaccctgatgaaaccttgaagttctgaaatttaactgcctaaaatgttctccttagatgtgagagaaagagaaatcagaaaaattaattctcttgggggaagggcttgaattgaagctttactttagaatttagccctggtttgaaattttccattacatgatcttggtttatcatcgatgggaagggtagaaaacttcaaggaaaataagtgaaattttaaaagtcagcattttcttagacctcttcagctgattgtttatttttctatgaattcctacacatggttattcccccctacttgagataatctaaatataaaccagctacttgatgtaactgagaatttgtgtggatatttatttaaacaaatgtgtaattttgagtacagaattcaacagttacctccaaaaaagaaacattgttaatataatttaacagaagttgtgaaactaaaattttctaagattaactggtagttcattgtaaatgaacataatgaacagaatttatgactccactgtggaaaatgctatcaaataactaaggaatatatatggaataagtgtacatatgtaaaatattgttactagagttagatatgtgccaaagtccatttatcccaaatcctgtctgaaaaggaggggtacattggtaaacattttggagtgcttaaaaatgccaaaaacaaaatggtaatttctactttgataaagtaaaaaagttaaatgtgtgtaaaaaagtgttctgtgtccttctactccagcatcgtctcatgtaaaataagaaagccctaaaatactattggagagaaaaaattaactaggttgctactttatttgcctaaatacttttttctattttgttagattttgcctttcttttggaaggaaggaggcgatattctggattataaaaatgaattgggaacattatcacaattccagactttctattaatatttatgtgttttaataaacgtttgaaattaaaaaaaaaaaaaaaaaaaa

SEQ ID NO: 2620 - protein, 647 aa, Homo sapien
MWRVCARRAQNVAPWAGLEARWTALQEVPGTPRVTSRSGPAPARRNSVTTGYGGVRALCGWTPSSGATPRNRLLLQLLGSPGRRYYSLPPHQKVPLPSLSPTMQAGTIARWEKKEGDKINEGDLIAEVETDKATVGFESLEECYMAKILVAEGTRDVPIGAIICITVGKPEDIEAFKNYTLDSSAAPTPQAAPAPTPAATASPPTPSAQAPGSSYPPHMQVLLPALSPTMTMGTVQRWEKKVGEKLSEGDLLAEIETDKATIGFEVQEEGYLAKILVPEGTRDVPLGTPLCIIVEKEADISAFADYRPTEVTDLKPQVPPPTPPPVAAVPPTPQPLAPTPSAPCPATPAGPKGRVFVSPLAKKLAVEKGIDLTQVKGTGPDGRITKKDIDSFVPSKVAPAPAAVVPPTGPGMAPVPTGVFTDIPISNIRRVIAQRLMQSKQTIPHYYLSIDVNMGEVLLVRKELNKILEGRSKISVNDFIIKASALACLKVPEANSSWMDTVIRQNHVVDVSVAVSTPAGLITPIVFNAHIKGVETIANDVVSLATKAREGKLQPHEFQGGTFTISNLGMFGIKNFSAIINPPQACILAIGASEDKLVPADNEKGFDVASMMSVTLSCDHRVVDGAVGAQWLAEFRKYLEKPITMLL

SEQ ID NO: 2621 - DNA, 7239 bp, Homo sapien
cactagaatgtgaaggatcttcgcggttctgggtgcccagaaaggcggcgacgcggcggatgacaacattaggccgcgacgcgctcctggccaggcggcggctgtagtgttagctttggacgccgcagtagccgctgccggtagcaagccgactgagggaaggtgggggtccgcccgggctggtggacctcggggccgaaagttcccgccccgctcgggggctgagccggcagtgcctccgcggccgctgggcagcgcccttcgtccaggctcgcgccccagctgccgccgacgacagcggccgagagaagttggggtctgactagacgcttacggggcctcggaccccggcgccgcggcgacctcggaggaaccggctccttgcgtcccgcctccctgggagctccgcacgggatttgcagatttacagaatggctgcacattaatggaaagagaagcataaacctatcttctttcattatggagggaggtttggcagatggagaacctgatcgaacttcgcttcttggtgatagcaaagatgtccttgggccatcaactgttgtagcaaacagtgacgaatctcagcttctgacaccaggaaagatgagtcagcgccaaggaaaagaagcttatccaacgccaaccaaagatttgcatcagccatctcttagtccagcaagtcctcatagccagggttttgaaagagggaaggaagatatttctcaaaataaagatgaatcttcactttctatgtcaaagagcaagtctgaatctaaactttataatggctcagagaaggacagttcaacttcaagcaaactcacaaaaaaagaatctcttaaggtacaaaagaaaaattaccgagaagaaaagaaaagagccacaaaggagctgctcagtacaatcacagatccttctgttattgttatggctgattggttaaagattcgtggtactctaaagagctggaccaagttatggtgtgtgttgaaacctggggtgctactgatctataaaacccaaaaaaatggtcagtgggtaggaacagttcttctgaatgcctgtgaaatcattgaacgtccatcaaaaaaggatggcttttgtttcaaacttttccatcctttggagcaatctatttgggcagtgaagggtccaaaaggtgaagcggttggatccattactcaacccttacctagcagttatttgatcatccgagctacttcagagtcagatggaaggtgctggatggatgctttggagttggctttgaaatgttctagtcttcttaaacgtacaatgatcagagaaggaaaggaacatgacctgagcgtttcatcagatagcacacatgtgactttctatggcttactacgtgctaacaatctccacagtggtgataacttccagttaaatgatagtgaaattgaacgacaacattttaaggaccaagatatgtattctgataaatctgataaagaaaatgatcaagaacatgatgagtctgataatgaggtgatggggaaaagtgaagaaagtgacacagatacatcagaaagacaagatgactcatatatcgaacctgagcctgttgagcctttaaaggagactacctacactgaacagagccatgaagaacttggagaggcaggtgaggcttctcaaacagaaactgtatctgaagaaaacaaaagccttatctggacactattgaaacaagtccgtcctggcatggacctatccaaggtggttctgcctacatttattttggaaccccgttctttcctggataaactttcagattactactatcatgcagatttcctatctgaggcagctcttgaagaaaatccttatttccgtttgaagaaagtagtgaaatggtatttgtcaggattctataaaaagccaaagggactgaagaaaccttataatcctatacttggcgagactttccgttgtttatggattcatcccagaacaaacagcaaaactttttatattgctgaacaggtgtcccatcatccaccaatatctgccttttatgttagtaatcgaaaagatggattttgccttagcggtagtatcctggctaagtctaagttttatggaaactcattatctgcaatattagagggagaagcacggttaactttcttgaatagaggtgaagattatgtaatgacaatgccatacgctcattgtaaaggaattctttatggtacaatgacactggagcttggtggaacagtcaatattacatgtcaaaaaactggatacagtgcaatacttgaatttaaactaaagccattcctagggagtagtgactgtgttaatcaaatatcagggaaacttaaactgggaaaagaagtcctagctactttggaaggtcattgggatagtgaagtttttattactgataaaaagactgataattcagaggttttctggaatccaacacctgacattaagcaatggagattaataaggcacactgtaaaatttgaagaacagggagattttgaatcagagaaactctggcaacgggtaactcgagccataaatgccaaagaccaaactgaagctacccaagagaagtatgttttggaagaagctcaaagacaagctgccagggatcggaaaacaaaaaatgaagagtggtcttgcaaattatttgaacttgatccactcacaggagaatggcattacaagtttgcagatacccgaccatgggacccacttaatgatatgatacagtttgaaaaagatggtgttattcagaccaaagtgaaacatcgtactccaatggttagcgtccccaaaatgaaacataagccaaccaggcaacagaagaaagtagcaaaaggctattcctccccagaacctgacattcaagactcctctggaagtgaagctcaatcagtaaaaccaagtacaagaagaaagaaaggaatagaactgggagacattcagagttccatcgaatctataaaacaaacacaggaagaaattaaaagaaatattatggctcttcgaaatcatttagtttcaagcacaccggccacggattattttctgcaacaaaaagactacttcatcattttcctcctgattttgcttcaagtcataataaacttcatgttcaagtagaagttctctaccattgaatcagtgaactagaaagatctgatttggcctgggaccagtgttcaagttggtttggtctttattaaaaatcacaatattccgaaaacaaaaaaacctaggagataaatgtagaggtattgacttttcgtatcttttatcttcacactgaaacaagagctatcctatttgattattaaagtgagctatgtgttaagtgccaggacatttctagcttttgtgagaatgtgtctacatatgagtataataaacccacatgtatacacaattgtctcttatgtactcctacctgacagtagtctttgtattctatagtatgttctgagatataatgttaacattgttcataacaaaaaatgctatcaatcttataaatatatgtaatctattttcttcataaaacaggcacaaaagttttatcagtaaggaattacagattgagaaatgatggaataatagacataattaattcaatacactactgttaaaatcatttgcaaagcactcagctcaattatcttcttagaaagaaagaaaaagtatgaatggtcaaaatgaatacatcgagagagataaatggcaaattgcttttttaaaagtttacataagttttttttaacccctagaatttaatatttgtagatgcaggtaaatatatatacttacgtgtatatcagtataaaaacactggtgtgcaattaattggattgattataataccaccttaagcacttgctgaaaaaagtgtggtcaaaattgattgctgtccttttgtcttatttttgtttttcttaagtcagctggttcataacataggccaaattctagagatgtttatagagcatttgaagtgctgataatttatgttttttcattatgaaaacttattttagctttagactccagtgtgttcagtgaataagtagaatataaaaaaatataaccagtattttacttcaaaagccaaaaagaggcaataagaaaagacactttgtggtggcctttatgtgtgcattaaaattggtttctgtaaaacgtgtaataagttgagtatctacgaagagtatcaagttctgaagtttaatttttttattatcctcctctcttcttagtaacttctttctgtggcaaaaccacaattctttaagattcctattgttcaggctaaggcaaatttttttgtttgtttcttcagtttaatattttgattttgtgtttttacgtaaatatttatattccttgaaagcaatttttgccaaggtagttcagtttaggaatatgttgttctaaaatatgtcttagaatcctgaaagcatagattttgaaatgtttttttaatgaaaatgaaggtcagagagaataattgccctgaccacatttgcctttcagtaggaggaggctgtgaaatagtaaaattataatcgtttatgccatgataaatacaagattggtaaataaatacattgattggtaaattatgagaatcaaaatgataaaaagagcctgcttttttccctaaccaatatagctatcttaagtatccttaggtttctgtgaagaaccatttcccatgttttcttggcaaaataatgctgtattccatatgtacatgtgaaatgatgttttaaattgataaaagcttaaataagatctacctatacccagtattttcatgatattagaacaaatgggtttttggttatattttatatttgtcaatataatttttgtattcacattctgttacactctgcctattcattgatatatgatattctgtaaatattgtacaatttgatcttttttatggtttaaattagttaattacatacaaattgattggcttatcacaaaaatcatttcatcagtaaaccttgttaacattttgtactggtgacccacctcttaggactttggtcttatccacgtgtatgttgttttcatttggtccaaataatattttatttgtatgggtatcttctaagactaaataggtagttgtgttctttatttttaaaatttctttttagagcaaatgttatgggttcttacccaaagagtcaaaaactatttcttaagaaagagcagagttattcatgactgttctttatacactaaaagcatgcatctaatctaatagtcctcttattatgcttttagttgtatgagtctctttctatgaactgaacacaaaactcaggaattggtggcttaattttagatcagtgcttgtactaggcttagttatatgaatctttataacacataattactaactttgtagccatatatgtaattgactttgaatgttatttacctgaaattaatcttccttcacacatggaccgtaaacggttcccagttgtctgagagcctcatgagggtttctaggatttatgaccttatgaccagtttttttcatttaccaagattttattttcctacatgaaaatttaattgagtaataattattcacatgtgcattttctttttagctgttaaatgtactatgccatcatccaccatttagtaaaatgtagctggcccaggacatgtaaaaaaaaaaaaaaaacaacaacaataaatagggcatgtgaaatgttaagttacagcaatagatattttatttgtatttcatgttagtacttttttgttttatatcacttataaaggtacagtgtactctttgtcacagctcagttggtaaccgcattccattgaaaagttggccttgtaaaatacaactctcatttaatattcatgcttttgtgcctttaagaaaatattttttgtcattttttgtgttacagaactataatgtgattcaaggtgtttataggcttgtcataaaagggtcatttctgtgtgttactttctttttatatagctatagtatatttaaacaataatactatcttttataggggtttgtctatttacctattctttactcagacattgatgtagacttgtcagattattctgagtattgttaacagtgccttttcgatggaatcacactttttggctgtcaccttgtgccatatacacacaaaattttgtggaaggcagttttaactttctgaagaatatctgtcaaaatttaagaaaacaaatgtataaaattccattttttccagtgtttagcatttctagtaagcagtgaggttgtttgacatacagtgatgatggcattattgataagccatacatgagactgcagattatattgaatcatattaaatgtacagaaataaaatattagatttatatcaaattttccaatttgaaccagtggggaaaatcccacagaaatcagtaagtttacatttcaatttctatcttatttgactaagtggaaagagattctttaaaatgtataacctgccattatgtaatttggtttcattttattctacctgttgtgtgagtttagtatatttaatttactttttgttactctttacatactgtttatttttgttagtttttaattgaagatggactgttgaaattgtataggaccagtgtcttattaatatgattaatatatttagaagagccacgtgaaacccatgacaaaatgaatgtgaatattctttctaaaaatttagaaaatgttatctttttgcatttattatgtaaaactgttttacagtatcaaaatttttcacttaaagaaaaaaaatgccatgaaacatttgaactgatgagccacagaacttcagttgaaatttttttcactttttagcatgctaaatatacatctgagtttaaatgttctgtttaatggccattcataaattcaagcactaccactggtcagttttgtgtgatagaataaaaatatgttacctgcagtgtaagtacagcacactgtcaaattcttttccttaaggtgcacagtaaatgtacagatagttataggccactgttttgtaatgtagtacatttctaatctattattcctaacctattataactgtttgcagaaagaaaagaatttttctaataatctgtaaaattatgctaacttctacaagtaggcttctaaataaaatttttaaaaagagc

SEQ ID NO: 2622 - protein, 889 aa, Homo sapien
MEGGLADGEPDRTSLLGDSKDVLGPSTVVANSDESQLLTPGKMSQRQGKEAYPTPTKDLHQPSLSPASPHSQGFERGKEDISQNKDESSLSMSKSKSESKLYNGSEKDSSTSSKLTKKESLKVQKKNYREEKKRATKELLSTITDPSVIVMADWLKIRGTLKSWTKLWCVLKPGVLLIYKTQKNGQWVGTVLLNACEIIERPSKKDGFCFKLFHPLEQSIWAVKGPKGEAVGSITQPLPSSYLIIRATSESDGRCWMDALELALKCSSLLKRTMIREGKEHDLSVSSDSTHVTFYGLLRANNLHSGDNFQLNDSEIERQHFKDQDMYSDKSDKENDQEHDESDNEVMGKSEESDTDTSERQDDSYIEPEPVEPLKETTYTEQSHEELGEAGEASQTETVSEENKSLIWTLLKQVRPGMDLSKVVLPTFILEPRSFLDKLSDYYYHADFLSEAALEENPYFRLKKVVKWYLSGFYKKPKGLKKPYNPILGETFRCLWIHPRTNSKTFYIAEQVSHHPPISAFYVSNRKDGFCLSGSILAKSKFYGNSLSAILEGEARLTFLNRGEDYVMTMPYAHCKGILYGTMTLELGGTVNITCQKTGYSAILEFKLKPFLGSSDCVNQISGKLKLGKEVLATLEGHWDSEVFITDKKTDNSEVFWNPTPDIKQWRLIRHTVKFEEQGDFESEKLWQRVTRAINAKDQTEATQEKYVLEEAQRQAARDRKTKNEEWSCKLFELDPLTGEWHYKFADTRPWDPLNDMIQFEKDGVIQTKVKHRTPMVSVPKMKHKPTRQQKKVAKGYSSPEPDIQDSSGSEAQSVKPSTRRKKGIELGDIQSSIESIKQTQEEIKRNIMALRNHLVSSTPATDYFLQQKDYFIIFLLILLQVIINFMFK

SEQ ID NO: 2623 - DNA, 5026 bp, Homo sapien
agaggaggaaattgttcctcgtctgataagacaacagtggagaaaggacgcatgctgtttcttagggacacggctgacttccagatatgaccatgtatttgtggcttaaactcttggcatttggctttgcctttctggacacagaagtatttgtgacagggcaaagcccaacaccttcccccactggattgactacagcaaagatgcccagtgttccactttcaagtgaccccttacctactcacaccactgcattctcacccgcaagcacctttgaaagagaaaatgacttctcagagaccacaacttctcttagtccagacaatacttccacccaagtatccccggactctttggataatgctagtgcttttaataccacaggtgtttcatcagtacagacgcctcaccttcccacgcacgcagactcgcagacgccctctgctggaactgacacgcagacattcagcggctccgccgccaatgcaaaactcaaccctaccccaggcagcaatgctatctcagatgtcccaggagagaggagtacagccagcacctttcctacagacccagtttccccattgacaaccaccctcagccttgcacaccacagctctgctgccttacctgcacgcacctccaacaccaccatcacagcgaacacctcagatgcctaccttaatgcctctgaaacaaccactctgagcccttctggaagcgctgtcatttcaaccacaacaatagctactactccatctaagccaacatgtgatgaaaaatatgcaaacatcactgtggattacttatataacaaggaaactaaattatttacagcaaagctaaatgttaatgagaatgtggaatgtggaaacaatacttgcacaaacaatgaggtgcataaccttacagaatgtaaaaatgcgtctgtttccatatctcataattcatgtactgctcctgataagacattaatattagatgtgccaccaggggttgaaaagtttcagttacatgattgtacacaagttgaaaaagcagatactactatttgtttaaaatggaaaaatattgaaacctttacttgtgatacacagaatattacctacagatttcagtgtggtaatatgatatttgataataaagaaattaaattagaaaaccttgaacccgaacatgagtataagtgtgactcagaaatactctataataaccacaagtttactaacgcaagtaaaattattaaaacagattttgggagtccaggagagcctcagattattttttgtagaagtgaagctgcacatcaaggagtaattacctggaatccccctcaaagatcatttcataattttaccctctgttatataaaagagacagaaaaagattgcctcaatctggataaaaacctgatcaaatatgatttgcaaaatttaaaaccttatacgaaatatgttttatcattacatgcctacatcattgcaaaagtgcaacgtaatggaagtgctgcaatgtgtcatttcacaactaaaagtgctcctccaagccaggtctggaacatgactgtctccatgacatcagataatagtatgcatgtcaagtgtaggcctcccagggaccgtaatggcccccatgaacgttaccatttggaagttgaagctggaaatactctggttagaaatgagtcgcataagaattgcgatttccgtgtaaaagatcttcaatattcaacagactacacttttaaggcctattttcacaatggagactatcctggagaaccctttattttacatcattcaacatcttataattctaaggcactgatagcatttctggcatttctgattattgtgacatcaatagccctgcttgttgttctctacaaaatctatgatctacataagaaaagatcctgcaatttagatgaacagcaggagcttgttgaaagggatgatgaaaaacaactgatgaatgtggagccaatccatgcagatattttgttggaaacttataagaggaagattgctgatgaaggaagactttttctggctgaatttcagagcatcccgcgggtgttcagcaagtttcctataaaggaagctcgaaagccctttaaccagaataaaaaccgttatgttgacattcttccttatgattataaccgtgttgaactctctgagataaacggagatgcagggtcaaactacataaatgccagctatattgatggtttcaaagaacccaggaaatacattgctgcacaaggtcccagggatgaaactgttgatgatttctggaggatgatttgggaacagaaagccacagttattgtcatggtcactcgatgtgaagaaggaaacaggaacaagtgtgcagaatactggccgtcaatggaagagggcactcgggcttttggagatgttgttgtaaagatcaaccagcacaaaagatgtccagattacatcattcagaaattgaacattgtaaataaaaaagaaaaagcaactggaagagaggtgactcacattcagttcaccagctggccagaccacggggtgcctgaggatcctcacttgctcctcaaactgagaaggagagtgaatgccttcagcaatttcttcagtggtcccattgtggtgcactgcagtgctggtgttgggcgcacaggaacctatatcggaattgatgccatgctagaaggcctggaagccgagaacaaagtggatgtttatggttatgttgtcaagctaaggcgacagagatgcctgatggttcaagtagaggcccagtacatcttgatccatcaggctttggtggaatacaatcagtttggagaaacagaagtgaatttgtctgaattacatccatatctacataacatgaagaaaagggatccacccagtgagccgtctccactagaggctgaattccagagacttccttcatataggagctggaggacacagcacattggaaatcaagaagaaaataaaagtaaaaacaggaattctaatgtcatcccatatgactataacagagtgccacttaaacatgagctggaaatgagtaaagagagtgagcatgattcagatgaatcctctgatgatgacagtgattcagaggaaccaagcaaatacatcaatgcatcttttataatgagctactggaaacctgaagtgatgattgctgctcagggaccactgaaggagaccattggtgacttttggcagatgatcttccaaagaaaagtcaaagttattgttatgctgacagaactgaaacatggagaccaggaaatctgtgctcagtactggggagaaggaaagcaaacatatggagatattgaagttgacctgaaagacacagacaaatcttcaacttatacccttcgtgtctttgaactgagacattccaagaggaaagactctcgaactgtgtaccagtaccaatatacaaactggagtgtggagcagcttcctgcagaacccaaggaattaatctctatgattcaggtcgtcaaacaaaaacttccccagaagaattcctctgaagggaacaagcatcacaagagtacacctctactcattcactgcagggatggatctcagcaaacgggaatattttgtgctttgttaaatctcttagaaagtgcggaaacagaagaggtagtggatatttttcaagtggtaaaagctctacgcaaagctaggccaggcatggtttccacattcgagcaatatcaattcctatatgacgtcattgccagcacctaccctgctcagaatggacaagtaaagaaaaacaaccatcaagaagataaaattgaatttgataatgaagtggacaaagtaaagcaggatgctaattgtgttaatccacttggtgccccagaaaagctccctgaagcaaaggaacaggctgaaggttctgaacccacgagtggcactgaggggccagaacattctgtcaatggtcctgcaagtccagctttaaatcaaggttcataggaaaagacataaatgaggaaactccaaacctcctgttagctgttatttctatttttgtagaagtaggaagtgaaaataggtatacagtggattaattaaatgcagcgaaccaatatttgtagaagggttatattttactactgtggaaaaatatttaagatagttttgccagaacagtttgtacagacgtatgcttattttaaaattttatctcttattcagtaaaaaacaacttctttgtaatcgttatgtgtgtatatgtatgtgtgtatgggtgtgtgtttgtgtgagagacagagaaagagagagaattctttcaagtgaatctaaaagcttttgcttttcctttgtttttatgaagaaaaaatacattttatattagaagtgttaacttagcttgaaggatctgtttttaaaaatcataaactgtgtgcagactcaataaaatcatgtacatttctgaaatgacctcaagatgtcctccttgttctactcatatatatctatcttatatacttactattttacttctagagatagtacataaaggtggtatgtgtgtgtatgctactacaaaaaagttgttaactaaattaacattgggaaatcttatattccatatattagcatttagtccaatgtctttttaagcttatttaattaaaaaatttccagtgagcttatcatgctgtctttacatggggttttcaattttgcatgctcgattattccctgtacaatatttaaaatttattgcttgatacttttgacaacaaattaggttttgtacaattgaacttaaataaatgtcattaaaataaataaatgcaatatgtattaatattcattgtataaaaatagaagaatacaaacatatttgttaaatatttacatatgaaatttaatatagctatttttatggaatttttcattgatatgaaaaatatgatattgcatatgcatagttcccatgttaaatcccattcataactttcattaaagcatttactttgaatttc

SEQ ID NO: 2624 - protein, 1304 aa, Homo sapien
MYLWLKLLAFGFAFLDTEVFVTGQSPTPSPTGLTTAKMPSVPLSSDPLPTHTTAFSPASTFERENDFSETTTSLSPDNTSTQVSPDSLDNASAFNTTGVSSVQTPHLPTHADSQTPSAGTDTQTFSGSAANAKLNPTPGSNAISDVPGERSTASTFPTDPVSPLTTTLSLAHHSSAALPARTSNTTITANTSDAYLNASETTTLSPSGSAVISTTTIATTPSKPTCDEKYANITVDYLYNKETKLFTAKLNVNENVECGNNTCTNNEVHNLTECKNASVSISHNSCTAPDKTLILDVPPGVEKFQLHDCTQVEKADTTICLKWKNIETFTCDTQNITYRFQCGNMIFDNKEIKLENLEPEHEYKCDSEILYNNHKFTNASKIIKTDFGSPGEPQIIFCRSEAAHQGVITWNPPQRSFHNFTLCYIKETEKDCLNLDKNLIKYDLQNLKPYTKYVLSLHAYIIAKVQRNGSAAMCHFTTKSAPPSQVWNMTVSMTSDNSMHVKCRPPRDRNGPHERYHLEVEAGNTLVRNESHKNCDFRVKDLQYSTDYTFKAYFHNGDYPGEPFILHHSTSYNSKALIAFLAFLIIVTSIALLVVLYKIYDLHKKRSCNLDEQQELVERDDEKQLMNVEPIHADILLETYKRKIADEGRLFLAEFQSIPRVFSKFPIKEARKPFNQNKNRYVDILPYDYNRVELSEINGDAGSNYINASYIDGFKEPRKYIAAQGPRDETVDDFWRMIWEQKATVIVMVTRCEEGNRNKCAEYWPSMEEGTRAFGDVVVKINQHKRCPDYIIQKLNIVNKKEKATGREVTHIQFTSWPDHGVPEDPHLLLKLRRRVNAFSNFFSGPIVVHCSAGVGRTGTYIGIDAMLEGLEAENKVDVYGYVVKLRRQRCLMVQVEAQYILIHQALVEYNQFGETEVNLSELHPYLHNMKKRDPPSEPSPLEAEFQRLPSYRSWRTQHIGNQEENKSKNRNSNVIPYDYNRVPLKHELEMSKESEHDSDESSDDDSDSEEPSKYINASFIMSYWKPEVMIAAQGPLKETIGDFWQMIFQRKVKVIVMLTELKHGDQEICAQYWGEGKQTYGDIEVDLKDTDKSSTYTLRVFELRHSKRKDSRTVYQYQYTNWSVEQLPAEPKELISMIQVVKQKLPQKNSSEGNKHHKSTPLLIHCRDGSQQTGIFCALLNLLESAETEEVVDIFQVVKALRKARPGMVSTFEQYQFLYDVIASTYPAQNGQVKKNNHQEDKIEFDNEVDKVKQDANCVNPLGAPEKLPEAKEQAEGSEPTSGTEGPEHSVNGPASPALNQGS

SEQ ID NO: 2625 - DNA, 2340 bp, Homo sapien
aggcgctgcggagacgcgtagaggagcgcgccccccggccgmtgccgmccctggcccgtgccgtcaccccgcttctccgcgcctcgggcggtacccagccagtccccagcgccgcgctaccgcgctgaccggccctccagacgcctcccggtacccgggaccccagcccggccgctcgcccgcagcccgccggccgcacacgtccccggagccgggcctagggcgggcggcagggcggctcggcgcagtcaggctgggctctgtagcgtccccatggccgcggccggctggcgggacggctccggccaggagaagtaccggctcgtggtggtcggcgggggcggcgtgggcaagtcggcgctcaccatccagttcatccagtcctattttgtaacggattatgatccaaccattgaagattcttacacaaagcagtgtgtgatagatgacagagcagcccggctagatattttggatacagcaggacaagaagagtttggagccatgagagaacagtatatgaggactggcgaaggcttcctgttggtcttttcagtcacagatagaggcagttttgaagaaatctataagtttcaaagacagattctcagagtaaaggatcgtgatgagttcccaatgattttaattggtaataaagcagatctggatcatcaaagacaggtaacacaggaagaaggacaacagttagcacggcagcttaaggtaacatacatggaggcatcagcaaagattaggatgaatgtagatcaagctttccatgaacttgtccgggttatcaggaaatttcaagagcaggaatgtcctccttcaccagaaccaacacggaaagaaaaagacaagaaaggctgccattgtgtcattttctagaatcccttcagttttagctaccaacggccaggaaaagccctcatcttctctttctctcctcagtttacatcttgttggtacctttctagccttagacaaatgatcaccatgttagccttagacgaagaagctggctagtcctttctgtgaagctaatacaatggtcatttccagacaaatttaaaggaaacactaaggctgcttcaaagattatctgattcctttaaaatatatgtctatatacacagacatgctctttttttaagtgcttacattttaatagagatgaatcagttttggaatctaagctgtttgccaagctgaagctacaggttgtgaaataatttttaacttttggaatcatactgcctactgttactctaaatagaaatatagggttttttttaatgtgaatttttgcctatctttaaacatttcaatgtcagcctttgttaaccttaaatacactgaattgaatctacaaaagtgaaccatctcagacctttactgatactacaacttttgttttctgatggccaaaataccaaatgcctgttgtatttatggattaaaaactgcttataaaaccctgtgttactactcctactcttggagatgataatattctatgtggtcaaatatttggactcatttaggacttagatatttcagtgtacttgattttttaatttaactctttttcacagccacgctaagggtaaaaaggaataatttccttctgtcttccttttcaagtatttctgggtaagggattcaaaaaactaaaactgtttttgtttgtaatataaaatatggaattgatctttccagggtcagagatgattaatgtttttgctatatacttttatacattattttcttatcaaactagttaacaagtatttttatatgtttgtaagcagatatgctttcatagcataccttgtgtatatgtaaagataagtatttaattctcactgttcacttttaactgacaaagaaaaacaagtggaaactacagaaactgtggtagaacttttacttgctggtctggtcttggttgtacccatctttggccagtcacataactactcaagaaaccttcccaatagagtacaacaggatgagactctgaaatcactttcagtattccctgctagatattgattgttatttcaagtattaagtgtaagcttttaatggataattagtataactgtggatggcatctgattttgtttttaattctgtggattgtgtttaagcaattcaatagtatgttcctgattttgagatgctaagtggtattgcacagttgtcactttatcaagtgtgtacaacagtcccatgaagtttatagagcatacccttgtatagcttcaggtgctagaattaaaattgatctgttatcacaaaaaaaaaaaaaaaaaaaaaaggctctttaattaggcg

SEQ ID NO: 2626 - DNA, 1410 bp, Homo sapien; identical to SEQ ID NO: 1769

SEQ ID NO: 2627 - protein, 204 aa, Homo sapien; identical to SEQ ID NO: 1770

SEQ ID NO: 2628 - DNA, 2319 bp, Homo sapien; identical to SEQ ID NO: 689

SEQ ID NO: 2629 - protein, 469 aa, Homo sapien; identical to SEQ ID NO: 690

SEQ ID NO: 2630 - DNA, 1897 bp, Homo sapien
ctccgaacaggaagaggacgaaaaaaataaccgtccgcgacgccgagacaaaccggacccgcaaccaccatgaacagcaaaggtcaatatccaacacagccaacctaccctgtgcagcctcctgggaatccagtataccctcagaccttgcatcttcctcaggctccaccctataccgatgctccacctgcctactcagagctctatcgtccgagctttgtgcacccaggggctgccacagtccccaccatgtcagccgcatttcctggagcctctctgtatcttcccatggcccagtctgtggctgttgggcctttaggttccacaatccccatggcttattatccagtcggtcccatctatccacctggctccacagtgctggtggaaggagggtatgatgcaggtgccagatttggagctggggctactgctggcaacattcctcctccacctcctggatgccctcccaatgctgctcagcttgcagtcatgcagggagccaacgtcctcgtaactcagcggaaggggaacttcttcatgggtggttcagatggtggctacaccatctggtgaggaaccaaggccacctctgtgccgggaaagacatcacataccttcagcacttctcacaatgtaactgctttagtcatattaacctgaagttgcagtttagacacatgttgttggggtgtctttctggtgcccaaactttcaggcacttttcaaatttaataaggaaccatgtaatggtagcagtacctccctaaagcattttgaggtaggggaggtatccattcataaaatgaatgtgggtgaagccgccctaaggattttcctttaatttctctggagtaatactgtaccatactggtctttgcttttagtaataaaacatcaaattaggtttggagggaactttgatcttcctaagaattaaagttgccaaattattctgattggtctttaatctcctttaagtctttgatatatattacttgttataaatggaacgcattagttgtctgccttttcctttccatcccttgccccacccatcccatctccaaccctagtcttccatttcctcccgccagtctccattgaatcaatggtgcaggacagaaagccagtcagactaatttccttctttcctcgcacttctccccactcgtcatcttttaactagtgtttcacaaggatcctctgaaaccctctctgtgccccaagtacagatgccattacttctgctttcgtatctcctcaggcaaaagtggagggtgccttatgggccctcctcataggttgtctctgcatacacgaacctaacccaaatttgctttggtgccagaaaaactgagctatgtttgaacaaagatgtcgtgcaaactgtactgtgaacaacagttggtttaaaatatgaggggcaaggaggaggatgcatttcaaaagcttgattgatgtgttcagagctaaattaagaggagttttcagatcaaaaactggttaccattttttgtcagagtgtctgatgcggccactcattcggctccccagaattcctagactgggttaatagggtcatattgtgaatgtctcactacaaaatgacttgagtccagtgaaatctcattagggtttaagaatatttcagggatccttaatgttttgatttttgttttctgaaattggattttattttattttatcttataatttcagttcatctaaattgtgtgttctgtacatgtgatgtttgactgtaccattgactgttatggaagttcagcgttgtatgtctctctctacactgtggtgcacttaacttgtggaatttttatactaaaaatgtagaataaagactattttgaagatttgaataaagtgatgaagttgc

SEQ ID NO: 2631 - protein, 168 aa, Homo sapien
MNSKGQYPTQPTYPVQPPGNPVYPQTLHLPQAPPYTDAPPAYSELYRPSFVHPGAATVPTMSAAFPGASLYLPMAQSVAVGPLGSTIPMAYYPVGPIYPPGSTVLVEGGYDAGARFGAGATAGNIPPPPPGCPPNAAQLAVMQGANVLVTQRKGNFFMGGSDGGYTIW

SEQ ID NO: 2632 - DNA, 2849 bp, Homo sapien
  Unsure 410-603: Unknown base
tggactatgagactggacatatctcgttctacaatgccacggatggatctcatatctacacatttctgcacgcctcttcctctgagcctctgtatcctgtattcagaattttgaccttggagcccactgccctgaccgtttgcccaataccaaaagtagagagttcccccgatcccgacctagtgcctgatcattccctggagataccagtgaccccaggcttagctaatgaaagtggggagcctcaggctgaagtaacatctctgcttctccctgcccagcctggagctaagggtctcaccctccacaacagccagtcagaaccataaagctacaggcacacactgaagcactttactgatattcattcgattattccataggacagttgtttgagattggtgccaccnnnnnnnnnnnnnnnnnnnnnnnnnnnnnnnnnnnnnnnnnnnnnnnnnnnnnnnnnnnnnnnnnnnnnnnnnnnnnnnnnnnnnnnnnnnnnnnnnnnnnnnnnnnnnnnnnnnnnnnnnnnnnnnnnnnnnnnnnnnnnnnnnnnnnnnnnnnnnnnnnnnnnnnnnnnnnnnnnnnnnnnnnnnnnnnnnntgtcaggtagtctcatttggcaagtatggaagcagaggcagggcaacattaagtagcttacataactcacacggtaatttgtgcagttgggagatgttcagcttcagtcctggccaattgcccgttcttttccagcctgatttttcccgcatgggaagaacccacatgtagccctgaggttcccttcccaggacagctccaggatcgagatcactgtgagtggttgtggagttaagacccctatggactccttcccagctgattatcagagccttagacccagcactccttggattggctctgcagagtgtcttggttgagagaatcacattcagggcaggctagggacacggggttctggaaggacctcctcagcatggcccaagccttgcatgctgtggctcttaaatccaggaaaaatggctgaccccatggacacctcctcaaactctctgcagcagatgtaattctgtatccagacatggcaaatgccatcctccttgtttctgaggaccagaggagtgtacagcgtgctgaggagccccatgacctaccagacaaccctgagagatttgaatggcgttactgtgtgcttggctgtgaaagcttcatgtcagagagacactactgggaggtggaagtgggggacagaaaagagtggcatattggggtatgtagtaagaacgtggagaggaaaaaagtttgggtcaaaatgacaccggagaacggatactggactatgggcctgactgatgggaataagtatcgggctctcactgagcccagaaccaacctgaaacttcctgagcctcctaggaaagtgggggtcatcctggactatgagactggacatatctcgttctacaatgccacggatggatctcatatctacacatttctgcacgcctcttcctctgagcctctgtatcctgtattcagaattttgaccttggagcccactgccctgaccgtttgcccaataccaaaagtagagagttcccccgatcccgacctagtgcctgatcattccctggagataccactgaccccaggcttagctaatgaaagtggggagcctcaggctgaagtaacatctctgcttctccctgcccagcctggagctaagggtctcaccctccacaacagccagtcagaaccataaagctacaggcacacactgaagcactttactgatattcattcaattattccataggacagttgtttgagtttggtgccaccttattggcccctttatacagataaggaaactggggtgtagaaaagtgtattgactttacaaagcagacaggaatagtgaacaacagagctgggatctgaacaacaatgactaacattaatggagaatttaaaacgttctgagtgctgtgttatgagctttggtgggtgtcactcctttaatcctcacaacaccctgtcaggtagtctcatttggcaagtatggaagcagaggcagggcaacattaagtagcttacataactcacacggtaatttgtgcagttgggagatgttcagcttcagtccctggccaattgcccgttcttttccagcctgatttttcctgcatgggaagagcccacatgtagccctgaggttcccttcccaggacagctccaggatcgagatcactgtgagtggttgtggagttaagacccctatggactccttcccagctgattatcagagccttagacccagcactccttggattggctctgcagagtgtcttggttgagagaataacgttgcagttcccacagggcatgtgactttgaaagagactagaggccacactcagttaataatggggcacagatgtgttcccacccaacaaatgtgataagtgatcgtgcagccagagccagccttccttcagtcaaggtttccaggcagagcaaataccctagagattctctgtaatattggtaatttggatgaaggaagctagaagaattacagggatgtttttaatcccactatggactcagtctcctggaaaaggatctgtccactcctggtcattggtggatgttaaacccatattcctttcaactgctgcctgctagggaaaactgctcctcattatcatcactattattgctcaccactgtatcccctctactgggcaagtgcttgtcaagttctagttgttcaataaatttgttaataatgctgaaaaaaaatctatgtcgggtgcggagaaagaggtaatgaaatggcagga

SEQ ID NO: 2633 - protein, 226 aa, Homo sapien [sequence omitted]

SEQ ID NO: 2634 - DNA, 5577 bp, Homo sapien
ggcaaccatggcgggaggaatgaaagtggcggtctcgccggcagttggtcccgggccctggggctcgggagtcgggggcggtgggacagtgcggctactcttgatcctctccggctgcttggtctacggcacagctgaaactgatgtaaatgtggtcatgcttcaggaatcccaagtttgtgaaaagcgtgccagccaacaattctgttacacaaatgtgcttatcccaaaatggcatgatatatggacacggatacagatccgagtaaatagttccagattggttcgagtcacccaggtggagaatgaggagaaactgaaggagctagagcagtttagtatctggaactttttttcctcctttttaaaagagaaattgaatgacacctatgttaacgtgggtctatacagcacaaaaacctgcctcaaagttgagattatagagaaggacaccaagtacagtgtcattgtgatccggagatttgatcccaaactctttcttgttttccttcttggacttatgctatttttttgtggagacttgctgagcagaagtcaaattttctactactctactgggatgactgtgggaattgtggcctctctgctaatcatcatttttatactatctaagtttatgcctaagaaaagtcccatttacgtcatcctggtgggaggctggtctttttctctgtacctcattcaactagtttttaaaaatttacaagagatctggaggtgttactggcagtatcttttaagttatgtcctcacagttggattcatgagttttgcagtatgttacaagtatgggcccttggagaatgaacgaagtatcaacctgctgacctggaccttgcagctgatgggcctgtgtttcatgtattctggcatccagataccacatattgcccttgccattatcatcattgctctttgtactaagaacctggaacaccctattcagtggctgtacatcacctgcagaaaggtgtgtaagggagcagaaaagcctgttccccctcgtctcctgacagaagaagaatatcggatacaaggagaggtagaaacccgaaaggctttagaggagctccgagaattttgtaacagtccagactgctctgcttggaagactgtttctcgaatccagtctccaaaaagatttgctgactttgtggaaggctcttcccacctcacgccaaatgaagtttctgtccatgagcaggagtatggattagggagcattattgcccaggatgaaatctatgaggaagcatcctctgaggaggaggactcatattctcggtgtcctgctatcacacagaacaactttctaacctaggtagtggtcagttatctttacgtggactggcttggtgccttggtccatgttgcatgtgttgtgcaattgctttcaaccctttgaaacagagtgagatagatagggtagaaattctcctactgaaataagaggcctaaaaaggcctccctttggaaatgggaggtctctatgggatccctgaggaaggagagtggataaagtagtgaatgctgggtagttcacttcccattggttaagctaacagcccacttttatgtttccagagaaattggatggccacagctagcatggcattctagctccttcttgaaagttgattcaatcatggcatttctgtcactggctggctctccaaagtaagaactgttgttaagtgcaggaatgcttttagactataggctgcaacttccagagagaaatccacaaatctgagcctccttcactccagcttttatttcagtgactttagaataattattgatttaactgttttgggaggaaaatagatttttattgttttgttttttaaatgaatgtcttttaaaaaacataacaaactcatgttccagaaccagcaagtgctccagagtgacacaccccctaggcccctacatatttattaatatggattatccattaaagccccaggagctgttgttttaagctttgatttagttctcatacatatgatagaaagtcctatttgcctttaggaacatgcctgtaggctcttctgcaggtgagatgtactgggctttttattatattcaactttcaattccatcttaaaaaacatttgtattcttctcttcccattcttccttaccctgcctttgccctttcaggaagggtcagttcccttacctgtgaactatgtatgttcagagtagcattattcctgctagctaggagaagtcatcttgtttaggggatttggatgctttttatacgttctccattttcctgtcattgggtcatgttatctttgagttgctatgaaatcaggaaactgtctccttttcctttcccttcctttgtctacatgctctgtccattcctttcagccttttctcaccacccatactcccccaaatctgggtaatttttaagccttgaaactatgtagtttcttgatacacaatttgtagttatgcagcagccacaatttgcattgccaggaaataggctccaggttatcttcatgcctctgggtgctcattcagctgtcaagtttccatgaacttacacttatttatgattgcgtttctgacctgagatgtatgctgcctgttattgcagtagcattagtttcagattcttttgccattgcaaagtaccccttataaaccagcaatgtcatctgtgaggaagcaaattctcaagtgtctgtcatttacttggttctttttctttgtggtcttcacccttataccctggaaaagtctgtaattaccttagccaggaagatagatggtcatggcaagcgcacagcaccagacttactggctcaccaagatgatggaaaaaggcagatgattttttaaaaagccgtaatgactcctttagaccagccatttagcgtggtaattttgaaaggcctagctccattgcagacttccaaagggtcagctctgagactgccctccaggtgggcagttgattatttccaccagtgttttccagagccttaaactgtcctaagtgacaactacctcagttggcaggaaagagacatatagtagaaagtgaaaaatgagcagtatttgggcagatgctatgggttacagttgaagggtaaaaggaactttacattgggaaacctttatacccttgtgaattatgtacatggtaaaatgttctctctctacaaagaactattaaaacttctgaaatatactattttttaccttatttatagaaattgagacctagcatatttaagcataagtttattttaaaaaataattcaactcgtgcaagtggtctcaggattctctggagattttggtgcctcccctacttagggaggtgatagcttgcctataagggtgacttttcctgatcatgtctttatttcaatgagaaagcactgtgaaattgtgaaagattctcctctttctctgtttaataaacccccatgaaatatagtttccatctctagaccagttttttttccaccgtgtttagacttgaggtgaataaaatcaaactgttttttactccctatctggtagttggagacctgagctgtaggcagtggagatggcaattggttctgcagcctgagagttgctctcacacagtgaaggacggtgctgctctggtgtgctgtgtgtccttgccctgcctgcctgtggctctgcccagatgcttcagatcctctgtgttccggagattgcttgacttcaaccttctttaggagctgctcttgtctccctcttggccacttagtttgctggctcagtcactacttgaagaccccatttaatttttctctggcagttatagctcttgtgatttcagtacagtctcatctctcagaccaatctcatcaagaaggattgaagggataactatgaggtaagctggacattggagccgtgtttgctgccacgtcagcgtcttgctgggtgaatgtcaagccataaatgggctccagggctctggatctcatcagcattggaaatctattgcctctcatcagtctgaccaaattatgtagagcattaatgtagagactcccattaatgggaatacaagaggcagctggcataaaacatttctttcactttcctttcccactcagattgcttcaagagaccaacagaacacagggatcaaaaacaaggaaaatttagcaacttcattaccttctaataagtaattcctgttagccactgcatcccaccaaaactagtttatttttcccctcaaattcatgatttttacgtctgttacaaagggaattttgctgatagctctttgggtcccactgttccattttatgctaatagattccattctagggcccagccgtctcttgactgatggtgttccctttaacccttggcatgtataatagaattttggtgaatgaaagaacccaaataggccagatagtccccccaggccctgatatccataaaaggcttgggaatgcattatgtaattgtccttagtctttttgttgttttagaaaaaaaaaacaagatgggctcagatggatgcctacgtaaaaatggttcctagctgtgtactcataacttttctttgaattgagtagtgaaaggaaggaggaggaaaggaaattaaatgtccttctagtattctctggactcaagtctgacatatgagataataacctatattgaaatgccaagaattgtatctgaaacaagagaacagtttgacacatttatcatgccttcatattacatattaactgaaaccaattaataaacatatgaaatatccattgcacaaggcaaaggcacctaaaccttttgtttctttttctacatagcagaaattgattttttttttatttttttaggggaacctatataattatgacccagtgatgtcttttggtgacttaagcttatgaattcaggttacaattgagttgattctagatggttactaccttgaaaaggatgttggtgccttatgtgacacgagccagagcctgctgggaataaacaaagcagattcatgccaacaccaactcgtagctttagtggcagatgggagtggtcacagactcccaaaatgtggggctttggatttccacaccatcccacgtgtgtgtcatcttcctctttcacactcttgatgataatttgaaaatgatgaaatcacctctgaatttgcctatagcatgagcacattcttatgacaacataacaaatagttcataatgtgaatattagaaactgttacagcctgcagttaccataattttccatgtttgtggaattgatattgaaatagcagggctaaggaattactggcaagttttagcctgtgggtaataccttagggttatttaaatatttgtaattttatttaaatgttcatgaatgtttgaaaggaacaaaattatcagggatggctctttgccatgggtcttattttcaccctcttttctgtaagaaaaaagaacaatgtcttaatgtatttttaaagtttttggtatagtttctaattccaattttaataaaagttttatagat

SEQ ID NO: 2635 - protein, 446 aa, Homo sapien
ATMAGGMKVAVSPAVGPGPWGSGVGGGGTVRLLLILSGCLVYGTAETDVNVVMLQESQVCEKRASQQFCYTNVLIPKWHDIWTRIQIRVNSSRLVRVTQVENEEKLKELEQFSIWNFFSSFLKEKLNDTYVNVGLYSTKTCLKVEIIEKDTKYSVIVIRRFDPKLFLVFLLGLMLFFCGDLLSRSQIFYYSTGMTVGIVASLLIIIFILSKFMPKKSPIYVILVGGWSFSLYLIQLVFKNLQEIWRCYWQYLLSYVLTVGFMSFAVCYKYGPLENERSINLLTWTLQLMGLCFMYSGIQIPHIALAIIIIALCTKNLEHPIQWLYITCRKVCKGAEKPVPPRLLTEEEYRIQGEVETRKALEELREFCNSPDCSAWKTVSRIQSPKRFADFVEGSSHLTPNEVSVHEQEYGLGSIIAQDEIYEEASSEEEDSYSRCPAITQNNFLT

SEQ ID NO: 2636 - DNA, 5620 bp, Homo sapien
aggaggaggtggcttgaggcaaccatggcgggaggaatgaaagtggcggtctcgccggcagttggtcccgggccctggggctcgggagtcgggggcggtgggacagtgcggctactcttgatcctctccggctgcttggtctacggcacagctgaaactgatgtaaatgtggtcatgcttcaggaatcccaagtttgtgaaaagcgtgccagccaacaattctgttacacaaatgtgcttatcccaaaatggcatgatatatggacacggatacagatccgagtaaatagttccagattggttcgagtcacccaggtggagaatgaggagaaactgaaggagctagagcagtttagtatctggaactttttttcctcctttttaaaagagaaattgaatgacacctatgttaacgtgggtctatacagcacaaaaacctgcctcaaagttgagattatagagaaggacaccaagtacagtgtcattgtgatccggagatttgatcccaaactctttcttgttttccttcttggacttatgctatttttttgtggagacttgctgagcagaagtcaaattttctactactctactgggatgactgtgggaattgtggcctctctgctaatcatcatttttatactatctaagtttatgcctaagaaaagtcccatttacgtcatcctggtgggaggctggtctttttctctgtacctcattcaactagtttttaaaaatttacaagagatctggaggtgttactggcagtatcttttaagttatgtcctcacagttggattcatgagttttgcagtatgttacaagtatgggcccttggagaatgaacgaagtatcaacctgctgacctggaccttgcagctgatgggcctgtgtttcatgtattctggcatccagataccacatattgcccttgccattatcatcattgctctttgtactaagaacctggaacaccctattcagtggctgtacatcacctgcagaaaggtgtgtaagggagcagaaaagcctgttccccctcgtctcctgacagaagaagaatatcggatacaaggagaggtagaaacccgaaaggctttagaggagctccgagaattttgtaacagtccagactgctctgcttggaagactgtttctcgaatccagtctccaaaaagatttgctgactttgtggaaggctcttcccacctcacgccaaatgaagtttctgtccatgagcaggagtatggattagggagcattattgcccaggatgaaatctatgaggaagcatcctctgaggaggaggactcatattctcggcgtcctgctatcacacagaacaactttctaacctaggtagtggtcagttatctttacgtggactggcttggtgccttggtccatgttgcatgtgttgtgcaattgctttcaaccctttgaaacagagtgagatagatagggtagaaattctcctactgaaataagaggcctaaaaaggcctccctttggaaatgggaggtctctatgggatccctgaggaaggagagtggataaagtagtgaatgctgggtagttcacttcccattggttaagctaacagcccacttttatgtttccagagaaattggatggccacagctagcatggcattctagctccttcttgaaagttgattcaatcatggcatttctgtcactggctggctctccaaagtaagaactgttgttaagtgcaggaatgcttttagactataggctgcaacttccagagagaaatccacaaatctgagcctccttcactccagcttttatttcagtgactttagaataattattgatttaactgttttgggaggaaaatagatttttattgttttgttttttaaatgaatgtcttttaaaaaacataacaaactcatgttccagaaccagcaagtgctccagagtgacacaccccctaggcccctacatatttattaatatggattatccattaaagccccaggagctgttgttttaagctttgatttagttctcatacatatgatagaaagtcctatttgcctttaggaacatgcctgtaggctcttctgcaggtgagatgtactgggctttttattatattcaactttcaattccatcttaaaaaacatttgtattcttctcttcccattcttccttaccctgcctttgccctttcaggaagggtcagttcccttacctgtgaactatgtatgttcagagtagcattattcctgctagctaggagaagtcatcttgtttaggggatttggatgctttttatacgttctccattttcctgtcattgggtcatgttatctttgagttgctatgaaatcaggaaactgtctccttttcctttcccttcctttgtctacatgctctgtccattcctttcagccttttctcaccacccatactcccccaaatctgggtaatttttaagccttgaaactatgtagtttcttgatacacaatttgtagttatgcagcagccacaatttgcattgccaggaaataggctccaggttatcttcatgcctctgggtgctcattcagctgtcaagtttccatgaacttacacttatttatgattgcgtttctgacctgagatgtatgctgcctgttattgcagtagcattagtttcagattcttttgccattgcaaagtaccccttataaaccagcaatgtcatctgtgaggaagcaaattctcaagtgtctgtcatttacttggttctttttctttgtggtcttcacccttataccctggaaaagtctgtaattaccttagccaggaagatagatggtcatggcaagcgcacagcaccagacttactggctcaccaagatgatggaaaaaggcagatgattttttaaaaagccgtaatgactcctttagaccagccatttagcgtggtaattttgaaaggcctagctccattgcagacttccaaagggtcagctctgagactgccctccaggtgggcagttgattatttccaccagtgttttccagagccttaaactgtcctaagtgacaactacctcagttggcaggaaagagacatatagtagaaagtgaaaaatgagcagtatttgggcagatgctatgggttacagttgaagggtaaaaggaactttacattgggaaacctttatacccttgtgaattatgtacatggtaaaatgttctctctctacaaagaactattaaaacttctgaaatatactattttttaccttatttatagaaattgagacctagcatatttaagcataagtttattttaaaaaataattcaactagtgcaagtggtctcaggattctctggagattttggtgcctcccctacttagggaggtgatagcttgcctataagggtgacttttcctgatcatgtctttatttcaatgagaaagcactgtgaaattgtgaaagattctcctctttctctgtttaataaacccccatgaaatatagtttccatctctagaccagttttttttccaccgtgtttagacttgaggtgaataaaatcaaactgttttttactccctatctggtagttggagacctgagctgtaggcagtggagatggcaattggttctgcagcctgagagttgctctcacacagtgaaggacggtgctgctctggtgtgctgtgtgtccttgccctgcctgcctgtggctctgcccagatgcttcagatcctctgtgttccggagattgcttgacttcaaccttctttaggagctgctcttgtctccctcttggccacttagtttgctggctcagtcactacttgaagaccccatttaatttttctctggcagttatagctcttgtgatttcagtacagtctcatctctcagaccaatctcatcaagaaggattgaagggataactatgaggtaagctggacattggagccgtgtttgctgccacgtcagcgtcttgctgggtgaatgtcaagccataaatgggctccagggctctggatctcatcagcattggaaatctattgcctctcatcagtctgaccaaattatgtagagcattaatgtagagactcccattaatgggaatacaagaggcagctggcataaaacatttctttcactttcctttcccactcagattgcttcaagagaccaacagaacacagggatcaaaaacaaggaaaatttagcaacttcattaccttctaataagtaattcctgttagccactgcatcccaccaaaactagtttatttttcccctcaaattcatgatttttacgtctgttacaaagggaattttgctgatagctctttgggtcccactgttccattttatgctaatagattccattctagggcccagccgtctcttgactgatggtgttccctttaacccttggcatgtataatagaattttggtgaatgaaagaacccaaataggccagatagtccccccaggccctgatatccataaaaggcttgggaatgcattatgtaattgtccttagtctttttgttgttttagaaaaaaaaaacaagatgggctcagatggatgcctacgtaaaaatggttcctagctgtgtactcataacttttctttgaattgagtagtgaaaggaaggaggaggaaaggaaattaaatgtccttctagtattctctggactcaagtctgacatatgagataataacctatattgaaatgccaagaattgtatctgaaacaagagaacagtttgacacatttatcatgccttcatattacatattaactgaaaccaattaataaacatatgaaatatccattgcacaaggcaaaggcacctaaaccttttgtttctttttctacatagcagaaattgatttttttttatttttttaggggaacctatataattatgacccagtgatgtcttttggtgacttaagcttatgaattcaggttacaattgagttgattctagatggttactaccttgaaaaggatgttggtgccttatgtgacacgagccagagcctgctgggaataaacaaagcagattcatgccaacaccaactcgtagctttagtggcagatgggagtggtcacagactcccaaaatgtggggctttggatttccacaccatcccacgtgtgtgtcatcttcctctttcacactcttgatgataatttgaaaatggtgaaatcacctctgaatttgcctatagcatgagcacattcttatgacaacataacaaatagttcataatgtgaatattagaaactgttacagcctgcagttaccataattttccatgtttgtggaattgatattgaaatagcagggctaaggaattactggcaagttttagcctgtgggtaataccttagggttatttaaatatttgtaattttatttaaatgttcatgaatgtttgaaaggaacaaaattatcagggatggctctttgccatgggtcttattttcaccctcttttctgtaagaaaaaagaacaatgtcttaatgtatttttaaagtttttggtatagtttctaattccaattttaataaaagttttatgccaaaaaaaaaaaaaaaaaaaaaaaaaaaa

SEQ ID NO: 2637 - protein, 452 aa, Homo sapien
RRRWLEATMAGGMKVAVSPAVGPGPWGSGVGGGGTVRLLLILSGCLVYGTAETDVNVVMLQESQVCEKRASQQFCYTNVLIPKWHDIWTRIQIRVNSSRLVRVTQVENEEKLKELEQFSIWNFFSSFLKEKLNDTYVNVGLYSTKTCLKVEIIEKDTKYSVIVIRRFDPKLFLVFLLGLMLFFCGDLLSRSQIFYYSTGMTVGIVASLLIIIFILSKFMPKKSPIYVILVGGWSFSLYLIQLVFKNLQEIWRCYWQYLLSYVLTVGFMSFAVCYKYGPLENERSINLLTWTLQLMGLCFMYSGIQIPHIALAIIIIALCTKNLEHPIQWLYITCRKVCKGAEKPVPPRLLTEEEYRIQGEVETRKALEELREFCNSPDCSAWKTVSRIQSPKRFADFVEGSSHLTPNEVSVHEQEYGLGSIIAQDEIYEEASSEEEDSYSRRPAITQNNFLT

SEQ ID NO: 2638 - DNA, 3269 bp, Homo sapien
ggtcgtctcgggtgaggaggtcgcgccggaagtggctctagccgtggcgcttcggcgtagtaaggagcctgcaacagagttttgttgtttagggggcgcggcaccgcaccgctcccttcaccttgcagcagccatggcgaaaggcagagtcgccgaacgatcgcagttgggcgctcaccacacgacccccgtgggggacggggcagcggggacgcggggtctcgcggcgcctggcagcagagaccaccagaaggaaaaatcctgggtagaagctggatcagcaagaatgtcactccttatattggtgtccattttcttatctgcagcttttgttatgtttttggtatataaaaattttcctcagcttagtgaagaagaaagagtgaatatgaaggttcccagagatatggatgatgccaaggctctaggaaaagttttatccaaatacaaggacaccttttatgttcaagtacttgtagcttattttgctacatatattttcttgcaaacatttgctattccaggctctatatttctcagtatactctcagggtttctttatccctttccactagccttatttcttgtttgtttgtgttctggacttggtgcctctttctgttatatgctttcctatttagttgggagaccagttgtatacaaatacctaacagagaaagcagtaaaatggtcacagcaggttgaacgtcatagagaacatctcattaactacattatatttttgagaataacaccatttctgcctaattggtttattaatatcacatctcctgtgataaacgtgccattgaaagttttttttattggtacttttctaggtgttgcacctccttcttttgtagccattaaggcaggaacaacactgtatcaacttacaacagcaggagaagctgtttcctggaactcaatatttattctgatgatcttggctgttctttctattctgccagccatcttccaaaaaaaactaaagcagaaatttgagtaaaaataatcatctgatttttagttttgctgtcatcaccatctcaggattaacagatgcatccatttatgttttaaaatcacctcttcagtaattaaacaaggaatttgtaaaataaaatttcctatcagatagttaaagtaatacatttaagtgacaaggggagaagaaagtaaaaatggaaattggtatactgtgaaaagtgctatcaatagttaaggtagacatcttagacatcttataaattattataccaagggtagctgtagataatagtagtgtggtaggaaattgttgatccagctaattcattcaatttaattgaatattttttatctttaataactaaaatagatatttttaaattctagattttttaaagtagtgttgcaggttttgttaatgttaggcttttttcagagcataaactggaaaacttaaaaagagatttacattttcttcctctttttttttttttttttttctgttttgagacggagtctagctctgccgcccaggctggagtgcagtggcgcgatctccgctcattgcaagctccacctcctgggttcacgccattctcctgtctcagcctcctgagtagctgggactacaggcgcccgccaccatgcccagctaatttttttgtatttttagtagagacggggtttcaccgtgttagccaggatggtctcgatctcctgacctcgtgatctgcccgccttggcctcccaaagtgctgggattacaggcatgagccaccgcgcctggcccattttcttcctcttttgaggtaatggatttgtttggagatggcatgttagtagacgactgaatatggaaaggatatcgagttatctattttgttaattttatttttgttttttatcatctagatttttatcatggattagtctgaaatttaaagttctggccagtcggttttctttcatcttgtagtttttacagtatttccactgtgcatatgcaaaatgggtattacataactgtatcatatttggtattgataattttttttttttttgagacggagtcttgctgttgcccaggctggagtggagtgcgtggtgtgatctcggctcactgcaaactccgcctcctgggttcaagcgattctcctggcccagcctcctgagtagctgggattacaggtgtgtgccaccatgcccagctaatttttgtgtttttagtagagacggggtttcaccatgttggccgggctggtcttgaactcctgacctcaggctatatgcccacttccacctcccaaagtgctgggattacaggcatgagccactgtgcccagcctggtattgataatttatattcagataatttgttatggctctttaatatcccacaaggggctctaaaaagcaaacattcaagagtatgtagtttttagacattaagttaattattttaaacagtgacagcaaaacacaagtgattaaatatagtttatttgttccaatgactaaattttacctcatttattaatctggtcattaaggaatatatttaataatattatgtaattattctttttatgcatgatacacctagaaaaatgccttttgtttctattgatggctttgttgtttggagctacttttgattacttattgcagtttcccaatttagtctttactttatctaactcacaaagtaaaattaactgatcacatggcaactactgtatttaaatagttctggaaaaatgaaagtgctttttgctgcttggtaaatgggtaatgcccttgattccttgactgtaggacatagctgatctaaagtactctgtcagttttaccttcacccatgactgtcattagttgtcaaagttgaaaagtactttagctgtgagaaatccttgtatgtttttattataagaggtataatcatcctcaaagcctgtttttattacatgatgtggactgattattttttctatcacagtgttaacagatggattttattgtaaatacaaagaaaacatattgattattgtagtattcttatgtcacctggccttttgcgtgaggattatttattatttctagcaaggctttcttcctttcttattgcccagagactgactgatacatcttttgttatttttacacataaattaaacatagcctttttggacaaattcactaaatattaatgtataaaatgtaattgagtaaatttttatcagaattttaaaaataaaagagcttagactcagtaggaactc

SEQ ID NO: 2639 - protein, 335 aa, Homo sapien
VVSGEEVAPEVALAVALRRSKEPATEFCCLGGAAPHRSLHLAAAMAKGRVAERSQLGAHHTTPVGDGAAGTRGLAAPGSRDHQKEKSWVEAGSARMSLLILVSIFLSAAFVMFLVYKNFPQLSEEERVNMKVPRDMDDAKALGKVLSKYKDTFYVQVLVAYFATYIFLQTFAIPGSIFLSILSGFLYPFPLALFLVCLCSGLGASFCYMLSYLVGRPVVYKYLTEKAVKWSQQVERHREHLINYIIFLRITPFLPNWFINITSPVINVPLKVFFIGTFLGVAPPSFVAIKAGTTLYQLTTAGEAVSWNSIFILMILAVLSILPAIFQKKLKQKFE

SEQ ID NO: 2640 - DNA, 1134 bp, Homo sapien
aaaaactcctttttgcaatagaagagacagagggatttggacaagaatgaatgtggcttcttattttggaggagctcttgcatttaaataccccagccaagaaagattgcacagatagtgtatataagctgttcattctgtacagtgaattttccgaacctctcaaagtatgttttccgttcttccacagaaatatgcaaaacagttcatccttttctactttatttattgttcccttgaaatgactgaccaggaaaaagatcatccttaaattttgaagcaagtgagagactttattaaaaatacatatatatctatataaacatagatgatagtggctctagttttatagagctccaagtgtattaaacatgacagccattcattcataaagatctggatttgctttaccttgttaatattatctaggggaaaaagtgcaaattgctccatgttctactctcccttatgtaacatctcctgagggtgtttagttgcatggctgttcagaaaggtattaagggcttaggccaaatcttactttgagtatgttaaaaaaaaaaaaaatgctgctggcttttctgaagacaggtgcttgaacttgtcagtttgttttaaataaatacaatagttgaaaatttttctctgttacatcagtaatattgttaaagtaatggatagaaccataacttacacatgaaagtcatatactagatccaatactatttagtttattatcgaaattggaaggattcattgagcagcatagaagtttgtttacatgttactttgagatgctaggtatttgtggaattaaaaagaatcaggctcttttgtactttgtttttaaatctgtgatgcttttcaaatttaattcataataaattgatgcaatttcatacttaggaacatacaaaaggtaatgtaaactctgccacttttttgtgttcaaaattttggtttttatgaagccagatggattgaagagttacataagcatttgaatgctctaatataaggctaatgattttctgttagtgtttgaatatcttcattcctctcaaattcataacagttctatttaactgaattaaataaccatatgaaaaatcgaaaaaaaaaaaaaaaaagaaa

SEQ ID NO: 2641 - protein, 38 aa, Homo sapien [sequence omitted]

SEQ ID NO: 2642 - DNA, 9175 bp, Homo sapien
tatgtttagtcccatatgctcttcctgaatcttgccactgcccatcaagagatagaatacatttcccctccccttgaacatggaagcaaccaagctttaagaagcacagctttggagacactccatgagtctgcactgctttcaggggaactagcacttaagaccttgtgtaacaaaatggacactggggacacagctctaggacaaaaagctacctcaaggtctggagaaactgataaagcatcaggtagatggagacaggaacaatcagctgttattaagatgagcacttttggcagtcatgaaggacagcggcaaccacaaatagagcctgagcaaatcggaaacacagcatcagcacaactgtttggttctgggaaactggcctcccctagtgaagtggtgcagcaagtcgcagagaagcaatatccaccgcatcgtccgagtccttactcatgccaacactcactctctttccctcagcactcattgccacagggggtcatgcacagcaccaagccacatcagagcctcgaaggtcctccgtggcttttccctggccctttgccatccgttgcctctgaggacttatttccttttcctatacatggccacagtggtggttatcctagaaaaaagatttcaagtctgaaccctgcttatagccaatactcccagaaaagtattgaacaggcagaagaggctcacaagaaagagcacaaacccaaaaagcctggcaagtacatttgcccttactgcagcagagcgtgtgccaaacctagtgtactgaaaaaacacatcaggtcccatactggggagcggccatatccatgtataccttgtggtttctctttcaagacaaagagcaatttgtacaagcacaggaagtcacatgcccatgcaattaaggcaggattagtacctttcacagagtcagctgtatctaaattggacctagaggctggttttattgatgtagaagcagaaatacattcagatggtgaacagagtacagacacagatgaggagagttctttatttgccgaggcttctgacaaaatgagtcctggtccacccatcccactggacattgccagcagaggcggctatcatgggtcattggaagaatcattgggaggtccaatgaaggtgccgattttgattatccctaaaagtgggattcctctccctaatgaaagctctcagtatattggccctgatatgctaccaaatccatctttaaatactaaggctgatgattcgcacacagtcaaacagaaacttgcactaagactgtcagagaaaaaaggacaagattctgagccatcgctcaaccttctgagcccgcacagtaaaggaagcactgattctggttacttttctcgctcagaaagtgctgagcagcaaataagccctcccaacacaaatgcaaagtcttatgaagaaatcatctttggaaaatactgtcggcttagtccgagaaatgcactcagtgttacaaccacaagtcaggagcgtgccgcaatgggtaggaagggcataatggaaccattacctcacgttaacaccaggttagatgtcaagatgtttgaagatcctgtttcacagctgatcccaagcaagggagatgtcgaccccagtcaaacgagcatgctgaaatccactaagttcaacagtgagtccagacaaccccagattattccatcatctatcaggaacgaaggaaaactttatccagcaaacttccaaggcagcaacccggttctcttagaagctcctgtagactcttcaccccttattagaagcaactcagtgccaacttcttcagcaactaatctaactattcctccttctttgagaggaagtcactcatttgatgaaaggatgactggttccgacgatgtattctatccagggaccgtgggcataccccctcagcgcatgctaagaagacaagcggcatttgagctgccttcggtacaggagggccacgtggaagtcgagcaccatggcaggatgttgaagggtatcagcagttcatccctgaaggaaaagaaattgtctcctggggacagggttgggtatgactatgatgtctgtcggaaaccctataagaagtgggaggactctgaaacaccaaagcaaaactacagggacatttcctgcttgagttctttaaagcatggtggagaatatttcatggatcccgtggtgccattgcagggagtaccaagcatgtttggaactacctgtgaaaacaggaaacgccggaaagagaagagcgtaggggatgaagaggacacgcccatgatctgcagcagcattgtaagcactcctgtgggcatcatggcttccgattatgaccccaaactgcagatgcaggaaggagtcaggagtggatttgccatggctggacacgaaaacctttctcatggtcacacggaacgctttgacccatgtcggccccaactgcagcctggaagtccatctcttgtgtcagaggagtcaccttcagccattgattcagacaagatgtcagacctagggggcaggaaacctcctggaaatgtgatttctgtgattcagcacaccaactcactgagccgacccaattcatttgaaaggtctgagtcagccgaacttgtggcttgcacacaggataaagccccttccccttcagagacttgtgacagtgagatttcagaagccccagtgagtcctgagtgggctccacctggggatggtgcagaaagtggggggaaaccctctccatctcagcaggtgcagcagcagtcctatcacacacagcccaggctagttcggcaacacaacatccaggttcctgagattcgagtgaccgaggagcctgataaacctgagaaggagaaggaagcccagagcaaagagccagagaagcctgtggaagaatttcagtggccccagagaagtgagaccctttcccagctccccgcggagaagttgcctcccaaaaagaagcgtctgcgacttgcagatatggagcactcctcaggggagtccagctttgaatccacaggcacaggcctctcccgcagccccagccaagaaagcaacttgtcccacagctccagtttctccatgtcttttgaaagagaagaaaccagtaagctttctgcacttcctaagcaggatgagtttgggaagcattcagagtttctgactgtccctgctggttcatactcattgtctgtcccaggccatcaccaccagaaagagatgcgacgctgctcatcagagcagatgccttgtcctcacccagcggaagtcccagaagttcggagcaaatcatttgattatgggaatctgtcccatgctcctgtgtcgggagcagcagcctccacggtatcaccgtccagggagaggaagaaatgctttctggtgcggcaagcttccttcagtggctccccagaaatctcccagggcgaggttggcatggatcagagcgtgaagcaagagcagctggagcacctgcatgctggcctccggtccgggtggcaccatggcccgcctgctgtgctgcctcctcttcagcaagaggacccagggaagcaggtggcgggtccttgtcccccgctgagctcggggccactgcacctggcccagccacagatcatgcacatggacagtcaggaatctttgagaaatcccttgatccaaccaacatcctatatgacaagcaagcacttacctgaacagccacacttatttccacatcaagagacaattccattttctccaatccagaatgccttgtttcagtttcagtatcctacagtttgtatggttcatttaccagctcagcagcctccctggtggcaggcacatttcccacatccctttgctcagcaccctcagaagagctatggcaagccctcttttcagacagaaatccattcgagctatcccttagagcatgtggcagagcacactggaaagaaacctgctgagtatgcacacacgaaagagcagacctacccatgttattcaggagcatcagggctacacccaaagaaccttcttccaaagtttccatcagaccagagcagtaagtcaactgaaacgccctctgagcaggttcttcaagaagattttgcctcggcaaatgctgggtctttgcagtccctcccaggaacagtggttcctgttcggatccagacgcacgtaccatcctatggaagtgtcatgtacacaagcatttctcagatacttgggcagaatagccctgccattgtcatatgcaaagtcgatgagaatatgacccaaaggacactggtcaccaacgcagccatgcaagggataggattcaacattgcccaggtgctggggcagcatgcgggcttggagaagtaccccatttggaaagcacctcagactttgcccctcggcttagaatcctccatccccttgtgtttaccttccacctctgacagcgtggccaccctgggaggtagcaagcgaatgctttctccagccagtagcttggagctcttcatggaaaccaagcagcagaaaagggtcaaagaagaaaagatgtacggacagattgtggaggagcttagtgctgtggagctgaccaactcagacatcaaaaaggacctctcccgcccccagaaaccccagctggttcgacaaggatgtgcttctgagccaaaagatggcttgcagtcagggtcatcttccttctcctcgctgtcgccctcctcatctcaagactatccttctgttagcccgtcttccagggagccattcccgcccagcaaggagatgctttccggttcccgggcaccacttccggggcagaagtccagtgggccttctgaaagcaaagaatcttcagatgaattagatatcgatgagacggcatcggacatgagcatgagcccacagagttcttcattaccagcaggagatggtcagctggaagaggaagggaagggccacaagcggcctgttggcatgctggtccgcatggcctctgcccccagcgggaacgtggcagactcaactcttcttctcacggacatggcagatttccagcagattcttcagttccccagtctgcggacaacaactactgtgagttggtgcttcttgaattatacaaaacccaattatgtgcaacaggccaccttcaaatcctcggtttatgcttcatggtgcattagttcctgtaatccaaacccatcaggattgaacaccaagaccacgctggctcttctgaggtccaagcaaaaaatcactgcagaaatttatactctggctgctatgcataggcctggaaccggcaagcttacatcatcaagtgcttggaagcagtttactcagatgaaacctgatgcgtcctttttatttggcagcaaactagaaaggaaactagtgggaaatatcttaaaggaaagagggaaaggagatattcatggagataaagatattggatccaaacaaactgagccaatccgaattaaaatatttgaaggagggtacaaatcgaatgaagattatgtatatgtcagaggacgtggccggggaaagtacatttgtgaagaatgtgggattcgctgtaagaagccaagcatgctcaaaaaacacatccgtacccatactgatgttcggccttatgtatgcaagttatgtaactttgccttcaaaacgaaaggaaacctaacgaagcatatgaaatctaaagcacacatgaaaaaatgcctggaattgggagtctcaatgacatcggtggatgatacagaaactgaggaagcagaaaatttggaagatttgcacaaagcagcagagaagcatagcatgtccagcatttcaactgatcatcagttctccgatgctgaggaatcagatggtgaggatggagatgataatgatgatgatgatgaagatgaagatgactttgacgaccagggagatttaacaccaaaaacaagatcaagaagcaccagtcctcagcctcctagattctcctccttgcctgtgaatgttggcgccgtaccccacggggttccttcagatagttccctgggacattcttcgttgatcagctatttggttactttgccaagtattcgagttactcagcttatgacacccagtgattcatgtgaagatacccagatgacagaataccagaggctattccagagcaaaagtacggactcagaaccagacaaagacagattggacatacctagttgtatggatgaggagtgcatgctaccttcagagccaagctcctctcccagggacttctcaccctcaagccaccattcctctccaggatatgattcttcaccctgtcgagataattcaccaaagaggtatctgatacccaaaggagatttatctcccaggagacatttatcacctaggagagatctgtcacccatgagacatctttcaccaacaaaggaagctgcattgagaagagagatgtcccaaagagatgtttcaccaagaaggcatttgtctccaaggaggccagtgtctcctgggaaagatatcacagcaagaagagacctctcccctagaagagagagaagatacatgaccacaataagagcgccatctcccagaagggctttataccataacccaccattgtccatgggacagtatttgcaagcagagccaattgtattggggcctcctaatttaagaagaggattacctcaggttccttacttcagtctctatggagaccaagaaggtgcttatgaacatccaggctccagccttttccctgagggtcctaatgactatgtcttcagtcatcttccactccactctcagcaacaagtgcgagcccctatccccatggtgcccgttggtgggatccagatggttcactccatgccgccagccctttccagtttacatccttcacccacattgcccctgccaatggagggctttgaggagaagaaaggcgcgtcaggggagtccttctccaaggacccctatgtgctttctaagcagcatgagaagcgaggtcctcacgctttgcagtcatctggtccgcctagcactccctcctctcctcggctgttgatgaaacagagcacttcggaagacagcctaaacgcaacagagcgggaacaggaggaaaatatacagacttgtacaaaagccattgcctctctccggattgccacggaagaggcagctctgctcgggccagatcagccagcgcgggtgcaggagccccaccagaaccccctgggaagtgcacatgttagcattagacactttagtagacctgagccaggtcagccctgtacctcagccacccaccctgacttgcatgatggtgaaaaggacaattttggtacatcacagactccattagctcactccacgttttacagcaagagttgtgtggatgacaagcagttggactttcacagcagcaaggaattatcttcaagcacagaggaaagcaaagatccttcatcagaaaagagtcagctacattgatctatgatgcatggagactttcatttccacattttcccatttttttgtttttgtttttctagaaatggaggtaatccagtttatagcatgcctgtcctaagttacagtagtttgctattatatatacttttgttatatcaaaagaattaggtaaattaacaagtcatcatgagcctgaccaaaacaaaatttgaaattaacctattgggtctggtacttttaaaattgtacagatgtttgtgccttttctttactttgcttatattcttataagcattttttagcagtaatttgtacatattttagaatttgtgtatctgctttgtaataaatgtaatttctttccttttttggacacttggatctaaatgatgtaaagcaaaacagcatcaatatatatgtgaggttgcactaaaacatatttttatatgattaaaactgaacagcttttatgtacagctctgattctgtaatactaatatttatttactttgtttcataaattgtacattttttcttaatgttgtggattgcttttctatgtgaagcatgggatttactgttgcgtaactagaacaaaaatgtacattgtaaacaagatatttaaactagagtatcttattctgcacttatgcattagttaaaaaaagataaaggatgtatcagtcagttcttaactcttgtatatttttttgtctcttgtttgctggattgactataacttaagtgctgattgtgattttaaaatgatagtaccgtaaagcattaaagtaaacaatgtgctattgtgagttttttcaaagctttataaatcagttataaataatattaaaagtatttggtcttatgtgaacatgttgatctatatactcatctaaaaatatgggaaaacattccaccccatgtaaatatgtacaagtgcatcactggtacaattttatgtaactcagttggacactaggttgccacagacctatgctaggtgtctttaaaaaattaaggtgacaaagcacatgggactgtgtagagcttggttatcggccggcccggtggcttggcaggcagtctgtcgctgctcatggagaagacctgggcttagcaatctccttagttcttgctacacaggatggtgactggaactaaggctacacagagggtcgcacttggactctgagggttgggtgtggaagggggaaaaggggatggagacctgctccccagctcttcctgtcagccggtttacatgggaacagggttaacatctgtgttaggggaggtcaccttaccctttttcataggggaagagtgtcacactcctggctatctcagggggaatggggaaaagaatctttcaagggcaaagaactcgtgggaggatgtctgttgtatgtaatactcacaatggcttttggttagtgttgaaggtgggaagagcatttgtaggtccagaagagtgaaagagagggaggggtgcagcaacatgtgcacaggcacgcacatgtgtgcacgcacacatacaatctgggttatctttgtgctatatagtggattataattctgtgaaaccaagtttgtatattgaattacattaaggagtgttctttaaaaagagaaataaatatacaattacatgcttaaaaaaaaaaaaaaaaaaaaa

SEQ ID NO: 2643 - protein, 2000 aa, Homo sapien
MLFLNLATAHQEIEYISPPLEHGSNQALRSTALETLHESALLSGELALKTLCNKMDTGDTALGQKATSRSGETDKASGRWRQEQSAVIKMSTFGSHEGQRQPQIEPEQIGNTASAQLFGSGKLASPSEVVQQVAEKQYPPHRPSPYSCQHSLSFPQHSLPQGVMHSTKPHQSLEGPPWLFPGPLPSVASEDLFPFPIHGHSGGYPRKKISSLNPAYSQYSQKSIEQAEEAHKKEHKPKKPGKYICPYCSRACAKPSVLKKHIRSHTGERPYPCIPCGFSFKTKSNLYKHRKSHAHAIKAGLVPFTESAVSKLDLEAGFIDVEAEIHSDGEQSTDTDEESSLFAEASDKMSPGPPIPLDIASRGGYHGSLEESLGGPMKVPILIIPKSGIPLPNESSQYIGPDMLPNPSLNTKADDSHTVKQKLALRLSEKKGQDSEPSLNLLSPHSKGSTDSGYFSRSESAEQQISPPNTNAKSYEEIIFGKYCRLSPRNALSVTTTSQERAAMGRKGIMEPLPHVNTRLDVKMFEDPVSQLIPSKGDVDPSQTSMLKSTKFNSESRQPQIIPSSIRNEGKLYPANFQGSNPVLLEAPVDSSPLIRSNSVPTSSATNLTIPPSLRGSHSFDERMTGSDDVFYPGTVGIPPQRMLRRQAAFELPSVQEGHVEVEHHGRMLKGISSSSLKEKKLSPGDRVGYDYDVCRKPYKKWEDSETPKQNYRDISCLSSLKHGGEYFMDPVVPLQGVPSMFGTTCENRKRRKEKSVGDEEDTPMICSSIVSTPVGIMASDYDPKLQMQEGVRSGFAMAGHENLSHGHTERFDPCRPQLQPGSPSLVSEESPSAIDSDKMSDLGGRKPPGNVISVIQHTNSLSRPNSFERSESAELVACTQDKAPSPSETCDSEISEAPVSPEWAPPGDGAESGGKPSPSQQVQQQSYHTQPRLVRQHNIQVPEIRVTEEPDKPEKEKEAQSKEPEKPVEEFQWPQRSETLSQLPAEKLPPKKKRLRLADMEHSSGESSFESTGTGLSRSPSQESNLSHSSSFSMSFEREETSKLSALPKQDEFGKHSEFLTVPAGSYSLSVPGHHHQKEMRRCSSEQMPCPHPAEVPEVRSKSFDYGNLSHAPVSGAAASTVSPSRERKKCFLVRQASFSGSPEISQGEVGMDQSVKQEQLEHLHAGLRSGWHHGPPAVLPPLQQEDPGKQVAGPCPPLSSGPLHLAQPQIMHMDSQESLRNPLIQPTSYMTSKHLPEQPHLFPHQETIPFSPIQNALFQFQYPTVCMVHLPAQQPPWWQAHFPHPFAQHPQKSYGKPSFQTEIHSSYPLEHVAEHTGKKPAEYAHTKEQTYPCYSGASGLHPKNLLPKFPSDQSSKSTETPSEQVLQEDFASANAGSLQSLPGTVVPVRIQTHVPSYGSVMYTSISQILGQNSPAIVICKVDENMTQRTLVTNAAMQGIGFNIAQVLGQHAGLEKYPIWKAPQTLPLGLESSIPLCLPSTSDSVATLGGSKRMLSPASSLELFMETKQQKRVKEEKMYGQIVEELSAVELTNSDIKKDLSRPQKPQLVRQGCASEPKDGLQSGSSSFSSLSPSSSQDYPSVSPSSREPFPPSKEMLSGSRAPLPGQKSSGPSESKESSDELDIDETASDMSMSPQSSSLPAGDGQLEEEGKGHKRPVGMLVRMASAPSGNVADSTLLLTDMADFQQILQFPSLRTTTTVSWCFLNYTKPNYVQQATFKSSVYASWCISSCNPNPSGLNTKTTLALLRSKQKITAEIYTLAAMHRPGTGKLTSSSAWKQFTQMKPDASFLFGSKLERKLVGNILKERGKGDIHGDKDIGSKQTEPIRIKIFEGGYKSNEDYVYVRGRGRGKYICEECGIRCKKPSMLKKHIRTHTDVRPYVCKLCNFAFKTKGNLTKHMKSKAHMKKCLELGVSMTSVDDTETEEAENLEDLHKAAEKHSMSSISTDHQFSDAEESDGEDGDDNDDDDEDEDDFDDQGDLTPKTRSRSTSPQPPRFSSL

SEQ ID NO: 2644 - DNA, 9175 bp, Homo sapien; identical to SEQ ID NO: 2642

SEQ ID NO: 2645 - protein, 2500 aa, Homo sapien
MLFLNLATAHQEIEYISPPLEHGSNQALRSTALETLHESALLSGELALKTLCNKMDTGDTALGQKATSRSGETDKASGRWRQEQSAVIKMSTFGSHEGQRQPQIEPEQIGNTASAQLFGSGKLASPSEVVQQVAEKQYPPHRPSPYSCQHSLSFPQHSLPQGVMHSTKPHQSLEGPPWLFPGPLPSVASEDLFPFPIHGHSGGYPRKKISSLNPAYSQYSQKSIEQAEEAHKKEHKPKKPGKYICPYCSRACAKPSVLKKHIRSHTGERPYPCIPCGFSFKTKSNLYKHRKSHAHAIKAGLVPFTESAVSKLDLEAGFIDVEAEIHSDGEQSTDTDEESSLFAEASDKMSPGPPIPLDIASRGGYHGSLEESLGGPMKVPILIIPKSGIPLPNESSQYIGPDMLPNPSLNTKADDSHTVKQKLALRLSEKKGQDSEPSLNLLSPHSKGSTDSGYFSRSESAEQQISPPNTNAKSYEEIIFGKYCRLSPRNALSVTTTSQERAAMGRKGIMEPLPHVNTRLDVKMFEDPVSQLIPSKGDVDPSQTSMLKSTKFNSESRQPQIIPSSIRNEGKLYPANFQGSNPVLLEAPVDSSPLIRSNSVPTSSATNLTIPPSLRGSHSFDERMTGSDDVFYPGTVGIPPQRMLRRQAAFELPSVQEGHVEVEHHGRMLKGISSSSLKEKKLSPGDRVGYDYDVCRKPYKKWEDSETPKQNYRDISCLSSLKHGGEYFMDPVVPLQGVPSMFGTTCENRKRRKEKSVGDEEDTPMICSSIVSTPVGIMASDYDPKLQMQEGVRSGFAMAGHENLSHGHTERFDPCRPQLQPGSPSLVSEESPSAIDSDKMSDLGGRKPPGNVISVIQHTNSLSRPNSFERSESAELVACTQDKAPSPSETCDSEISEAPVSPEWAPPGDGAESGGKPSPSQQVQQQSYHTQPRLVRQHNIQVPEIRVTEEPDKPEKEKEAQSKEPEKPVEEFQWPQRSETLSQLPAEKLPPKKKRLRLADMEHSSGESSFESTGTGLSRSPSQESNLSHSSSFSMSFEREETSKLSALPKQDEFGKHSEFLTVPAGSYSLSVPGHHHQKEMRRCSSEQMPCPHPAEVPEVRSKSFDYGNLSHAPVSGAAASTVSPSRERKKCFLVRQASFSGSPEISQGEVGMDQSVKQEQLEHLHAGLRSGWHHGPPAVLPPLQQEDPGKQVAGPCPPLSSGPLHLAQPQIMHMDSQESLRNPLIQPTSYMTSKHLPEQPHLFPHQETIPFSPIQNALFQFQYPTVCMVHLPAQQPPWWQAHFPHPFAQHPQKSYGKPSFQTEIHSSYPLEHVAEHTGKKPAEYAHTKEQTYPCYSGASGLHPKNLLPKFPSDQSSKSTETPSEQVLQEDFASANAGSLQSLPGTVVPVRIQTHVPSYGSVMYTSISQILGQNSPAIVICKVDENMTQRTLVTNAAMQGIGFNIAQVLGQHAGLEKYPIWKAPQTLPLGLESSIPLCLPSTSDSVATLGGSKRMLSPASSLELFMETKQQKRVKEEKMYGQIVEELSAVELTNSDIKKDLSRPQKPQLVRQGCASEPKDGLQSGSSSFSSLSPSSSQDYPSVSPSSREPFPPSKEMLSGSRAPLPGQKSSGPSESKESSDELDIDETASDMSMSPQSSSLPAGDGQLEEEGKGHKRPVGMLVRMASAPSGNVADSTLLLTDMADFQQILQFPSLRTTTTVSWCFLNYTKPNYVQQATFKSSVYASWCISSCNPNPSGLNTKTTLALLRSKQKITAEIYTLAAMHRPGTGKLTSSSAWKQFTQMKPDASFLFGSKLERKLVGNILKERGKGDIHGDKDIGSKQTEPIRIKIFEGGYKSNEDYVYVRGRGRGKYICEECGIRCKKPSMLKKHIRTHTDVRPYVCKLCNFAFKTKGNLTKHMKSKAHMKKCLELGVSMTSVDDTETEEAENLEDLHKAAEKHSMSSISTDHQFSDAEESDGEDGDDNDDDDEDEDDFDDQGDLTPKTRSRSTSPQPPRFSSLPVNVGAVPHGVPSDSSLGHSSLISYLVTLPSIRVTQLMTPSDSCEDTQMTEYQRLFQSKSTDSEPDKDRLDIPSCMDEECMLPSEPSSSPRDFSPSSHHSSPGYDSSPCRDNSPKRYLIPKGDLSPRRHLSPRRDLSPMRHLSPTKEAALRREMSQRDVSPRRHLSPRRPVSPGKDITARRDLSPRRERRYMTTIRAPSPRRALYHNPPLSMGQYLQAEPIVLGPPNLRRGLPQVPYFSLYGDQEGAYEHPGSSLFPEGPNDYVFSHLPLHSQQQVRAPIPMVPVGGIQMVHSMPPALSSLHPSPTLPLPMEGFEEKKGASGESFSKDPYVLSKQHEKRGPHALQSSGPPSTPSSPRLLMKQSTSEDSLNATEREQEENIQTCTKAIASLRIATEEAALLGPDQPARVQEPHQNPLGSAHVSIRHFSRPEPGQPCTSATHPDLHDGEKDNFGTSQTPLAHSTFYSKSCVDDKQLDFHSSKELSSSTEESKDPSSEKSQLH

SEQ ID NO: 2646 - DNA, 1865 bp, Homo sapien; identical to SEQ ID NO: 2397

SEQ ID NO: 2647 - protein, 415 aa, Homo sapien; identical to SEQ ID NO: 2398

SEQ ID NO: 2648 - DNA, 1802 bp, Homo sapien
gggcagctccaccctgggagggactgtggcccaggtactgcccgggtgctactttatgggcagcagctcagttgagttagagtctggaagacctcagaagacctcctgtcctatgaggccctccccatggctttagagacgatctgccgaccctctgggagaaaatccagcaagatgcaagccttcagaatctgggatgttaaccagaagaccttctatctgaggaacaaccaactagttgctggatacttgcaaggaccaaatgtcaatttagaagaaaagatagatgtggtacccattgagcctcatgctctgttcttgggaatccatggagggaagatgtgcctgtcctgtgtcaagtctggtgatgagaccagactccagctggaggcagttaacatcactgacctgagcgagaacagaaagcaggacaagcgcttcgccttcatccgctcagacagcggccccaccaccagttttgagtctgccgcctgccccggttggttcctctgcacagcgatggaagctgaccagcccgtcagcctcaccaatatgcctgacgaaggcgtcatggtcaccaaattctacttccaggaggacgagtagtactgcccaggcctgcctgttcccattcttgcatggcaaggactgcagggactgccagtccccctgccccagggctcccggctatgggggcactgaggaccagccattgaggggtggaccctcagaaggcgtcacaagaacctggtcacaggactctgcctcctcttcaactgaccagcctccatgctgcctccagaatggtctttctaatgtgtgaatcagagcacagcagcccctgcacaaagcccttccatgtcgcctctgcattcaggatcaaaccccgaccacctgcccaacctgctctcctcttgccactgcctcttcctccctcattccaccttcccatgccctggatccatcaggccacttgatgacccccaaccaagtggctcccacaccctgttttacaaaaaagaaaagaccagtccatgagggaggtttttaagggtttgtggaaaatgaaaattaggatttcatgatttttttttttcagtccccgtgaaggagagcccttcatttggagattatgttctttcggggagaggctgaggacttaaaatattcctgcatttgtgaaatgatggtgaaagtaagtggtagcttttcccttctttttcttctttttttgtgatgtcccaacttgtaaaaattaaaagttatggtactatgttagccccataattttttttttccttttaaaacacttccataatctggactcctctgtccaggcactgctgcccagcctccaagctccatctccactccagattttttacagctgcctgcagtactttacctcctatcagaagtttctcagctcccaaggctctgagcaaatgtggctcctgggggttctttcttcctctgctgaaggaataaattgctccttgacattgtagagcttctggcacttggagacttgtatgaaagatggctgtgcctctgcctgtctcccccaccgggctgggagctctgcagagcaggaaacatgactcgtatatgtctcaggtccctgcagggccaagcacctagcctcgctcttggcaggtactcagcgaatgaatgctgtatatgttgggtgcaaagttccctacttcctgtgacttcagctctgttttacaataaaatcttgaaaatgcctaaaaaaaaaaaaaaaaaaaaaaaaaaaaaaaaaaaaaaaaaaaaaaaaaaaa

SEQ ID NO: 2649 - protein, 159 aa, Homo sapien
MALETICRPSGRKSSKMQAFRIWDVNQKTFYLRNNQLVAGYLQGPNVNLEEKIDVVPIEPHALFLGIHGGKMCLSCVKSGDETRLQLEAVNITDLSENRKQDKRFAFIRSDSGPTTSFESAACPGWFLCTAMEADQPVSLTNMPDEGVMVTKFYFQEDE

SEQ ID NO: 2650 - DNA, 6466 bp, Homo sapien
ctctcttgctcgctcgctccctctctctcctgctggctgcctgttctaggaagccagcgcggagaggggggggatgcacagcacaggggagagagattgcgcatgttggtcagtcgtgttttaaagagtacagtgcggggaggctgagaggggcgcatgcaacaacaacttttggaaggatggaagagaagaggcgaaaatactccatcagcagtgacaactctgacaccactgacagtcatgcgacatctacatccgcatcaagatgctccaaactgcccagcagcaccaagtcgggctggccccgacagaacgaaaagaagccctccgaggttttccggacagacttgatcacagccatgaagatcccggactcataccagctcagcccggatgactactacatcctggcagacccatggcgacaggaatgggagaaaggtgtgcaggtgcctgccggggcagaggccatcccagagcccgtggtgaggatcctcccaccactggaaggcccccctgcccaggcatccccgagcagcaccatgcttggtgagggctcccagcctgattggccagggggcagccgctatgacttggacgagattgatgcctactggctggagctcatcaactcggagcttaaggagatggagaggccggagctggacgagctgacattagagcgtgtgctggaggagctggagaccctgtgccaccagaatatggccagggccattgagacgcaggaggggctgggcatcgagtacgacgaggatgttgtctgcgacgtgtgtcgctctcctgagggcgaggatggcaacgagatggtcttctgtgacaagtgcaacgtctgtgtgcatcaggcatgctacgggatcctcaaggtgcccacgggcagctggctgtgccggacgtgtgccctgggtgtccagccaaagtgcctgctctgccccaagcgaggaggagccttgaagcccactagaagtgggaccaagtgggtgcatgtcagctgtgccctatggattcctgaggtcagcatcggctgcccagagaagatggagcccatcaccaagatctcgcatatcccagccagccgctgggctctgtcctgcagcctctgcaaggaatgcacaggcacctgcatccagtgttccatgccttcctgcgtcatagcgttccatgtcacatgcgcctttgaccacggcctggaaatgcggactatattagcagacaacgatgaggtcaagttcaagtcattctgccaggagcacagtgacgggggcccacgtaatgagcccacatctgagcccacggaacccagccaggctggcgaggacctggaaaaggtgaccctgcgcaagcagcggctgcagcagctagaggaggacttctacgagctggtggagccggctgaggtggctgagcggctggacctggctgaggcactggtcgacttcatctaccagtactggaagctgaagaggaaagccaatgccaaccagccgctgctgacccccaagaccgacgaggtggacaacctggcccagcaggagcaggacgtcctctaccgccgcctgaagctcttcacccatctgcggcaggacctagagagggttagaaatctgtgctacatggtgacaaggcgcgagagaacgaaacacgccatctgcaaactccaggagcagatattccacctgcagatgaaacttattgaacaggatctgtgtcgaggcctgtccacctcattccccatcgatggcaccttcttcaacagctggctggcacagtcggtgcagatcacagcagagaacatggccatgagcgagtggccactgaacaatgggcaccgcgaggaccctgctccagggctgctgtcagaggaactgctgcaggacgaggagacactgctcagcttcatgcgggacccctcgctgcgacctggtgaccctgctaggaaggcccgaggccgcacccgcctgcctgccaagaagaaaccaccaccaccaccaccgcaggacgggcctggttcacggacgactccagacaaagcccccaagaagacctggggccaggatgcaggcagtggcaaggggggtcaagggccacctaccaggaagccaccacgtcggacatcttctcacttgccgtccagccctgcagccggggactgtcccatcctagccacccctgaaagccccccgccactggcccctgagaccccggacgaggcagcctcagtagctgctgactcagatgtccaagtgcctggccctgcagcaagccctaagcctttgggccggctccggccaccccgcgagagcaaggtaacccggagattgccgggtgccaggcctgatgctgggatgggaccaccttcagctgtggctgagaggcccaaggtcagcctgcattttgacactgagactgatggctacttctctgatggggagatgagcgactcagatgtagaggccgaggacggtggggtgcagcggggtccccgggaggcaggggcagaggaggtggtccgcatgggcgtactggcctcctaactcacccccttccctgtcccaggccctgccctggtccccccacaaggcctcagcccagtcacaactgccatttccagtctctgctgagtgtcccagaccctcgaggctgccactccgtcgtggttttatttttaatatagagagagttttgaattctacactgttgtctttcctctgtgctggcctaggacattaggattccttccacggctccggccgctaggaccctgccaggtcccgcgcaccatccctgccctgcccacgtggtattgctgggctcctggctagatgcaagcaaggtggacaagagctcaggactccagcccactgccactgggtgacacagactgtcgtttgggcattatttcatggcagatgggccagtccagggcctaccccgccttgcccccagatcccactggggtccatttggggggtcctgctacactccaccgatccccaaggaagtataataaacgatacccagccagagtctactcactgtcacaagcacaacgagtttatatgagaaagcactgagggggtgcagagggcccgctagttccaggggaactgaaagctgttcctgatcagcccgtatcatctgaggcctgcctgcccaccctgccaccctcccctcccttgctgctctgcccctgccagtgcccagcccagcggctctgggaaggggttcccagaatccctcctgagctgtgccatttactcaggggactcccaaacagccagctgccagtgcaggtggagggctgtaggggagggccagtgcccagacagggtcatggggctcagaccagcccactgtagagaatcactctgaggctccaacttccttccttccttcggggccagtctcggccgaagtctggtcacgctcagacagagctgaccagaccagaccgtttgccttttcaagtttcctagtcctgctacaagatgagcttcttccgtggtttccttttggaaactcctccttccaacaagcagtgggatcccggggcccagggcgggccggtgttggccgctggggctgttgtaagtcttgctggatgttcccctgttcctgagccttaacccctcgcacagccatcccccccccccgtcctgccatccccccccgccgtcctgccttccccaccccacccttaggtcccaggtagttgctctgaagagtttcagtagagtggccccagggtgatagctcagggaacaacaaaaaaggaattccgtgaaaacatttttttttctttgatgaattactcctgggtcacttccaccactggtaaagccagaacttctccaaaaagaaccttgcaaaaagtccagtgaatcagtcgaatcattctgtggatgccaaagaatattttgaccataatacagcacagcctggacctgacaacttgtcatttggacttttttttaaatggagttctttagcaacaaagtatagaaacatgttcattgcacacacccaaggagaagagctcaagcgcttggaagaggatgctttgctgctgctgaagtgtacctgggtgttagatttcagatcctgggctgagcccactgtgagctttcctaaactgtgagactcacagaggggaaagatactgacggtgaaaccagcatggaaaacgtctttaccatgtggttccctcctccccaaatacataaagcaaataagcaggatggggaacagcttgaccttcatccacccctaactccaaaactatcaaggtacgacagtggcattgtcatcgacactcaatttcatgtgaattttagcaaaacaggaaacaaagataatgactcagttcagaggatcggacaaatgtgtctagtccgggtggactcggagggagtggggtgggcttcaaggattctgggcgttgggatggcatgagctaccctgtagagtttagtctgcctgcccgccttggtagtagtgaccagtcagtgtcagcatcagtgtcccaaccccagtctctgtttactgcctttgaacagaacttcttccttccccatgctttgggtcacctcgggctgcaaccctgtctgtgccagattgcccggtctgaccctgcaggaagcaaagaggtgagcttaaagaacaaccaaactctgccaggggtcccagaaagcccagggtccagcagtctcagcacttggccccttgccccttcacaccatcctggggcaggggctgggcctccctggtggcaggggtgggtggagaattagggagagggtgcaacgagtctggccccttgcctcgggctggctggtgttcttccaagagcctctgctcacattgttggcctctggattctggcccttcttcattggctgttgctttggactggactgttgctgagcctgtgtcctgcagaacccagatgtctgttaggctggctggctgctgcgaggggaggggggtggcctttcatttggggtgccctttcactcccaggccaagccctggagcaatcttcttcaggcagctgtctccacctccaggatgtccagcaggctgcaaggagaaggatgccagccacccatcctcccccagttcccagcctttcccctgttggtcacagccgcttctgtctttttccggtctactgtccccagtgtagagggctttgctgtccctgagactgaggcaggttccttttccaggtcagaggtggaggtagatctttctctcaaccacatctgcctccacacacagctcctccgcagggaaggagaagctgctctgtaactcattctggctatcgtcccccttctcactgacctgaccgcccaccacctccttccccctcatcacatgacaaaggataatgtgcaagaaaagtatttttatgtatcataaatgtattttgaaacaaatgagaagaagaaaggtagaagggtttattttattaaatgagcctgacttagtgacagtgtgtgagcatttgcaatgtaagggcctcagcttccttggagaagccaccccaggtttccagacatagatgttgaattgtttgtggggggtgtgccaggccacgtctcgtgtgtccgtatgcaggcatgcctgtgtatactgtgtatgggcacactgtgggactagctgggacaattcctagagattcaactgcccaattctaaccaacattggcagcggctgaacttggcatttccttgctaactgccagatgtggccaacctttgtccatatgcaaaccactgaaaaatgatctggatttctatagcaaggcccttggggagggcactctcccatgcccttggcctcgctggccacattggccaatgagccagggctggagtctgagacctttggttgttctttaaggcacctcctgccactttctccctcagaggcacaaacactttgtgttccacgtcagtttgaggggacggtggggggatgatatgaatgtcacaggaggagacaccttctgtctttgtttcaaagaaagtgatgtgccatttgttaatatacaagagaaatattgaaaatatattgaaaagagcaattttaaattatttttggcttatgttgcaatatttattttcttgtattagaaaagattcctttgtagagaaaaaatgtatttttcattaacgcaaagacctatttctcctttttgtacattgtccatgtgcgcaacccttaacgagcaatagaatgtatggtcacctgggtgtggccagtgcccgctgtgccctgcatgattctgtgttgccgctgctgcatagttcccagccccatcctgtcctgctcactcatgggggcttccagaccccggccccaccagggcttgtgtcatagggagccctttgcactcctcgtgtgttggcaaacgcagttaataaagcaatgttttctgtgc

SEQ ID NO: 2651 - DNA, 681 bp, Homo sapien
gaagacattgtggctgaccatgttgcctcttacggtgtaaacttgtaccagtcttatggtccctctgggcagtacagccatgaatttgatggagacgaggagttctatgtggacctggagaggaaggagactgtctggcagttgcctctgttccgcagatttagaagatttgacccgcaatttgcactgacaaacatcgctgtgctaaaacataacttgaacatcgtgattaaacgctccaactctaccgctgctaccaatgaggttcctgaggtcacagtgttttccaagtctcccgtgacactgggtcagcccaacaccctcatctgtcttgtggacaacatctttcctcctgtggtcaacatcacctggctgagcaatgggcactcagtcacagaaggtgtttctgagaccagcttcctctccaagagtgatcattccttcttcaagatcagttacctcaccttcctcccttctgatgatgagatttatgactgcaaggtggagcactggggcctggatgagcctcttctgaaacactgggagcctgagattccaacacctatgtcagagctcacagagactgtggtctgcgccctggggttgtctgtgggcctcgtgggcattgtggtggggaccgtcttgatcatccgaggcctgcgttcagttggtgcttccaga

SEQ ID NO: 2652 - DNA, 13708 bp, Homo sapien
  Unsure 10096-10440, 11382-11718, 12631-12691: Unknown base
ctaacggagaaaagaagccgtggccgcgggaggaggcgagaggagtcgggatctgcgctgcagccaccgccgcggttgatactactttgaccttccgagtgcagtggtaggggcgcggaggcaacgcagcggcttctgcgctgggaaattcagtcgtgtgcgacccagtctgtcctctccccagaccgccaatctcatgcacccctccagagtggcccttgactcctccctctcctcactccatctttcctggcctctctccgggtgcttagcggacttggccaataacctcctccttttaaacgccctgaattgaaccctgcctcctgcgcatcctctttttgtgtcaccttagggttcagatttaactacgcgacttgactagtcatcttttgatctctctctcgtatttagtacttttagtcagcgagcatttattgatatttcaacttcagcctcgcggttaagagcttgggctctggaatcatacggctggaattggaattctgtcagtcgtgtggccgctctctactgtcttgtgaagataagtgagataatcttgacctgtggtgagcactcgtgagcgttagctgctgtatttaccagaggcatacatcacaatttggaattatgcattggtttatcaatttacttgtttattgtcaccctgctgcccagatatgacttcatgagggacagtgatgtgtgttctgaaattgtgaaccatgagtctagtacttaatgatctgcttatctgctgccgtcaactagaacatgatagagctacagaacgaaagaaagaagttgagaaatttaagcgcctgattcgagatcctgaaacaattaaacatctagatcggcattcagattccaaacaaggaaaatatttgaattgggatgctgtttttagatttttacagaaatatattcagaaagaaacagaatgtctgagaatagcaaaaccaaatgtatcagcctcaacacaagcctccaggcagaaaaagatgcaggaaatcagtagtttggtcaaatacttcatcaaatgtgcaaacagaagagcacctaggctaaaatgtcaagaactcttaaattatatcatggatacagtgaaagattcatctaatggtgctatttacggagctgattgtagcaacatactactcaaagacattctttctgtgagaaaatactggtgtgaaatatctcagcaacagtggttagaattgttctctgtgtacttcaggctctatctgaaaccttcacaagatgttcatagagttttagtggctagaataattcatgctgttaccaaaggatgctgttctcagactgacggattaaattccaaatttttggactttttttccaaggctattcagtgtgcgagacaagaaaagagctcttcaggtctaaatcatatcttagcagctcttactatcttcctcaagactttggctgtcaactttcgaattcgagtgtgtgaattaggagatgaaattcttcccactttgctttatatttggactcaacataggcttaatgattctttaaaagaagtcattattgaattatttcaactgcaaatttatatccatcatccgaaaggagccaaaacccaagaaaaaggtgcttatgaatcaacaaaatggagaagtattttatacaacttatatgatctgctagtgaatgagataagtcatataggaagtagaggaaagtattcttcaggatttcgtaatattgccgtcaaagaaaatttgattgaattgatggcagatatctgtcaccaggtttttaatgaagataccagatccttggagatttctcaatcttacactactacacaaagagaatctagtgattacagtgtcccttgcaaaaggaagaaaatagaactaggctgggaagtaataaaagatcaccttcagaagtcacagaatgattttgatcttgtgccttggctacagattgcaacccaattaatatcaaagtatcctgcaagtttacctaactgtgagctgtctccattactgatgatactatctcagcttctaccccaacagcgacatggggaacgtacaccatatgtgttacgatgccttacggaagttgcattgtgtcaagacaagaggtcaaacctagaaagctcacaaaagtcagatttattaaaactctggaataaaatttggtgtattacctttcgtggtataagttctgagcaaatacaagctgaaaactttggcttacttggagccataattcagggtagtttagttgaggttgacagagaattctggaagttatttactgggtcagcctgcagaccttcatgtcctgcagtatgctgtttgactttggcactgaccaccagtatagttccaggagcggtaaaaatgggaatagagcaaaatatgtgtgaagtaaatagaagcttttctttaaaggaatcaataatgaaatggctcttattctatcagttagagggtgacttagaaaatagcacagaagtgcctccaattcttcacagtaattttcctcatcttgtactggagaaaattcttgtgagtctcactatgaaaaactgtaaagctgcaatgaattttttccaaagcgtgccagaatgtgaacaccaccaaaaagataaagaagaactttcattctcagaagtagaagaactatttcttcagacaacttttgacaagatggactttttaaccattgtgagagaatgtggtatagaaaagcaccagtccagtattggcttctctgtccaccagaatctcaaggaatcactggatcgctgtcttctgggattatcagaacagcttctgaataattactcatctgagattacaaattcagaaactcttgtccggtgttcacgtcttttggtgggtgtccttggctgctactgttacatgggtgtaatagctgaagaggaagcatataagtcagaattattccagaaagccaactctctaatgcaatgtgcaggagaaagtatcactctgtttaaaaataagacaaatgaggaattcagaattggttccttgagaaatatgatgcagctatgtacacgttgcttgagcaactgtaccaagaagagtccaaataagattgcatctggctttttcctgcgattgttaacatcaaagctaatgaatgacattgcagatatttgtaaaagtttagcatccttcatcaaaaagccatttgaccgtggagaagtagaatcaatggaagatgatactaatggaaatctaatggaggtggaggatcagtcatccatgaatctatttaacgattaccctgatagtagtgttagtgatgcaaacgaacctggagagagccaaagtaccataggtgccattaatcctttagctgaagaatatctgtcaaagcaagatctacttttcttagacatgctcaagttcttgtgtttgtgtgtaactactgctcagaccaatactgtgtcctttagggcagctgatattcggaggaaattgttaatgttaattgattctagcacgctagaacctaccaaatccctccacctgcatatgtatctaatgcttttaaaggagcttcctggagaagagtaccccttgccaatggaagatgttcttgaacttctgaaaccactatccaatgtgtgttctttgtatcgtcgtgaccaagatgtttgtaaaactattttaaaccatgtccttcatgtagtgaaaaacctaggtcaaagcaatatggactctgagaacacaagggatgctcaaggacagtttcttacagtaattggagcattttggcatctaacaaaggagaggaaatatatattctctgtaagaatggccctagtaaattgccttaaaactttgcttgaggctgatccttattcaaaatgggccattcttaatgtaatgggaaaagactttcctgtaaatgaagtatttacacaatttcttgctgacaatcatcaccaagttcgcatgttggctgcagagtcaatcaatagattgttccaggacacgaagggagattcttccaggttactgaaagcacttcctttgaagcttcagcaaacagcttttgaaaatgcatacttgaaagctcaggaaggaatgagagaaatgtcccatagtgctgagaaccctgaaactttggatgaaatttataatagaaaatctgttttactgacgttgatagctgtggttttatcctgtagccctatctgcgaaaaacaggctttgtttgccctgtgtaaatctgtgaaagagaatggattagaacctcaccttgtgaaaaaggttttagagaaagtttctgaaacttttggatatagacgtttagaagactttatggcatctcatttagattatctggttttggaatggctaaatcttcaagatactgaatacaacttatcttcttttccttttattttattaaactacacaaatattgaggatttctatagatcttgttataaggttttgattccacatctggtgattagaagtcattttgatgaggtgaagtccattgctaatcagattcaagaggactggaaaagtcttctaacagactgctttccaaagattcttgtaaatattcttccttattttgcctatgagggtaccagagacagtgggatggcacagcaaagagagactgctaccaaggtctatgatatgcttaaaagtgaaaacttattgggaaaacagattgatcacttattcattagtaatttaccagagattgtggtggagttattgatgacgttacatgagccagcaaattctagtgccagtcagagcactgacctctgtgacttttcaggggatttggatcctgctcctaatccacctcattttccatcgcatgtgattaaagcaacatttgcctatatcagcaattgtcataaaaccaagttaaaaagcattttagaaattctttccaaaagccctgattcctatcagaaaattcttcttgccatatgtgagcaagcagctgaaacaaataatgtttataagaagcacagaattcttaaaatatatcacctgtttgttagtttattactgaaagatataaaaagtggcttaggaggagcttgggcctttgttcttcgagacgttatttatactttgattcactatatcaaccaaaggccttcttgtatcatggatgtgtcattacgtagcttctccctttgttgtgacttattaagtcaggtttgccagacagccgtgacttactgtaaggatgctctagaaaaccatcttcatgttattgttggtacacttataccccttgtgtatgagcaggtggaggttcagaaacaggtattggacttgttgaaatacttagtgatagataacaaggataatgaaaacctctatatcacgattaagcttttagatccttttcctgaccatgttgtttttaaggatttgcgtattactcagcaaaaaatcaaatacagtagaggacccttttcactcttggaggaaattaaccattttctctcagtaagtgtttatgatgcacttccattgacaagacttgaaggactaaaggatcttcgaagacaactggaactacataaagatcagatggtggacattatgagagcttctcaggataatccgcaagatgggattatggtgaaactagttgtcaatttgttgcagttatccaagatggcaataaaccacactggtgaaaaagaagttctagaggctgttggaagctgcttgggagaagtgggtcctatagatttctctaccatagctatacaacatagtaaagatgcatcttataccaaggcccttaagttatttgaagataaagaacttcagtggaccttcataatgctgacctacctgaataacacactggtagaagattgtgtcaaagttcgatcagcagctgttacctgtttgaaaaacattttagccacaaagactggacatagtttctgggagatttataagatgacaacagatccaatgctggcctatctacagccttttagaacatcaagaaaaaagtttttagaagtacccagatttgacaaagaaaacccttttgaaggcctggatgatataaatctgtggattcctctaagtgaaaatcatgacatttggataaagacactgacttgtgcttttttggacagtggaggcacaaaatgtgaaattcttcaattattaaagccaatgtgtgaagtgaaaactgacttttgtcagactgtacttccatacttgattcatgatattttactccaagatacaaatgaatcatggagaaatctgctttctacacatgttcagggatttttcaccagctgtcttcgacacttctcgcaaacgagccgatccacaacccctgcaaacttggattcagagtcagagcactttttccgatgctgtttggataaaaaatcacaaagaacaatgcttgctgttgtggactacatgagaagacaaaagagaccttcttcaggaacaatttttaatgatgctttctggctggatttaaattatctagaagttgccaaggtagctcagtcttgtgctgctcactttacagctttactctatgcagaaatctatgcagataagaaaagtatggatgatcaagagaaaagaagtcttgcatttgaagaaggaagccagagtacaactatttctagcttgagtgaaaaaagtaaagaagaaactggaataagtttacaggatcttctcttagaaatctacagaagtataggggagccagatagtttgtatggctgtggtggagggaagatgttacaacccattactagactacgaacatatgaacacgaagcaatgtggggcaaagccctagtaacatatgacctcgaaacagcaatcccctcatcaacacgccaggcaggaatcattcaggccttgcagaatttgggactctgccatattctttccgtctatttaaaaggattggattatgaaaataaagactggtgtcctgaactagaagaacttcattaccaagcagcatggaggaatatgcagtgggaccattgcacttccgtcagcaaagaagtagaaggaaccagttaccatgaatcattgtacaatgctctacaatctctaagagacagagaattctctacattttatgaaagtctcaaatatgccagagtaaaagaagtggaagagatgtgtaagcgcagccttgagtctgtgtattcgctctatcccacacttagcaggttgcaggccattggagagctggaaagcattggggagcttttctcaagatcagtcacacatagacaactctctgaagtatatattaagtggcagaaacactcccagcttctcaaggacagtgattttagttttcaggagcctatcatggctctacgcacagtcattttggagatcctgatggaaaaggaaatggacaactcacaaagagaatgtattaaggacattctcaccaaacaccttgtagaactctctatactggccagaactttcaagaacactcagctccctgaaagggcaatatttcaaattaaacagtacaattcagttagctgtggagtctctgagtggcagctggaagaagcacaagtattctgggcaaaaaaggagcagagtcttgccctgagtattctcaagcaaatgatcaagaagttggatgccagctgtgcagcgaacaatcccagcctaaaacttacatacacagaatgtctgagggtttgtggcaactggttagcagaaacgtgcttagaaaatcctgcggtcatcatgcagacctatctagaaaaggcagtagaagttgctggaaattatgatggagaaagtagtgatgagctaagaaatggaaaaatgaaggcatttctctcattagcccggttttcagatactcaataccaaagaattgaaaactacatgaaatcatcggaatttgaaaacaagcaagctctcctgaaaagagccaaagaggaagtaggtctccttagggaacataaaattcagacaaacagatacacagtaaaggttcagcgagagctggagttggatgaattagccctgcgtgcactgaaagaggatcgtaaacgcttcttatgtaaagcagttgaaaattatatcaactgcttattaagtggagaagaacatgatatgtgggtattccgactttgttccctctggcttgaaaattctggagtttctgaagtcaatggcatgatgaagagagacggaatgaagattccaacatataaatttttgcctcttatgtaccaattggctgctagaatggggaccaagatgatgggaggcctaggatttcatgaagtcctcaataatctaatctctagaatttcaatggatcacccccatcacactttgtttattatactggccttagcaaatgcaaacagagatgaatttctgactaaaccagaggtagccagaagaagcagaataactaaaaatgtgcctaaacaaagctctcagcttgatgaggatcgaacagaggctgcaaatagaataatatgtactatcagaagtaggagacctcagatggtcagaagtgttgaggcactttgtgatgcttatattatattagcaaacttagatgccactcagtggaagactcagagaaaaggcataaatattccagcagaccagccaattactaaacttaagaatttagaagatgttgttgtccctactatggaaattaaggtggaccacacaggagaatatggaaatctggtgactatacagtcatttaaagcagaatttcgcttagcaggaggtgtaaatttaccaaaaataatagattgtgtaggttccgatggcaaggagaggagacagcttgttaagggccgtgatgacctgagacaagatgctgtcatgcaacaggtcttccagatgtgtaatacattactgcagagaaacacggaaactaggaagaggaaattaactatctgtacttataaggtggttcccctctctcagcgaagtggtgttcttgaatggtgcacaggaactgtccccattggtgaatttcttgttaacaatgaagatggtgctcataaaagatacaggccaaatgatttcagtgcctttcagtgccaaaagaaaatgatggaggtgcaaaaaaagtcttttgaagagaaatatgaagtcttcatggatgtttgccaaaattttcaaccagttttccgttacttctgcatggaaaaattcttggatccagctatttggtttgagaagcgattggcttatacgcgcagtgtagctacttcttctattgttggttacatacttggacttggtgatagacatgtacagaatatcttgataaatgagcagtcagcagaacttgtacatatagatctaggtgttgcttttgaacagggcaaaatccttcctactcctgagacagttccttttagactcaccagagatattgtggatggcatgggcattacgggtgttgaaggtgtcttcagaagatgctgtgagaaaaccatggaagtgatgagaaactctcaggaaactctgttaaccattgtagaggtccttctatatgatccactctttgactggaccatgaatcctttgaaagctttgtatttacagcagaggccggaagatgaaactgagcttcaccctactctgaatgcagatgaccaagaatgcaaacgaaatctcagtgatattgaccagagtttcaacaaagtagctgaacgtgtcttaatgagactacaagagaaactgaaaggagtggaagaaggcactgtgctcagtgttggtggacaagtgaatttgctcatacagcaggccatagaccccaaaaatctcagccgacttttcccaggatggaaagcttgggtgtgatcttcagtatatgaattaccctttcattcagcctttagaaattatattttagcctttatttttaacctgccaacatactttaagtagggattaatatttaagtgaactattgtgggtttttttgaatgttggttttaatacttgatttaatcaccactcaaaaatgtttgatgggcctaagggacatctctgctttcacnnnnnnnnnnnnnnnnnnnnnnnnnnnnnnnnnnnnnnnnnnnnnnnnnnnnnnnnnnnnnnnnnnnnnnnnnnnnnnnnnnnnnnnnnnnnnnnnnnnnnnnnnnnnnnnnnnnnnnnnnnnnnnnnnnnnnnnnnnnnnnnnnnnnnnnnnnnnnnnnnnnnnnnnnnnnnnnnnnnnnnnnnnnnnnnnnnnnnnnnnnnnnnnnnnnnnnnnnnnnnnnnnnnnnnnnnnnnnnnnnnnnnnnnnnnnnnnnnnnnnnnnnnnnnnnnnnnnnnnnnnnnnnnnnnnnnnnnnnnnnnnnnnnnnnnnnnnnnnnnnnnnnnnnnnnnnnnnnnnnnnnnncttatttggatttttcctagtaagatcactcagtgttactaaataatgaagttgttatggagaacaaatttcaaagacacagttagtgtagttactatttttttaagtgtgtattaaaacttctcattctattctctttatcttttaagcccttctgtactgtccatgtatgttatctttctgtgataacttcatagattgccttctagttcatgaattctcttgtcagatgtatataatctcttttaccctatccattgggcttcttctttcagaaattgtttttcatttctaattatgcatcatttttcagatctctgtttcttgatgtcatttttaatgtttttttaatgttttttatgtcactaattattttaaatgtctgtacctgatagacactgtaatagttctattaaatttagttcctgctgtttatatctgttgatttttgtatttgataggctgttcatccagttttgtctttttgaaaagtgagtttattttcagcaaggctttatctatgggaatcttgagtgtctgtttatgtcatattcccagggctgttgctgcacacaagcccattcttattttaatttcttggctttagggtttccatacctgaagtgtagcataaatactgataggagatttcccaggccaaggcaaacacacttcctcctcatctccttgtgctagtgggcagaatatttgattgatgcctttttcactgagagtataagcttccatgtgtcccacctttatggcaggggtggaaggaggtacatttaattcccactgcctgcctttggcaagccctgggttctttgctccccatatagatgtctaagctaaaagccgtgggttaatgagactggcaaattgttccaggacagctacagcatcagctcacatattcacctctctggtttttcattcccctcnnnnnnnnnnnnnnnnnnnnnnnnnnnnnnnnnnnnnnnnnnnnnnnnnnnnnnnnnnnnnnnnnnnnnnnnnnnnnnnnnnnnnnnnnnnnnnnnnnnnnnnnnnnnnnnnnnnnnnnnnnnnnnnnnnnnnnnnnnnnnnnnnnnnnnnnnnnnnnnnnnnnnnnnnnnnnnnnnnnnnnnnnnnnnnnnnnnnnnnnnnnnnnnnnnnnnnnnnnnnnnnnnnnnnnnnnnnnnnnnnnnnnnnnnnnnnnnnnnnnnnnnnnnnnnnnnnnnnnnnnnnnnnnnnnnnnnnnnnnnnnnnnnnnnnnnnnnnnnnnnnnnnnnnnnnnnnnnnttctgctatgtatttaaaagaatgttttctacattttatccagcatttctctgtgttctgttggaagggaagggcttaggtatctagtttgatacataggtagaagtggaacatttctctgtcccccagctgtcatcatataagataaacatcagataaaaagccacctgaaagtaaaactactgactcgtgtattagtgagtataatctcttctccatccttaggaaaatgttcatcccagctgcggagattaacaaatgggtgattgagctttctcctcgtatttggaccttgaaggttatataaatttttttcttatgaagagttggcatttctttttattgccaatggcaggcactcattcatatttgatctcctcaccttcccctcccctaaaaccaatctccagaactttttggactataaatttcttggtttgacttctggagaactgttcagaatattactttgcatttcaaattacaaacttaccttggtgtatctttttcttacaagctgcctaaatgaatatttggtatatattggtagttttattactatagtaaatcaaggaaatgcagtaaacttaaaatgtctttaagaaagccctgaaatcttcatgggtgaaattagaaattatcaactagataatagtatagataaatgaatttgtagctaattcttgctagttgttgcatccagagagctttgaataacatcattaatctactctttagccttgcatggtatgctatgaggctcctgttctgttcaagtattctaatcaatggctttgaaaagtttatcaaatttacatacagatcacaagcctaggagaaataactaattcacagatgacagaattaagattataaaagattttttttttgtaattttagtagagacagggtnnnnnnnnnnnnnnnnnnnnnnnnnnnnnnnnnnnnnnnnnnnnnnnnnnnnnnnnnnnnnggttttggcaagctggaactctttctgcaaatgactaagatagaaaactgccaaggacaaatgaggagtagttagattttgaaaatattaatcatagaatagttgttgtatgctaagtcactgacccatattatgtacagcatttctgatctttactttgcaagattagtgatactatcccaatacactgctggagaaatcagaatttggagaaataagttgtccaaggcaagaagatagtaaattataagtacaagtgtaatatggacagtatctaacttgaaaagatttcaggcgaaaagaatctggggtttgccagtcagttgctcaaaaggtcaatgaaaaccaaatagtgaagctatcagagaagctaataaattatagactgcttgaacagttgtgtccagattaagggagataatagctttcccaccctactttgtgcaggtcatacctccccaaagtgtttacctaatcagtaggttcacaaactcttggtcattatagtatatgcctaaaatgtatgcacttaggaatgctaaaaatttaaatatggtctaaagcaaataaaagcaaagaggaaaaactttggacatcgtaaagactagaatagtcttttaaaaagaaagccagtatattggtttgaaatatagagatgtgtcccaatttcaagtattttaattgcaccttaatgaaattatctattttctatagattttagtactattgaatgtattactttactgttacctgaatttattataaagtgtttttgaataaataattctaaaagcatatactaagactcattcactttattcaaatatttgtgtgttctgtgtgccaggcatgggactcgttctaaggagaaagcagtgagcaaggcaggcatagtctgcctatataaagctcccaatctgaggaggataggcaactgaccacgcagtgtgaaccggggagcctattgcacaaccagtctgataatgctgcatctcagtctaaatatcctagtagtgt

SEQ ID NO: 2653 - protein, 3056 aa, Homo sapien; identical to SEQ ID NO: 2302
  Unsure 10096-10440, 11382-11718, 12631-12691: Unknown amino acid

SEQ ID NO: 2654 - DNA, 1069 bp, Homo sapien
gaaaaccagagcctatatggagttccctcttctaacccaactgacttgtatctgtccgtggaaaatttcagtccagaagaattgaccttgaccattaataaagacactggcagagagatcttcccataataaagcaatctgattcagcatcactaaaccgataatgcatgaagcaacgataaaattacaaaagagcagcatttttaattttcacaaaatgtctcagttttcagctatacctgcacgttcataaccaacaatataaaccgtggtctcatgtaacacataaacaattcatgcctttcatagtttattattattaaagtctaaacaaaattgcaatttcttaggtaaccttatatttacaataaatgaagattaccctcaaatgctagaagctgtctaggtccgtccggtgtgtcagattttcctcagattagatgtgccaataaccaagtttattcagtaaacaacttgtacttgtttcatctggttttattactctcacccataaacaggaatgactctttgaccctctggaaatatgtaatgcttccaatcttgctttgtgtatctcatttaatttgttataaggtagtactgattttagcatattaatgcgatttcttccttgttgtttgctttggtctgtgttcaatccagagagcttaaattgtcattattttgggaagaaaacctgtatttttgttagtttacaatattatgaaatttcacttcaggagaaactgctgggcttcctgtggctttgttttcttagttactttttccgtgccgtgtattttttaattgatttttcttcttttacttgaaaagaaagtgttttattttcaaatctggtccatatttacattctagttcagagccaagccttaaactgtacagaatttccactgtaattaaaactatttagtgttagttataaatagccttcaaaaagagagattctccattcacgatcacctgcatcacagcccatggtgaatgtatgtttctgcatagcgaaataaaaatggcaaatgcaaaaaaaaaaaaaaaaaaaaaaaaaaaa

SEQ ID NO: 2655 - DNA, 6949 bp, Homo sapien
aaacaagaagaatgggattgatatttccgcagaagtttggaagttatgtaacagagcaggttgagatcctaccttttaggagcagcctgccccttttgaaggggtaaagggagtgggtgcagtgccctctcttctgttgtagtggcttatccctctaaggcatgacccttggataggggttacctgcctcggaaagtccccacttccttgtgggagtttaaaatagattggcatatgtgagagatggagacaaggtgggaaatcggatcctgtcttaggatttctcatcaggagatgctgatacttggtgtttcagcttgataaattgagaaggtgccatgaaaccaggtcctggaacagaatccctggttgctctgtcttttagctgctctgaccctctgccctgcagagcatgcattttgcatgtgcctggcaggaggccctcctgcttgagccctgctgtatttgtctgtgttgacaacgtgactgccagccattaagcttggtcagtccacagacacactaggaaagcagaggcagctcttggtttctctggaacagagctgcaagaagtctctgggcatctgcatggccaggagcttatgcttaactgttgagtgacctgcagccataagggcattaattctgccttccagaggtgggaatgacttggctttaaacagtgatttgtgtgagaattcttcaaatcccataaggtagaaggcatggtggagtggaggagaaatcttggctcatatctgcctcttccattgaccagctgtgtgaccttgggcctgttacttttaacctacctgaccctccatttcctcatttatcagaagtgtctaactgtacacaagttaaactgtaaggattacatgaggtagtagtcaatcctggtgtttctctgtatcttctcacttctcactggtgttggaaatatgatcttgcgaccctagatggcagccactctggggcagaagagacagtgaccaccttttgaagagctcaaaggagaatattgccccacagggcttagtgggtcccccaggctgaggctggggaggagggccacctttgcctacagcaagtggcatatcattgttctaggggttctcttgacggcagaactttgcctctagctcattttccacagcctagattttccaatcttgccaatccagttgacttctgtcttctcatttccaagccattgttctctctctttcactatctacatggattatccttcattcaaactgctttgtcccggccgggtgcggtggctcatgcctgtagtcctagcactttgggaggccgaggcgggtggatcacgaggtcaggagatcgagaccatcctggctaacatggtgaaaccccgtctctactaaaattaaaaaaattagccgggcgtggtggcaggcgcctgtggtcccggctacttgggaggctgaggcgggagaatggcatgaacccgggaggtggagcttgcagtgggtggagatcgcgccactgcactccagcctgggcgacagagcgagactccgtctgaaaaaaaaaacaaaaaaactgctttgtcctgtaggaatcctgtgcgggttatgtgcacctccctcaatccttaccttgaagctgaggtttcccctcagctctcaagtactcagtttgcactgcaggtagtccctattttaacgaaagttatacggtccagctcagggaatcctgaaaagctgcccttgcttccatggtaatcaaaaggcagttctcatggaataaaagctacctgaagcctgagttgggacctttggctggggaaggtggttgaggacgttctctgattagatgcttggcatgaggtttgctactggaactgctagtgtagaatgtttcagccccctagagttgtccctgtgatgtggctacctcctttctctgggatttctcttaaagtctggggagcccctgcttctcatttcctggaatttatcttcccagtctccctttctggctgaaaatttctagtatcttacagaacagcggtgggatacactggagcacatcatattaccactaagtatgtctaataaatgatgtcctctgatttgacatttcctaaatgtgaagctcctgattttatacaattttgaaattagtaagcttgttagttttgtttgaaattctaggcattggatacacttaacatgagggctacatgtgcatcaacatactctggtttccttccctctgtatcttttttttttttgagatggagtctcactgtctcctaggctggagtgcagtggtgtgatcatggctcactgcagccccaaccttcagggctcaggtgatcctcccgcctcagccacccaagtggctgggaccgcaggtgcatgccaccatgcctggctaacttatttttatatattgtagagacggagtctccctatgttgcctaggctgaccttgagctcttgggctcaggtgatcctcccgccttggcctcccaaagtgttgggattataggcgtgagccactgtgtccagccttttcctctgtatcttgtatccattccccagagcgatactgtgtatccttgaacagacggtttcttgaagtcagagtctatctcctctgtcacttctcccccttcattatctaagactgaggttgtggtttatatgcttagagttgaaagcatggggtccaacgtgttctgtactctgtagttccccagactctccagggaaactacttagctctcaggtggttcttttctgtttttctcagagcaagttatctaataactgaagaggactctgccctttggcctgttcctgactttctaactccttttgctggaggaaggggaggttgaggggggtgccctgtggtgtgaaagccccacttgccctctcctctatactttcttccaatgcagacgggagaaagtatcataaatgtagtgactgtgggtcaggggagctctgagaggccagcacaggaaaccagaaacaaaatgagtcagttcgtaggtggcgatcagaggcaccctgctgagggtgcaaggccacaggtgatgcctcctcagtaggcccaggagcatcaaaacgggaacagtccctttcagccttcaggagcctcccaaatgtcacttagtgatgtcccattcacctgcttaaaggccctgcatcctgccaggtagttggtttgtccatagcatcctgagctctgcttgggtgagccagacaaaaagaatgattcctggccagagtagtgataccagggcccagacagaggcagagagtccggatagaagatcctgtaagctggggtagggagccgaggaggccatggagccaggggaatcattgaagtgagggacaatttctggaggagggaaactgagtaaggaaggcctggccaaggaccaagaaggggacagtatcctgatctatgaaagaagactcaagtggggattgacagagccagattgggtggagtccaagctttgggcaggtgagtgtccaggagatgagggctgagaatgggccttcagagcccagccagaaggggaaagcacaaagctccaccctccttcttcacatccctccatgctgctcaaatcccaggtcttcaggcaccatggaggacaaacgcaacatccagatcatcgagtgggaacacctggacaagaagaagttctacgtgtttggtgtggcaatgacaatgatgatccgtgtcagtgtctacccattcaccctcatccgcacccggttgcaagttcagaaggggaagagcctctaccatgggaccttcgatgccttcatcaagatcctgcgagcagatggtatcactggcctctaccgagggttcctggtcaataccttcaccctcatctctggccagtgttatgtcaccacttatgagctcacccggaagtttgtagctgactacagccagagtaacacagtcaaatcactggtggctggtggctcagcctcccttgtggcccagagcatcacagtgcccattgatgtagtctcccagcacctgatgatgcaacgcaagggtgagaaaatgggccgctttcaggtgcgggggaacccagagggacaaggggtagttgcctttggccaaaccaaggacatcatcaggcagatcctgcaggctgatggacttcgcggcttctatcgaggctatgtggcttcactgcttacctatatcccaaacagtgctgtctggtggcccttctatcacttctatgcagagcagctctcctacctgtgtcctaaggagtgccctcacattgtctttcaagctgtctcggggcccctggctgcagccactgcctccatcctcaccaatcccatggatgtcatacgaacccgtgtgcaggttgagggcaagaactccatcatcctgaccttcagacagctgatggcagaagaagggccttggggcctcatgaagggcctctcggccagaatcatctcagccacaccttccaccattgtcattgtggtgggctatgagagcctcaagaaactcagcctccgacctgagctggtggactcgagacactggtaaccagtggtggggagagaagcctgctgttttccacactaccgtgggtcaggggcagagtggagaggacagcaccctctccaggtgctcccaccacacacccagccctgccctgggccaagtggcctatctgggatagggatagagactttgaactgctcttgctgaagaggctccacgcctggatcccttgcccccactatttaaaattctcttctgagccgggctccctcactcagtccctgtatttgatactggcctaaagaccccaccccccaccctgccagcccttcttctggcttccccttccatctgtgtccctgagaccctgagaagagctgtacatagagcttgcttactaccactggttcttcctcttgggctttcagcccagactccaagcagctgctatcaaccctctctcccttcatctcttagccttgcttatttttattttgggaccgagctgcccactagatgactctgcttttccctgcatttggggctaaggtgccaggtacttatttgcacagggagcaggagcagcaaaaaatctctggttctccagagcactcgtcctctctttggaggggttattaggttgggagaaatgttgatacttttgttttgtgtgtgtgtgtgtgtgtgtgtgtgtgtgtgtgtgtgtgtgtgttttaacatctgtgaaccaggctattagtcctgctaaagcgccaatcctgctgtcagagctcacccccttcctaagacaggtagaaaaatgtaatgtagctttttccacaagccagttccctgtcccttcagtctcaggagccctaggagagtctaagctggggcatcccctggcccagaggactcccgtggtgggcacagttctaagtggatcaggctgtcttgggtgcactggacttggagcactaccttgagaagtcaggttgagaaagtagttgatctagaaggcaacaagtgggcatgtgttccccagcacattacccaggccagcagagccaaacctaggagagggcagtgggtagattctctgccccaggcagccatgacatacacataaataccccaatcactcagacttacggcaacaagtgttgtctcactatggtgatctctaagatccacatcactggatgcgtagtcatcccagtcatggtaccctgtggaggaatgctggaagaacataaagagcagttcagaaagtcacccaataccaggaccactgcatttaccagcctgatactgccaagattatctgatgctctcctcaggagctaggagaggagtgctccttcctccctaccgctactctccccaagcctgtgttgcaggtagagaggtgcagcaaatagagaaggcatgtcaaaccctgcatttctacctgagagtgtgacctggatgatcctccaaaccctattggtcccaccccctgggaaaggccatggtgccagtttgaaaggtgctagctacctgaagccttgatatttcttcatggctgccgcacattcttccaccttggccagaacaggttctgaaaaccgcttctctaccttcaccaccaccactgcccatcttgatctctttgagggttttcccatttcacttgatcttatttttgtttatcccttcctgcactttgtcaagagagtcctccagtttctatccaggaatgttcacatccaaagggttggacccacggatcattctgaatcttcctgcccctcctcactgcttaaccctgagaaccacaaatataatggaagcagttccccccaccctcaccccatctctttaagctcatcctagcaagacctctagagaccctagagactcgactttagccttccccgccatggcacagtggggaaggtgtcaatggggagtgtcacggacaggaggtaggatcctgccgctcgcgtcttagtgtttctccctcaagactttccttctgttttgttgtcttgtgcagtattttacagcccctcttgtgtttttctttatttctcgtacacacacgcagttttaagggtgatgtgtgtataattaaaaggacccttggcccatactttcctaattctttagggactgggattgggtttgactgaaatatgttttggtggggatgggacggtggacttccattctccctaaactggagttttggtcggtaatcaaaactaaaagaaacctctgggagactggaaacctgattggagcactgaggaacaagggaatgaaaaggcagactctctgaacgtttgatgaaatggactcttgtgaaaattaacagtgaatattcactgttgcactgtacgaagtctctgaaatgtaattaaaagtttttattgagcccccg

SEQ ID NO: 2656 - protein, 368 aa, Homo sapien
QSQIGWSPSFGQVSVQEMRAENGPSEPSQKGKAQSSTLLLHIPPCCSNPRSSGTMEDKRNIQIIEWEHLDKKKFYVFGVAMTMMIRVSVYPFTLIRTRLQVQKGKSLYHGTFDAFIKILRADGITGLYRGFLVNTFTLISGQCYVTTYELTRKFVADYSQSNTVKSLVAGGSASLVAQSITVPIDVVSQHLMMQRKGEKMGRFQVRGNPEGQGVVAFGQTKDIIRQILQADGLRGFYRGYVASLLTYIPNSAVWWPFYHFYAEQLSYLCPKECPHIVFQAVSGPLAAATASILTNPMDVIRTRVQVEGKNSIILTFRQLMAEEGPWGLMKGLSARIISATPSTIVIVVGYESLKKLSLRPELVDSRHW

SEQ ID NO: 2657 - DNA, 1165 bp, Homo sapien
gttctcatacaagatttattccccagcacacccctcccctcctcagttcacagtggagactatggagattcagggcaggatccctcaggtacaagaaacaccttccgaagattttgctctccttccttccctccctcttgccaactcccaaggcctgaagcgcacactcatgcaaacacacgaaatccccctccttccccacacctcctgtctttccacatcagagctctgaacttgagaggtgtcaaaagtctgtttgagaagcctaaagtggggagatgccattacccctgaccaccccactatgagtgactatgagacacctaactcttccctcttctgtcaaccattttcactccctggcctctgtaccttctccatcaaccaagagcaaacatgtcagcacacccccacctgcagtacatgaaaacaggctctgtccaacatccctcacccaagtacaggggtgttgggggagtggcccctgaggatcagcaaagggttaatgcagaaggaaagaggacagaagcgtttggcttgagctctgcttggggaggcagaggctatagactggcacaggtttagaatcaagtaccatgtttaggtttctgtctcacatcacatgatttcactaggggctgcagaacagatacccctcagaggggtctctgctgattacagccacattcttactattggctcatccttaaaggaggccccaccaagttgggaagcagttgaaaataaaagctgtaaagggagctgaacaggaagtaagaataggtggtgcaagagattatggcccctgggatgaatgacatggagccatttgtaaagtgctactgtatcatcccccatgaattattgcttctccaaaggaggagcagaggaaggaacaggaacatagaaatgagtatggtattgctttgctcactgctgaggctgatggccagatggacccaggggttatcagaaaccgaagattaactacacagctccagaagactcagacctcaaaatacagaggtgctcactaatcctcccagccagctgatccccctgggccaaggtaatgtagaagaggcccatccccacatcatattcacattttttaaatttcacaagcaatactttggaccactggggttcaggccccaagaaatga

SEQ ID NO: 2658 - DNA, 1296 bp, Homo sapien
ctgggtcctggcctttgggcatcatccagcgccatcggcctggcgcttcagccaacgcgggagtggatgggccccttcttcttcgcagacagcgttcggccgctgcccgggctctaggcgcggccggacggcccagtctggagggttcggggcggaggcccgggggggtgcgcgcgcccggggtccggcctctcactcgctcccctctcgtccgcagccgcagggccgtaggcagccatggcgcccagccggaatggcatggtcttgaagccccacttccacaaggactggcagcggcgcgtggccacgtggttcaaccagccggcccgtaagatccgcagacgtaaggcccggcaagccaaggcgcgccgcatcgccccgcgccccgcgtcgggtcccatccggcccatcgtgcgctgccccacggttcggtaccacacgaaggtgcgcgccggccgcggcttcagcctggaggagctcagggtggccggcattcacaagaaggtggcccggaccatcggcatttctgtggatccgaggaggcggaacaagtccacggagtccctgcaggccaacgtgcagcggctgaaggagtaccgctccaaactcatcctcttccccaggaagccctcggcccccaagaagggagacagttctgctgaagaactgaaactggccacccagctgaccggaccggtcatgcccgtccggaacgtctataagaaggagaaagctcgagtcatcactgaggaagagaagaatttcaaagccttcgctagtctccgtatggcccgtgccaacgcccggctcttcggcatacgggcaaaaagagccaaggaagccgcagaacaggatgttgaaaagaaaaaataaagccctcctggggacttggaatcagtcggcagtcatgctgggtctccacgtggtgtgtttcgtgggaacaactgggcctgggatggggcttcactgctgtgacttcctcctgccaggggatttggggctttcttgaaagacagtccaagccctggataatgctttactttctgtgttgaagcactgttggttgtttggttagtgactgatgtaaaacggttttcttgtggggaggttacagaggctgacttcagagtggacttgtgttttttctttttaaagaggcaaggttgggctggtgctcacagctgtaatcccagcactttgaggttggctgggagttcaagaccagcctggccaacatgtcagaactactaaaaataaagaaatcagccatgaaaaaaaaaaaaaaaaaaaaaaaaa

SEQ ID NO: 2659 - protein, 211 aa, Homo sapien [sequence omitted]

SEQ ID NO: 2660 - DNA, 879 bp, Homo sapien
ggccgggcgtcatgggcggcctcttctggcgctccgcgctgcgggggctgcgctgcggcccgcgggccccgggcccgagcctgctagtgcgccacggctcgggagggccctcctggacccgggagcggaccctggtggcggtgaagcccgatggcgtgcaacggcggctcgttggggacgtgatccagcgctttgagaggcggggcttcacgctggtggggatgaagatgctgcaggcaccagagagcgtccttgccgagcactaccaggacctgcggaggaagcccttctaccctgccctcatccgctacatgagctctgggcctgtggtggccatggtctgggaagggtacaatgtcgtccgcgcctcaagggccatgattggacacaccgactcggctgaggctgccccaggaaccataaggggtgacttcagcgtccacatcagcaggaatgtcatccacgccagcgactccgtggagggggcccagcgggagatccagctgtggttccagagcagtgagctggtgagctgggcagacgggggccagcacagcagcatccacccagcctgaggctcaagctgcccttaccaccccatcccccacgcaggaccaactacctccgtcagcaagaacccaagcccacatccaaacctgcctgtcccaaaccacttacttccctgttcacctctgccccaccccagcccagaggagtttgagccaccaacttcagtgcctttctgtaccccaagccagcacaagattggaccaatcctttttgcaccaaagtgccggacaacctttgtggtgggggggggtcttcacattatcataacctctcctctaaaggggaggcattaaaattcactgtgcccag

SEQ ID NO: 2661 - protein, 187 aa, Homo sapien
MGGLFWRSALRGLRCGPRAPGPSLLVRHGSGGPSWTRERTLVAVKPDGVQRRLVGDVIQRFERRGFTLVGMKMLQAPESVLAEHYQDLRRKPFYPALIRYMSSGPVVAMVWEGYNVVRASRAMIGHTDSAEAAPGTIRGDFSVHISRNVIHASDSVEGAQREIQLWFQSSELVSWADGGQHSSIHPA

SEQ ID NO: 2662 - DNA, 4019 bp, Homo sapien
cccgggtatcaaaagaaggatcggctccgcccccgggctccccgggggagttgatagaagggtccttcccaccctttgccgtccccactcctgtgcctacgacccaggagcgtgtcagccaaagcatggagaatcaagagaaggcgagtatcgcgggccacatgttcgacgtagtcgtgatcggaggtggcatttcaggactatctgctgccaaactcttgactgaatatggcgttagtgttttggttttagaagctcgggacagggttggaggaagaacatatactataaggaatgagcatgttgattacgtagatgttggtggagcttatgtgggaccaacccaaaacagaatcttacgcttgtctaaggagctgggcatagagacttacaaagtgaatgtcagtgagcgtctcgttcaatatgtcaaggggaaaacatatccatttcggggcgcctttccaccagtatggaatcccattgcatatttggattacaataatctgtggaggacaatagataacatggggaaggagattccaactgatgcaccctgggaggctcaacatgctgacaaatgggacaaaatgaccatgaaagagctcattgacaaaatctgctggacaaagactgctaggcggtttgcttatctttttgtgaatatcaatgtgacctctgagcctcacgaagtgtctgccctgtggttcttgtggtatgtgaagcagtgcgggggcaccactcggatattctctgtcaccaatggtggccaggaacggaagtttgtaggtggatctggtcaagtgagcgaacggataatggacctcctcggagaccaagtgaagctgaaccatcctgtcactcacgttgaccagtcaagtgacaacatcatcatagagacgctgaaccatgaacattatgagtgcaaatacgtaattaatgcgatccctccgaccttgactgccaagattcacttcagaccagagcttccagcagagagaaaccagttaattcagcgtcttccaatgggagctgtcattaagtgcatgatgtattacaaggaggccttctggaagaagaaggattactgtggctgcatgatcattgaagatgaagatgctccaatttcaataaccttggatgacaccaagccagatgggtcactgcctgccatcatgggcttcattcttgcccggaaagctgatcgacttgctaagctacataaggaaataaggaagaagaaaatctgtgagctctatgccaaagtgctgggatcccaagaagctttacatccagtgcattatgaagagaagaactggtgtgaggagcagtactctgggggctgctacacggcctacttccctcctgggatcatgactcaatatggaagggtgattcgtcaacccgtgggcaggattttctttgcgggcacagagactgccacaaagtggagcggctacatggaaggggcagttgaggctggagaacgagcagctagggaggtcttaaatggtctcgggaaggtgaccgagaaagacatctgggtacaagaacctgaatcaaaggacgttccagcggtagaaatcacccacaccttctgggaaaggaacctgccctctgtttctggcctgctgaagatcattggattttccacatcagtaactgccctggggtttgtgctgtacaaatacaagctcctgccacggtcttgaagttctgttcttatgctctctgctcactggttttcaataccaccaagaggaaaatattgacaagtttaaaggctgtgtcattgggccatgtttaagtgtactggatttaactacctttggcttaattccaatcattgttaaagtaaaaacaattcaaagaatcacctaattaatttcagtaagatcaagctccatcttatttgtcagtgtagatcaactcatgttaattgatagaataaagccttgtgatcactttctgaaattcacaaagttaaacgtgatgtgctcatcagaaacaatttctgtgtcctgtttttattcccttcaatgcaaaatacatgatgatttcagaaacaaagcatttgactttctgtctgtggaggtggagtaggtgaaggcccagcctgtaactgtcctttttcttcccttaggcaatggtgaactgtcattacagagcctagaggctcacagcctcctggaggaagcagcctccactttggatcaggaaatagtaaaggaaagcagtgttgggggtagcggcatgcagaccctcagaccagaatggggacatcttgtggtctgctgcctcaggaatctcctgaccacttgtagtccctccgacttctctagacatctagtctcagtgctagcttatttgtatttttcctctttcacttcttatggaggagagtgtttaactgagttagaatgttgaaactgacttgctgtgacttatgtgcagctttccagttgagcagaggaaaatagtggcaggactgtcccccaggaggactccctgcttagctctgtgggagaccaactacgactggcatcttctcttccccctggaaggcagctagacaccaatggatccttgtcagttgtaacattctatttcaacttcaggaaagcagcagttttcttttaatttttcctatgaccataaaattagacatacctctcaacttacatatgtcttcaacatggttacctctgcataaatattagcaaagcatgccaatttctcttaagtactgaaatacatatgataaatttgactgttatttgttgagactatcaaacagaaaagaaattagggctctaatttccttaaagcaagctcacttgctttagttgttaagttttataaaagacatgaaattgagtcattttatatatgaaaactaagttctctatcttaggagtaatgtcggcccacaagggtgcccacctcttgttttccccttttaaaaactcagatttttaaaagccctttccaaaggtttcaactgtaaaatacttctttttacaatgtatcaacatatttttatttaaggggaattaacaattgccagggaaaccagccaacccaagtttattatatcattaaccttatcataaattcaaacctaagttgctggaccctggtgtgaggacataaatcttccaaagttttgcctatcctaagagctgcatttttctactgctctttaccttgcattttagctaatttaggagttttgagaatgtattggatacgctccagtacataaggagttgccgcatattatatcagactgctttgagaaatctcatccctagtctattgcagttgtttctattagcttactgattaactcagtcctgacacaccttttgggaaatgctgatttaaacttcttaactggcaacagttggaacagtaatcagtttgctaacatatttaaagtcttgaatgttgaagaactcatgtgatttacccttttcaactttttggaaaacgatttaatttattctaattagattaaccctattaatctatggattgggtatcaaaatgaatgccagtccagatgtgcctagacacgaaattggagctgaggactctcacgatatgcaagttcatccaacgtgaagataccataagctttttctctgaaccagagaaatgaaagtcagtttaagaggctgatagatcttggccctgttaaggcatccacttcacagttctgaaggctgagtcagccccactccacagttaggccaagaattagattttaaaacttcatctgtctgtcccagttaactgttaaataaggcctcatcctccactgaagagtatggattgaaggattgtgaactatgtttagtgtgattgtgaacttggtgcctaatgttccatgtctgaagtttgccccagtgctacacgttggagtatacctatgtgtgtgctttgccactgaagtaagattttgcctgtatggtactgttttgtttgttaataaagtgcactgccacccccaatgcaaa

SEQ ID NO: 2663 - protein, 568 aa, Homo sapien
RVSKEGSAPPPGSPGELIEGSFPPFAVPTPVPTTQERVSQSMENQEKASIAGHMFDVVVIGGGISGLSAAKLLTEYGVSVLVLEARDRVGGRTYTIRNEHVDYVDVGGAYVGPTQNRILRLSKELGIETYKVNVSERLVQYVKGKTYPFRGAFPPVWNPIAYLDYNNLWRTIDNMGKEIPTDAPWEAQHADKWDKMTMKELIDKICWTKTARRFAYLFVNINVTSEPHEVSALWFLWYVKQCGGTTRIFSVTNGGQERKFVGGSGQVSERIMDLLGDQVKLNHPVTHVDQSSDNIIIETLNHEHYECKYVINAIPPTLTAKIHFRPELPAERNQLIQRLPMGAVIKCMMYYKEAFWKKKDYCGCMIIEDEDAPISITLDDTKPDGSLPAIMGFILARKADRLAKLHKEIRKKKICELYAKVLGSQEALHPVHYEEKNWCEEQYSGGCYTAYFPPGIMTQYGRVIRQPVGRIFFAGTETATKWSGYMEGAVEAGERAAREVLNGLGKVTEKDIWVQEPESKDVPAVEITHTFWERNLPSVSGLLKIIGFSTSVTALGFVLYKYKLLPRS

SEQ ID NO: 2664 - DNA, 6113 bp, Homo sapien; identical to SEQ ID NO: 27

SEQ ID NO: 2665 - protein, 567 aa, Homo sapien; identical to SEQ ID NO: 28

SEQ ID NO: 2666 - DNA, 3821 bp, Homo sapien
agtctcgcggtgctgccgggctcagccccgtctcctcctcttgctccctcggccgggcggcggtgactgtgcaccgacgtcggcgcgggctgcaccgccgcgtccgcccgcccgccagcatggccaccaccgccacctgcacccgtttcaccgacgactaccagctcttcgaggagcttggcaagggtgctttctctgtggtccgcaggtgtgtgaagaaaacctccacgcaggagtacgcagcaaaaatcatcaataccaagaagttgtctgcccgggatcaccagaaactagaacgtgaggctcggatatgtcgacttctgaaacatccaaacatcgtgcgcctccatgacagtatttctgaagaagggtttcactacctcgtgtttgaccttgttaccggcggggagctgtttgaagacattgtggccagagagtactacagtgaagcagatgccagccactgtatacatcagattctggagagtgttaaccacatccaccagcatgacatcgtccacagggacctgaagcctgagaacctgctgctggcgagtaaatgcaagggtgccgccgtcaagctggctgattttggcctagccatcgaagtacagggagagcagcaggcttggtttggttttgctggcaccccaggttacttgtcccctgaggtcttgaggaaagatccctatggaaaacctgtggatatctgggcctgcggggtcatcctgtatatcctcctggtgggctatcctcccttctgggatgaggatcagcacaagctgtatcagcagatcaaggctggagcctatgatttcccatcaccagaatgggacacggtaactcctgaagccaagaacttgatcaaccagatgctgaccataaacccagcaaagcgcatcacggctgaccaggctctcaagcacccgtgggtctgtcaacgatccacggtggcatccatgatgcatcgtcaggagactgtggagtgtttgcgcaagttcaatgcccggagaaaactgaagggtgccatcctcacgaccatgcttgtctccaggaacttctcagctgccaaaagcctattgaacaagaagtcggatggcggtgtcaagccacagagcaacaacaaaaacagtctcgtaagcccagcccaagagcccgcgcccttgcagacggccatggagccacaaaccactgtggtacacaacgctacagatgggatcaagggctccacagagagctgcaacaccaccacagaagatgaggacctcaaagctgccccgctccgcactgggaatggcagctcggtgcctgaaggacggagctcccgggacagaacagccccctctgcaggcatgcagccccagccttctctctgctcctcagccatgcgaaaacaggagatcattaagattacagaacagctgattgaagccatcaacaatggggactttgaggcctacacgaagatttgtgatccaggcctcacttcctttgagcctgaggcccttggtaacctcgtggaggggatggatttccataagttttactttgagaatctcctgtccaagaacagcaagcctatccataccaccatcctaaacccacacgtccacgtgattggggaggacgcagcgtgcatcgcctacatccgcctcacccagtacatcgacgggcagggtcggcctcgcaccagccagtcagaagagacccgggtctggcaccgtcgggatggcaagtggctcaatgtccactatcactgctcaggggcccctgccgcaccgctgcagtgagctcagccacaggggctttaggagattccagccggaggtccaaccttcgcagccagtggctctggagggcctgagtgacagcggcagtcctgtttgtttgaggtttaaaacaattcaattacaaaagcggcagcagccaatgcacgcccctgcatgcagccctcccgcccgcccttcgtgtctgtctctgctgtaccgaggtgttttttacatttaagaaaaaaaaaaaagaaaaaaagattgtttaaaaaaaaaaggaatccataccatgatgcgttttaaaaccaccgacagcccttgggttggcaagaaggcaggagtatgtatgaggtccatcctggcatgagcagtggctcacccaccggccttgaagaggtgagcttggcctctctggtccccatggacttagggggaccaggcaagaactctgacagagctttgggggccgtgatgtgattgcagctcctgaggtggcctgcttaccccaggtctaggaatgaacttctttggaacttgcataggcgcctagaatggggctgatgagaacatcgtgaccatcagacctacttgggagagaacgcagagctcccagcctgctgtggaggcagctgagaagtggtggcctcaggactgagagcccggacgttgctgtactgtcttgtttagtgtagaagggaagagaattggtgctgcagaagtgtacccgccatgaagccgatgagaaacctcgtgttagtctgacatgcactcactcatccatttctataggatgcacaatgcatgtgggccctaatattgaggccttatccctgcagctaggagggggaggggttgttgctgctttgcttcgtgttttcttctaacctggcaaggagagagccaggccctggtcagggctcccgtgccgcctttggcggttctgtttctgtgctgatctggaccatctttgtcttgccttttcacggtagtggtccccatgctgaccctcatctgggcctgggccctctgccaagtgcccctgtgggatgggaggagtgaggcagtgggagaagaggtggtggtcgtttctatgcattcaggctgcctttggggctgcctcccttcttattcttccttgctgcacgtccatctcttttcctgtctttgagattgacctgactgctctggcaagaagaagaggtgtccttacagaggcctctttactgaccaactgaagtatagacttactgctggacaatctgcatgggcatcacccctccccgcatgtaacccaaaagaggtgtccagagccaaggcttctaccttcattgtccctctctgtgctcaaggagttccattccaggaggaagagatctataccctaagcagatagcaaagaagataatggaggagcaattggtcatggccttggtttccctcaaaacaacgctgcagatttatctgcacaaacatctccacttttgggggaaaggtgggtagattccagttccctggactaccttcaggaggcacgagagctgggagaagaggcaaagctacaggtttacttgggagccagctgagaagagagcagactcacaggtgctggtgcttggatttagccaggctcctccgagcacctcatgcatgtcccagcccctgggccctagccctttcctgccctgcagtctgcagtgccagcacgcaaatcccttcaccacagggtttcgttttgctggcttgaagacaaatggtcttagaattcattgagacccatagcttcatatggctgctccagccccacttcttagcattcttactcctcttctggggctaatgtcagcatctatagacaatagactattaaaaaatcaccttttaaacaagaaacggaaggcatttgatgcagaatttttgcatgacaacatagaaataatttaaaaatagtgtttgttctgaatgttggtagacccttcatagctttgttacaatgaaaccttgaactgaaaatatttaataaaataacctttaaacagtcaaaaaaaaaaaaaa

SEQ ID NO: 2667 - protein, 556 aa, Homo sapien
MATTATCTRFTDDYQLFEELGKGAFSVVRRCVKKTSTQEYAAKIINTKKLSARDHQKLEREARICRLLKHPNIVRLHDSISEEGFHYLVFDLVTGGELFEDIVAREYYSEADASHCIHQILESVNHIHQHDIVHRDLKPENLLLASKCKGAAVKLADFGLAIEVQGEQQAWFGFAGTPGYLSPEVLRKDPYGKPVDIWACGVILYILLVGYPPFWDEDQHKLYQQIKAGAYDFPSPEWDTVTPEAKNLINQMLTINPAKRITADQALKHPWVCQRSTVASMMHRQETVECLRKFNARRKLKGAILTTMLVSRNFSAAKSLLNKKSDGGVKPQSNNKNSLVSPAQEPAPLQTAMEPQTTVVHNATDGIKGSTESCNTTTEDEDLKAAPLRTGNGSSVPEGRSSRDRTAPSAGMQPQPSLCSSAMRKQEIIKITEQLIEAINNGDFEAYTKICDPGLTSFEPEALGNLVEGMDFHKFYFENLLSKNSKPIHTTILNPHVHVIGEDAACIAYIRLTQYIDGQGRPRTSQSEETRVWHRRDGKWLNVHYHCSGAPAAPLQ

SEQ ID NO: 2668 - DNA, 2309 bp, Homo sapien
acctacgtccttcccacggcccggccagttaatctgctgcagttctgtcgaccaggtcaatgacagcgtttacaggaaagtactgcctgccttggtcatcccggctcattatatgaaactccccagggaccactcctatgtcagccagcccctcgtcgtcccggctgatcagcagcttgagatagaaagactacaggctgagctgtccaatccccatgccgggatcttcccacacccgtcctcacagatccagccccagcccctgtcttcccaggccatctctcagcagcacctgcaggatgcgggcacccgggagtggagccctcagaacgcatccatgtcggagtctctctccatccaagcttccctgaacgacgcggctttggctcagatgaacagtgaggtgcagctcctgactgaaaaggccctgatggagcttgggggtgggaagccgcttccgcacccccgggcgtggttcgtctccttggatggcaggtccaacgctcacgttagacattcatacattgatctccaaagagctggaaggaacggaagtaatgatgccagtttggactctggcgtagatatgaatgaaccaaaatcagcccggaagggaaggggagatgctttgtctctgcagcagaactacccgcccgtccaagagcaccagcagaaagagcctcgagccccagacagcacggcctacacgcagctcgtgtacctggatgacgtggaacagagtggtagcgaatgtgggaccacggtctgtacccccgaggacagtgccctgcgatgcttgttggaggggtcgagtcggagaagtggtggccagctgcccagcctgcaggaggagacgaccagacggactgcggatgccccctcggagccagcagccagcccccaccagagaagatctgcccacgaggaagaggaagacgatgatgatgatgaccaaggagaagacaagaaaagcccctggcagaaacgggaggagaggcccctgatggcgtttaacattaaatgagctatcgcagacccacctgactgtggaatataaaattgccaaatatcctttctcatggaagcgcgtacccgttcgtggaggaaacggaacggcagcccagccgtgggacggacgtggacgtttactgcattcctgtttgccgtgtaaatgttagaaaggaattaaagttattactcggaataaaggatgactttggcggatgtcgcccctgcaaggaggtggctgaaagtggtgtccagatgtccttccgaggactcggcgtatccgccgccagggacattaagaaaccgcacgtgatgtcgctatgctctaacgatcacctcagttctccctaggattctgggaacagatgaaactttttgcatcgcttgagtcatttttatcacaataatcctactgtgaagctgtcgttgagaacttaggttggcacgtagcgtctcaaggtatgcgttctctcaaaggaaagctatgcatcgctgcttcgttgtctgattttgcttagattttgctttggttaggttgcgttttggggtttgcctttttttgttgtcgcttaaatgcaatttggttgtaaagatttgattcctttgtgttcatctgttccgcttctcagcggtccatctcagcgtctcccttcaggaaccgctgagtgtcctctcttaacatccaagccttttaatgaaatcgtactgaaatctgtatcagctaagagtcctccaatcctggtcccattaactccaagtgcctttttgacagtgacaacagacagtccctcgctttttgttgttgtttgttttcttaacccctttaatggaactgcctggattttatacagttattaaaggatgtctcttttgctttaaactgcatgctgccaagtgccatttggggtcagcatcctcgtttcaacacagtgtgctctctagttatcatgtgtaacgtgggttctgtttagcgaagatagactagaggacacgttagagatgcccttccctgctccatccctgtggcaccattatggtttttttggctgtttgtatatacggttacgtattaactctggaatcctatgggctcatcttgctcacccaatgtgggagtctggtttgagcaagcgagctgaatgtgactattaaaaaaaatttaaaaaaaaaaaagaaaatcttatgtactatccaaaagtgccagaatgactcttctgtgcattcttcttaaagagctgcttggttatccaaaaatgaaaattcaaaataaactctgaagaaaaggaaaaaaaaaaaaaaaa

SEQ ID NO: 2669 - protein, 340 aa, Homo sapien
PTSFPRPGQLICCSSVDQVNDSVYRKVLPALVIPAHYMKLPRDHSYVSQPLVVPADQQLEIERLQAELSNPHAGIFPHPSSQIQPQPLSSQAISQQHLQDAGTREWSPQNASMSESLSIQASLNDAALAQMNSEVQLLTEKALMELGGGKPLPHPRAWFVSLDGRSNAHVRHSYIDLQRAGRNGSNDASLDSGVDMNEPKSARKGRGDALSLQQNYPPVQEHQQKEPRAPDSTAYTQLVYLDDVEQSGSECGTTVCTPEDSALRCLLEGSSRRSGGQLPSLQEETTRRTADAPSEPAASPHQRRSAHEEEEDDDDDDQGEDKKSPWQKREERPLMAFNIK

SEQ ID NO: 2670 - DNA, 9765 bp, Homo sapien
gggtaaagctagtgacacagaaaggggtggagtgctgacatccaataattcttctgattctccaaccggcagtggctataatactgatgtctctgatgataatcttccatgtgaccggacaagcccttcctcagacttaaatggaaattctgtttcagatgaacaggatgaaggagtcgaatctgatgatttgaaaaaagatctacctctgatgcctcctcctccagattcatgtagcatgaagttgaccattaaagaaatttggtttagttttgcagctcccaccaatgtgagatctcacacacatgcattttctaggcagctgaaccttttaagcactgcaacaccagctgttggtgcatggcttgttcccattgaccaactcaagtcatctttaaacaaattggaaactgagggaaccttgagaatttgtgctgttatgggatgcataatgacagaagcattagagaataaaagtgtacattttcccctaagaagtaaatacaacaggcttacaaaagttgctcgctttctccaagaaaatccttcatgtttactatgtaatatactacaccactatctgcaccaggcaaattactccatcattgatgatgctacaatgagcgatggacttcctgctttggtaactttgaagaaaggtttagttgcactggcaaggcagtggatgaagtttattgtggtgacaccagcctttaaaggagttagcttacatagaccagctcagcctctgaaacctcaaatagctatggaccatgaacatgaagatggacttggattggacaatgggggtggtcttcaaagtgataccagtgctgatggagcagaatttgagttcgatgcagccacagtcagtgaacacacaatgctattagaaggaacagctaaccggcctccacctggtagctctggacctgtaactggagctgagataatgaggaaactttctaaaactcatacccatagtgactctgcattaaaaataaagggcattcacccatatcattctctgagctataccagtggagacactgccactgattctccagtgcatgttggacgtgctgggatgccagtaaaggacagtccaaggaaggagagcctactcagctacctgactggaagcttcccaagcctgcacaacctcctggaaggtactcctcagagaagcagtgctgctgtgaaaagtagctccctaacgagaacaggaaatacagtagccactgatatgttatctgaacatcccttgctatctgagccatcatctgtgagtttctataattggatgtcaaatgctgtgggtaatcgaggaagtgtgttacaagaatctcctgttacaaaatcaggacacaatagtcttcccacaggtgttgcacccaatcttccaacaataccctcagcctcagatttcaacactgtcttgtctagtgaccaaaatactttggatgggacacattctcagcatagcaccagtcaggatgatgtggcaggtgtagaagaagcaaaccaagggtttcctgctgttcagcttgctgatgcacaggttgttttcaagcctcttctgagtcatacagggatccagtcacaggatacaatgccattctgctaccgaatgtactttggagaacacctttcattttcagggactttggactgcctcagagcagatattgtggattcagacacagccaaagagagaaaaggcaaaagagcaagaaggcaaggccatgtgaatcttcctccacttgagttcaaaccagcattaatgttgggaacctttagcatcagtgctgttgtaatggaaaagtccgtgtgcacccctcagaactctaccagtgccctttcttttcatgatctcagcaagcggtattataacacctttcactgcaactttactatttcctgtcagtcaataagccagcatgtagatatggctttggttcgtcttattcatcagtttagcacaatgatagatgacatcaaagcaactcagactgatattaaacttagcagatatacagccggatctgcttccccaacacctaccttcaaaaccagaaaacatcgggactttcgttcatctgactttagccgcagttctagaggaagtcttaatggtggcaatagagtaaataatgcaaagaacaaacggaccaacaatgagaataacaaaaaggaatctcgaaacaagaattcattaggaagatctgaaagaagaacatcaaaagtgtctaggaaaggttcaaaagatgtggtggatcacatgactattcatatggatgactctgattcaattacagtgtcagaacaaagtgagccttcagctgagtgctggcagaatatgtataaattgcttaacttctattcacttatctccgatccaacaggaatattggaaaagtcttcagaaacatttggaccagcaggagttcggagccctacagagccaacatgtaaagttgtgtttgagaatgaacaagacaacagcagtttgactaagactcagaggaaacgtagcttggtaacttctgaacctcagcatgttactctaatagtgtttgggattggcatggtgaaccgcacacacctagaggcagatattggtggactaacaatggaatcagaactgaagaggatccatggcagttttactcttaaggaaaaaatgaaagatgttttacatcaaaagatgactgagacttgtgctactgctcatattggtggggttaatattgtgctgcttgaagggattacaccaaatatacaactggaggattttcctacatctcctacaagtacagccaaacaagagtttctaactgtagtgaaatgtagtattgccaagtcccaagccctctacagtgcccaaagagggctgaagacaaacaatgctgctgtgttcaaagtaggagctatcagtatcaacattcctcagcaccctgccaccttacatagcatgatggttcgaagttctcaccaactatctaaacaaatctcagacctaatcagacagccttctacagccccacagcctgtaaaagaagatattgcaaccccactaccttctgaaaaaaccccaacaagtgttaatcaaactcctgttgaaacaaatgaatttcctcagctaccagaaggcttagaaaagaagcctattgttcttaaattcagtgccatgttagatggtatagccattggagcagcacttttaccatctctgaaagcagaatacaagatgggaagaatgagaagtcatggaatgacaggtgcacagacaagatttacatttgagctgccaaatcacagattgcgttttacttcaaaagtttctgccacagatatgtcaaccattcctccttctgccagtcttaaccttccccctgttaccatgtcagggaaatatataatggaagaacatgatagttattcggatcaggtgtggagtatagatgaactgccttctaaacaaggttactatttacagggaaattatctgcgttgtgtggcagaagttggttcctttgaacataatcttacaactgatcttctaaaccacttggtatttgtacagaaagtgttcatgaaggaagttaatgaagtaatacaaaaagtttctggtggggagcagcctattcctctctggaacgaacatgatggaacagcagatggagataaacctaaaattctcctctattccctaaacttgcagttcaagggtattcaagtaacggccactactccatcaatgagagctgtaagatttgaaactggattgattgaactggaactttctaaccgacttcaaaccaaagcttcaccaggaagtagcagctatctgaaactgtttggcaaatgccaggtggatttaaatctggcattaggacaaattgtcaaacatcaggtttatgaggaagctggttctgattttcatcaagttgcctattttaaaaccagaattggattaagaaatgccctccgagaagaaatcagtggttcttcagatagggaagctgtgcttattactttgaatagaccaattgtttatgcacagcctgtggcctttgatagagctgtgctgttttggctgaattataaggccgcctatgacaactggaatgaacaacgaatggctttacataaggatattcatatggctacaaaggaagtagtagatatgctacctggtatccagcaaacatcagcccaggcctttgggactctttttctccagctcactgtcaatgatctgggaatttgcctacctatcacaaatactgcacagtctaatcatactggagaccttgacactggttctgctttggtattaaccattgaaagtactctcatcactgcatgctcttcagagtctctggttagcaaagggcatttcaaaaacttttgtatccgttttgctgatggatttgagacatcatgggatgactggaaaccagaaattcatggggatttagtgatgaatgcctgtgtagttccagatggcacctatgaagtatgttcaagaactacaggacaagcagcagctgaaagcagtagtgctggaacctggacactcaacgtattgtggaaaatgtgtgggattgatgttcacatggatcctaacattggcaaaaggcttaatgctctgggcaatactcttacaacactgacaggagaggaagacatagatgacattgctgacttaaattcagtgaacatagctgacctgtcagatgaggatgaagttgatactatgtctcccactatccatactgaagccacagattatcgaagacaggcagcatctgctagccagccgggagaacttagaggaagaaaaattatgaagcgtatagtggatatcagagaactgaatgaacaggccaaagtaatagatgatctgaaaaaattaggtgcaagtgaaggaaccataaaccaggaaattcaacgttaccaacagttagaatctgtggctgtgaatgacattagaagagatgttcgtaaaaaattacggaggtccagtatgcgggctgcttccctaaaggataagtggggtttgagttacaaaccaagttacagccgatcaaaaagcatttctgcttctggaagaccacctcttaagcgaatggaaagggcaagttctcgagtaggagaaactgaagagctcccagaaatccgtgtggatgcagcatctcctggacctagagtaacttttaatatccaggatacatttccagaggagacagaactggaccttttgtcagtaaccattgaaggtccatcccattattcatcaaatagtgaaggatcatgttctgtgttcagttctcccaaaactccaggaggcttttcaccaggcattcctttccaaactgaagagggccgacgggatgacagtttgtcttctaccagtgaagattccgagaaggatgaaaaagatgaagaccatgagagggaaaggttttatatttacaggaaaccctcacatacgtctcgtaaaaaagcaacaggctttgctgctgttcatcagctatttacagaacgctggccaacaacaccagtcaatagaagtcttagtggcacagctacagagagaaatattgactttgaacttgatatacgggttgaaattgatagtggaaaatgtgtactccacccaaccacccttctacaagaacatgatgatataagtttgagaaggagttatgatcgaagttccaggagcttagatcaagattcaccttcaaaaaagaagaagtttcaaactaattatgcttctaccacccatttaatgaccggcaagaaagtgccatcatctctacagacaaagcctagtgacttagaaacaacagtattttacattcccggagttgatgtaaagttgcattacaattccaagacgctaaagactgaatcacctaatgcctccaggggatcttccttgccaagaacactgtccaaagagtccaagctgtatggtatgaaagatagtgcaacatctcctccttctcctcctttaccttccactgtccagagcaagactaacaccttacttcctccccagcccccacctattcctgcagccaaaggaaaaggaagtggaggagtaaaaacagccaagttatatgcctgggtagcacttcagtcattgccagaagaaatggttattagtccctgcctattagactttctggaaaaagctctggaaactatcccaattacaccagttgaaaggaattatacagctgtcagctcacaagatgaagatatgggacattttgaaataccagatcctatggaagaatcaacaacatcactagtgtcgtcttcaacatctgcttactcttccttccctgtagatgttgtggtttatgtacgagttcagccctcacagatcaaatttagctgtttaccagtatcaagagtagaatgcatgttaaagctgccatccctggatttggtgttttcttcaaaccgaggagaactggagactttagggactacatatcctgcagagactttatcccctggaggtaatgctactcagagtggaacaaagacttctgctagcaaaactggaataccaggttcatcgggattaggcagccctcttggccgaagtcgacatagtagtagtcagtcagacctgaccagttccagcagtagttcatctggcttgagcttcactgcatgcatgtctgacttttccctttatgtatttcatccatatggagcagggaaacaaaaaactgctgtttctggcctcacacctggatcaggaggattagggaatgtggatgaggagcccacttcagtcactggtcgaaaagattcactcagtataaaccttgagtttgtaaaagtgagtttgtcacggatcaggcgttcaggaggtgcctcattttttgaaagtcagtctgtaagcaagtctgcaagcaaaatggatactacgttaataaatatatctgctgtttgtgatatagggtctgcctcctttaaatatgatatgcgccgactcagtgaaattctggcatttccaagagcatggtatagaagaagtattgcaagacgtctattccttggagaccaaactataaatttgccaacatctggcccagggacacctgattccattgaaggggtaagccaacacctttcccctgaatcatcaagaaaagcttactgcaagacctgggagcagccaagtcagtcagcctccttcacccacatgcctcagtcacctaatgtgttcaatgagcatatgacaaacagcaccatgtcaccagggacagtaggacagagcctaaaatccccagcttccataagatcaaggagtgtatctgattcttcagttcctcgaagagattcactttcaaaaacatcaactccttttaacaaatcaaacaaagcagcaagccaacaagggaccccatgggaaacacttgtcgtgtttgctatcaacttgaagcaattaaacgttcaaatgaatatgagtaatgtaatgggaaatacaacttggacaactagtggtttgaagagccagggccgtctgtcagtaggaagtaatcgtgatcgagagatcagcatgtctgttggtctgggaagatcacaattagattctaaaggaggagtagttggagggaccatagatgtcaatgctttggagatggttgctcatatttctgaacatccaaatcagcaacccagtcacaaaattcagattactatgggttctactgaagctcgtgttgattacatgggctcaagtatcctcatgggcatcttcagtaatgctgatcttaagcttcaggatgaatggaaagtaaacttgtataatacattggattcaagcataactgataaaagtgagattttcgtccatggagatttgaagtgggatattttccaagtaatgatatcaaggtcaaccacaccagatctgataaaaataggaatgaagctccaggaatttttcacacaacaatttgataccagcaaacgagctctgtctacctggggaccagttccttaccttccgccaaagacaatgactagcaacctagaaaaaagttcacaagaacaattacttgatgcagcacatcatcgacactggcctggagtattgaaggtggtatcaggatgccacatatccttatttcagattccattaccagaagatggaatgcaatttggaggatcaatgagcttacatggaaatcatatgacactggcatgttttcatggtccaaattttcgttcaaaatcttgggccctttttcatttagaagaaccaaatattgctttttggactgaagctcagaaaatctgggaagatggctccagtgatcattctacatatattgtacaaacactagattttcacctgggtcataatactatggttaccaaaccatgtggtgctttggaaagtcctatggcaacaataaccaagataacaaggcgtcgccatgaaaatccaccccatggagtagcaagtgtgaaagaatggttcaattatgttacagctacaaggaatgaagagctaaatctgcttcgtaatgttgatgctaacaacactgagaatagcactactgtgaagaattctagtttgttgagtggattcagaggaggttctagctacaaccatgaaacagagactatctttgcattaccaaggatgcagcttgactttaaatccattcatgttcaagaaccacaggagccttcattacaggatgccagcctgaagccaaaagtagaatgtagtgtggtgacagagttcactgaccacatttgtgtgactatggatgctgagctcatcatgtttcttcatgatttagtatcagcttatcttaaagaaaaagaaaaagccatctttccacctcggattttatctactcgaccaggacaaaaaagtccaattattatacatgacgacaattcctctgataaagatagagaagatagcatcacttatactactgtggactggagagattttatgtgcaatacatggcatctagaacctactcttagattaatttcttggactggaagaaagattgatccagtaggtgttgattatattcttcaaaaattgggctttcatcatgctaggactactattcctaaatggcttcaaagaggagtcatggatccactggacaaggttctgtcagttcttatcaaaaagctcggtactgcactacaggatgaaaaggaaaagaaaggcaaagacaaagaagaacactaaaaaagtaatttgatctgtgaacaaattatgattgtgtctgttttattacactggagtgtttttttagtataataatttgaaatataactttaaaataattctaaatttgtggctataattaaaagtttgtaagttaacctgttctagttccatcattctgtgtacagtgaagtattgcatgataatgtaaattttgtgaaaaactagattaaaatatataactgcttgttatggtttataattatataatgtgcaatacaattcctgcatctttaaaatgtctgcagaataactgtgaatttttttgttattggattggccgtaacttttagaaaaaaatcttgttgatgataatgtgattttggggaggtcattaattgctttttcttttttaaatgtagacttatataaatacctgtttgtatatagcttgagtaattgtgatatgattgtataccactaaaatattgttaactattataataaagtcacagtaatggttt

SEQ ID NO: 2671 - DNA, 1142 bp, Homo sapien; identical to SEQ ID NO: 2280

SEQ ID NO: 2672 - protein, 203 aa, Homo sapien [sequence omitted]

SEQ ID NO: 2673 - DNA, 4436 bp, Homo sapien
cccccttgtcattaatacattaaaaagattcaatctttaccctgaggtaattttggccagttggtaccggatttataccaaaataatggacttgattggtattcaaaccaagatatgttggacggttaccagaggagaaggactcagtcctattgaaagctgtgaaggattgggagatcctgcttgcttttatgttgctgtaatttttattttaaatggactaatgatggcattattcttcatatatggcacatatttaagtggcagccgattaggaggcctggttacagtgttgtgcttctttttcaatcatggagagtgtacccgtgtaatgtggacaccacctctccgtgaaagcttctcatatccatttcttgttcttcagatgttgctagtgactcatattctcagggctacaaaactttatagaggaagcttgattgcactctgcatttccaatgtatttttcatgcttccttggcagtttgctcagtttgtacttcttactcagattgcatcattatttgcagtatatgttgtcgggtacattgatatatgtaaattacggaagatcatttatatacacatgatttctcttgcactttgttttgttttgatgtttgggaactcaatgttattaacttcttattatgcttcttctttggtaattatttggggtattctggcaatgaaaccacatttcctgaaaataaatgtatctgaacttagtttatgggttattcaaggatgtttttggttatttggaactgtcatacttaaatacttgacatctaaaatttttggtattgcagatgacgctcatattggcaacttactaacatcaaaattctttagttataaggattttgatactttattgtatacctgtgcagcggagtttgactttatggaaaaagagactccactgagatacacaaagacattattgcttccagttgttcttgtagtgtttgttgctattgttagaaagattattagtgatatgtggggtgtcttagctaaacaacagacacatgtaagaaaacaccagtttgatcatggagagctggtttaccatgcattgcaattgttagcatatacagcccttggtattttaattatgagactaaaactcttcttgacaccacacatgtgtgttatggcatcactgatctgctcaagacagctatttggatggctcttttgcaaagtacatcctggtgctattgtgtttgctatattagcagcaatgtcaatacaaggttcagcaaatctgcaaacccagtggaatattgtaggggagttcagcaatttgccccaagaagaacttatagaatggatcaaatatagtactaaaccagatgcagtgtttgcgggtgccatgcccacgatggcaagtgttaagctctctgcacttcggcccattgtgaatcatccacattatgaagacgcaggcttgagagccagaacaaaaatagtatactcaatgtatagtcggaaagcagccgaagaagtgaagcgagaactgataaagttaaaagtgaactattacattctagaagagtcatggtgtgtaagaagatccaagcctggttgcagtatgcctgaaatttgggatgtagaagatcctgccaatgctgggaaaactcccttatgtaacctcttggtgaaggattccaaacctcacttcaccactgtattccagaacagtgtttacaaagtcctagaagttgtaaaagaatgactgctacatgacctgctgcctacggagaactacatctgtaatggttttaatgttttgctaagtcatgtgttgttcatatcccaaaaacttttataggtaactgttttcaaatagaaaacgttttatttggtcaatttgaatgtcattctaattataaaaatgacttacacctttatcaattggttactatttcaatgcaccctttaaaatttgctatgcaaatgagtatatgcttgtacttgactttaatatttgtgctaaagtgagcaaagctacctgtataaagaaaacacagtgggttgtgacaaggatgacatgaaaatacaggacaattctgacaatgtaggggctgattttatagtgtaagaactattaatgccccttgcttcttttttctgcctcttgctcttgtcttttggacatttcagtgattgtaagttcttcggtcatgtcagcccctgtcatcaacttgagttacagtagatggggcagacatggagtgtttgctatataaaactatctgtttgttttacttccttgtgcgctttttgttctctgttctcttgttaatgaagcttttcctgcccattattaatccaaactcttggaccttgtggttaggaaattcccttaacttccagccatatggcattatcgtgtctctttctctctctctcttgctctctctcttctcctcttccccatattttctgtcaaataagtactgtttactcatttagttgcttatcaagtacttattcttggttttaaaaaaaattaatggtaactgtatttttctcatttttagcattattcaaatgtttatattttaatacctttaaaccactttaaagttttttcatgtttaattatagttttaagaaaaactattttgaacaaccccaaatatagtgcatctagaaactaatgtatatttgattagacatcatttatagtggaacagtagactgtagtacatggtaatttttcttttactattaagatacaataaaacatgactaattttgctgtcaaaaatgtaaagaataatgataaatggagttttttatattttacttttaagattgcctgtctttaataagacaaagccttaagccttatgttataattttggttctaaaaaccatcatttcagtataaggaataagtatatttcgtcctcctctttagtttttttcttcctatttatttttattttgaaaaatttctacaccttctttgaattccttgtatgaatttttgtttcttagaagttaatttgtgtgaaatgagattcttcaaaacgatgaaacctcatagctctgagaaaaggttttagggttttaaattctaagcaaagcgtgactatggctgacagactacacatttaattatacagcttctctttcttaaccacaggcagattaacctcattgtggattgtccttcagaccttagtcctcaggcatggtttctggtgcccactcctggaagccgctgttccctttctaccttcttaccagagcccaagggcaggcctggtcccggggaagcagcagcttgctgacataagtcagctgcaaaggctgaggagtgtgccctcagagaagcaccgccccccagtcttgtgccagcgcctagagccgcagctcccagggatgctccttccctggaggcagcccaggagagggactctggcagcgttcttcagatttgtggccactgtttctcatttgctggttgactgtttttatttcttaggcttttgctagttttagaaaatagggaagcagcccttgatttgtggattaaaagcaacatttgagcgatgatgcacaacagtccaggaaaatgggcggtggacacttgaggctgaggatgggagttgacatgagcagggagagggaggtgcgcgctgcttatctgtgattgttgctcacctgagtgtggctgattgtgtacatccagcagttacaatttttaaaaattatacttttacatttattttatatttttctcacccccagtaatttccttccaaagaagttcacatgtaataagtagaaattctgtataggaaaaaagcattaaaaatactattataactgcttcatttgctgggaaccattaaaagtaatataaattagctttttccagaaggatccttttgtagcagtgtttatgaatgtaacccccagcaaaatatggctatatattaggggagccagtttggagcagaggcctgaaggtccctgctatgcagccgtggccacagctcgcagcccaagcactgtggagcatccacacctttgatggcaatgcagattggtagcaggttccataggcgtacaaaacagtattaaagctcagtgttttgcatattgttagcatttacaaatatttttgctttagtatgaggaaagtaaggatgggcaaagaagcgatcaaaatagctattgctacaacattttcgaaaacaaagttggggctgtatttctttaaaaagataagcctctaaaaatgcttggcaaaaaaaatatagtgttaaaataggccagtgatattaatgagaaaatgaaagtatgtatcaggaataaagtgatattgcataggagtattgtatttttatgaattttatgccagttgtttacatgtactatatatgttaaattaaaaaaaatcatgagaaatg

SEQ ID NO: 2674 - protein, 580 aa, Homo sapien
PLVINTLKRFNLYPEVILASWYRIYTKIMDLIGIQTKICWTVTRGEGLSPIESCEGLGDPACFYVAVIFILNGLMMALFFIYGTYLSGSRLGGLVTVLCFFFNHGECTRVMWTPPLRESFSYPFLVLQMLLVTHILRATKLYRGSLIALCISNVFFMLPWQFAQFVLLTQIASLFAVYVVGYIDICKLRKIIYIHMISLALCFVLMFGNSMLLTSYYASSLVIIWGILAMKPHFLKINVSELSLWVIQGCFWLFGTVILKYLTSKIFGIADDAHIGNLLTSKFFSYKDFDTLLYTCAAEFDFMEKETPLRYTKTLLLPVVLVVFVAIVRKIISDMWGVLAKQQTHVRKHQFDHGELVYHALQLLAYTALGILIMRLKLFLTPHMCVMASLICSRQLFGWLFCKVHPGAIVFAILAAMSIQGSANLQTQWNIVGEFSNLPQEELIEWIKYSTKPDAVFAGAMPTMASVKLSALRPIVNHPHYEDAGLRARTKIVYSMYSRKAAEEVKRELIKLKVNYYILEESWCVRRSKPGCSMPEIWDVEDPANAGKTPLCNLLVKDSKPHFTTVFQNSVYKVLEVVKE

SEQ ID NO: 2675 - DNA, 4863 bp, Homo sapien
ccacgcgtccggccagctggagaggttcagcttggagaaggagagtcttcagcaggaagtaaggacgctgaagagcaaagtgggcgagctcaacgagcagctgggaatgctcatggagaccatccaagccaaggacgaggtcatcatcaagctcagcgagggcgagggcaacgggcctcctcccaccgtggcgcccagctccccttcggttgtgcctgttgccagggaccagctggaactggacaggctgaaagataatctacaggggtacaaaacccaaaacaaatttctaaataaggagattttggaactctcagctctacgaagaaatgcagaaaggagagagagggatctgatggcaaagtattctagcctggaagccaagctctgccagatagaaagtaaatacctgatattgctccaagaaatgaagacaccagtgtgctcagaagaccaggggcccacccgggaggtcatagcccagttgctggaggatgctctgcaggttgagagccaagagcagccggagcaagcatttgttaaacctcatcttgtcagtgaatatgatatttatgggttcaggactgtacctgaggatgatgaggaagagaaattggttgccaaggtccgcgcgttggatctgaagactctctacctcacagaaaaccaggaagtctccactggggtcaagtgggaaaactattttgcaagtacagtgaacagggagatgatgtgctctccagagttaaaaaacctcatccgtgcgggcattccccacgagcaccgttccaaggtgtggaagtggtgtgtggaccgtcacaccaggaagttcaaggacaacactgagcctggccacttccagaccttgctgcagaaggcgctggagaaacagaacccagcctccaagcagattgagctggacttgctgcgaactctgcccaacaacaaacattactcctgccccacctcagaaggcatacagaagttacgcaatgtcctcctcgccttctcctggcggaatccagatatcggctactgtcaaggcctaaacaggttggtggcagtggccctcctgtacctggaacaagaagatgctttctggtgtctcgttaccatagtggaagttttcatgcctcgagactattatacaaagactcttttaggatcccaggtggaccagcgggtgttcagagaccttatgagtgagaagctgcctcggttgcatggccactttgaacagtacaaagtcgactacactctcatcactttcaactggtttctggtggtatttgtggatagtgtcgttagtgacatcctctttaaaatatgggactctttcctttatgaaggaccaaaggttattttccgttttgctctggcactttttaagtacaaggaagaggagattttgaaattgcaagattcgatgtctatatttaagtatctccgctacttcactcgcactatccttgatgctaggaagctgatcagtatctcctttggggacctgaaccctttccccctacgccagatccggaaccgacgcgcctaccacttggagaaagtccggctggagctgaccgagctggaggccatccgtgaggacttcctgcgtgagcgggacaccagccctgacaagggtgagctggtcagtgacgaggaggaggatacctgagtgggctcgggatgctgctcttccttccttcacaaccaaagtgtgcccaaagggtgaaagtgcacttaaaagccagaatgtaacgtgtgtgtcctctggggatctgctgggcagatgtcccaagccaggctgcccttcctcatttcccactgtgcggggggcaggggtgggaggtctaatctgtttacaaccatttccgtgccatgcttttggttacacgtatctcagtcacgctttctgcctggttggtggatcctcaggcttaccagtggctatttgcaagagcctgtttccagcctccgtcagcctgtcggtgctctgaccctctgaaaccttgctttgctgggcatctccccatattctctctcctgtacatagtgggcagtggtgtgtggttttgaatggcagtgctataaaggatgccagctgtgctttaggcacctgtaggccagagggttgctgcctcaggcataaggttggtatgaaaaggggctgccttagaaaagcaggcacatcccttgttcagaaatggccactgtaggaaagcctgtgaacctcccaccagtggctttaagctgccagccatgccccatttctagaatagcctttgctcttccacacgcaacccttccatcagtgtcttccagcctgcatggggagggcctggctgcccagacacccaccctcacttctcatggccagcctgtgtttgcagatcactgggctgctctgtccccagcttgccccgtgccaggcatggctctgtgagattctgtggaatgcccttcttgacttgtggaaatcattcaccaagtacgatgggatgggattccaagtaaacagtggaccgtcatattgcaaagcaggcccacgcctgggctggccttggttgaggggatggaggaatgttttcgggggtgctttgcagggcagtggtgcagccgcagcgtgaacgctcttggacagctgaaaaccatggcctccttggggatggccagtgctcctggtgtctccacctgcctgggttgtgcaggaggccggctgccagtgcctggggctgggaaacttttttgcttggggcaggcttgggtgagctctcccagatgtgtgcccaccccaccactgcctggaacatccttgttctctgccaggatgcaggggcactgttgcctctgacacagcagtttctgggaactcagaggactgcctttctgaaggctggggagaggctttgagcaaggagcttgtttttgcttaatcgctctagaccatccctgatgcgtagatgtgagaggatgttttctggcacagtgttatgaaaatacaagataaatgatctcagtggaatgtttcatattacccgaaaaaaactggaaatcatcctttgttgtgaacacactgagactaagaattgaagcaatgcagttttaagaagtatttttcctattttttgctgtcaactttttggcaatgccacggcaaagttggtgtttcagcacatgctagagtgagctccggcttcgtgtctttaaccaactccactaatgtttcactgggtagacggagctggcctctatatttagccagaagcctttgcctcttttcaggcatcaaaaatgggttttgtcattgtctttgtctttgagagcagcagtttgaggtctgactccttcagttgtcctgtgagctgggcgttgcagtctgctcgaatcaagtgttggaaaccccccacccctcagcccatcgtgaaacgacagctgtcagcctggggggcggctgctgaggaggtgcagcaggaatggggctgggccctgaggttttactttccgagccaatggcccctggaacatgccagcacacactgccatgtcctggggctaagagctgcctttagggacaggctcgtgttgtccagtttgccctgagagatgcacctgaccaggggcccgtcgtggctgcaacccacggtggtatgttagtgtttccaggcagttgtcagcagctgccgggtagtgtgtgtgtgcgacagcaggagagttcctggaggaaagggactggggacactttctcagaggttctcctgcctggaatcaagtgatgcgtgtccagaaggcaagagagggcggctccgcctggttaaagtttgggaacgggacggagccaactcctccttccaggactgtgggccccactcttttgcgctaacacttcccctccctcgggtcactgaggaaagagctgctctgtcccctccagtgccctgaaggtccctggcctccactggctgccatggcagggggcccttctgacaggggctgccccaagctgctgttcctcctctgaaccttcaccccaacacccagcccgtggcccctgcaagggggaccctgccagctgggaaacccaaaggcctgtccaaacgtgcgcaccaggaccgaggggagctccctcccaacacctgctaggaattgccaacttttaaatggatggggttttttatgggttgaacctctgttaatacttttgtacactctcactacagtttatatttttataggctattttctcaaggtgtttctagattccacatatctattttatataacaagttattatgttatgtgtgtgactcccttgtgtgtatctgtgccagcctcagcctccgagttgcttttccctctggccctgactctcactgactcaccgatgtgatgtgcaggcccacttcttaccccagatagcctcgggcgctgcctgtagtcatgctgacagctgtacagtagccgccaagactgctgacagctggagacggttctggtttcaactacggtatattgatatcggaagtattctagacagatcctcggttgggttttctagctacatgtttgtattgcacagatccccacctgccatcctatagtgttgtcttcctgtgtgttccggggcttctgggcagctgggcctgcccggggaagtccttgcaggtgggaggccatacagagacccactgtgtgccactgagcgtcccactgctgctgggcaactggaggactgcagggggcgccaggtgactctctccttttatatcacagcagctcctgtgctgaccttcaagttacgttttggaactgtaatactaaaggaagaaataaactactaatttgtataataaaaaaaaaaaaaaa

SEQ ID NO: 2676 - protein, 415 aa, Homo sapien
MKTPVCSEDQGPTREVIAQLLEDALQVESQEQPEQAFVKPHLVSEYDIYGFRTVPEDDEEEKLVAKVRALDLKTLYLTENQEVSTGVKWENYFASTVNREMMCSPELKNLIRAGIPHEHRSKVWKWCVDRHTRKFKDNTEPGHFQTLLQKALEKQNPASKQIELDLLRTLPNNKHYSCPTSEGIQKLRNVLLAFSWRNPDIGYCQGLNRLVAVALLYLEQEDAFWCLVTIVEVFMPRDYYTKTLLGSQVDQRVFRDLMSEKLPRLHGHFEQYKVDYTLITFNWFLVVFVDSVVSDILFKIWDSFLYEGPKVIFRFALALFKYKEEEILKLQDSMSIFKYLRYFTRTILDARKLISISFGDLNPFPLRQIRNRRAYHLEKVRLELTELEAIREDFLRERDTSPDKGELVSDEEEDT

SEQ ID NO: 2677 - DNA, 1345 bp, Homo sapien
ggcgtaaaccactgcacgcagcctaccctctgcctttttaagatgatgtatttatttaatttttgccatcattggtgcttcaccttcctgcgaaggaaattccagagcctgtatttaagctacctaggcttttacactccctttattgcctttccaaatagtatctcatttggtgtactctagtgtcctatacctcttggaaacgaaagagggcccaacctacaactaagaagggacaaaccttgaactaagtaagaccttacacacccagaaagaacactgggccctccttcttcagggacaatgcagtagccacttggcttgtggaatttactgaaggctatttcctgtaacttgctagttaacttagttttgtatttcaggcagaggtgcgctctgtaatgttgggcctttgacttcacagtactggagagctgttcacacagatgtttagacctttctctctctctctcttttcttctttctcaacaactctttcacagaggcagtcattttgaaaggttgaaatatttggcctttaccaaagagctttttttttccttaagcaaaatcctttcagaaagaaacaaatggggaagggcagattaagaatgcatatgtcccaatccacttctataggagtttaatcatattcacatgagtaaaatgatggaagaactctttaaggtaatcctttgggataaaggatcctgggaagttctctcaggtaaagaaagcttacagcagatttgtaatatatgtctggagagctatttataagaaatttaagaggattgttttgttttcctttattaaagatttaagcctttttactttgcaaaaagaaaactacaaaagttttatagatataactttgctaattttttaaacttttctgaaacgattagctgtagccaaattatgtggttacgttttgctacattagaatttgaaaatgcaatatgtgtggtaaatctactgtttgaaatttataatggtctctgatatgattcgaattttggtaacttttgaaagttattttccccctttagtcatggatttctatttgttttttaatgttaatttttctagaaagcatctgaattgactaggcttttcctatataaaaaactcaaaacttgttaactctgtactttaataaaatttaaaattaaaactgtgttgtttttttctcttctgctagatacatatataattaaagtactcaagttagttgttttgcagagatgttgccttcagatgttaatcaggtctctcaagtttcatggagtctatgctgatcctttaattgacaaataaaagatatatatctgtggtgtgcaac

SEQ ID NO: 2678 - protein, 60 aa, Homo sapien
GVNHCTQPTLCLFKMMYLFNFCHHWCFTFLRRKFQSLYLSYLGFYTPFIAFPNSISFGVL

SEQ ID NO: 2679 - DNA, 7912 bp, Homo sapien
ggaaattattagatgaattgtcagacccagaatcttcaaaacttattggagaagtgtttaatattgtgagccaacagtctactgctcgacctggctgcattattgaactcgacgcaataaccaaccaatgtggctcaaatacacagttgcttcatgtgtttcaagaagacttcattataggatataaaccacataaggaagatatggagaaaaaggaaacagaaatattttttcagccatcacaaggataccgcccaccaccattttcagaaaagttctttctagtagtaattgagaaggacagcaataataactctattctgcatatgtggcaccttcatcttaaatctgtacaagcatgtttagctaaagcttcagaaggggcttcctctgagagtctactttcagtccctggacagaagaatgtagattcttctccagaaacctctcctagtgtgagccccatgccacattcttcatcaattgccaatcttcaaactgccagtaaacttattctgagttctagactggtgtatagccaaccccttgatctcccagaatcagttgaagtaataagagcaacgccttcagcaggccatctgagttcttcttcaatttatccagtgtgccttgcaccttatttagtggttacaacttgttctgacaataaagtacgcttctggaaatgttgtatggaagccaacccagagtgtaataaaagtgatgagaaagaaatttatcattggaagagatggcctttgatgaatgatgaaggagaagataatagcagtacagtgagcattgtgggaagaccagttgctgttagctgttcatacacaggtcgccttgcagtggcttataagcagcctatccaccataatggttttgtttctaaagaattttccatgcatgtttgtatatttgaatgtgaatctacaggaggatcagagtgggttttagaacaaacaattcatcttgatgatttggttaaggttgggagtgtacttgattcaagggtcagcgtcgacagtaatctgtttgtgtatagcaagtcagatgcactcttgagcaaggatagatatcttattccgaatatcaaacatttagtacatttggactgggtatcaaaagaagatggctcccacattcttacagtgggagtcggtgcgaatatcttcatgtatggaaggctttcaggaattgtgactgagcaaaccaacagtaaggatggagtagctgtcatcactttaccactaggtggtagtatcaagcaaggagttaagtcaagatgggttcttcttagatctatagacttggtatcttctgttgatggtactccttcactgcctgtttctctctcttgggtaagagatgggatattggtggtaggaatggattgtgaaatgcatgtatatgcacagtggaagcatgctgtcaaatttggagacactgaagctgatagtcctaatgcagaagaggcagcaatgcaagatcattcgacctttaaatctaatatgctggcaagaaaaagtgttgttgaaggaacagctatttctgatgatgttttttgttcaccaactgtaattcaagatggtggcttatttgaggctgcacatgtactttcccctactcttccacaatatcatccaactcagctgttagaattgatggatttagggaaagtgcgaagggctaaagccattctctctcatttagtaaaatgtattgcaggtgaagtagcaatagttagagatcctgatgctggagaaggaactaagcgacatctctctcgaactattagtgtaagtggcagtacagcaaaggaaacagtcaccgtaggaaaagatggtactcgagattatactgagatagattctatccctccactaccactatatgcattacttgctgcagatcaagatacatcctacagaatttcagaagaaagtacaaagataccacagagctatgaagatcagacagtaagtcaaccagaggatcagtattcagagctgtttcaaatccaggatataccaacggatgatattgatttagagcctgaaaagagagaaaacaaatcaaaagtaataaatctttctcaatatggaccagcttactttggccaagaacatgcaagggtactttcaagtcatcttatgcactcaagtctaccaggccttacccgtttggagcagatgttccttgtagctttggctgatacagtggctactactagtactgagcttgatgaaagcagagataagagttgctcaggaagagatacattagatgagtgtggtttgagatacttgttagctatgcgcctacacacatgccttttgacatcgctgcctcctttataccgagtgcagctacttcatcaaggtgtctctacatgccattttgcctgggcttttcattctgaggctgaagaagaactgattaatatgattccagcaattcagagaggggacccccagtggtctgaattaagagctatgggcatagggtggtgggtgaggaacattaacacgcttcgaagatgcattgaaaaggttgccaaagcttcttttcaaaggaacaatgatgccttagatgctgcactattctacctttcaatgaagaagaaagcagtagtgtggggtctgtttaggtcacagcatgatgaaaaaatgacaacatttttcagccacaactttaatgaagatagatggcgaaaagctgctttgaaaaatgctttttccttacttggaaaacaacgctttgaacaatcggctgcttttttcttgctagctggttcattgaaagatgccatagaggtatgtcttgaaaaaatggaagatattcagctagccatggttattgcccgtttatatgaatctgaatttgagacttcatccacttatatatccatcctaaatcagaagattttgggttgccaaaaggatggctcaggattcagttgcaaaagattacatcctgatcctttcctgcgtagtcttgcctattgggtaatgaaagattacacccgagccttggacacattactggaacaaacaccaaaggaggatgatgaacatcaagttatcatcaagtcttgtaacccggtggcatttagtttttataactaccttcgaactcatcctttgctcattcgaagaaatcttgcctcccctgaaggaactttggcaaccttaggtctcaaaactgagaagaactttgttgataaaattaacctcatagaaagaaaattattctttaccactgcaaatgctcattttaaagttggatgccctgttttagccttggaggtactctccaaaattccaaaagtaaccaaaacatctgccttatctgcaaaaaaagatcagcctgacttcatttctcacaggatggatgatgtaccttcacattcaaaagctctgagtgatggcaatggaagttctggcattgaatggtcaaatgtaacttcatcacagtatgactggagtcagccaatagtaaaagttgatgaggaacctcttaatcttgattggggtgaagatcacgacagtgccttagatgaagaggaagacgatgctgttggtttagtgatgaaaagtacagatgccagggaaaaagataaacaatcagatcagaaggcctcagaccctaacatgttattaacacctcaggaagaggatgatcctgaaggtgatactgaagttgatgtgattgctgaacaactaaaattcagagcttgtttaaagatccttatgactgaattaagaacattggctacaggttatgaagtagatggaggaaaactcagatttcaactctataactggcttgaaaaggaaattgctgccttgcatgagatatgtaatcatgaatcagttattaaagagtattccagtaagacatattccaaagtagagagtgatctgctggatcaggaagaaatggtagacaaaccagatattggttcctatgagcgccatcaaatagaaagaagaagattgcaggccaaacgagagcatgcagaaagacgaaagtcgtggttgcagaaaaaccaagatctcctgagagtatttctcagctactgtagccttcatggggcccaaggtggtggtttggcttcagtaaggatggaactcaaatttttgctacaagaatcacaacaggaaactacagtaaagcagctccagtctccactaccactgcctaccaccctacctctgctttcagcaagtattgcgtcaacaaaaacagtcatagctaatcctgtattgtacttaaataatcacatccatgatatactttatactattgttcagatgaaaacaccacctcatcccagtattgaagatgtgaaggtgcacacacttcattcactagcagcatcactttctgcatcaatttaccaagcattatgtgacagtcatagctacagcagtcaaacagaaggaaatcagtttacaggaatggcttatcaaggacttcttttaagtgatcgtagaagactaaggacagaaagcattgaagaacacgcaacaccaaattcatctcctgctcaatggcctggtgtgagctcacttattaatcttttgagttcagcccaagatgaagaccagccaaaactgaacattttgctatgtgaagctgttgttgctgtttacttaagtttattgatacatgctcttgccacaaattcctccagtgaattatttcggcttgcagcccacccattaaataatcgaatgtgggctgctgtttttggaggcggtgtaaaacttgttgtgaaacctcgaagacaatcagaaaatatttcagcacctcctgtcctttctgaagacatagataaacaccgtaggagatttaacatgagaatgctcgtccctggaaggcctgtaaaagatgctaccccaccaccggtgcctgcagaaagaccatcttacaaagaaaaatttattcctcccgaacttagtatgtgggattattttgttgcaaagccatttcttcctttgtctgatagtggtgttatatatgattctgatgaaagcattcatagtgatgaagaagatgatgcctttttttcagatacacaaatacaggagcaccaagatccaaattcctatagctgggctcttctacatttgacaatggttaaactagcacttcacaatgtcaagaatttctttcctattgctggactggaattctctgagctgcctgtaacatcaccattaggtattgctgtgattaaaaacttggagaactgggaacagatcttgcaagagaaaatggatcagtttgaaggtccaccccctaactatatcaacacatatccaactgacctttcagtgggagctggaccagctattcttcgaaataaagcaatgctagaacctgaaaataccccattcaagtcccgggattcttctgcatttccagtcaaacgactttggcatttccttgttaaacaagaggtccttcaagagacatttattagatatattttcactaagaaaagaaagcagagtgaggttgaagctgatctgggctatccaggtggaaaggcgaaagtcatccataaggaatctgatatgatcatggcattttctgttaataaggcaaattgtaatgaaattgttttggcttcaacacatgatgttcaagaacttgatgttacttctctactggcctgtcagtcatacatatggatcggagaagaatatgacagagaatccaaaagttcagatgatgttgattatcgtggttccactacaactctttatcaacccagtgcaacatcctattcagcaagtcaggtgcatccaccttcatctctgccatggctgggcactggacagactagcactggagctagtgtgcttatgaaaaggaatctacataatgttaagagaatgacttcacacccagtccatcaatactatcttacaggtgctcaggacggcagtgtacgaatgtttgaatggacgcggcctcagcaacttgtctgctttcgtcaagctggcaatgcaagagttactagattatattttaattcacaaggcaacaagtgtggtgttgcggatggagagggttttctgagtatctggcaagttaaccaaactgcatcaaatcctaaaccttatatgagttggcagtgccacagtaaagccacaagtgactttgcatttattacctcttcaagtctagttgccacatctggacactccaatgacaatagaaatgtttgcctctgggacacattaatatcacccggaaacagcctcattcatggtttcacgtgccacgatcatggtgccacggtactgcagtatgcacccaaacagcaactcctaatctcggggggtaggaaaggacacgtctgcatttttgacatcaggcaaaggcagctcattcacacgttccaggcccatgactcagctattaaggctctggccttggatccctatgaggaatattttaccacaggttcagcagaaggtaacataaaggtttggagattgacaggccatggcctaattcattcatttaaaagtgaacatgctaagcagtccatatttcgaaacattggggctggagtcatgcagattgacatcatccagggcaatcggctcttctcctgtggtgcagatggcacgctgaaaaccagggttttgcccaatgcttttaacatccctaacagaattcttgacattctataaagattggggttttatttttatatacatttcagttaaaaggcacactacagtcatcactaggcaattctgctttctaagcagttgtattgaaaacagagaatctctgtgtagaatttgaatatgacccaagctgagtattatctaaacaggttggtggaatgaatgcgcatgtaccttattatgctgacatactaaaaaaaataaaacctagtattgtatgaaggatagctattctttacagcatttagcaaacctgattcagaaaacatttgagattagcaaattagtaacttgaaataatgaaaaggacgtttataccaaattaaggaagaaaatgttgctgatttgggtttttcttcctgttcttaccactgactgaagcatgcctgcagtctcctcctctgttgaatgaaggataatcataaggtgtttgttaggagcgctagaccacctggaaaactttcttagctgtggagcagtgcgcagtgaccagttctctgctgtgagaggccgtttccattctttcctgctgaatatttttcctgttagtgtttatactgagctagtactgtaacttgcaaatgagtgcaaatttaaatgcaatgttttactcacaatttgcacattcacattttttggactgctagtttttctatttaaatatttgccttcatgttaggaatgtactatgtgaacatgacatatttgtagttaaccaaacacaccttcttagtccagtttagtactttttcttttcgtgtattcaaggttaaacacccaaacatttaaggatatgttgaaactacaccaatagagcatttcatatcataattaaaatgaatgttaggcttcttgtggccagttaatagttgatgagattggtgacattatttattgccacagcctattgtataaactatgcagagttaaatatttgcttgtaaaatattagccaatgttgtcattattttgatgtatttccttggttatgaccaaaaatatgttgagatactgaaactaatgtctgtgtgtttaaatgtttaccagcaaattgtcttatcatgttaatgagaatgttcaatgcctgtgtggtaaatagtaaatacaatggcataaaagtaactttctctgaagatgtgatgttcaggctgtgaaatatatatgtaaaagaaaaataaatgttatttgttagagtt

SEQ ID NO: 2680 - DNA, 4403 bp, Homo sapien
gtttgatatctacactcagtattgcaacaattaccccaactccgtggccgccctgacggaatgcatgcgggacaagcagcaggccaagttctttcgggaccggcaggagctgctacagcactcgctgcccttgggctcctacctgctgaagccagtccagcgcatcctcaagtaccacctgctgctccaggaaattgccaagcattttgatgaagaagaggatggctttgaggtggtggaggatgccattgacaccatgacctgtgtggcctggtacatcaacgacatgaagaggaggcatgagcacgcggtccggctccaggagattcagtcactcctcatcaactggaaggggcccgacctgaccacctacggggagcttgtcctggagggcacattccgcgtgcatcgcgtgcgcaatgaaaggacctttttcctctttgacaaaacactgcttatcaccaagaagcggggcgatcactttgtctacaagggcaacatcccggtaaccaggccctgccccatctcctctgccatcttctctccttcccaaaggatctgggctccccttcttgtctgcttcttggggctccagcaccacccttctgagatcaccctccctgcttccccaggctgtcaaccttgtgcttgactgtcctttccctctgcccctagtgctcctccctgatgctgatcgaaagcaccagagactccctgtgcttcactgtcacccactacaagcacagcaagcagcagtacagcatccaggccaagacagtggaggagaaacggaactggactcaccacatcaagaggctcatcctagagaaccaccatgccaccattccccagaaggccaaggaagccatcttggaaatggattcctattatcccaatcggtaccgctgcagcccagagcggctgaagaaggcttggtcctcccaggatgaggtgtccaccaatgtgcgccaggggcgccggcaatctgagccaaccaaacacctgctcaggcaactcaacgagaaaggtgagtgtgtgaggtggccagccattcccagtgagcgggggaggaggagggaggaggggaagcagccgacaacctggggtgtgacctgagggtggaggattgtcagaatagtgtagagggaactctgcctccattccccccagaagagggcctcgcccctggctggctgaggagaggggctggagctctcccccatgcacaggcctcatgccctttcctccggaaacaatgagagccgagcaacaggcacagacctgcgctgctctgtggcccctgggcccctgctctgtcagtcattcttttgaaagcccaggagactaggtgagggttctgggagcaggagcccccagtgaggacttccccagggagctgtccagaggtctttttcctgcttactgatctcttcccctcccctcccctgcccctcgcccgtgtgctgggggacccggtggtgatgtctgcagcccgagcagcaggaatgaagggaaaggggcgcagggagtctgaaagctccaggagcagcagaaggcccagtggccggtctccaaccagtactgagaagcgcatgagcttcgagtccatttcttccctgccagaggttgagccggaccctgaggctgggagtgagcaagaggtattttctgctgtggaagggcccagtgccgaggagacgccttcagacacagaatctccagaagtcctggagacacagcttgatgcccaccagggccttctggggatggaccccccaggtgacatggtggacttcgtggcagctgagagcactgaggaccttaaggccctgagcagcgaggaggaagaagaaatgggaggtgccgcccaggagcctgagagccttctgccaccctctgtgctggaccaggccagcgtcattgcggagcgatttgtcagcagcttctctcggcggagcagcgtggcacaggaggacagcaagtccagtggctttgggagcccgcggctggtcagccggagcagcagcgtgctcagcctggagggcagcgagaagggcctggcccggcatggcagtgccacagactccctcagctgtcagctctccccagaagtggacatcagtgtgggggtggccacagaggacagcccttctgtcaatgggatggagcccccaagcccaggctgcccagtggagcctgaccggtcttcctgcaagaagaaggaatcagcactctccacccgagaccggctgttgctagacaagattaagagctattatgaaaatgcagaacaccatgatgcaggcttcagcgtccgtcgccgggagagcctctcctacatccccaaaggactggtaagaaactccatctccaggttcaacagccttccccggccagacccagagccagtacctccagtggggagcaagagacaggtgggctcccggccgacttcgtgggccctgtttgagctcccaggaccaagccaggcagtcaaaggggacccacctcccatctcagatgctgagttccgcccatcttcagaaattgtgaagatctgggagggaatggagtcttccggagggagccctgggaaggggccaggccagggccaggccaatggctttgacctgcatgagccactcttcatcctggaggagcatgagctgggagccatcacagaggagtcggccactgcctccccggaaagctcctctcccactgaggggcgcagcccggcccacctggcccgggagctgaaagagctggtgaaggagctgagcagcagtacccagggggagctggtggccccactgcacccccgcatcgtgcagctctcccacgtaatggacagccacgtgagcgagcgcgtcaagaacaaggtctaccagctggcccgccagtacagcctccggatcaagagcaacaagccagtgatggccaggccaccactgcagtgggaaaaggtggcccctgagagggatgggaagagccccactgtgccctgtctacaggaagaggctggagagccattaggtggcaaaggtaagaggaagccggtgctgtctctatttgactatgagcagctgatggcccaggagcacagccctcccaagccctcctcggctggggagatgtcaccacagcgtttcttcttcaacccgtctgctgtcagccagaggaccacctcgcctgggggccggccctccgcccggagccccctcagccccacagagaccttcagctggcccgacgtccgtgagctctgctccaagtatgcctcccgcgatgaggcacgccgagcagggggcggccggccccgcggcccacccgtcaacaggagccactcggtgccggagaacatggtagagccacctctgtcgggcagggtgggccgctgccgcagcctgagcaccaagaggggccggggaggcggagaggctgcccaatcccctgggcctctgccccagagcaagccggatggaggcgagaccctgtatgtcactgcagacctcaccctggaggacaaccggcgggtgattgtcatggagaagggaccccttcccagccccactgcagggctggaggagagcagtggccagggaccaagctcaccggtggccctgctggggcaggttcaggacttccagcagtctgcagagtgccagccgaaggaagagggttccagggacccggcagacccgagccagcagggcagagtgagaaaccttagagagaagttccaggccttgaactctgtcggttgatgctgactcctgggggagggaggagtcatgttggaggttggggaagaacctgggcatccttcccctcaagcctgggctcatggagcccctgcccagggccctcaggtgggcggaaagtccatcccctccgcccttcaggaaggatgctcccgtgtgcaggggtctcctgcctgtgccatccactggggctcgagacaatttcccactcacctgtgaggccggtgtggctgcttcccttgtaaatagttgttctctggtaagaagccaaatatttaagctcacttattcccagagagaggaagctctgctcaggcctccagcgttggctggccatggccacagccagatggaggagcccatccccaggagactcaggcagtggcctggagaggctttgttctgtaacggtgccttttcttagggtccaggcaggaatgaagccaataatttattgctttccattctgtggtatgatgtgcgtgtgcgtgagtgtgtggcccctgtttattcccctcctgtcaagaatgaagtggattcagttcaggtacttttgagggttgttgtgctgaccctgtggttgtcgctgatgtacacacatttcattatttgccaatggtgcaataaccactgctgacc

SEQ ID NO: 2681 - protein, 804 aa, Homo sapien
GFWEQEPPVRTSPGSCPEVFFLLTDLFPSPPLPLARVLGDPVVMSAARAAGMKGKGRRESESSRSSRRPSGRSPTSTEKRMSFESISSLPEVEPDPEAGSEQEVFSAVEGPSAEETPSDTESPEVLETQLDAHQGLLGMDPPGDMVDFVAAESTEDLKALSSEEEEEMGGAAQEPESLLPPSVLDQASVIAERFVSSFSRRSSVAQEDSKSSGFGSPRLVSRSSSVLSLEGSEKGLARHGSATDSLSCQLSPEVDISVGVATEDSPSVNGMEPPSPGCPVEPDRSSCKKKESALSTRDRLLLDKIKSYYENAEHHDAGFSVRRRESLSYIPKGLVRNSISRFNSLPRPDPEPVPPVGSKRQVGSRPTSWALFELPGPSQAVKGDPPPISDAEFRPSSEIVKIWEGMESSGGSPGKGPGQGQANGFDLHEPLFILEEHELGAITEESATASPESSSPTEGRSPAHLARELKELVKELSSSTQGELVAPLHPRIVQLSHVMDSHVSERVKNKVYQLARQYSLRIKSNKPVMARPPLQWEKVAPERDGKSPTVPCLQEEAGEPLGGKGKRKPVLSLFDYEQLMAQEHSPPKPSSAGEMSPQRFFFNPSAVSQRTTSPGGRPSARSPLSPTETFSWPDVRELCSKYASRDEARRAGGGRPRGPPVNRSHSVPENMVEPPLSGRVGRCRSLSTKRGRGGGEAAQSPGPLPQSKPDGGETLYVTADLTLEDNRRVIVMEKGPLPSPTAGLEESSGQGPSSPVALLGQVQDFQQSAECQPKEEGSRDPADPSQQGRVRNLREKFQALNSVG

SEQ ID NO: 2682 - DNA, 2213 bp, Homo sapien
gctctagaactagtggatcccccgggctgcaggaattctctaaagaagcccctgggagcacagctcatcaccatggactggacctggaggttcctctttgtggtggcagcagctacaggtgtccagtcccaggtgcagctggtgcagtctggggctgaggtgaagaagcctgggtcctcggtgaaggtctcctgcaaggcttctggaggcaccttcagcagctatgctatcagctgggtgcgacaggcccctggacaagggcttgagtggatgggagggatcatccctatctttggtacagcaaactacgcacagaagttccagggcagagtcacgattaccgcggacgaatccacgagcacagcctacatggagctgagcagcctgagatctgaggacacggccgtgtattactgtgcgaaaaccgggatcctggggccgtatagcagtggctggtacccgaactcggactactactactacggtatggacgtctggggccaagggaccacggtcaccgtctcctcagggagtgcatccgccccaacccttttccccctcgtctcctgtgagaattccccgtcggatacgagcagcgtggccgttggctgcctcgcacaggacttccttcccgactccatcactttctcctggaaatacaagaacaactctgacatcagcagcacccggggcttcccatcagtcctgagagggggcaagtacgcagccacctcacaggtgctgctgccttccaaggacgtcatgcagggcacagacgaacacgtggtgtgcaaagtccagcaccccaacggcaacaaagaaaagaacgtgcctcttccagtgattgctgagctgcctcccaaagtgagcgtcttcgtcccaccccgcgacggcttcttcggcaacccccgcagcaagtccaagctcatctgccaggccacgggtttcagtccccggcagattcaggtgtcctggctgcgcgaggggaagcaggtggggtctggcgtcaccacggaccaggtgcaggctgaggccaaagagtctgggcccacgacctacaaggtgaccagcacactgaccatcaaagagagcgactggctcagccagagcatgttcacctgccgcgtggatcacaggggcctgaccttccagcagaatgcgtcctccatgtgtgtccccgatcaagacacagccatccgggtcttcgccatccccccatcctttgccagcatcttcctcaccaagtccaccaagttgacctgcctggtcacagacctgaccacctatgacagcgtgaccatctcctggacccgccagaatggcgaagctgtgaaaacccacaccaacatctccgagagccaccccaatgccactttcagcgccgtgggtgaggccagcatctgcgaggatgactggaattccggggagaggttcacgtgcaccgtgacccacacagacctgccctcgccactgaagcagaccatctcccggcccaagggggtggccctgcacaggcccgatgtctacttgctgccaccagcccgggagcagctgaacctgcgggagtcggccaccatcacgtgcctggtgacgggcttctctcccgcggacgtcttcgtgcagtggatgcagagggggcagcccttgtccccggagaagtatgtgaccagcgccccaatgcctgagccccaggccccaggccggtacttcgcccacagcatcctgaccgtgtccgaagaggaatggaacacgggggagacctacacctgcgtggtggcccatgaggccctgcccaacagggtcaccgagaggaccgtggacaagtccaccgagggggaggtgagcgccgacgaggagggctttgagaacctgtgggccaccgcctccaccttcatcgtcctcttcctcctgagcctcttctacagtaccaccgtcaccttgttcaaggtgaaatgatcccaacagaagaacatcggagaccagagagaggaactcaaaggggcgctgcctccgggtctggggtcctggcctgcgtggcctgttggcacgtgtttctcttcccgcccggcctccagttgtgtgctctcacacaggcttccttctcgaccggcaggggctggctggcttgcaggccacgaggtgggctctaccccacactgctttgctgtgtatacgcttgttgccctgaaataaatatgcacattttatccatg

SEQ ID NO: 2683 - protein, 627 aa, Homo sapien [sequence omitted]

SEQ ID NO: 2684 - DNA, 1869 bp, Homo sapien
agatgaccttttaggaaagtggtgcatttattaattgaactgaagaagtagttcagttgaattcagtatcataattcacaaattggaggctgttgattttgattcatttaaggtttaaaatctttattaattgcaaacagtgcaattatttatacttcacagtgccttcccagaccttccaccttaggttctgctgcaaaaagcaccagtgctgaagatgctgcaagcaccaaatcatagctcataaaatcaggtcctgagatagttacccataaagaggaatcctttgagtgtatgccattggtgagccgatgagcatggaccatagaagggctcaatgtagaaggtaaaattggcaaatcataattgagaaatatgaaatgtattcccatacataatatggtatagggtgtaatgtacctgcttttgatcacttttcattttaaagtgctattcacttgatcttaaatgttccatgaactgttaaatttcttaagttacatagttactacaccacatttatgtgtatgttatgttttaatagtcaatgataggtatgtacaattgataatataaaggggctcattgaaacttgagagcctgttgagttttggttagttgtagattgcatttttataaaaaaaaatacagatagattgatgataatagatattggggcattgtttctgtctcatgagaattcttttattcattaccataagccttcactgatactataagcattattttaaatgacgctgatcttaagtctgaaataaatggaaagcagaaaaggtgagccagttgatttgaatgcattggatattagtgttagaaacaatgtatagtttagattgaaactgaactgacttatttagcacttaaacaaaaatttgacaatgtttttagttttttttaagacagcttagtgtggtgatacttagaattctatggtttgatgtttcttttagaaatgagaagtatagttttattttttaatataaaaaatggttttaatactaaaactagtaatttgatactagttgtttataaacattgtaaaatatatcttttaaacaaattatcttggtagttaattcataagggtgggtttgggtaggaatagcagagtactttcagagggaaaggggagtcattcagaagtgatagcattttatttgtttgaatactctgccagtaaaatcagctgtacttagaaagttatctgttgtgtagaataatgatgtagagtttactaatcagtgaggatgtcttgtttttattttctgcaaactctgcctcactttaaaatgcattataacaatacctaattaaagataattttggctctgaaagttaccttattttttgttgagttagtgacttcatttttcttgccacaatataagcttttgagggatttttttaaattggtgcttttaataagcaaataaatcccagggttttattttcttcagtgatacccctatagaaactcttaaatgtatttgcgcatatatatatatatattttcttatgcatgctcgatgcattttcgtcctgagaaaaatgttctctacagaaactacccgtgtgtaaaaagaagattggcttaaaatggctactgtgatgggaacagtgtcttagggagatgcagcttggacttgaggtaaattgaatactttacaactgtggtttagagtttgctttaatgacattgtatgtaaaaggtcacatgattgctgtaattttgtattcattatggtttcctcaataaatgtacattgatgacttattaaaaaaaatctatgtcgggtgcggagaaagaggtaatgaaatggcaggaattcgatatcagcttatcatacc

SEQ ID NO: 2685 - protein, 12 aa, Homo sapien
MKWQEFDISLSY

SEQ ID NO: 2686 - DNA, 3446 bp, Homo sapien
cagtttcagggtctcgccggcagccccagccggcgggcgcggagcgggcagcggggcccggatcgcaggctcctctgggggccccggagttgggaagcggcgtccgggagcccccggaggaggatgggctgcagacacagcaggctgagcagctgcaaacccccgaaaaagctataactgtccagctctgtgcatcagaggaggctgagcggcaccagaaggatataaccagaattctccagcaacatgaggaggaaaagaagaaatgggcacaacaggtggagaaggaaagggagctagagcttcgagacagactggatgagcagcaaagggtcctggaaggaaagaatgaagaggccctgcaagtcctccgggcctcatatgaacaggagaaagaagcgcttacccactctttccgggaggccagttctacccagcaggagaccatagacagactgacctcacagctggaggctttccaggccaaaatgaagagggtggaggagtccattctgagccgaaactataagaaacatatccaggattatgggagccccagccagttctgggagcaggagctggagagcttacactttgtcatcgagatgaagaatgagcgtattcatgagctggacaagcggctgatcctcatggaaacagtgaaagagaaaaatctgatattggaggaaaaaattacgaccctgcaacaggaaaatgaggacctccatgtccgaagccgcaaccaggtggtcctgtcaaggcagctgtcagaagacctgcttctcacgcgtgaggccctggagaaggaggtgcagctgcggcgacagctccagcaggagaaggaggagctgttgtaccgggtccttggggccaatgcctcgcctgccttccctctggcccctgtcactcccactgaggtctctttcctcgccacatagggtgcagggcctgggcccaccacgacgcctgaagtcacagctccttccaaggtttttctggagaagacagcaggagcctctcagttcttttccaggaaggaacgagggtgggagcgagatggagatcctgggtgtgtgcccagtgagccctggggccttgagttacatggaatcacccacagggttttggaggccccgagaagcgtcttcccttgagttggccaagggaataagcaagaggagacatttcctccctgccccagcactctgtcccaatccgagaagttccgaggctttcccaggggcagtctgtgtcacgctggccatttgacataaaggagacagcccctggtcccagcttgtcagctctgctgccgacttgctgacttatcaacttcctctaggtgtttccactccaccctggcctgctcagagcctcagtttacccctgcattaaaatggtggggggactggtcaaaggactcttatgtcactgcagtgtcccattctaggattgtctgaaggccagagtaggggttggggggagtgtggacaaaccccgcaaatcagagtggggaaggtgagtggtagagagggggtctctgaaggcccttggggctgacagggccaggcagcctccccagctgaggcatcattcctgggccagagtcgtgtccaccaagggacagtagccagagctcctcttcctttaccaggcaaggtgcatcccctcagccctcctggcccttcagtcttggtgccacctgggcacaggggcaagcttggtggttgtgagtccattcatctatcagagctggaacctcatccctgcacagatgaggaaaccaaggcatggagcagttcccagagtcgaatctagatctcatctgtcatccgggtcttatcctttgctctgtttttctcttcaggctctggaaaatcagatctgtgacttaatcctctccctggccctcacccacttagtttctttttcattcctgctccctgccttaactcctcctcccactgcccctgatcccaggcccaggcttttacaacctggtgctcagcttccccatcagtgaaaaggggtggctagagtaactaacctcagcaggccctccagtcctgatagtctgtggatttcggatccttctcaggaagcttcatgtctaatggagactataattataactcctgttctgcatagagcatttgcatcaaaggctttccatacccctccctcccctggtcctcataagatccttgaagcaggttcctattcctcattggcaacatggcaaacagatcacaggagtcaaagggccttgctcaaggtccccagcttcagccccaggccctaagccagcgtcagaacagtcaatctgcatttttcatcagtcattctatagtgacatcatcccagactgccttctgtattcccctgtgtacagtctccttctgtttctaggtttagaagttcagaggtgactgtgtttctccatttccacagccaaatgggggaagaggtgaggctaggggagtgctgtgctgattctccagccatggtcagacaggtcacccaggagcctcgaggaaagccctggagggaatcacatgtgtactttttcatgaagctttttgcaaagcacatctgtgatacactagtttattgaactaatgtccaggagtagacatgattggtggccaagttatttggggacacctaaacagatcagtgacctgaatgacttctcagaacctttaatatgccaatgtgtgtggcaaacttacaagaagggagctaagtatccagcctctcccaaacctctttgaacaaagcttctgtccctcccacacctctcacctcacaggcacatcaggctgcagaatgcgctttagaaagcattgttttagtccaggcacagtggctcacgcctgtaatcccagcactttgggaggccgaggtgggtggatcacaaggttgggagattgagaccatcctggctaacacagtgaaaccctgtctctactaaaaaaatacaaaaaattagcttggcgtggtggtgggcgcctgtagtcccagcagcttgggaggctgaggctggagaatggtgtgaacccaggaggcggagcttgcagtgagccaagatcgcgccactgcactccagcccgggtgacagagcaagactccgtctcaaaaaaaagaaaagaaaaaagaaagcattgttttaattgagaggggcagggctggagaaggagcaagttgtggggagccaggcttccctcacgcagcctgtggtggatgtgggaaggagatcaacttctcctcactctgggacagacgatgtatggaaactaaaaagaacatgcggcaccttaaaaaaaaaaaaaaaaaaaaaaaaaaaaaaaaaaaaaaaaaaaaaaaaaaaaaaaaaaaaaaaaaaaaaaaaaaaaaaaaaaaaaaaaaaaaaaaaaaaaaaaaaaaaaaaaaaaaaaaaaaaaaaa

SEQ ID NO: 2687 - protein, 311 aa, Homo sapien
VSGSRRQPQPAGAERAAGPGSQAPLGAPELGSGVREPPEEDGLQTQQAEQLQTPEKAITVQLCASEEAERHQKDITRILQQHEEEKKKWAQQVEKERELELRDRLDEQQRVLEGKNEEALQVLRASYEQEKEALTHSFREASSTQQETIDRLTSQLEAFQAKMKRVEESILSRNYKKHIQDYGSPSQFWEQELESLHFVIEMKNERIHELDKRLILMETVKEKNLILEEKITTLQQENEDLHVRSRNQVVLSRQLSEDLLLTREALEKEVQLRRQLQQEKEELLYRVLGANASPAFPLAPVTPTEVSFLAT

SEQ ID NO: 2688 - DNA, 1856 bp, Homo sapien
cgagcttgatgtattgctcagtattcacttagaagggtttctttctctttggcctagtttgtgaagggatcttcctttggactttctctaagttgggagaagaacattcttttcaatggagctcatcttctatctctagggtctgttcagcctttcatctatccatccttcctctttattggtagaagaaacagtggagagtagccacttctggttctagcacttctcttttgttaagatagggtttggatttagtatgaagctttggctaaaacccttgggtttgccttagaacactgacactaagaacctggaatgacatggggaggacaaagagagctcaagaggaatgctttgtgagaagtggattctctccgtgtccctgccccccacccaaacttgaactatacctattacatttccaggcagtatccctaagatgagatcctggagaaaggactaggggaagtatctttctggatgcttgtggtcccagaagggtactttctgtgtcataccatgccacttctttaagctcttcagggcagccaaagccagcccttttctcctactgcccccaggagaaatagcactcttctcccttcccccagatggcagggctctggcctccctacacctcataccctgcctgcctcctccaggaggaatctccggggccccttcctgactctccccaccttcgccacttgtctctaggctatgggacaatcatcccattcaccacttgacatccttgacatccttgactttcattcccccaacctccagcaggttggccccaatcctcttcacctctgtgttttcttctagaagatgcattttgggtctgagaggagcattttcctggaaggccatcttttaaggcccctgcttgctgtcatagtgcagagcagaaacttgcacactatttagagagctcccttcccacctctctgcccagccttgttacctcacttctgctctggccatggctgtgaagggcccagccagctccctgttttgatgttctgtgcaacagctccggggtcttgtgactggagatcctcaacaggccctggagccaggactggagtcttggcagctgatgagcagcaccttgccggccaggaggagctgatgctgacgatctccccaacatctgaaggcttaaagaacattgtcgttcttcagccctccttgcttctctcaatacaataagacattgcagaagcaaaagggtggcctctgctccaggcaaggcagctggctctgtctggggcgtcggcctggggcttgggtgccacgtgctgagattgcatagtcaaaacagccatttttgccaacaatagcttgtggctccccacattttcctaccctgcactcaagggccagaccactctctgcatggaccagaccatcttcccaaacccatggtgctttttccccaactcaacctagactccaaggtggggagggatgggtcagaggccatagtggcccctggataatcctgacgtggggtggagtggggtgaggcagagggagcagccccaacacctgcactgggccatctatgggaaagaacacgggtcgagtgcagtcgagttgtctggccatctgtatttggatctataactgtactttgcctggcgctgtgcgcaaggtcagaaaacttactgctagtacctagaaacacacaaggctgcccagccaaatcttaatgtaaagtagctagagccatggaagtacagtatgaattaaaaagaaaaaagtattgaactcctaaaaaaaatctatgtcgggtgcggagaaagaggtaatgaaatggcaggaattcgatatcagctatcatacct

SEQ ID NO: 2689 - protein, 11 aa, Homo sapien
MKWQEFDISYH

SEQ ID NO: 2690 - DNA, 1843 bp, Homo sapien
ggcacgagcaagacatcaactgaatgaggattttaaaaaatggtatataagcataggacaagggctatgtttgtttgtttttcaaaagtgctttgaagataacagcctttaggtttgagttatttcacttttcataatttttaagtagcttatatataatggtggtaccataggattttcttttttcaaatgactgtcggcagaaacagtgggcactgactcaccttttgagttttagcagagaattatttatttctttacaatgcactttctaacccattgtagctatattagcattatcttttaaaaaagacatgcttttgtatttaaatattgtaggatttaagtgtctttctcaaaatagcttattcctttctgaaagaaaatgagggaaatactctgaattattaggagacttaaacccaatatttaaatatgctattttataacactgcatcagttttaggagttgcatctctcctgctggctcttttatatttgagcaagatcagtgtagaatatgtgtttagaaacttgtctgttgtctcagtttagtgaaaaggaggtgctgcatgtgcctgaattaaaaccaagaaatttttccaagccaaatgcagccttagtgatgagagatttaattctccattgtcaccttttagcttttatgattgcttagttttttctgaaggatgtctgcattgtaaaactatggactaaaacctaaaaaacagaatcctcaaaaactttgctgtatgtgttttaacattttagagaacagtatgttgaataactaaggtatgtaacttgaataggaaaaatgtccatcaaatgcaccttggaaaatcacagtaggtagaaggctgtgttaaccgtttgtgtcttattaacatccttaagttaattttgaatttttgacagttttgagggaaaagacctatggaacctaatgtgaagtatttcgtatgttaactggtgttgagttgaagatttttactgtgtataagcagatatcatttgaatgataaaaatgtcattaacctgctgtcttaagatgttcacacaaatatggagagtaattctacaatataaaaatatttattttaatactgagtttcagttaagtcataaacagtgttaaaactcttgggaaggtgtaggggttttttgtttgtcatttttaaaattgaaactgtgtcatacagtgtttcacgtctctgaaattgggattataatagcactattttgatgtagctctaccgatactatgtggtaatgctattttgttttactaacaagctctggaatatttagcagtcattttcactggcacaagagccttttgtatgttattcaatttaaacttttaaaccaaaaattttatggtccagtgtctttggcaaaaagatgctggagggaatgtaacatacaattaatatgtggttatatatatatataaaaagacacaaattgccatgttatggttctgccttgaaacagcacaatgaagtgtatcagtatattctgtgattatgaaacttatatgttgtgttgttttgtgtcttctgttgcctgtcctttgggccagatgtgggccagttaaatgcagttatcatctcattaaatacagatgcagataaaatatctttagtgctgcaacattttacctaactttttgtatgttttcatgactgtgtgttattttccaaagctgttcctacctcaccatgaggctttatggattgttatgtattataaatgttctatatgagacagactactgtgtttcttctcatttattaaaagttaagtagaaaaataaactaattttaatatctaaaaaaaa

SEQ ID NO: 2691 - DNA, 1694 bp, Homo sapien
gcggccgcgccccgccgccaccatgagggccgagggcctcggcggcctggagcgcttctgcagcccgggcaaaggccgggggctgcgggctctgcagcccttccaggtgggggacttgctgttctcctgcccggcctatgcctacgtgctcacggtcaacgagcggggcaaccactgcgagtactgcttcaccaggaaagaaggattgtccaaatgtggaagatgcaagcaggcattttactgcaatgtggagtgtcagaaagaagattggcccatgcacaagctggaatgttctcccatggttgtttttggggaaaactggaatccctcggagactgtaagactaacagcaaggattctggccaaacagaaaatccacccagagagaacaccttcggaaaaattgttagctgtgaaggagtttgaatcacatctggataagttagacaatgagaagaaggatttgattcagagtgacatagctgctctccatcacttttactccaagcatctcgaattccctgacaatgatagcctcgtagtactctttgcacaggttaactgtaatggcttcacaattgaagatgaagaactttctcatttgggatcagcgatatttcctgatgttgcattgatgaatcatagctgttgccccaatgtcattgtgacctacaaagggaccctggcagaagtcagagctgtacaggaaatcaagccgggagaggaggtttttaccagctatattgatctcctgtacccaacggaagatagaaatgaccggttaagagattcttatttctttacctgtgagtgccaggagtgtaccaccaaggacaaggataaggccaaggtggaaatccggaagctcagcgatcccccaaaggcagaagccatccgagacatggtcagatatgcacgcaacgtcattgaagagttccggagggccaagcactataaatcccctagtgagctgctggagatctgcgagctcagccaggagaagatgagctctgtgtttgaggacagtaacgtgtacatgttgcacatgatgtaccaggccatgggtgtctgcttgtacatgcaggactgggaaggagccctgcaatatggacagaaaatcattaagccctacagtaagcactatcctttgtactccctcaacgtggcctccatgtggttgaagctagggagactctacatgggcctggaacacaaagccgcaggggagaaagccctgaagaaggccattgcaatcatggaagtagctcacggcaaagatcatccatatatttctgagatcaaacaggaaattgaaagccactgaaactatgcagcatttcagttttcatttaaacacttagttcagaaaccttaaaggatttgaatatttcaaattgcacacgtcactccagcatctctgtaaaataattggaatgaaaatacttcttgcacttaaacactgcacatgccgtactttgaggttagtctgaatcttgaactttaataccaaattaattttgaatgcttttgtttcctaagagataatggcatggtttcatatgttatactttggacagagttttaaaaatggaattattttttctttcatgcctcttgtaatgttctgaacaaacttgaatgatgaaagtattaaagagatatcagtaaaaaaaaaaaaaaaaaaaaaaaaaaaa

SEQ ID NO: 2692 - protein, 433 aa, Homo sapien
MRAEGLGGLERFCSPGKGRGLRALQPFQVGDLLFSCPAYAYVLTVNERGNHCEYCFTRKEGLSKCGRCKQAFYCNVECQKEDWPMHKLECSPMVVFGENWNPSETVRLTARILAKQKIHPERTPSEKLLAVKEFESHLDKLDNEKKDLIQSDIAALHHFYSKHLEFPDNDSLVVLFAQVNCNGFTIEDEELSHLGSAIFPDVALMNHSCCPNVIVTYKGTLAEVRAVQEIKPGEEVFTSYIDLLYPTEDRNDRLRDSYFFTCECQECTTKDKDKAKVEIRKLSDPPKAEAIRDMVRYARNVIEEFRRAKHYKSPSELLEICELSQEKMSSVFEDSNVYMLHMMYQAMGVCLYMQDWEGALQYGQKIIKPYSKHYPLYSLNVASMWLKLGRLYMGLEHKAAGEKALKKAIAIMEVAHGKDHPYISEIKQEIESH

SEQ ID NO: 2693 - DNA, 1482 bp, Homo sapien
aactggcgcaggggccgctgcggcaaggactggttgccataaaggaagcccacgacatagagaccaggcttaatgaggtggagaagctgctgaagacgatcataagcatgccctgtaaatattctagatcggaagttgtgctcaccttcttcgaaagatctcctctggatcaggtgttaaaaaatgataatgtgcataaaattcaacccagctttcaaagtccagtcaaaatatcagaaatcatgaggtccaatggattttgtttagcaaataccgaaacaatagttattgaccacagtataccaaatggaagagaccagcagctgggcgtggaccaaacagagcatttatttgagaatggcagtgagtttccctcagagctggaggacggggacgacccagcagcctacgtcaccaacctgtcatattaccacctggtccccttcgagacagacatttgggactgaacctctctatcaggcctcccccgcctcagctgttcactgccagctctgatgctgtccactgtgctggcccccatggtcacagctgctgccccagctctggaactcccagacgtcccaggccccactgacgccaggaggcctgggtgtcctgcaagtggagcagcaggggctcctagtgggccaggctgaccgcagagtctccagcaagctgaggtcacagccggaggccacagggcctgtgttctgagggtcttcactccctgcttggtgcccacagggctgcgcactgccagggcagggacagttcctgtggggctcgctctcactgctactgcttcctgggaggtgcatccctcttggtgaagtggcctagtgccccccagccaccctgactccccaccattccctcccacggcaaacgcacaaaacgtcttgagggagattttgacaagtcacccattccaggtgccacaggcaggggatgtttagtaatccaggatttctctgagaactgggatatgtggcctttttttttttctttttatcttttatctggaaactgggtttgggtcaaccccaggagtatttgcagaaggcccagcacagtggggggtattggctgcagggcagggaaggcattgccgactagataaccgtgtgagcttggactgagcgttggtggttcttcccaaaggaaaggaatttcttcccggcctgccaggtctctgggccttcagcgcgggtcctggtgctgcggccacaccaccctggggtgctcattgacagagctgccataatgaacttgaaaggacgggaatcacgagggaagctggggctcccctgcccacaggagaggatccccgttcttcaagcttctctgctcagtgtctactaacgaccgacatttgctaatgtaaataatagtaaattattgagaattctaattcttttacacagtctgtttttaatctattttaattaaataaaatctatgactccaaaaaaaaaaaaaaaa

SEQ ID NO: 2694 - DNA, 4623 bp, Homo sapien; identical to SEQ ID NO: 2561

SEQ ID NO: 2695 - DNA, 3635 bp, Homo sapien
agatggctgccgacagtgagcccgaatccgaggtatttgagatcacggacttcaccactgcctcggaatgggaaaggtttatttccaaagttgaagaagtcttgaatgactggaaactgattggaaactctttgggaaagccactcgaaaagggtatatttacttctggcacatgggaagagaaatcagatgaaatttcctttgctgacttcaagttctcagtcactcatcattatcttgtacaagagtccactgataaagaaggaaaggatgagttattagaggatgttgttccacaatctatgcaagatttgctgggtatgaataatgactttcctccaagagcacattgcctggtaagatggtatgggctacgtgagttcgtggtgattgcccctgctgcacacagtgacgctgttctcagcgaatctaagtgcaaccttcttctgagttctgtttctattgccttgggaaacactggctgtcaggtgccactctttgtgcaaattcaccacaaatggcgaagaatgtatgtaggagaatgtcaaggtcctggtgtacgaactgatttcgaaatggttcatcttagaaaagtgccaaatcagtacactcacttatcaggtctgctggatatcttcaaatcaaagattggatgtcctttaactccattgcctccagttagtattgctattcgatttacctatgtacttcaagattggcagcagtatttttggcctcagcaacctccagacatagatgcccttgtaggaggagaagttggaggcttggagtttggcaagttaccatttggtgcctgcgaagatcctattagtgaactccatttagctactacatggcctcatctgaccgaagggatcattgtggataatgatgtttattctgatttggatcctattcaagctccacattggtctgttagagttcgaaaagctgagaatcctcagtgtttgctaggtgattttgtcactgaattttttaaaatttgccgtcgaaaggagtcaactgatgagattcttggacgatctgcatttgaggaagaaggcaaagaaactgctgatataactcatgctttgtcaaaattgacagagccggcatcagttccaattcataaattatcagtttcaaatatggtacacactgcaaagaagaaaatccgaaaacacagaggtgtagaggagtcaccgctaaataatgatgttcttaatactattctcctgttcttattccctgatgctgtttctgagaaaccattagatggaactacttcaacagataataataatcctccatcagagagtgaagactataatctctacaatcagttcaagtctgcaccatctgacagtttaacatacaaactggctttgtgtctctgtatgatcaatttttaccatggagggttgaaaggagtggcacacctctggcaggaatttgttcttgaaatgcgtttccgatgggaaaacaactttctgattccaggattagcaagtggacccccagatctgaggtgttgtttactgcatcagaaactacagatgttaaattgttgtattgaaagaaagaaggcacgtgatgaggggaaaaagacaagtgcttcagatgtcactaatatatatccaggggatgctggaaaagcaggagaccagttggtgccagataatctaaaagaaacagataaggaaaagggagaggtaggaaaatcttgggattcctggagtgacagcgaagaagaattttttgaatgcctaagtgatactgaagaacttaaaggaaatggacaagagagtggcaagaaaggaggacctaaggagatggcaaatttaaggccggaaggacggctctatcagcatgggaaacttacactgctgcataatggagaacctctctacattccagtaacccaggaaccagcacctatgacagaagatctgctagaagagcagtctgaagttttagctaaattaggtacatcggcagagggggctcaccttcgagcacgcatgcagagtgcctgtctgctctcagatatggagtcttttaaggcagctaatccaggttgctccctggaagattttgtgaggtggtattcaccccgggattatattgaagaggaggtgattgatgaaaagggcaatgtggtgctgaaaggagaactgagtgcccggatgaagattccaagcaatatgtgggtagaagcctgggaaacagctaagccaattcctgctagaaggcaaaggagactctttgatgatacacgggaagcagaaaaggtgctgcactatctggcaatccagaaacctgcagaccttgctcggcacctgttaccttgtgtgattcatgcagctgtactcaaggtaaaggaagaagaaagtctcgaaaacatttcttcagttaagaagatcataaagcagataatatcccattccagtaaagttttgcacttccccaatccagaagacaagaaattggaagaaatcattcaccagattactaatgtggaagctctcattgccagagctcggtcactaaaagccaagtttggaactgagaaatgtgaacaggaggaggaaaaggaagatcttgaaaggtttgtgagttgcctgctggagcagcctgaagtgttagtcaccggtgcaggaagaggacatgctggcaggatcattcacaagctgtttgtgaatgcccagagggctgcagctatgactccaccagaggaggaattgaagagaatgggctccccagaggaaagaaggcagaactccgtgtcagacttcccaccccctgctggccgggaattcattttgcgcaccactgtgccgcgccctgctccctactccaaagctctgcctcagcggatgtacagtgttctcaccaaagaggactttagacttgcaggtgccttttcatcagatacttccttcttctgattcttctagcattactcgttggtggcttcagagacagtgctgcctcctcctgagggagggaaggtaccagggagaacctgggaggtcctggagagggccctgtccagttgggtgatcaggaatcaaaccagcatcggaaagacttcccagcaccaagcttgagctgtgtcgtttcgtggagggggcagcgaggatgggcttgagctgttgagagatttctgccctagagatggcctttgtatatgggggggtggtggggggacacaaacacatcagacactccgtcctcacactggcaggacggtgttcatcgcattctcttctgtgaccagcctctaggctagcggctgcattcgtggtctgtgcaaacacttcgtggttctatatatcagcagcaagtgtgcaaaataaaggacctgttaactcagatttctggatattttggtggtagcttctagtcccagaatctgtgtttttaaaatactacatgacattctgtctattcaatcacctggtggtcatctttcttgtactaattaactgttgatgagcattttggatattctaggagaaagcctataatttcacatagtttctctttttcatgtaactgtaacctaaatgtattacttctgataaaactatatatcaaatgtcactgcaaattagttttatatctgtcatgtg

SEQ ID NO: 2696 - protein, 981 aa, Homo sapien
MAADSEPESEVFEITDFTTASEWERFISKVEEVLNDWKLIGNSLGKPLEKGIFTSGTWEEKSDEISFADFKFSVTHHYLVQESTDKEGKDELLEDVVPQSMQDLLGMNNDFPPRAHCLVRWYGLREFVVIAPAAHSDAVLSESKCNLLLSSVSIALGNTGCQVPLFVQIHHKWRRMYVGECQGPGVRTDFEMVHLRKVPNQYTHLSGLLDIFKSKIGCPLTPLPPVSIAIRFTYVLQDWQQYFWPQQPPDIDALVGGEVGGLEFGKLPFGACEDPISELHLATTWPHLTEGIIVDNDVYSDLDPIQAPHWSVRVRKAENPQCLLGDFVTEFFKICRRKESTDEILGRSAFEEEGKETADITHALSKLTEPASVPIHKLSVSNMVHTAKKKIRKHRGVEESPLNNDVLNTILLFLFPDAVSEKPLDGTTSTDNNNPPSESEDYNLYNQFKSAPSDSLTYKLALCLCMINFYHGGLKGVAHLWQEFVLEMRFRWENNFLIPGLASGPPDLRCCLLHQKLQMLNCCIERKKARDEGKKTSASDVTNIYPGDAGKAGDQLVPDNLKETDKEKGEVGKSWDSWSDSEEEFFECLSDTEELKGNGQESGKKGGPKEMANLRPEGRLYQHGKLTLLHNGEPLYIPVTQEPAPMTEDLLEEQSEVLAKLGTSAEGAHLRARMQSACLLSDMESFKAANPGCSLEDFVRWYSPRDYIEEEVIDEKGNVVLKGELSARMKIPSNMWVEAWETAKPIPARRQRRLFDDTREAEKVLHYLAIQKPADLARHLLPCVIHAAVLKVKEEESLENISSVKKIIKQIISHSSKVLHFPNPEDKKLEEIIHQITNVEALIARARSLKAKFGTEKCEQEEEKEDLERFVSCLLEQPEVLVTGAGRGHAGRIIHKLFVNAQRAAAMTPPEEELKRMGSPEERRQNSVSDFPPPAGREFILRTTVPRPAPYSKALPQRMYSVLTKEDFRLAGAFSSDTSFF

SEQ ID NO: 2697 - DNA, 2836 bp, Homo sapien
acgtcacgcggccgttacggcgctcaggcgtctcgacgcgcgcgatttaaaaccagctcaggagacgccaaggaaagatgggacctcccggcccagcactgccagccacaatgaataactcttcttcagagacgcgaggacacccccacagtgcctcctctccttcagagcgtgtgttcccgatgcccctgcccaggaaggcgcctctcaatattcctggcaccccagtcctcgaagactttcctcagaatgacgatgagaaggagcggctgcagcggaggcgctcgagggtctttgatctgcagttcagcactgactcacctcgcttattggcctccccctccagcaggagtattgacatttcagctactatccccaagtttacaaacacgcagattacggaacattactccacctgtatcaaactgtccactgaaaataaaatcactaccaagaatgcttttggtttgcacttgattgattttatgtcagagattcttaaacagaaagacaccgaaccaaccaactttaaagtggctgcgggtactctggatgccagcaccaagatctatgctgtgcgcgtggatgccgtccatgccgatgtatacagagtccttggggggctgggcaaagatgcaccgtctttggaagaagtagaaggccatgttgctgatggaagtgctactgaaatgggaacaaccaaaaaggctgtaaagccaaagaagaagcacttacacagaactattgagcagaacataaacaacctcaatgtctccgaagcagatcggaagtgtgagattgatcccatgtttcagaagacagcagcctcatttgatgagtgcagcacagcaggggtgtttctgtccactctccactgccaggactacagaagtgaactgctgtttccctctgatgtccagactctctccacgggagaacctctcgagttgccagagttaggttgtgtagaaatgacagatttaaaagcgcccttgcagcagtgtgcagaagatcgccagatctgcccttccctggccgggttccagtttacacagtgggacagtgaaacacataatgagtctgtgtcggccctggtagacaagtttaagaagaatgaccaggtatttgacatcaatgctgaagttgacgagagtgactgtggagacttccccgatgggtccctgggggatgactttgatgccaacgatgaacctgaccacaccgcagttggggatcatgaagagttcaggagctggaaggagccctgccaggttcagagctgccaggaagaaatgatttcccttggggatggagacatcaggaccatgtgcccccttctgtctatgaaacctggagaatattcttatttcagtcctcggaccatgtcgatgtgggctggcccggatcactggcgctttaggcctcgacgcaaacaagatgctccttcccaatcagaaaacaaaaagaagagtacaaaaaaagattttgaaattgactttgaagatgatattgactttgatgtatattttagaaaaacaaaggctgctactattctgaccaagtccactttggagaaccagaattggagagctaccacccttcctacagatttcaactacaatgttgacactctggtccagcttcacctcaaaccaggcaccaggttacttaagatggcccagggccatagggtagagactgagcattatgaagaaattgaagactatgattacaacaaccctaacgacacctccaacttttgccctggattacaggctgctgacagtgatgatgaagatttggatgacttatttgtgggacctgttgggaactctgacctctcaccttatccttgccatccacctaagacagcacaacagaatggtgacactccagaagcccaaggattagacatcacaacatatggggagtcaaacttggtagctgagcctcagaaggtaaataaaattgaaattcactatgccaagactgccaaaaagatggacatgaagaaactgaagcagagcatgtggagtctgctgacagcgctctccggaaaggaggcagatgcagaggcaaaccacagggaagctggaaaagaagcggccctggcagaagtggctgacgagaagatgcttagcgggctcacgaaggacctgcagaggagcctgccccctgtcatggctcagaacctctccatacctctggcttttgcctgtctcctacatttagccaatgaaaagaatctaaaactggaaggaacagaggacctctctgatgttcttgtgaggcaaggagattgagttcactatggagaagtcagcagcaggaggcccatcccttactcagttgccgggacatccccagtctcgggggaagaagatgccatgggcttatacccaggctgtagccaactaccaacgtgcctgtttgtttgttgctctttccttctctccatcatagtctgggtgccagcgccctgaagctccgtgctcaactgattaaactttactgccctatggtgaccatctaggagaggggagggcagagggggtgagggtactattctggattgagaaaacctatatccattctttatatcaatgtatagttttagtctcctaaattgatctgttattttccaaactattctcttgtagaaaattttccagtgggcacttaatggtgcccttgaagaacttcctaatccatgtacataaaatacatcatatgtacacttataaatgtatatagaatgctcaaaaataaaattcttaataatagaactggcaaaataaaaaaaaaaaaaaaaaaaaaaaaaaaaaaaaaaaaaaaa

SEQ ID NO: 2698 - protein, 741 aa, Homo sapien
MGPPGPALPATMNNSSSETRGHPHSASSPSERVFPMPLPRKAPLNIPGTPVLEDFPQNDDEKERLQRRRSRVFDLQFSTDSPRLLASPSSRSIDISATIPKFTNTQITEHYSTCIKLSTENKITTKNAFGLHLIDFMSEILKQKDTEPTNFKVAAGTLDASTKIYAVRVDAVHADVYRVLGGLGKDAPSLEEVEGHVADGSATEMGTTKKAVKPKKKHLHRTIEQNINNLNVSEADRKCEIDPMFQKTAASFDECSTAGVFLSTLHCQDYRSELLFPSDVQTLSTGEPLELPELGCVEMTDLKAPLQQCAEDRQICPSLAGFQFTQWDSETHNESVSALVDKFKKNDQVFDINAEVDESDCGDFPDGSLGDDFDANDEPDHTAVGDHEEFRSWKEPCQVQSCQEEMISLGDGDIRTMCPLLSMKPGEYSYFSPRTMSMWAGPDHWRFRPRRKQDAPSQSENKKKSTKKDFEIDFEDDIDFDVYFRKTKAATILTKSTLENQNWRATTLPTDFNYNVDTLVQLHLKPGTRLLKMAQGHRVETEHYEEIEDYDYNNPNDTSNFCPGLQAADSDDEDLDDLFVGPVGNSDLSPYPCHPPKTAQQNGDTPEAQGLDITTYGESNLVAEPQKVNKIEIHYAKTAKKMDMKKLKQSMWSLLTALSGKEADAEANHREAGKEAALAEVADEKMLSGLTKDLQRSLPPVMAQNLSIPLAFACLLHLANEKNLKLEGTEDLSDVLVRQGD

SEQ ID NO: 2699 - DNA, 2428 bp, Homo sapien
cccacgcgtccggtctttgatgaagttgatacagatcaatctggtgtcttgtctgacagagaaatccgaacactggctaccagaattcacgaactgccgttaagtttgcaggatttgacaggtctggaacacatgctaataaattgctcaaaaatgcttcctgctgatatcacgcagctaaataatattccaccaactcaggaatcctactatgatcccaacctgccaccggtcactaaaagtctagtaacaaactgtaaaccagtaactgacaaaatccacaaagcatataaggacaaaaacaaatataggtttgaaatcatgggagaagaagaaatcgcttttaaaatgattcgtaccaacgtttctcatgtggttggccagttggatgacataagaaaaaaccctaggaagtttgtttgcctgaatgacaacattgaccacaatcataaagatgctcagacagtgaaggctgttctcagggacttctatgaatccatgttccccataccttcccaatttgaactgccaagagagtatcgaaaccgtttccttcatatgcatgagctgcaggaatggagggcttatcgagacaaattgaagttttggacccattgtgtactagcaacattgattatgtttactatattctcattttttgctgagcagttaattgcacttaagcggaagatatttcccagaaggaggatacacaaagaagctagtcccaatcgaatcagagtatagaagatcttcatttgaaaaccatctacctcagcatttactgagcattttaaaactcagcttcacagagatgtctttgtgatgtgatgcttagcagtttggcccgaagaaggaaaatatccagtaccatgctgttttgtggcatgaatatagcccactgaccaggaattatttaaccaacccactgaaaacttgtgtgttgagcagctctgaactgattttacttttaaagaatttgctcatggacctgtcatcctttttataaaaaggctcactgacaagagacagctgttaatttcccacagcaatcattgcagactaactttattaggagaagcctatgccagctgggagtgattgctaagaggctccagtctttgcattccaaagccttttgctaaagttttgcactttttttttttcatttcccatttttaagtagttactaagttaactagttattcttgcttctgagtataacgaattgggatgtctaaacctatttttatagatgttatttaaataatgcagcaatatcacctcttattgacaatacctaaattatgagttttattaatatttaagactgtaaatggtcttaaaccactaactactgaagagctcaatgattgacatctgaaatgctttgtaattattgacttcagcccctaagaatgctatgatttcacgtgcaggtctaatttcaaagggctagagttagtactacttaccagatgtaattatgttttggaaatgtacatattcaaacagaagtgcctcattttagaaatgagtagtgctgatggcactggcacattacagtggtgtcttgtttaatactcattggtatattccagtagctatctctctcagttggtttttgatagaacagaggccagcaaactttctttgtaaaaggctggttagtaaattattgcaggccacctgtgtctttgtcatacattcttcttgctgttgtttagtttgttttttttcaaacaaccctctaaaaatgtaaaaaccatgtttagcttgcagctgtacaaaaactgcccaccagccagatgtgaccctcaggccatcatttgccaatcactgagaattagtttttgttgttgttgttgttgttgtttttgagacagagtctctctctgttgcccaggctggagtgcagtggcgcaatctcagctcactgcaacctccgcctcccgggttcaagcagttctgtctcagccttctgagtagctgggactacaggtgcatgccaccacaccctgctaatttttgtatttttagtagagacgggggttccaccatattggtcaggcttatcttgaactcctgacctcaggtgatccacctgcctctgcctcccaaagtgctgagattacaggcataagccagtgcacccagccgagaattagtatttttatgtatggttaaaccttggcgtctagccatattttatgtcataatacaatggatttgtgaagagcagattccatgagtaactctgacaggtattttagatcatgatctcaacaatattcttccaaaatggcatacatcttttgtacaaagaacttgaaatgtaaatactgtgtttgtgctgtaagagttgtgtatttcaaaaactgaaatctcataaaaagttaaatttttgtctgaaaaaaaaaaaaaaaaa

SEQ ID NO: 2700 - DNA, 1327 bp, Homo sapien
gtacgttcctcatgaaagggacgacgggagctgcatgaaagccgaagttatggaccgctagcatctgtcactggccaccggtttccgggagtaagcggcagctaccttacagccctgacacgagccgggtgctctctcttctcaccgcggcccacgtctcctcgctggctccggtggcctcgctgggtcgcgaggaggcggaggactgtactctgaggccaaaagccagagtcggccctgaacgcccacgactctcagggtccagaggccgtgagaccggccgcggctgaaaggtaaagaaaccaagtggaagagtgtttcctcctctggccgtaaagcagctgtccccgccctactccggaccgccccaaagactccatgggatggacctgagtcagccgaatcctagccccttcccttgggcctgctgtggtgctcgacatcagtgacagacggaagcagcagaccatcaaggctacgggaggcccggggcgcttgcgaagatgaagtttggctgcctctccttccggcagccttatgctggctttgtcttaaatggaatcaagactgtggagacgcgctggcgtcctctgctgagcagccagcggaactgtaccatcgccgtccacattgctcacagggactgggaaggcgatgcctgtcgggagctgctggtggagagactcgggatgactcctgctcagattcaggccttgctcaggaaaggggaaaagtttggtcgaggagtgatagcgggactcgttgacattggggaaactttgcaatgccccgaagacttaactcccgatgaggttgtggaactagaaaatcaagctgcactgaccaacctgaagcagaagtacctgactgtgatttcaaaccccaggtggttactggagcccatacctaggaaaggaggcaaggatgtattccaggtagacatcccagagcacctgatccctttggggcatgaagtgtgacaagtgtgggctcctgaaaggaatgttccagagaaaccagctaaatcatggcaccttcaatttgccatcgtgacgcagacctgtataaattaggttaaagatgaatttccactgctttggagagtcccacccactaagcactgtgcatgtaaacaggttcctttgctcagatgaaggaagtagggggtggggctttccttgtgtgatgcctccttaggcacacaggcaatgtctcaagtactttgaccttagggtagaaggcaaagctgccagtaaatgtctcagcattgctgctaattttggtcctgctagtttctggattgtacaaataaatgtgttgtagatga

SEQ ID NO: 2701 - protein, 158 aa, Homo sapien
MKFGCLSFRQPYAGFVLNGIKTVETRWRPLLSSQRNCTIAVHIAHRDWEGDACRELLVERLGMTPAQIQALLRKGEKFGRGVIAGLVDIGETLQCPEDLTPDEVVELENQAALTNLKQKYLTVISNPRWLLEPIPRKGGKDVFQVDIPEHLIPLGHEV

SEQ ID NO: 2702 - DNA, 2524 bp, Homo sapien
ccggggcggcggttgcatcagattctaggaagtgtctgtagccgcagctgcgggtccgggattcccagccatggcagattcctccgggcagcagggcaaaggccggcgtgtgcagccccagtggtcccctcctgctgggacccagccatgcagactccacctttacaacagcctcaccaggaacaaggaagtgttcatacctcaagatgggaaaaaggtgacgtggtattgctgtgggccaaccgtctatgacgcatctcacatggggcacgccaggtcctacatctcttttgatatcttgagaagagtgttgaaggattacttcaaatttgatgtcttttattgcatgaacattacggatattgatgacaagatcatcaagagggcccggcagaaccacctgttcgagcagtatcgggagaagaggcctgaagcggcacagctcttggaggatgttcaggccgccctgaagccattttcagtaaaattaaatgagaccacggatcccgataaaaagcagatgctcgaacggattcagcacgcagtgcagcttgccacagagccacttgagaaagctgtgcagtccagactcacgggagaggaagtcaacagctgtgtggaggtgttgctggaagaagccaaggatttgctctctgactggctggattctacacttggctgtgatgtcactgacaattccatcttctccaagctgcccaagttctgggagggggacttccacagagacatggaagctctgaatgttctccctccagatgtcttaacccgggttagtgagtatgtgccagaaattgtgaactttgtccagaagattgtggacaacggttacggctatgtctccaatgggtctgtctactttgatacagcgaagtttgcttctagcgagaagcactcctatgggaagctggtgcctgaggccgttggagatcagaaagcccttcaagaaggggaaggtgacctgagcatctctgcagaccgcctgagtgagaagcgctctcccaacgactttgccttatggaaggcctctaagcccggagaaccgtcctggccgtgcccttggggaaagggtcgtccgggctggcatatcgagtgctcggccatggcaggcaccctcctaggggcttcgatggacattcacggaggtgggttcgacctccggttcccccaccatgacaatgagctggcacagtcggaggcctactttgaaaacgactgctgggtcaggtacttcctgcacacaggccacctgaccattgcaggctgcaaaatgtcaaagtcactaaaaaacttcatcaccattaaagatgccttgaaaaagcactcagcacggcagttgcggctggccttcctcatgcactcgtggaaggacaccctggactactccagcaacaccatggagtcagcgcttcaatatgagaagttcttgaatgagtttttcttaaatgtgaaagatatccttcgcgctcctgttgacatcactggtcagtttgagaagtggggagaagaagaagcagaactgaataagaacttttatgacaagaagacagcaattcacaaagccctctgtgacaatgttgacacccgcaccgtcatggaagagatgcgggccttggtcagtcagtgcaacctctatatggcagcccggaaagccgtgaggaagaggcccaaccaggctctgctggagaacatcgccctgtacctcacccatatgctgaagatctttggggccgtagaagaggacagctccctgggattcccggtcggagggcctggaaccagcctcagtctcgaggccacagtcatgccctaccttcaggtgttatcagaattccgagaaggagtgcggaagattgcccgagagcaaaaagtccctgagattctgcagctcagcgatgccctgcgggacaacatcctgcctgagcttggggtgcggtttgaagaccacgaaggactgcccacagtggtgaaactggtagacagaaacaccttattaaaagagagagaagaaaagagacgggttgaagaggagaagaggaagaagaaagaggaggcggcccggaggaaacaggaacaagaagcagcaaagctggccaagatgaagattccccccagtgagatgttcttgtcagaaaccgacaaatactccaagtttgatgaaaatggtctgcccacacatgacatggagggcaaagagctcagcaaagggcaagccaagaagctgaagaagctcttcgaggctcaggagaagctctacaaggaatatctgcagatggcccagaatggaagcttccagtgagggggcacaggactgactttttaaaccattgtggactagtggctgctgtctgcctcagtgacaatgtcccagcgctcctatcatgtttacagtcacccttgggtcctaaattaagagttgtgttcatgtaggttcgtgtcgtcgttggctctgagacattgataataaatttttctcaacagtgaaaaaaaaaaaaaaaaaaaaaaa

SEQ ID NO: 2703 - protein, 748 aa, Homo sapien
MADSSGQQGKGRRVQPQWSPPAGTQPCRLHLYNSLTRNKEVFIPQDGKKVTWYCCGPTVYDASHMGHARSYISFDILRRVLKDYFKFDVFYCMNITDIDDKIIKRARQNHLFEQYREKRPEAAQLLEDVQAALKPFSVKLNETTDPDKKQMLERIQHAVQLATEPLEKAVQSRLTGEEVNSCVEVLLEEAKDLLSDWLDSTLGCDVTDNSIFSKLPKFWEGDFHRDMEALNVLPPDVLTRVSEYVPEIVNFVQKIVDNGYGYVSNGSVYFDTAKFASSEKHSYGKLVPEAVGDQKALQEGEGDLSISADRLSEKRSPNDFALWKASKPGEPSWPCPWGKGRPGWHIECSAMAGTLLGASMDIHGGGFDLRFPHHDNELAQSEAYFENDCWVRYFLHTGHLTIAGCKMSKSLKNFITIKDALKKHSARQLRLAFLMHSWKDTLDYSSNTMESALQYEKFLNEFFLNVKDILRAPVDITGQFEKWGEEEAELNKNFYDKKTAIHKALCDNVDTRTVMEEMRALVSQCNLYMAARKAVRKRPNQALLENIALYLTHMLKIFGAVEEDSSLGFPVGGPGTSLSLEATVMPYLQVLSEFREGVRKIAREQKVPEILQLSDALRDNILPELGVRFEDHEGLPTVVKLVDRNTLLKEREEKRRVEEEKRKKKEEAARRKQEQEAAKLAKMKIPPSEMFLSETDKYSKFDENGLPTHDMEGKELSKGQAKKLKKLFEAQEKLYKEYLQMAQNGSFQ

SEQ ID NO: 2704 - DNA, 6703 bp, Homo sapien
cgcacgctgccaaagcctggagaagtggaatctcgtcagcgccgctccctgcgcgggactcgcggaacggcactgagcatgctcagttgccggagcccgttctggtctcaagtaggaagctagtgcgctgtaaccgcatctgatctgggcgctccgggaagggcgagactggagcagagccgctgggcgccggagccgaggcgagcgccgcgcgcaccactggttggagttgctgtgggtgagctgctgtggtctgtagccaagcatgctgtggtcggatctgcccagccgtggaacagaaacatttgctggatggaaaatccataaaagaaagctcctgtgaaaagctgaggctgacaataatttaagcaaaatcagatcgatctctttgggctgcctgacctccttgggtgcttgctattaattaacagactttgtggggaaaaaaaggagcttgccttctgagctttgtaccaaagacctgggaaaactaaccatctcagtctttcctgaggacttgggaactgccgaggcctctgccaatgtgttgactgtcgctatgggctcactgttgtccaggcagctcatatttcaaattataacctatttcctgcaccattgctgacgcctggtgatccatgtcagaagtacttccagctgactcaggtgttgacaccttggcagtgtttatggccagcagcggaactacagacgtcacaaatcggaacagcccagccacaccaccaaacacccttaacctccgatcctcccacaatgaactgttgaacgctgaaataaaacacacagaaaccaagaacagcacacctcccaaatgcaggaaaaaatatgcactaactaacatccaggcggccatgggcctctcggatccagctgcacagcccctgctgggaaatggctctgccaacatcaagctggtgaaaaatggggagaaccagctccgtaaggctgcagagcaagggcagcaggaccccaacaaaaacctgagccccactgcagtcatcaacataacttctgagaagttagagggtaaagagccccacccacaggattcctcgagctgtgagattttaccctcccagcccaggagaactaagagcttcctaaattactatgcagatctggaaacctcagccagagaactagagcagaaccgaggcaatcaccatgggactgcggaagagaaatcccagccagtccagggccaggcctccaccatcattgggaatggcgatttgctgctgcagaaaccaaacagaccccagtccagccctgaagacggccaagtagccacagtgtcatccagcccagaaaccaagaaggatcatccgaaaacaggggccaaaaccgactgtgcactgcaccggatccagaacctggcaccgagcgatgaggagtccagctggacaacgttgtcccaagacagtgcctcacccagctccccggatgaaacagatatatggagtgatcactcatttcagactgatccagatttgccgcctggctggaaaagagtcagtgacattgccgggacctattattggcacatcccaacaggaacgactcagtgggaacggcccgtctccatcccagcagatctccagggttctaggaaagggtcacttagttctgtaacgccatctcccaccccagagaacgagaaacagccatggagtgattttgctgttctgaatgggggaaagattaatagtgacatttggaaggatttgcatgcagccactgttaacccggaccccagtttaaaagagtttgaaggagcaaccctacgctatgcatctttgaaactcagaaatgccccacaccctgatgatgatgattcttgtagtatcaacagtgacccagaagccaagtgttttgctgtgcgttctctgggatgggtagagatggcagaagaggacctcgcccccggtaaaagtagtgttgcggtcaacaactgcatcaggcaactttcctactgcaaaaatgacatccgagacacagtcgggatttggggagaggggaaagacatgtacctgatcctggagaatgacatgctcagcctggtggaccccatggaccgcagcgtgctgcactcgcagcccatcgtcagcatccgcgtgtggggcgtgggccgcgacaatggccgggattttgcttatgtagcaagagataaagatacaagaattttgaaatgtcatgtatttcgatgtgacacaccagcaaaagccattgccacaagtctccacgagatctgctccaagattatggctgaacggaagaatgccaaagcgctggcctgcagctccttacaggaaagggccaatgtgaacctcgatgtccctttgcaagtagattttccaacaccaaagactgagctggtccagaagttccacgtgcagtacttgggcatgttacctgtagacaaaccagtcggaatggatattttgaacagtgccatagaaaatcttatgacctcatccaacaaggaggactggctgtcagtgaacatgaacgtggctgatgccactgtgactgtcatcagtgaaaagaatgaagaggaagtcttagtggaatgtcgtgtgcgattcctgtccttcatgggtgttgggaaggacgtccacacatttgccttcatcatggacacggggaaccagcgctttgagtgccacgttttctggtgcgagcctaatgctggtaacgtgtctgaggcggtgcaggccgcctgcatgttacgatatcagaagtgcttggtagccaggccgccttctcagaaagttcgaccacctccaccgccagcagattcagtaaccagaagagtcacaaccaatgtaaaacgaggggtcttatccctcattgacactttgaaacagaaacgccctgtcaccgaaatgccatagctgcacatgcaaaaggactcggctatttacctgaagattgactagctacactaaagaaaatgaactccgccatccgaccttccatccagttgctgatgctttgtcttcagagaatttacccttaaccaagcagtgttagacaagcatgttctctcgtcttgccaccatcatgtgatatgaaaagaagcatgaataattttttttgctgtaagttacatcatgcgcagtggaaggtctttttcttattgtaaatattgtgaacattacttaacttcacacacacacagagaagagtgtggccccacccctcctagtgaactaacgctgcgtccttggaatgaatgatgcgtgagttagtttcactgtcttcttggctggacctgtcacaagcaacctttaagtcctacagcactttgccctgttttcaacattggagtaggcactgcatagcagataccattgaattgctgtaaaaataggatggcgagtttgtgttttaatttttcataaaattgaacctgttggttgacaaaattggctgttggcatcagtatagaaaccaactggcagctttccctgacaagctctttgacacatggacaccatttcatgtctacagctgtttgtgggatgttggaaaaaaatgaaacttcaaaattgatgaaaaactaaattcgaggaattaaaatcgaacaaaacatagcctttcttttccgatggttttcaaactgattatttttaaaagagattaataaaatcataatgcattttgggtgggacatatttcaaacttctgccttatattgtacggtgcagctagagaattatagttcactatggccattctctacataaacattaagatgaaatactcctcatcagcctttcatccttagtttgagaattagctgatatgcaatttgaagttgaggaaatatcattgatatttctatcatgcacgattattttagatttctaccaccgtgtgatttttgctagtccatgtgctagaggtaaacgttctgctggaattctgcatccagctctatccccctctgatgctttttgcccagaaagctgtctgtccatcatgtattgtccatggcaacaaattacattaggttgaacctttccttgattttatgtatttaatattagaatttgttggactcaactagatatattttttaatttatattttttccattttactttgaagatttgaaatgttcatacctgagcaaagtctacacaggagtaatggactgtttaacaagtttcccaaaacagcattttcctgctccttcgtatgtaggtgagaaacttagctggaaagacatacaaatttagactctcgttgacattgtcgttttaaaaggaagttgctaaggcgatcaatctcaatattagtcttgtttacttcttcttaatgtcaaaattaacatttacaacatccaattataaaagtaatgctttatgtttatacactgctatgtacttgtcaaaatggtttccacattcttatcacatctgagccttaccaggtagagaaggtactaaatacactttagaagtaaaaatatgaagtaccgagaggctaaacccactggcctaagatctcaccaaagttcatgaaaaccaggactaggacccacggctcccaaagcccgttcttgctgtgttgtgctgcctccatatccgtcaggaagagcctttccagaatgattctgggcatatactaagaagagcaggtatggaaagatctattgtcagggaatcttagaattccctacacgagtgggagaaagatgtccaaattccttacgcagtggtattcatgatggtgccctatctaagtccaggactgttttcctacagcgtgcctcaaaagtgttgtagagggcaggattctacattcacagcctgttccatctacgagattttccagatgctacttgtggtagacattcctaactcatggtacttagccaccagagatcatgatggaatgagtgggtggcttttctacctgccattccctcagaattcatgaggggtgggggacagggggaccggaattgtcttagcaccccaatgttatgacaaaactatgctactttagaaacgcagtctgtttttcaccaattgacatactactgatctgaagtaaccagtgccatcataagaaattactgcattaagaaaatccttgctgtgccctttgaaaagctgttcagaaatcatttacagtgatctttcatctcggtcgctgtagtgaaacattttagtgtgataaatttcaaaattctaaacaaattacccacttttatattggaaatctctaccagaactccctcttcattttttaaggcatacatttgcttgttttcaagatcaagaattctgagctagctttaagtagcaaactgatttatatgtgcaattataggatgcattaagatgaatgatagcctttacatattgaaaactttgcagacgttttgttttgaaaatggcattgtatagtaaatgcaaattaattttgtaaaattatgttaaagagtatgttcagacactttctgccatggccaaaaagtatgtatgaaagtatgtgtgtatttgtttgtaaaaggatgccaatgttttacctgatatcttagtgacacttcagttatctatgcattctttagatctgtgattcggtaaacaggcagccatgttcacgatgccttctatgtcttaccatatttttaattaacctgttaaatacagcttaaaatatttttattttatttattctatttttactgaaatatactgcattattgtgttaatgtattatctttcctggatattatctcccagtgtatccagatctaagtaatctcagtgaactatacattgcctaaaaagtggttttgtaatgatttgtagtcacatttctattgggatatgtagaagaaaaggcaaaatgcttaaagttccttttattttttaaaagcagctagatagacacagacttgccacctcatacatctgctccttggcaacatcaaggggaacgactagccaacatgcctatggctaaaaactttcctttgcagactaaagcactgcttggtgcttcgtttttctacccttcacaacatgtgtgatttcatctaagagatatatacatgtacacatgccctttgtttccacctggatacaagatcactcatagctaattaggaccattgttttttgttcatctgtcttgttgcatgaagggacattagacccatttccattaaaataagttcttggtgataaactgtggcactgctacttctttttaaatccactttatgatttcaagatggacacttgtaagatgactcgacacaaggccattgcctggaagccccagagctttcctctgtttgtatggcccgttcatgtcccaggcattgcaacacaaactcaagatttcaccacaacatgacaagcattttcctaactgatattagcacaatttaactaataagccccttcgctctctagttggccaggcttaacctaatacacatctaacgtgtgtgccacacggccagtagaaagtttaacttcagcttcagggcaaagatacccactcacaccgtgtcaacgcaagcagtagttcctggcctccagagcagcttacttcccctgaaagaacgctttgttttcctttatgcccttttcctgttgaccacttttacacatttaaatgtaatttgttgtgagaataaatttagctgcataaaaaa

SEQ ID NO: 2705 - protein, 758 aa, Homo sapien
MSEVLPADSGVDTLAVFMASSGTTDVTNRNSPATPPNTLNLRSSHNELLNAEIKHTETKNSTPPKCRKKYALTNIQAAMGLSDPAAQPLLGNGSANIKLVKNGENQLRKAAEQGQQDPNKNLSPTAVINITSEKLEGKEPHPQDSSSCEILPSQPRRTKSFLNYYADLETSARELEQNRGNHHGTAEEKSQPVQGQASTIIGNGDLLLQKPNRPQSSPEDGQVATVSSSPETKKDHPKTGAKTDCALHRIQNLAPSDEESSWTTLSQDSASPSSPDETDIWSDHSFQTDPDLPPGWKRVSDIAGTYYWHIPTGTTQWERPVSIPADLQGSRKGSLSSVTPSPTPENEKQPWSDFAVLNGGKINSDIWKDLHAATVNPDPSLKEFEGATLRYASLKLRNAPHPDDDDSCSINSDPEAKCFAVRSLGWVEMAEEDLAPGKSSVAVNNCIRQLSYCKNDIRDTVGIWGEGKDMYLILENDMLSLVDPMDRSVLHSQPIVSIRVWGVGRDNGRDFAYVARDKDTRILKCHVFRCDTPAKAIATSLHEICSKIMAERKNAKALACSSLQERANVNLDVPLQVDFPTPKTELVQKFHVQYLGMLPVDKPVGMDILNSAIENLMTSSNKEDWLSVNMNVADATVTVISEKNEEEVLVECRVRFLSFMGVGKDVHTFAFIMDTGNQRFECHVFWCEPNAGNVSEAVQAACMLRYQKCLVARPPSQKVRPPPPPADSVTRRVTTNVKRGVLSLIDTLKQKRPVTEMP

SEQ ID NO: 2706 - DNA, 3028 bp, Homo sapien
caaaaatgaggtgaattaatacttgggcgctcaggaaccctggacagctacatgaggtgtttaaaaactgccctgaccatcttgccaaacaagtctctgctcatgaggccccacaggatgaacgagccgaggcaggacagtgtcctgccctgtcggaacagtgactgctgacctgccaagagagagctggggactgcctgctgtctgccagtacaatgaaggaagtggtttattggtcacccaagaaggtggcagactggctgctggagaatgctatgccagaatactgtgagcctctggagcatttcacaggccaggacttgatcaacctaacccaagaggatttcaaaaaaccccccttgtgccgagtctcctctgacaacgggcagcggctcctggacatgatagaaaccctgaaaatggagcaccatttggaagcacacaagaacggccatgccaatgggcacctcaacattggcgtagacatccccacccccgacggcagcttcagcatcaagattaaacccaacgggatgccaaatgggtataggaaagagatgataaagatccccatgccagaactggagcgctctcagtaccccatggagtggggcaagacttttctggcctttctttatgcactttcctgtttcgttctcaccacagtgatgatctcggtcgtccacgaacgagtacctcctaaggaggtgcagcctccactaccggacacattttttgaccattttaaccgggtgcagtgggccttttctatttgtgaaattaatggcatgatccttgtaggactctggttaattcagtggctgctcttaaaatacaagtctattattagcagaagatttttctgcatagttggcacgctgtacctgtatcggtgtattacaatgtatgtaactacactcccagtacctggtatgcatttcaactgttctccgaagcttttcggagactgggaagcccaactgcgaagaataatgaagctcattgctggaggtggcttgtctatcactggctctcacaacatgtgtggggactatctgtacagcggccacacggtcatgctaacacttacctacttatttatcaaagagtattcccctcggcgactctggtggtatcactggatttgctggcttctcagcgtagttggaatcttctgtattctcttagcgcatgaccactacactgtggacgtggtggtggcatattacatcaccacgagactcttctggtggtatcacactatggccaatcagcaagtgctaaaggaagcttcccagatgaacctcctggccagggtgtggtggtacaggccatttcagtactttgaaaagaatgtccaaggaattgtacctcgatcttaccattggcctttcccctggccagtagtccacctcagtaggcaagttaaatacagccggctggtgaatgacacataacagctgtacaaagtggggaaaagacaaattgtccgaagtgctaagaactccatgagagaagatgccataaaataaacacctccctaatcctattatctttcaatggttaccttgacttaacctattgagttacctggtcagcactgtgatctttttttctctccaaaggacctgcgttggacaacaataaagaaaaatttaacctatcatgcactgtacacatttcctgttcataagtttgggatttacataacccgcaaccaccatgttcctttgtatatgatgcagcagcataaatgtaagcttttatatcataagttctggtctttccagtcacatctggaaataaagcgtattattttcttgggaaaacatacttttcatatctcttgccccaaagattgggctgtaagccattttctagcaaatgtctctatgaaggtttctaagtacctgaatggggtttgattctgaaatctttctacctgttgcaccgatattcaaataaaaatgatagacacagaaaggtttggtaactttgggttttgtaaaatcagcaaaggcagtgtttcaaaaagtgcaaaaaaaaagattctgttataaagtgattttctaagtatttcctaactttatttttcaaaatgatgttatgaacaccaaatttaaagatttttaacatgtcagagagaagagagttaaaatttaaaaatgcatcttgggagagaaatttgtctatgtttctagtgcctttcttgtcttgattgtatggtcagtaggcaatcttaaatgtttttatttaaaataaagtattccttgaaaatataaatatatgtatacactactaaattttgcatttatagctaaattgaatcagaagactgcttatggttttaaaattgcaatgacttaaataatgaggttgttaattagagtcagagcctgttcacatattgtgatcaggtagcaatgacatgtaccacttaaattattttatcgtcgatttggtagttcgattttaactactcaatgaaaacagccatgaatatcttttcttaaagagagttttgaaaatgatcacttacctaaaacttgaaagctatgaattagttatccatactctcatgacaattttgttggtgaacaacaaaaaagagatctatttctttaaaagatatttgtgcagaaactgcatgtaactctaagttttactcctaacatacatatgtttggggaagtattctattctatacttgcctatgtggagaacaaaatagttttttaagaatgaagaagtatatatatccattctgtattttacgtgcagcagaattatcttccgtaggatttttttgtgtattcacaaggtgatatttgtattgtaaaacaataatggtgaaggaaataaaaaggcttttaaaattttgtttgttttaaatctttgtaaagttattattccagagagtatactggtatcttacagcttacctagatcataaattaatcaaaatgcactttttaataaaaactgatacttaaaataaatggctgttatttctaaaaaaaaaaaaaaa

SEQ ID NO: 2707 - protein, 413 aa, Homo sapien
MKEVVYWSPKKVADWLLENAMPEYCEPLEHFTGQDLINLTQEDFKKPPLCRVSSDNGQRLLDMIETLKMEHHLEAHKNGHANGHLNIGVDIPTPDGSFSIKIKPNGMPNGYRKEMIKIPMPELERSQYPMEWGKTFLAFLYALSCFVLTTVMISVVHERVPPKEVQPPLPDTFFDHFNRVQWAFSICEINGMILVGLWLIQWLLLKYKSIISRRFFCIVGTLYLYRCITMYVTTLPVPGMHFNCSPKLFGDWEAQLRRIMKLIAGGGLSITGSHNMCGDYLYSGHTVMLTLTYLFIKEYSPRRLWWYHWICWLLSVVGIFCILLAHDHYTVDVVVAYYITTRLFWWYHTMANQQVLKEASQMNLLARVWWYRPFQYFEKNVQGIVPRSYHWPFPWPVVHLSRQVKYSRLVNDT

SEQ ID NO: 2708 - DNA, 1049 bp, Homo sapien
cggtcagggatcatgagggagagtgcgttggagccggggcctgtgcccgaggcgccggcggggggtcccgtgcacgccgtgacggtggtgaccctgctggagaagctggcctccatgctggagactctgcgggagcggcagggaggcctggctcgaaggcagggaggcctggcagggtccgtgcgccgcatccagagcggcctgggcgctctgagtcgcagccacgacaccaccagcaacaccttggcgcagctgctggccaaggcggagcgcgtgagctcgcacgccaacgccgcccaagagcgcgcggtgcgccgcgcagccccaggtgcagcggctggaggccaaccacgggctgctggtggcgcgcgggaagctccacgttctgctcttcaaggaggagggtgaagtcccagccagcgctttccagaaggcaccagagcccttgggcccggcggaccagtccgagctgggcccagagcagccggaggccgaagttggagagagctcggacgaggagccggtggagtccagggcccagcggctgcggcgcaccggattgcagaaggtacagagcctccgaagggccctttcgggccggaaaggccctgcagcgccaccgcccaccccggtcaagccgcctcgccttgggcctggccggagcgcagaagcccagccggaagcccagcctgcgctggagcccacgctggagccagagcctccgcaggacaccgaggaagatcccgggagacctggggctgccgaagaagctctgctccaaatggagagtgtagcctgagggctggtgttgcctgcctcccctgtgcttgtgccttgtcccaaaataaatcctttcagaatgtagcactcacgccctaataaggagcgaatcctacatccaccaaggcgggcgctctggccctcccttccttaagcccagtcctgtgtcctctgaaagaggtgcagtcactcacacctgcttgcgctcaccatcaataaaagtaatttcacccgaaaaaaaaaaaaaaaaaaaaaaaaaaaaaaaaaaa

SEQ ID NO: 2709 - DNA, 8988 bp, Homo sapien
  Unsure 5325-5343, 7848, 8971: Unknown base
aattgcggccgcgtcgacgctgcgagaagacgacagaagggggttgcatgtactgtatgtggagcagtgtacagtgaagcggaggcagagcggctccgcgagcttctctccactttcccatagagaaaccctgactggccgctgagggctagctacacacacgccctcacgcccggcgagcccgcgaggtcactatcatatgacaaaggctttgccgcagttcatcttcctccctgtgtactttccatttgccttcctggaatcctgctgcatcacagaagctggaagttctgatgttccactgaaatcacaatggaaagtcttgacttgactggtcacagtaatgaaaggcagtaatagaaataaggatcattcagcagaaggagaaggggttggaaaacgaccaaaacgaaagtgtcttcagtggcatccattgctagcaaagaaacttcttgatttttcagaagaggaagaagaggaagacgaagaggaggatattgataaggttcaacttcttggggccgatggcctagagcaagatgttggtgaaactgaagatgatgaatcaccagagcagcgagcccggagaccaatgaatgcatttcttttattttgcaaacgccatcgctctcttgtacgtcaggaacaccccaggcttgataaccgaggtgctaccaagatactagctgattggtgggctgttcttgatccaaaggaaaagcagaaatacacagacatggccaaggagtataaggatgcatttatgaaagcaaatcctggctacaaatggtgtcctaccacaaacaagcctgtgaaatccccaacacccactgtcaatccacgaaagaaactttgggccttcccatctgactcttcaagagacttgccaagccccaagaaagcaaagactgaagaaatgcctcagcttaactttggaatggctgatcctactcaaatgggaggcctgagtatgctgctgttagctggagaacatgctcttggcacaccagaggtatcctctggcacatgcaggcctgatgtttcagaatctcctgaattacgtcagaagtcaccattgtttcagtttgccgagatatcttcaagtacgtcccactctgatgcttctacaaagcagtgtcaaacatctgccttgtttcagtttgcagagatttcttcaaacacttcgcagttgggtggtgctgagcctgtaaaacgctgtggaaagtctgcactctttcaactggcagagatgtgcctggcatcagaagggatgaaaatggaagaatcaaagctaataaaagcaaaagaatccgatggtggaagaattaaagaattagagaagggaaaggaagaaaaagaaattaaaatggagaaaacagatgaaactaggttacagaaggaagcagaatttgaaaaatcggctaaggaaaatttaagagattctaaggaattgagaaattttgaggcattgcaaatagatgacataatggctataaaaatggaagatcccaaagaaattagaaaggaagagttagaagaagatcacaaatgtagtcattttcctgatttttcttattctgccagtagcaagataataattagtgatgttcccagtagaaaggatcatatgtgccatcctcatggaattatgatcattgaggatcccgcagcattaaacaagccagaaaagctaaaaaagaaaaagaagaaaagcaaaatggatcgacatggaaatgataaatccacacccaagaagacttgcaaaaagaggcagtcttcggaatctgacattgagagcgtcatatataccattgaagccgtcgcaaaaggagactggggcatagagaaacttggagatacccctcgcaagaaggtccgcacatcctcaagtggcaagggaagcattttggatgccaagccaccaaagaaaaaagtgaaatcaagagagaagaaaatgtcaaaggagaaatcctcagacaccaccaaagagtcaagacctccagatttcattagtatttctgctagcaagaacatttctggtgagacaccagagggtataaaagcagaaccattgacccctatggaagatgcactaccacccagcctatcaggacaggccaagcctgaggacagtgactgtcacagaaaaatagaaacttgtggttccaggaaatccgagaggtcttgcaaaggtgctctttataaaaccctggtgtctgagggcatgctcacctctctgcgagctaatgttgacagaggaaaacgaagctcaggaaaaggaaactcctctgatcatgaagggtgttggaatgaagaaagctggacatttagtcagagtgggaccagtgggagcaagaagttcaagaagacaaagccaaaagaagactgtctccttggctccgcaaagctggatgaagaatttgaaaaaaaattcaacagcctccctcaatatagtcctgttacatttgaccggaaatgtgtacctgtcccaagaaaaaagaagaagactggaaatgtgtcctcagaaccgactaaaaccagcaaaggaagtggggataaatggtcaaacaagcaactcttcttggatgccattcaccctacagaagccatattttcagaagacagaaacaccatggagcctgttcataaggttaaaaatatcccatccattttcaacactccagagccaacaacaacgcaagaacctttggtgggcagccaaaagagaaaagcaaggaaaaccaagattacacaccttgtcaggacagcagatggccgggtatcaccagcaggaggtactttggatgacaaaccaaaggaacaactgcagaggagtctccctaaagcaactgagacagactgcaatgacaaatgctcacacaacaccgaggtcggggagacgcggagcagtactccagaaatgcctgccgtgtctgcgttctttagcctcgctgcgctggctgaagtggcagccatggaaaatgtgcacagaggtcagaggtcaactccgctcacccatgatggacagccaaaagaaatgccgcaggctcctgtacttatttcctgcgctgaccagtgaagcgccctttcattgtaaaacattgtgctttacctactaccctagccttgtctttaccgagggatgctagtgagtccaagtggtggaaaatatagactgcaaacaagtgcttgttgccccacacggcccagattcacttgaagcagaagttagcatcctgggccagtttgttctctcagaacccagaatctttgagggtaaggttatctgtctgatactgagcagaaacagaatgatcctggagctttgctttctattgaaggcttttgacggtaataggtggtaacttggtaaaaggctgcctttactgtagctcacccagcatctcttttaccaaccagagagtgtgaaactagtttcatatattacctagttattctttcaaaacaaaacaaaaaaaaaacaaaaactgacgcactgcactagttattattagatattcttagtcttttttgtacatggagatttaagtttaagatggtttatataataggttatacctacatttatattgtagaataaatattaaaaagcctgttccagagactcccaagcagcctgggcaggcagatgtaccattgttagtggtgtatgctcggcctcgtggtccatatattctgcacttttatatttgccaccagaatggtagtttgctggcaaaaaaaaaaaaaagagagagagaaaaaattacaactcttacaatctgaatttttttcttagccttgagtgaccaagaagaatttgcttgaggcaaattgtggcaaatattttcccagacaggggaagagtcctgcagattacagattactggtgttttcatgccttgaggattcttttatttttacataggggtctaagtgaccaatggattgttcatacaaacaaaaaaaaagacaaaaatattattcagaagtgaccttagtattacttcactattctaaacacattgaagacactcacttcatgtggacttggagctacagaccttttacatccatcacagattggctggacgggttgcaattgctatgcacagcctgattggcactgcaggtttttagagccattttgagtttgtgttgtttaggaggtactgagtcaatgatgagggaggtatgcctgaccagagtgggactctcagtcatagatccacctgcaagtctctgtttcctttttgtgttttgttgcttttgaacataaaaccaaccatacataagcagcgccaagtggattaactggcttagaacattcaacatattgacttaaccacctgacattcacagtgtcttgtttcctagcaacagatgcaaagtgataaatcaaaattagtctgaggctacagattttacagggtatttgttctatagcacaaagtatttccccactcttgcgtcacagcacaaactaccaaattttaattattggattccagcaataatttttaatggttttcaaactggcggaattttgacagtgctagttcgagtttgaagcttttgaattagatctctaaatggtgacagtttacatggttttatctagctttcttatttatacttgactgaattgtaatgattttttttctaattgtaatttgacgtaatagccatacaaaaaatgactctattcatactaggtttagcttctcatggttgtagatattacttcagttccggtgctggaaaatatgtacaacatactaacaggattgaaaaaaaaatagaggtttttcttctggtttttttttccaaagcaggtaaagagggtagcaaagcatcggaatgatgtgctcaaaaatgcatattcctggtggggatggaggaagaaggcattagtaaaaggttaatcaaacgttacaacttaaccccattcatgcaggaataaatcaagtgagcagttccagacttttgcataatatttttactatgatgctgttttattaatattttctaaatttcaaaacaaaaagtgaatgtttgaaattgctgggtcccgatgttggtggctgttggagttttggaccactcgctagcagtgatttgaagattataattagctaaaatccaaaacaaaaaaccaacaacaaaaattgtatggtgcggaacatgcaccttgacaatggtactaacttgttattctatagaacacgttagaatagatctatttttgccagagcaccctccttcagtcctccgattacatttcactagagttccttacgagattgctgtatattcctgggaccnnnnnnnnnnnnnnnnnnnagcaaagcaaaagattactttttttctatgtgattaatatcttacttgatctgcttttcctaaacctcagtggcttttcccttaggcagggttgggggtgggagggcaacttactggagatgactgttttcagatactttaaaacaaacctttttgtagaaatgcttaatttttaagcggttaggcactgagagtagcagaaatcctgcaaagctttatagttccttagactcaccttgtcgattctctgagtaaagtcttgatttcaataattgtgcttctcatgccctgaatctgctggagaggagtgttgttattttcaggtaacaacattcgttagcacaaatatttcagaccaatattagtgctctccaccccaccttttgttatcattttcatttcatttctctcattcttttttattttggaaaatcatattgctatagtgtgtactttaatctgccagcagataccatctacactaacatttgtcccacagcatcctcaagagaaaaagttgttgcaccttatatatatctcaagcaaaccaaaatatgatgctcttctgctttgttttattctaaattgttgtatcatatctttctgaaaccattctgaatttagttgaaattatcaatatttatgcttttaaccttaatttctggattcaagcctgtatataaatcttttgaaaaaaaattgtcctagcccttctctgcgatgctggaagtagaagattgcgtctcagatggagacgcagtactgttccagttttctttagccttttatttatttagttattctgggtatttcctatgtaattttgaagtgtgtagagtatattatagtaactgaagctgcagctgtaagaagctgagtgaaagaaaaaatactgtaagacatccttaaagtttttatttgtttgggtactgtatatgagatcaggaaaaagaaaaatgtcccacagccacattggaaatacaggttcttgtccccaaattaggttagttcccagattttagatcaaaactgttaattcattaaaaccccttttaaaaggtaaattctactgttgtaattccgatagtctttttcccacaaatatcagaaatatatttatttaattctgtcagatgagctttctaccgatgccatgtcccaaagccatgttaaaataattcccacgttatcattgtgattctacttcctgccactaaaattgctggagaaacaaaataatgatggaacactatgaacaaaaaggagcatctgaactggtctggttatttagaatccaatgtgttcaaatccttttgttttcttattaagtcagatgctactgtaagtcagataaaattttgtttgcactctgcagtctttggctcaatgtatggaaatgtttgcacctatgtaaagtcacaagctaattacaaattgctacagaacaggagtaagctgaaaactgaatgccatgttttgtttataaggtggggaggggagggaaaataccaaaaaactctgttccaagtttggcatttgacattaatgtgaagcagtgggaccatgctgcctgctaaactactgtatgaatcgtaaatgttctgaagacgagcagctggaggctggaggatggcattccatacagcaaaggagaagcacccaccacttcatctgggaaaaggaaggaaattgcaggaggcctggagccatcatttgtaaaggggatgttgcggggtgtgatgctgttgaggagattcaccttcaattgcactgctccacagagccctcatataaggccaatcctaatgggctacctcggctttaaaagttaatttcagtaagtcctgtttcaaaagtttgtctttttttgcttctaccttcagtgccactattttccactgcagtgttttgacttcacaaactgcctcctccagagagaacaatgtattgctgaaaatgggcagtagaagcaaatgctgttgttacatttgacctataaagtattcagagtgactgctaggtagaaattaaaacttagctttcccaaatagctccttattttgcaccttataaaaagtatactaattgttaattagatgttgcttttgtttatacaagcattcccaaagaactagatttggattttgttttgagtttttggatttttaaaaattatcttatttagattgactaacagcatacttacaattttaaaagaagctgttgttcagttcatcttaccagatgtgtctggcgaagtattcagggtttgatggactgctttactttcgtttggaagtgatagctaagtttattatactctatattaaacaactttgttcatttcactgaggaccttatcttccttatatttcagaacaaagaagcaacaagcgtgaataaaaagacaaatgtatttgactccctcataatccccatctgtatgtgctacccttccttcaaatatataaatgtgcatctttttttttaaaaaaaaaaaaaaanaaggttcctcttctggccaaatttgatctatggtggtatgattcatactgttaaattgagagaggaaaccttgtggttaaaaattatatggctgctgttttctttttgcagtcagtggtcaaaactgatcatgtgcttaaatcgatttttatgcacagaactagttattgtgaacattactgctccctccaaagatttcctgataacttgggccagaggtggttactgagtaacaaggatctaattcaatgcctcaaaactcttccacccacaatgcaaatcttacctcacaagctctaacctaaatcacagagacatgcatgtttcatgcattaacactgatttcgctctgtggcccaccagaggggtgggctcatgtcccctgactcctcacatgagtgcctcagctctaagagccgtggaacggggggtagggaaggtttgcgatctggagctcagcaactggctcagcaacgttttctccatttcattagcactaaacaagtctcttgctctcaggaatttgtcagaaaaaagaataaaatcacctgagactccacataccagattataaactcttctcgtaggtttgaattgcttactcacatgtcataaattaaccacagcttcatttgaccaccaggtctaaagtctgttgacagtttcagcatgactgaatcgctcattttttttttttgctttcagaaattggcttggttctctttagagttggtgtaaacatgccatgtaataaatgatttccacttaatggtacaacagaattattgctttcttagatgtatgtgtagtaaaagtcaatatacacatttatataatttctttcttcaaaatcttatacctaatttgatatttctaaaaattgcacatgtaagtcatgtgtataacatgctaaagtactttaactgtgatcttaaaactgaataaaaatatttaataaaactttgaaatattttaaagatattattcaaatatatttctttatgttcacactactggccgtagagtatgtgcctttaatgtaccattttcactaaaaacagtaggaaaaatactaataaaagtaagatatttcaactattttagaacatcgaatgatgtgtcnccctaaactgtgtttgc

SEQ ID NO: 2710 - protein, 911 aa, Homo sapien
  Unsure 5325-5343, 7848, 8971: Unknown amino acid
MKGSNRNKDHSAEGEGVGKRPKRKCLQWHPLLAKKLLDFSEEEEEEDEEEDIDKVQLLGADGLEQDVGETEDDESPEQRARRPMNAFLLFCKRHRSLVRQEHPRLDNRGATKILADWWAVLDPKEKQKYTDMAKEYKDAFMKANPGYKWCPTTNKPVKSPTPTVNPRKKLWAFPSDSSRDLPSPKKAKTEEMPQLNFGMADPTQMGGLSMLLLAGEHALGTPEVSSGTCRPDVSESPELRQKSPLFQFAEISSSTSHSDASTKQCQTSALFQFAEISSNTSQLGGAEPVKRCGKSALFQLAEMCLASEGMKMEESKLIKAKESDGGRIKELEKGKEEKEIKMEKTDETRLQKEAEFEKSAKENLRDSKELRNFEALQIDDIMAIKMEDPKEIRKEELEEDHKCSHFPDFSYSASSKIIISDVPSRKDHMCHPHGIMIIEDPAALNKPEKLKKKKKKSKMDRHGNDKSTPKKTCKKRQSSESDIESVIYTIEAVAKGDWGIEKLGDTPRKKVRTSSSGKGSILDAKPPKKKVKSREKKMSKEKSSDTTKESRPPDFISISASKNISGETPEGIKAEPLTPMEDALPPSLSGQAKPEDSDCHRKIETCGSRKSERSCKGALYKTLVSEGMLTSLRANVDRGKRSSGKGNSSDHEGCWNEESWTFSQSGTSGSKKFKKTKPKEDCLLGSAKLDEEFEKKFNSLPQYSPVTFDRKCVPVPRKKKKTGNVSSEPTKTSKGSGDKWSNKQLFLDAIHPTEAIFSEDRNTMEPVHKVKNIPSIFNTPEPTTTQEPLVGSQKRKARKTKITHLVRTADGRVSPAGGTLDDKPKEQLQRSLPKATETDCNDKCSHNTEVGETRSSTPEMPAVSAFFSLAALAEVAAMENVHRGQRSTPLTHDGQPKEMPQAPVLISCADQ

SEQ ID NO: 2711 - DNA, 4408 bp, Homo sapien
gggcgcggaggcgaccgccatggcgttcctcaaactccgtgaccagccatcactggtgcaagctatatttaacggagatcctgatgaagttcgagcactaatatttaagaaagaagatgttaactttcaggacaatgaaaagcgaaccccattgcacgccgcagcttaccttggagatgcagaaatcattgaacttcttattttatctggagctagagttaatgccaaagacagcaaatggttgacacctttacacagagcagttgcatcttgtagtgaggaagcagttcaggtacttttgaagcattctgcagatgttaatgctcgagacaaaaattggcaaacccctttacatatagctgctgctaataaagctgtaaagtgtgctgaagctttggtacctcttctgagtaatgtaaacgtatctgatcgagcagggaggactgcattacatcatgcagctttcagtggacatggtgagatggtcaaactactcttgtctagaggtgccaatattaatgcttttgacaagaaagataggcgtgctatccattgggcagcatatatgggtcacattgaagtagtgaaattgcttgtgtcgcatggagctgaagtgacatgcaaggataaaaagtcttatacacctcttcatgcagcagcctctagtggaatgatcagcgtagtcaagtaccttctagatcttggagttgatatgaatgaaccaaatgcctatggaaatacacctcttcatgtagcctgctataatggacaagatgttgtagtgaatgaacttatagactgtggtgctattgtgaatcaaaagaatgaaaaaggatttactcctttgcactttgctgctgcatcaacacatggagcattgtgtttagagcttctagttggcaatggggccgatgtcaatatgaagagtaaagatgggaaaaccccactacacatgactgctctccacggtagattctcccgatcacaaaccattatccagagtggagctgtaatcgactgtgaggataagaatggaaatacccctttgcacatagcagcacggtatggccatgagctgctgatcaacactcttattacaagtggtgctgacactgcaaagcgtggcatacatggaatgttccccctccatttggcagccttaagcggcttttcagattgctgcagaaaacttctttcttcaggatttgatatagataccccagatgattttggcaggacttgtctacatgcagctgcagctggagggaatttggagtgcctaaaccttctgctgaatactggtgcagactttaataaaaaggacaaatttgggagatctccactgcactacgctgctgccaactgcaattaccagtgcctgtttgctcttgtgggatcaggagcaagtgtgaatgaccttgatgaaagaggctgcacacccctgcactatgcagctacatcagacacagatggcaagtgcctggaatacttattaagaaacgatgcaaatccagggatccgtgataagcaaggatacaacgcagttcattattcagctgcttatggtcaccgtctatgtcttcagctgattgcaagtgaaactcctctagatgttttaatggaaacctcaggaacagacatgctgagtgattcagataatagagcaacaataagccctttacacttggctgcctatcatggtcaccatcaagcactggaagtgttggtacagtctttgttagatcttgatgtcagaaatagtagtggaagaacacccctagatcttgcagcttttaagggccatgttgaatgtgtggatgtactcattaatcagggagcctcaatcttagtaaaagattacattttgaagaggacacctattcatgcagcagcaacaaatggtcattcagaatgcttacggctattaataggaaatgcagaaccacagaatgcagtggatattcaagatggaaatggacagacgcctctgatgctatctgttctcaacgggcacacagactgtgtttactcattgctgaacaaaggagcaaatgtagatgccaaagataagtggggaaggacagcgttgcatagaggggcagttacaggccatgaagaatgtgtagatgcattacttcaacatggtgctaagtgcttacttcgggatagcaggggccggacgcctatacacctgtctgctgcctgtggacacattggtgttcttggagcccttttgcagtcagcagcatctatggatgcaaatccagccacagcagacaatcatggatatacggcacttcactgggcttgctacaatggtcacgagacatgtgtagaactgcttttagaacaggaagttttccagaaaacggaaggaaatgcttttagtccattgcattgtgccgtgataaatgacaacgaaggtgctgctgagatgttaattgatacattaggtgccagcattgtgaacgccacagattcaaaaggaagaactcctctccatgcagccgccttcacagaccatgtagagtgtttacagctgctgctcagccataatgctcaagtcaattctgtggactctacagggaaaacacctcttatgatggctgcagaaaatggacaaacaaatacagttgagatgctggttagcagtgctagtgcagaactgactttacaagataacagtaaaaatactgccctccatttggcttgtagcaagggtcatgaaactagtgccttgttaatactggaaaagataacagatagaaacctcatcaatgcaaccaacgcagccttgcaaacacctctgcatgttgctgcccgaaatgggctaacaatggtggttcaggaacttttgggaaaaggagcaagtgtgcttgcagtagatgaaaatggctataccccagctttggcctgtgctcccaataaggatgtggctgattgcctggctctcattttggccaccatgatgcctgtctcatcaagtagtcctttatcatccttaacattcaatgccattaaccgttataccaacacctcaaaaacagtcagctttgaagctttgcccatcatgaggaatgaacctagctcctattgcagtttcaataacattggaggggaacaggagtacttatacactgacgtggatgagctcaacgactccgattctgagacctactgagaggctgaggaggagggagttctcacagtaaagcttcaaactgtgctttttcaggaaaaaggcactttgatattcacgtagaaattcaacctaagaggaaagatcccacagtgagccaatgttaagagatctgatggcattaggaggaagagttttaaaggaattctcttctgaattccctgagggaattttctagaatctcagaattgaaagagacctgaggttcatccagtctctaacctcttaacaaatgcaggagtcccttctacaagggtgatctttccaccttgaacacttccaagtgactctacctcaccaagcagtccattcagttgttgagcagctctaactgttagaaaggtcttccttagatggagttgaagcctccctcccggtaacttctgtctttgggcctgggtctgtcctccaagagaaccctgagaatgttggaaggatgaatctcgcacattctgccatgtcttctcttttacaggctgtttgacttctctgctgaagtgatttccagaaggactcatttgacacactattagatttaccacatctaatgaaatccaaggtgtagctataaagtgacaagctgtttttaatttatcacatacaccagaacttctatcctgcatcacttatatgtaaatgatgctgttaccaaaaacattaaggtagttcttgcgaatgccaccccactaagaaaactatttcattacttttgtaatccatctgtgagagtctgccccccagcttaaccacttcctttgatctgcacccaatgaagggaaaccccaaagtactgtctcaaatggtatttgaactacgccagtattgttggaataagtacattaattacttgaatgaatgaacacagcaccgtagaaatttcctttatggttacaccttgtatgtctaaagcattcaggccctgttctgtagtgtttcttatcctcacacagagtagaaaagcctgtttgctttatttaacttatacataaaagatgacatctgaaatatctgatgtgtattataataccagcttctgctctagaactactttgggtgaaatggtggtaatagcaaatgacctcctttaacaagacactcatctcaaacaatgccatttagttcaggagatctctaagtgtagctgtaaattttggggttaatttggcttatattggaccttttaaaagaaataaagttttttaatgcaat

SEQ ID NO: 2712 - protein, 1059 aa, Homo sapien
GAEATAMAFLKLRDQPSLVQAIFNGDPDEVRALIFKKEDVNFQDNEKRTPLHAAAYLGDAEIIELLILSGARVNAKDSKWLTPLHRAVASCSEEAVQVLLKHSADVNARDKNWQTPLHIAAANKAVKCAEALVPLLSNVNVSDRAGRTALHHAAFSGHGEMVKLLLSRGANINAFDKKDRRAIHWAAYMGHIEVVKLLVSHGAEVTCKDKKSYTPLHAAASSGMISVVKYLLDLGVDMNEPNAYGNTPLHVACYNGQDVVVNELIDCGAIVNQKNEKGFTPLHFAAASTHGALCLELLVGNGADVNMKSKDGKTPLHMTALHGRFSRSQTIIQSGAVIDCEDKNGNTPLHIAARYGHELLINTLITSGADTAKRGIHGMFPLHLAALSGFSDCCRKLLSSGFDIDTPDDFGRTCLHAAAAGGNLECLNLLLNTGADFNKKDKFGRSPLHYAAANCNYQCLFALVGSGASVNDLDERGCTPLHYAATSDTDGKCLEYLLRNDANPGIRDKQGYNAVHYSAAYGHRLCLQLIASETPLDVLMETSGTDMLSDSDNRATISPLHLAAYHGHHQALEVLVQSLLDLDVRNSSGRTPLDLAAFKGHVECVDVLINQGASILVKDYILKRTPIHAAATNGHSECLRLLIGNAEPQNAVDIQDGNGQTPLMLSVLNGHTDCVYSLLNKGANVDAKDKWGRTALHRGAVTGHEECVDALLQHGAKCLLRDSRGRTPIHLSAACGHIGVLGALLQSAASMDANPATADNHGYTALHWACYNGHETCVELLLEQEVFQKTEGNAFSPLHCAVINDNEGAAEMLIDTLGASIVNATDSKGRTPLHAAAFTDHVECLQLLLSHNAQVNSVDSTGKTPLMMAAENGQTNTVEMLVSSASAELTLQDNSKNTALHLACSKGHETSALLILEKITDRNLINATNAALQTPLHVAARNGLTMVVQELLGKGASVLAVDENGYTPALACAPNKDVADCLALILATMMPVSSSSPLSSLTFNAINRYTNTSKTVSFEALPIMRNEPSSYCSFNNIGGEQEYLYTDVDELNDSDSETY

SEQ ID NO: 2713 - DNA, 4857 bp, Homo sapien; identical to SEQ ID NO: 1625

SEQ ID NO: 2714 - protein, 1052 aa, Homo sapien; identical to SEQ ID NO: 1626

SEQ ID NO: 2715 - DNA, 1988 bp, Homo sapien
catgctgcgccgctacctagcctcggaccccgactgccgctggtgcccggccccggactgcggttatgctgttattgcctatggctgtgccagctgcccgaagctaacttgtgagagggaaggttgccagactgagttctgctaccactgcaagcagatatggcatccaaatcagacatgcgatatggcccgtcaacagagggcccagactttacgagttcggaccaaacacacttcaggtctcagttatgggcaagaatctggaccagcagatgacgtcaagccatgcccacgatgcagtgcatacattatcaagatgaatgatggaagctgtaatcacatgacctgtgcagtgtgtggctgtgaattctgttggctttgtatgaaagagatctcagacttgcattacctcagcccctctggctgtacattctggggcaagaagccatggagccgtaagaagaaaattctttggcagctgggcacgttgattggtgctccagtggggatttctctcattgctggcattgccattcctgccatggtcattggcattcctgtttatgttggaaggaagattcacagcaggtatgagggaaggaaaacctccaaacacaagaggaatttggctatcactggaggagtgactttgtcggtcattgcatccccagttattgctgcagttagtgttggtattggtgtccccattatgctggcatatgtttatggggttgtgcccatttctctttgtcgtggaggcggctgtggagttagcacagccaacggaaaaggagtgaaaattgaatttgatgaagatgatggtccaatcacagtggcagatgcctggagagccctcaagaatcccagcattggggaaagcagcattgaaggcctgactagtgtattgagcactagtggaagccctacagatggacttagtgttatgcaaggtccttacagcgaaacggccagctttgcagccctctcagggggcacgctgagtggcggcattctctccagtggcaagggaaaatatagcaggttagaagttcaagccgatgtccaaaaggaaattttccccaaagacacagccagtcttggtgcaattagtgacaacgcaagcactcgtgctatggccggttccataatcagttcctacaacccacaggacagagaatgcaacaatatggaaatccaagtggacattgaagccaaaccaagccactatcagctggtgagtggaagcagcacggaggactcgctccatgttcatgctcagatggcagagaatgaagaagaaggtagtggtggcggaggcagtgaagaggatcccccctgcagacaccaaagctgtgaacagaaagactgcctggccagcaaaccttgggacatcagcctggcccagcctgaaagcatccgcagtgacctagagagttctgatgcacagtcagacgatgtgccagacatcacctcagatgagtgtggctccccccgctcccatactgcagcctgcccctcgacccccagagcccaaggtgcaccgagcccaagtgcccatatgaacctctctgccctagccgagggacaaactgtcttgaagccagaaggtggagaagccagagtatgaagtggaatgaatgctcctgttctgagaagcacacttgtaactgcatcttttggaattttttttttttttttttccaaggggtagagatttatgtattttatttcacagattctctggtcacaggtttttgcccagggaaattctgagaaattcacaatttcttaccagataaaacatgaaaagtttgccgttagttcccctcccctcccctccctctttttagttttaatttattggttaaactgatggcagcaatccatgaggtgtgtcaaagagtgtacatatgtatgtgtgtatattgaatgctaaacatattactgaaagacacattttaataaagatttctgtcataattcaactt

SEQ ID NO: 2716 - protein, 541 aa, Homo sapien
MLRRYLASDPDCRWCPAPDCGYAVIAYGCASCPKLTCEREGCQTEFCYHCKQIWHPNQTCDMARQQRAQTLRVRTKHTSGLSYGQESGPADDVKPCPRCSAYIIKMNDGSCNHMTCAVCGCEFCWLCMKEISDLHYLSPSGCTFWGKKPWSRKKKILWQLGTLIGAPVGISLIAGIAIPAMVIGIPVYVGRKIHSRYEGRKTSKHKRNLAITGGVTLSVIASPVIAAVSVGIGVPIMLAYVYGVVPISLCRGGGCGVSTANGKGVKIEFDEDDGPITVADAWRALKNPSIGESSIEGLTSVLSTSGSPTDGLSVMQGPYSETASFAALSGGTLSGGILSSGKGKYSRLEVQADVQKEIFPKDTASLGAISDNASTRAMAGSIISSYNPQDRECNNMEIQVDIEAKPSHYQLVSGSSTEDSLHVHAQMAENEEEGSGGGGSEEDPPCRHQSCEQKDCLASKPWDISLAQPESIRSDLESSDAQSDDVPDITSDECGSPRSHTAACPSTPRAQGAPSPSAHMNLSALAEGQTVLKPEGGEARV

SEQ ID NO: 2717 - DNA, 4783 bp, Homo sapien
cgggagcccaggcgggcaggccgctggggtcggggctgcacgtacgagagccgggacgcccgggttcagagcgaaggaggaggcatggcttcggtgttcatgtgtggcgtggaggacctgctgttcagcggcagccgcttcgtatggaacttgaccgtgtccacgctgcggagatggtacacggagaggctgcgggcttgccaccaggtgctgcggacgtggtgcgggctgcaggacgtgtaccagatgacagaaggcaggcactgccaggtgcacctcctggatgataggagactggagctgctggttcagcccaaacttctagcaagagagttgctggacctagtggcttcacatttcaacctgaaagaaaaggagtattttggaataacattcatagatgacacaggtcagcagaactggctgcagttagatcaccgagttcttgaccacgatttgcccaagaaaccaggcccaaccattttgcactttgctgtgaggttttacattgagagcatatcgtttttaaaggataaaaccaccgtggagctgtttttcctgaatgcaaaggcctgtgtgcacaaggggcaaatcgaagtagagagcgaaaccatcttcaagttagcagcgtttattttacaggaagccaagggagattataccagtgatgaaaatgccaggaaagatttaaagacattaccagcctttccaaccaaaactcttcaggagcatccatcccttgcctactgtgaggacagggtaattgagcattatttgaaaatcaaaggtctcactcgaggtcaagctgtggttcagtatatgaaaatagtagaagctctaccgacttacggtgtccattattatgcagtaaaggataagcaaggacttccttggtggcttggaataagctataagggaattggccaatatgatatacaagacaaggtgaagcctcggaagttattccaatggaaacagctggagaacttatatttccgtgagaaaaaatttgctgttgaagttcatgatccacgaaggatttcagtttcaagaagaacctttgggcaaagtggcctgtttgtgcaaacatggtatgctaactcttctctcatcaagtccatttgggtaatggcaattagtcagcatcagttttacttggaccggaagcaaagcaaagcaaaaattccttcagccaggagtttagatgagattgcaatggatttgacagagacaggaacacaaagggcctccaagctggtgacactggaggcgaaaagtcagttcatcatggcaagtaatggcagtttaatctcctcaggttctcaagactcagaagttagtgaagagcaaaagagagaaaaaatccttgaactaaagaagaaggagaaactattacaagaaaaacttctgaaaaaagttgaggagcttaagaagatctgtctgcgggaggctgagctcacaggcaaaatgccaaaggagtatcccctgaacataggcgagaagcctcctcaggtcagaagacgtgtgggtactgcgttcaaattagatgacaacttgctgccgagtgaagaagatcctgctttgcaagaactggagagtaattttctaatacaacaaaagctggtggaagctgcaaagaaacttgccaatgagccagacctttgtaaaactgtgaagaaaaagcgaaagcaagattacacagatgcgatgaaaaagcttcaggagattgaaaatgcaataaacgaataccgaattaggtgtggaaagaaacccagccagaaagcaacagtgttaccagaagacataatcccctcagagagtagctctttgtctgacaccaccacctatgatgatcccagtgatgccttcacttttcctgggcagcgatcaagttcagtacctcattctccaagaattcttccccccaagtctcttggtattgagcgaatccatttcagaaagtcgtccatcaatgaacagtttgtggataccaggcagtccagagaaatgctgtccacacacagcagcccttacaaaactctggagaggcggccccagggaggacgaagcatgcccaccacgccagttcttacccgaaacgcctacagcagcagccacttggaacccgaatcttcatctcagcactgccgccagcggagtggaagcctggagtcccagtcccatctgctctccgagatggacagcgataagccatttttctccctctccaaatcccaaagaagcagcagcacagaaatcctcgatgacgggtcttcttatacaagccaatcaagcacagagtattactgtgtgacaccagttaccggcccctattacaccacccagaccctggacactcgcaccaggggtcggaggaggtcaaagaaacagaatgtttctacttcaaattcaggaagcatgcccaacctagcacaaaaggatagtttgaggaatggtgtttactcaaagagtcaggagccaccgtcttccagttactacattgccgggtacacaccctatgcagagtgtgacttttattacagtggtggttatgtctatgagaatgacaccgagggacagtatagtgtcaacccttcctaccggtcctcagcccactatggatatgagcgccagagggactacagcagatcctttcacgaagatgaggtcgaccgggtaccccataacccatatgcaactctccggctgccaaggaaggctgctgcaaaatcggagcacatcaccaaaaacatccacaaggccttagttgccgagcacttgcgtggctggtaccagcgggcctctgggcagaaggatcagggacacagcccgcagaccagctttgactcagacaggggatcacagagatgcctggggtttgcggggctgcaagtaccttgttctccaagcagtcgtgcatccttgtactcttcagtgtcttctacaaatgcttctgggaactggaggacccagttaaccatagggctgtcggattacgagactccagcacattcttcttacaccagctgctatggcaatgtctataatcctttaccctctccaagcagacaatacacagaaatcagtcaactggatggtacagatggaaaccagctggaagacaacctggagagtagtgagcagagactcttttggcatgaagattcaaagcctggaacattagtctgaactgcagttggacctcctgaccaagcactgcgttctcacactagtgtgccttgcaaattgtatttgtcttccgagaggatgttcgttttagaaacctaaagacatcaaaggttgaagagaagacttagttgccctggaagtgaatcagtgaatcacacaccaagccccacaaagcccctaaaggaggatttggcctttcaaactctaggcactaacgtaactgtagggtctgcccacatgttgaagtattgccaagagaggactcagtgtgaagccttcatcaatagcaagcactttttaagggagtaaaagttgttaaaggcaaacgtcaaaaacatgaaagggcattcaggatgtcccatggcaataagaacaggggaaatctcagagcacaattcagcaggatgagagaaggggaaccagaagctccggagtcattgctcacttcagagtttgaattcgtgagctgacaaagagtaacatgctctttctacacagacatggacaatttagacagtattggaaaattacttgaagctggattttcatgaagttctgaatgagtgtaaatgttttttaggatactataaagagtgatgtttttcataagcaccataaaatgggttctggaaaaactgattaccttagcatcctgtaatataacttatggtagcagattggggaaaatgaagcagcccactgaataattgacaaagtctgcttggagaacattctaaggtacaatatcatggagctcctttttcctttctccactaattgcgtgatgagctattgttctggctggtaattctccaactcggctgtcatttgaagtggcagacttaatatggaaagtttttataattatgagtttgaaaaagcattttaagatgatacagaaagtatccaaaacaacagaaaaaaaaagccacgtcattttagatgaattgcgtgccttaaaatggtgaacgttagaaaattaaacaagtctggattccacaagtagttccaagtcaccaagtgacaaaaacaaggttaacattaaaaaagaaaaacaacaacaacgacaaaaagctccaagctgcagtggatttaattatgaggctaaaactacctcatactttccttggaagaactaattagctatggtttattgtagggttttgtttgtttgttttttaaagcaaatgatttccatattcctgattgatcttttttgtcatctttgcttcaaaattacataaaaggtgctcctttcccccttcttttatacaagtttcttgttcatattgtgaatagaaaagtttctgaacaacttttttggaacattttctatctatattccaaagcatgtaatatatacataaaaacgatttgttaaactggtccttagtcatttgtataattagaaatgaagtttgggaaaaaattttggaaaaaagacaagcaaaaaaaaaataacttattccttttttgcatatttgtatagccttctagaatcagaaataacctttttgcatattcttttattgttctgacttttcaagacctattatttttttacataggtcaataaacaaaaggtgtgctactg

SEQ ID NO: 2718 - protein, 1062 aa, Homo sapien
REPRRAGRWGRGCTYESRDARVQSEGGGMASVFMCGVEDLLFSGSRFVWNLTVSTLRRWYTERLRACHQVLRTWCGLQDVYQMTEGRHCQVHLLDDRRLELLVQPKLLARELLDLVASHFNLKEKEYFGITFIDDTGQQNWLQLDHRVLDHDLPKKPGPTILHFAVRFYIESISFLKDKTTVELFFLNAKACVHKGQIEVESETIFKLAAFILQEAKGDYTSDENARKDLKTLPAFPTKTLQEHPSLAYCEDRVIEHYLKIKGLTRGQAVVQYMKIVEALPTYGVHYYAVKDKQGLPWWLGISYKGIGQYDIQDKVKPRKLFQWKQLENLYFREKKFAVEVHDPRRISVSRRTFGQSGLFVQTWYANSSLIKSIWVMAISQHQFYLDRKQSKAKIPSARSLDEIAMDLTETGTQRASKLVTLEAKSQFIMASNGSLISSGSQDSEVSEEQKREKILELKKKEKLLQEKLLKKVEELKKICLREAELTGKMPKEYPLNIGEKPPQVRRRVGTAFKLDDNLLPSEEDPALQELESNFLIQQKLVEAAKKLANEPDLCKTVKKKRKQDYTDAMKKLQEIENAINEYRIRCGKKPSQKATVLPEDIIPSESSSLSDTTTYDDPSDAFTFPGQRSSSVPHSPRILPPKSLGIERIHFRKSSINEQFVDTRQSREMLSTHSSPYKTLERRPQGGRSMPTTPVLTRNAYSSSHLEPESSSQHCRQRSGSLESQSHLLSEMDSDKPFFSLSKSQRSSSTEILDDGSSYTSQSSTEYYCVTPVTGPYYTTQTLDTRTRGRRRSKKQNVSTSNSGSMPNLAQKDSLRNGVYSKSQEPPSSSYYIAGYTPYAECDFYYSGGYVYENDTEGQYSVNPSYRSSAHYGYERQRDYSRSFHEDEVDRVPHNPYATLRLPRKAAAKSEHITKNIHKALVAEHLRGWYQRASGQKDQGHSPQTSFDSDRGSQRCLGFAGLQVPCSPSSRASLYSSVSSTNASGNWRTQLTIGLSDYETPAHSSYTSCYGNVYNPLPSPSRQYTEISQLDGTDGNQLEDNLESSEQRLFWHEDSKPGTLV

SEQ ID NO: 2719 - DNA, 1418 bp, Homo sapien
agaagaagctggccaaggatatgggagcaaccaccatggaccagaagtctctctgggcaggtgtagtggtcttgctgcttctccagggaggatctgcctacaaactggtttgctactttaccaactggtcccaggaccggcaggaaccaggaaaattcacccctgagaatattgaccccttcctatgctctcatctcatctattcattcgccagcatcgaaaacaacaaggttatcatcaaggacaagagtgaagtgatgctctaccagaccatcaacagtctcaaaaccaagaatcccaaactgaaaattctcttgtccattggagggtacctgtttggttccaaagggttccaccctatggtggattcttctacatcacgcttggaattcattaactccataatcctgtttctgaggaaccataactttgatggactggatgtaagctggatctacccagatcagaaagaaaacactcatttcactgtgctgattcatgagttagcagaagcctttcagaaggacttcacaaaatccaccaaggaaaggcttctcttgactgcgggcgtatctgcagggaggcaaatgattgataacagctatcaagttgagaaactggcaaaagatctggatttcatcaacctcctgtcctttgacttccatgggtcttgggaaaagccccttatcactggccacaacagccctctgagcaaggggtggcaggacagagggccaagctcctactacaatgtggaatatgctgtggggtactggatacataagggaatgccatcagagaaggtggtcatgggcatccccacatatgggcactccttcacactggcctctgcagaaaccaccgtgggggcccctgcctctggccctggagctgctggacccatcacagagtcttcaggcttcctggcctattatgagatctgccagttcctgaaaggagccaagatcacgcgcctccaggatcagcaggttccctacgcagtcaaggggaaccagtgggtgggctatgatgatgtgaagagtatggagaccaaggttcagttcttaaagaatttaaacctgggaggagccatgatctggtctattgacatggatgacttcactggcaaatcctgcaaccagggcccttaccctcttgtccaagcagtcaagagaagccttggctccttgtgaaggattaacttacagagaagcaggcaagatgaccttgctgcctggggcctgctctctcccaggaattctcatgtgggattccccttgccaggctggcctttggatctctcttccaagcctttcctgacttcctcttagatcatagattggacctggttttgttttcctgcagctgttgacttgttgccctgaagtacaataaaaaaaattcattttgctccagta

SEQ ID NO: 2720 - protein, 385 aa, Homo sapien
MDQKSLWAGVVVLLLLQGGSAYKLVCYFTNWSQDRQEPGKFTPENIDPFLCSHLIYSFASIENNKVIIKDKSEVMLYQTINSLKTKNPKLKILLSIGGYLFGSKGFHPMVDSSTSRLEFINSIILFLRNHNFDGLDVSWIYPDQKENTHFTVLIHELAEAFQKDFTKSTKERLLLTAGVSAGRQMIDNSYQVEKLAKDLDFINLLSFDFHGSWEKPLITGHNSPLSKGWQDRGPSSYYNVEYAVGYWIHKGMPSEKVVMGIPTYGHSFTLASAETTVGAPASGPGAAGPITESSGFLAYYEICQFLKGAKITRLQDQQVPYAVKGNQWVGYDDVKSMETKVQFLKNLNLGGAMIWSIDMDDFTGKSCNQGPYPLVQAVKRSLGSL

SEQ ID NO: 2721 - DNA, 8511 bp, Homo sapien
gttcgatgaaagaattgccgcttttcaaacaaagagtggaacagcctcggagatgggaacagagagggcgatggggctgtcagaagaatggactgtgcacagccaagaggccaccacttcggcttggagcccttcctttcttcctgctttggagatgggagagctgaccacgccttctaggaagagaaattcctcaggaccagatctctcctggctgcatttctacaggacagcagcttcctctcctctcttagacctttcctcaccttctgaaagtacagagaagcttaacaactccactggcctccagagctcctcagtcagtcaaacaaagacaatgcatgttgctaccgtgttcactgatggtggcccgagaacgctgcgatctttgacggtcagtctgggacctgtgagcaagacagaaggcttccccaaggactccagaattgccacgacttcatcctcagtccttctttcaccctctgcagtggaatcgagaagaaacagtagagtaactgggaatccaggggatgaggaattcattgaaccatccacagaaaatgaatttggacttacgtctttgcgtggcaaaatgattccccaacctttggagaacatcagcttgccagcagctctgaggtgcaaaatggaagtcccatgtctcagactgagactgtgtctaggtcagtcgcacccatgagaggtggagagatcactgcacactggctcttgaccaacagcacaacatctgcagatgtgacaggaagctctgcttcatatcctgaaggtgtgaatgcttcagtgttgacccagttctcagactctactgtacagtctggaggaagtcacacagcattgggagataggagttattcagagtcttcatctacatcttcctcggaaagcttgaattcatcagcaccacgtggagaacgttcaatcgctgggattagctacggtcaagtgcgtggcacagctattgaacaaaggacttccagcgaccacacagaccacacctacctgtcatctactttcaccaaaggagaacgggcgttactgtccattacagataacagttcatcctcagacattgtggagagctcaacttcttatattaaaatctcaaactcttcacattcagagtattcctccttttttcatgctcagactgagagaagtaacatctcatcctatgacggggaatatgctcagccttctactgagtcgccagttctgcatacatccaaccttccgtcctacacacccaccattaatatgccgaacacttcggttgttctggacactgatgctgagtttgttagtgactcctcctcctcctcttcctcctcctcctcttcttcttcttcagggcctcctttgcctctgccctctgtgtcacaatcccaccatttattttcatcaattttaccatcaaccagggcctctgtgcatctactaaagtctacctctgatgcatccacaccatggtcttcctcaccatcacctttaccagtatccttaacgacatctacatctgccccactttctgtctcacaaacaaccttgccacagtcatcttctacccctgtcctgcccagggcaagggagactcctgtgacttcatttcagacatcaacaatgacatcattcatgacaatgctccatagtagtcaaactgcagaccttaagagccagagcaccccacaccaagagaaagtcattacagaatcaaagtcaccaagcctggtgtctctgcccacagagtccaccaaagctgtaacaacaaactctcctttgcctccatccttaacagagtcctccacagagcaaacccttccagccacaagcaccaacttagcacaaatgtctccaactttcacaactaccattctgaagacctctcagcctcttatgaccactcctggcaccctgtcaagcacagcatctctggtcactggccctatagccgtacagactacagctggaaaaacagctctcgctgacccatcctgaaatactagttcctcaaatctcaacagaaggtggcatcagcacagaaaggaaccgagtgattgtggatgctaccactggattgatccctttgaccagtgtacccacatcagcaaaagaaatgaccacaaagcttggcgttacagcagagtacagcccagcttcacgttccctcggaacatctccttctccccaaaccacagttgtttccacggctgaagacttggctcccaaatctgccacctttgctgttcagagcagcacacagtcaccaacaacactgtcctcttcagcctcagtcaacagctgtgctgtgaacccttgtcttcacaatggcgaatgcgtcgcagacaacaccagccgtggctaccactgcaggtgcccgccttcctggcaaggggatgattgcagtgtggatgtgaatgagtgcctgtcgaacccctgcccatccacagccacgtgcaacaatactcagggatcctttatctgcaaatgcccggttgggtaccagttggaaaaagggatatgcaatttggttagaaccttcgtgacagagtttaaattaaagagaacttttcttaatacaactgtggaaaaacattcagacctacaagaagttgaaaatgagatcaccaaaacgttaaatatgtgtttttcagcgttacctagttacatccgatctacagttcacgcctctagggagtccaacgcggtggtgatctcactgcaaacaaccttttccctggcctccaatgtgacgctatttgacctggctgataggatgcagaaatgtgtcaactcctgcaagtcctctgctgaggtctgccagctcttgggatctcagaggcggatctttagagcgggcagcttgtgcaagcggaagagtcccgaatgtgacaaagacacctccatctgcactgacctggacggcgttgccctgtgccagtgcaagtcgggatactttcagttcaacaagatggaccactcctgccgagcatgtgaagatggatataggcttgaaaatgaaacctgcatgagttgcccatttggccttggtggtctcaactgtggaaacccctatcagcttatcactgtggtgatcgcagccgcgggaggtgggctcctgctcatcctaggcatcgcactgattgttacctgttgcagaaagaataaaaatgacataagcaaactcatcttcaaaagtggagatttccaaatgtccccatatgctgaataccccaaaaatcctcgctcacaagaatggggccgagaagctattgaaatgcatgagaatggaagtaccaaaaacctcctccagatgacggatgtgtactactcgcctacaagtgtaaggaatccagaacttgaacgaaacggactctacccggcctacactggactgccaggatcacggcattcttgcattttccccggacagtataacccgtctttcatcagtgatgaaagcagaagaagagactacttttaagtccaggagagagagggactcattgctctgagccagtcacctgggacctctgctcagaggaccgcaccaggaggctgcgcccaggatttgtcgggagccacgctgagtggcaagcaggaagagggacaggcatgcggggcgtgaccacagtggaggagacaggtggatgtggaaccacaggctgctcattcagcacctttgttgttactgtgaacgtgaatgtgggccagtatcaagagagtctctctgagtgactgcaccatggcactggcaccagggcgactattagccagggcagaccactagacttcagtgcagggacctggttttcccttcgtttgcactttagtaaattgggtgggaggtttccttttggatctgttttgagactgttccagaaagaaggcttcctttcccgagacacttccataggcagcaatttggtgattcatttgcagcaaaatactggcttgttaattattttcctgcccagcgcctgcgtgctaaacaacagatgaggatgagcgtaccactgaagtctgaagatgtcgccattgaacggacagtgttttcatatgtttctaggttgtcttatgctacagtttccaagccagcccccacagtgaggaaatgtgtgaggcaccgcacacaactgcaatgtgttttttaagtcaaggtgacacatgtatttaagatttttttttaaaatctctttgcagttaaatctcactttttcaaacaagcctggatcagggcaaaacaacttatatttggttttagctggaggctcagcaggcagattgcaggcaggggggcacttttcatccatgagggcccagcctggggcctgggactctgatcaccattgtggaggccagaggcagctgcgtatggaggagaaatgtcaaactgaacgcaggtttcaccactctaggaaagcagcttgttgagcccctgcagctggatgtggttagagggatgggctgaataggcaggttagatttcctgcatcaacagtgctttgggaagctgtgtggattcctgaggaagaacagggagccgagatggagccacacatgagtttgctcaccggctactgcagcactttgtacccagaatctcatgtccacaaaccccatgtaaactttcaaccactcaaagctgtttattcggctgaagaaataacttttttttctcacccagtcatttgtacctcttcatatggctatgtcgcaccctccagaaacgtggttatacttccagtcagtgtgggagaactgaagacttccggttggtcgaggaactgagggttgaccttcgggaaggaagttccactcatcttatttattatgcctgtgatgtgggtcctgccagggagacatccagtactcggtgtctttaattgccacctggggaactgtgtttattggccttctttggggcatcctggttttggatgaagtgaggggaatacagaggtaaaagaattgtctccaccctgaagcggggagtcccgcttcacatttctggaaatggtgcagccactggggacagttctgccccgggcatggttgtttcttcaaggtcctctaaatataatccctattcttacataatccttggccctgatggttttaagcaagaactcctgtgtcccatggtctccaccactcaccatcaccctgctgtagcaagagtcctagtcaggggaggtgcattttagtagttaaattgcacttatccatgagataaataaaaggagaactgtttttatcagtggaggctaacctaaaatttcaaagtgtcgcctttttgaaatcttgggcctctctctctgtagaaccaatggccctttgtggctcacggcctcgcacctaactggagagttctgagctcctgcagctcacctgagcccacagactaggcttcttggctccttccgcagcatgcctgctcacccccagaacccgcagctgtgggaagagccatgtagggaggctattcccaggcatacacttccactgccttcagctgacgtcacagctgacaaatcatctcctctatcggagccagaagacttcagctccacaaaatgaagtgttctgtcctgaaaacattcttgggaagaatcccaacatcgagaaaacggtgtcctgtgagttccaacaatgcttcttgttcatgggtttcttccgtatggagtggattaagagtgttttattttgttgttctaactgagaaaaaaaggaggcacccacaaggttgaggtcacacagtctccacagtttccaggaggcgtttgggggtggggaaggcacctccagagcatgaggctctaaggggacatgagtaaagcatgtctgtgacccagtgaggaagggagaggccagctgcactcctgcacggggttcctagctgcagaagggtcccgcctaggccgaggggaaacacctgatagcagaagaggcctggatgcacacctggcacgccgaggctctccgcccagacacagtgctccatgtcagcccctgcacctggggtgtgtgattcacgtgcacagatgccacaatcctgcaccaatatcccacagatgggggaaggtgagaggaaggggcaagtgatgtgtaactgctcaagagatgcttaaacctccatagagaggagccgggcgcaggggcatctgtgtgtcccgtcacacactgcagcagggaagggtggctggctggctccctggcatcagtggtttggtttaagctccagagggtcttattgccattgtcttttcctctgccccttgagccagcctaaggccctggagtctgtttctttaggcggatgaactgacatgctcctaccatgaccaggctctgggcaaggctcctcacagtatccttgagaggtgggcatggaagtgcccatttctcaggtacagaaaccttcagagaggataaatagcttgccctgtagaagcaggactgaaacccttgtccgcctgactcccccagctactctgcccactgtagccccctgccttactgtcctggcacacccctcaccatcctgtataccttaaatatcaaagagggcaagagagaaagggctttaaagataagttatttttttaaggaaccttaatattatttttaagaagtaaccaaattagtgacgtgaaatgcaaaaaaaaaaaaaaaaaatgctgactacccttttgaaaatgtgctttcagattgttttttatgtgtaattcttagacacttgtcattaagaaaatagtggctggcttgtgctcagcaagaagcacactggcacgtggctttggtataggaagtggaaggcaaggacctgggtttctgacaagtgcagtcagacatacacatccatctgagagctgcttgccttgttcccgtggtaaggccatggctcccacatactggaagcatatttttgtgaactgttttcagaattgggaacatattcagtggaatgtcttaaacgctgacacatcttcctcctttgaggggaagtatattttcagaagcagctaagacatttagagccaaaattgctgataggtggttcagtcaagttggctgatggcatctgaggtcaaaaactaagatgtgacgattgagttcttaaagaggtaactcttaaagtgggcccaagggagaaggcagcatctttggactcctaggctggatggctacccaagaatatgccattgaaggatgacacctattcagatgtgaaagttcccagagcaggcacctttgggtcacccaccacgtgtggctttttggtgcctgcatgaaactgtgttgccccctggtgagatgcccgggtgtcctgtaagccgatttaactctgcctgaggaagaggagctgtccactccagttgcccttggctaagtttagcctaacacacagggttttgacccatagttctaaaatacacaaattttgagactacagcacttctttggaaagaggaagaatgcaaagttcagtatttcaatactttgtattttacttgaaattacccttagtagcatcttttttttcctgtctgaaagcttttgtgtggatgagaagggacatttcatttcctcccttaacaaagtgtcattctgaggttctcatgtgtgtttttggaaatagagatactggttttgtagagtttgcctttgggtatgttttctttttttcttaaatctccaaggaagagaactgactaaaatagtaggaacatgaaagtattaaatgccaattaatttgttgtagtaaagtatcttcattagcgttatactccatcatatctggtgtaaactgctcacagaaaaccctatgaaaccaaagggggaccattcaggtctaaaaagcgacaggtccgagactgggtctgtcacctgggcattttcaaagaggacattttgaagaatttgcatattcagatttttaaaatgcacttaacatacttcattacagatttcttgggtagggaggatgggataggccagggatgggatggaatcagttctgcctgggaaactaatccgaatcatttacctttctgtattaaccttggcctgtcctaaaaagagaacgactgtttcatcatgagttgctctgagttttgttaatgtttgtgttggtggattgacggttaaatgaagcatttagctggaatatgaactttgggagttttcatgttgtcctggatttctctttgtaaacctttaaaccttagcccctggttgattgtgttaaacccattatgagaatgttatttaaagttgtattataattgcaacctccactaattattcagtactgtagcagcaaagtattatttgtaagaatttggttatttttatacttatatccactctaagtctggcgttctagtcagtaaaatgatgcaataaaattaatatcattttaaaaaaatctatgtcgggtgcggagaaagaggtaatgaaatggcaggaattcgatatcagcttatcatacct

SEQ ID NO: 2722 - protein, 1165 aa, Homo sapien
FDERIAAFQTKSGTASEMGTERAMGLSEEWTVHSQEATTSAWSPSFLPALEMGELTTPSRKRNSSGPDLSWLHFYRTAASSPLLDLSSPSESTEKLNNSTGLQSSSVSQTKTMHVATVFTDGGPRTLRSLTVSLGPVSKTEGFPKDSRIATTSSSVLLSPSAVESRRNSRVTGNPGDEEFIEPSTENEIWTYVFAWQNDSPTFGEHQLASSSEVQNGSPMSQTETVSRSVAPMRGGEITAHWLLTNSTTSADVTGSSASYPEGVNASVLTQFSDSTVQSGGSHTALGDRSYSESSSTSSSESLNSSAPRGERSIAGISYGQVRGTAIEQRTSSDHTDHTYLSSTFTKGERALLSITDNSSSSDIVESSTSYIKISNSSHSEYSSFFHAQTERSNISSYDGEYAQPSTESPVLHTSNLPSYTPTINMPNTSVVLDTDAEFVSDSSSSSSSSSSSSSSGPPLPLPSVSQSHHLFSSILPSTRASVHLLKSTSDASTPWSSSPSPLPVSLTTSTSAPLSVSQTTLPQSSSTPVLPRARETPVTSFQTSTMTSFMTMLHSSQTADLKSQSTPHQEKVITESKSPSLVSLPTESTKAVTTNSPLPPSLTESSTEQTLPATSTNLAQMSPTFTTTILKTSQPLMTTPGTLSSTASLVTGPIAVQTTAGKTALADPSEILVPQISTEGGISTERNRVIVDATTGLIPLTSVPTSAKEMTTKLGVTAEYSPASRSLGTSPSPQTTVVSTAEDLAPKSATFAVQSSTQSPTTLSSSASVNSCAVNPCLHNGECVADNTSRGYHCRCPPSWQGDDCSVDVNECLSNPCPSTATCNNTQGSFICKCPVGYQLEKGICNLVRTFVTEFKLKRTFLNTTVEKHSDLQEVENEITKTLNMCFSALPSYIRSTVHASRESNAVVISLQTTFSLASNVTLFDLADRMQKCVNSCKSSAEVCQLLGSQRRIFRAGSLCKRKSPECDKDTSICTDLDGVALCQCKSGYFQFNKMDHSCRACEDGYRLENETCMSCPFGLGGLNCGNPYQLITVVIAAAGGGLLLILGIALIVTCCRKNKNDISKLIFKSGDFQMSPYAEYPKNPRSQEWGREAIEMHENGSTKNLLQMTDVYYSPTSVRNPELERNGLYPAYTGLPGSRHSCIFPGQYNPSFISDESRRRDYF

SEQ ID NO: 2723 - DNA, 1339 bp, Homo sapien
ctaaacaaaatcattcacttccctgattttgataagaaaattcctgtaaagctgtttcctctgcctctcctctacgttggaaaccacataagtggattatcaagcacaagtaaattaagcctaccgatgttcaccgtgctcaggaaattcaccattccacttaccttacttctggaaaccatcatacttgggaagcagtattcactcaacatcatcctcagtgtctttgccattattctcggggctttcatagcagctgggtctgaccttgcttttaacttagaaggctatatttttgtattcctgaatgatatcttcacatcagcaaatggagtttataccaaacagaaaatggacccaaaggagctagggaaatacggagtacttttctacaatgcctgcttcatgattatcccaactcttattattagtgtctccactggagacctccaacaggctactgaattcaaccaatggaagaatgttgtgtttatcctacagtttcttctttcctgttttttggggtttctgctgatgtactccacggttctgtgcagctattacaattcagccctgacgacagcagtggttggagccatcaagaatgtatccgttgcctacattgggatattaatcggtggagactacattttctctttgttaaactttgtagggttaaatatttgcatggcagggggcttgagatattcctttttaacactgagcagccagttaaaacctaaacctgtgggtgaagaaaacatctgtttggatttgaagagctaaagagtctgcagcaggattggagactgacttgtgactgcgggctgggggggcattcccagtaggaatgtgaagccagaggtttcggattcgtgacatccaccccctgggcaagtgagagcatctgcaaaatgcaaagagaactacctcatatgcaggatgagccaatggcagtctcaagaaatgtactcgggcgacaccttacctgtggaaagcaaatcttttcaaaataagccactgggactcggtaggtggagccccagctgctcttctagggacctatggggccttcgtggcatctctgtgctgtgtgctggggaggaggttgatgtaatggtgactcttttctgatcagcaccttggccgtgattcccaaggtcccagccaaagcaaagggccagttgtttcagtttaaacagacatgtctttagtctaataaaattagttaactgccagtaaagttatttgttagctttgatgaaagctatgttggtatctttccctaatcatcaaagtaaataaaaaatcatttctatgtaaaaaaaaaaaaaaaaaa

SEQ ID NO: 2724 - protein, 261 aa, Homo sapien
LNKIIHFPDFDKKIPVKLFPLPLLYVGNHISGLSSTSKLSLPMFTVLRKFTIPLTLLLETIILGKQYSLNIILSVFAIILGAFIAAGSDLAFNLEGYIFVFLNDIFTSANGVYTKQKMDPKELGKYGVLFYNACFMIIPTLIISVSTGDLQQATEFNQWKNVVFILQFLLSCFLGFLLMYSTVLCSYYNSALTTAVVGAIKNVSVAYIGILIGGDYIFSLLNFVGLNICMAGGLRYSFLTLSSQLKPKPVGEENICLDLKS

SEQ ID NO: 2725 - DNA, 546 bp, Homo sapien
attggagacccttttcacaagatggcgccgaaagcgaagaaggaagctcctgcccctcctaaagctgaagccaaagcgaaggctttaaaggccaagaaggcagtgttgaaaggtgtccacagccacaaaaagaagaagatccgcacgtcacccaccttccggcggccgaagacactgcgactccggagacagcccaaatatcctcggaagagcgctcccaggagaaacaagcttgaccactatgctatcatcaagtttccgctgaccactgagtctgccatgaagaagatagaagacaacaacacacttgtgttcattgtggatgttaaagccaacaagcaccagattaaacaggctgtgaagaagctgtatgacattgatgtggccaaggtcaacaccctgattcggcctgatggagagaagaaggcatatgttcgactggctcctgattacgatgctttggatgttgccaacaaaattgggatcatctaaactgagtccagctgcctaattctgaatatatatatatatatatcttttcaccat

SEQ ID NO: 2726 - protein, 156 aa, Homo sapien [sequence omitted]

SEQ ID NO: 2727 - DNA, 5183 bp, Homo sapien
ggaataacaaaacatgctcttaaccatcatccccctccagagaagctggaggaaatttcccccaccagtgacagtcatgagaaagacacaagttcccaaagcaagtctgacatcacaagagaatcatcttttacatcagccgacactgggaattcactgtctgcttttccaagttatacaggcgcagggatatctactgaaggaagctcggacttctcctggggatatggtgaactcgatcaaaatgccactgaaaaagtccagacaatgttcacagccattgatgaactcttgtatgagcagaagttgagtgtgcataccaagagtctacaagaagagtgccaacagtggacagctagctttcctcacctcaggattctaggtaggcagataatcactccaagtgaaggttatagattgtatcctagatccccttctgctgtttccgcttcatatgaaacaaccttgtctcaagaaagagattctactatatttggtataaggggaaagaagttacatttttcatcttcttatgctcataaagcatcttccattgccaaatcctccagcttttgttctatggaaagagatgaggaagactctataatcgtctcagaaggaataattgaggaatacctagcattcgatcacatagatatagaagagggatttcatgggaagaaatcagaagcagctacagagaaacagaaattagggtatcctcccattgctccattttactgcatgaaagaagatgtccttgcttatgtgtttgacagtgtatggtgcaaggttgtgagctgtatggagcagttgacacgtagtcactgggaaggatttgcctctgatgatgagagtaatgttgcagttaccagacccgattcagaaagttcctgtgtgctgagtgaactacatcctttggtgttaccgcgagtgccacagtctaaggtgctgtacattacctcaaatccgatgagtctctgtcaagcaagcagacatcagccaaatgtgaatgatctcttggttcatggaatgcctctacagccaagaaatctctccctaatggacaagctcctagatcttgatgacaagctacttatgaggcctgggtccagtaccatcctttcaactcgaaattggccaaatcgagctgtggagtttagtacatcatctctgtcatacacagtgcagtccaccaggagacgcaatccaccaccacgaactcttcatccgatcagcacgagccattcatgtgctgaaacaccaagatctgtggaagaaatcctcagaggagcccgagtcccagtggcacccgactcgctctcctctccctcaccgacgcccctgagtcgaaataatctgctaccacctattggcacagctgaagtggaacatgtgagcactgtggggccacaaagacagatgaaaccccatggcgactctagtcgagctcaaagtgcggtggtggatgaacctaactatcagcagccacaagaaaggctccttttgcccgactttttccccaggcccaacacaactcaatcatttttgctggatacacagtatcgtcgctcatgtgcagttgagtatcctcatcaggcccgacctggcaggggatctgcaggtcctcagttacatgggtctacaaaatctcaaagcggaggcagaccagtctctcgaaccaggcagggaccataaggcaaatgagaagaatctatcaggctgcaggaaacacgagatttcatgaagcagtattcagtcatcaagtgatgcagagcttgtatagaagatcgactagaaatcatcttcatgaagagtgattttggcacaagtgaccgaagaacaaaacaccatagcagccaaaaatgacatgagtgttgtttctatctccagttactgtctctttcagcagaaattaacctatcccattggaaaggcaagtttgtacccaaagatgcaacagtgaataatacccaaatcactgctcatgttatctcttaacaatgatcagttcaatcatataggatttgatgagctcacacatacacaaaaagcagcaaatcatcagtgacaatatcactggcttcagaatacttcagcctgtgttcatttctggagagttgtactcagttttaagtcattttgctgttgaaaatctgacctcatcaaatagatgtcattcctaaaactctctttagatgtcctaccctatcagcagattaaaatggaaggggtgtgtaactaaaaacataaatgttaagcattagtataaagtaacttctgtaataaattatatcgcatattttttcagataggacagctcaaccttacgatgcctacctgatgccaggtgatgcttattttcttcctaaagtaggttactggtcatatcttttttccaaatattaaatgcaccttgccagatattctcctgcagctctaaggaaaggaaatcaatttaaaaataatttgtagaatctactattgagccaccaaagtataattccctaaaagtttaagaaaccctggcaattaattcagcataaacatatcctataaacagcaggagaggttcagctttctgattttactgtggaccttttcctaagggcattcatgaatgcagcaacagttttaactatggcttacatttattttaaatttcactaaatacaaatcttgattgtcatgccagttttagatcttattaattttcagaatggataaattcaaataatcataaattacggtaactttttattataccaaggtgttctaatgccatcatatgaagacagatgcttcaaacaacctgcattaaattatatttttaataaaattaaaatctatttttaacctatttgtagtcacaaaccgaaaacgtgtcgtctttaccttagagctaaaggcttactttatgcatacggtatatttaatagtctacaaatcaaagatttaaacagtcccttaaaaattccatatattttcataccaactcatctacatagaaatgaaaatctctattgttctcacaaaccattaccatgagttcactataacaactggatcaatatggcttgcctttcaaagttaaagaatcagaaaggggcctgtaagaagtcatttagcccaattccctcaccctgtgtgttttccctcaaagccagtgcaatttttttttaaccaaaaaactggacatgtttaatacatacagtttgacaaatttggatttcactctttgttttgatgtagtaactcttttataaaagggaacagattcagacaagctcagtggcccaactgaagacattcagcaattaatggcaggacttcagtaatcagtggcaggactacaacatacatctcttcatgctagggaaaccaggctctctattataaagctgaccagggctattgttttccccttttctctcatcctaaacaccattcatatttttcctaggtcacattttagtgggatcatttacaaagcccccagaacttaatcatcatgttttaccttttttattgaattatatacacctcttacaaaaatgcttgaagtaatttaacacctgtacatcagtacaaaacctggctgagtaaaatgaagagaggatctattcaagatcattaagaccaaatgtaaactgggaagtatgtggaagatagctgtccagcaagtgtctggaaggtgttctagctgggtagagagcctattctaacagacacgcacatcgcagaaagcagcatgaacagaaccacatcctagataagagttctgtgtacagaagatccatggaggcaagtgctgtcaggaaggacactgcctccctccaccctcccaaatgtcaccaccaagttccttcaggtgagacctcacacaatgtcaagtgctttctaggaaatactaagatcaggttgagagattctgcttggtctagtcaatctgaaaaattcaggctggaaagacaccttttctcaagagctgaattgacttttgccttcaaatcctgcctgcaccttgcctacgatggcatcaatttacacctaaggacctttgaagagaaaaattccattatttcttttctttcttgagagcagattttttccctcctcctttggaagatttgcagtactttgcttccatctgagccagaaaattgtccatttccttttgccgatccttttgtctgctctgtttgagaagttaaaacacaagctttcacaacattatccatagacagaaagtacctagtggttgccaggggctggaaaagtggaataactactaatgggtatggagtttttttggaatggtgaaaatgtcctacaattggtgttaataattgtaaaactttgtaaatacacttaaaaccaccaaattgtacactttaaaaggacaaatagaaggtatgcggttatgtcttaaaagaagaaaacaaaatacaacattccaaagaaaatattagcagtaggaatcagatcattaaagatgtggcaacaaactgccaagtttacctgaatggctgccttcaggctatccacgccttcatcaagccccaactcctttctgctcatttctgcttctttggcctcttcctgagcctgaaacaggaactcacatgagactcagggccaccaggaaatgcttaaaatacatactctttcccaaaagcaaatctataattctgtttcaattttatgaatatatgaatagacaaaatgaatcgaattacataactatgtcattcattaaatggcaacaatgctgacagcaagcagtagatcctctgattccaattaccatttgttttttacccaattctatttgctagaggtagtaagtactctggcactcataaatcacatgatgataaaaaggaacatgaggccgggtatggtggctcacaactgtaatccccataccttgggaggccaaggtgggaggatcacttgaactcaggagttcaagacctgcctgggtaacatagtgagacctcagttctataaaaaagaaaagaaatgagcctggtgtggtggcatgtgcttgtagtcccagctactagggaggctgaggtgggaagatggcttcagtctgagagttcaggctgcaataagctgtgatcatgcctctgcactccagcctgggtgatggagatgccatctcttagaaaaaagag

SEQ ID NO: 2728 - protein, 565 aa, Homo sapien
GITKHALNHHPPPEKLEEISPTSDSHEKDTSSQSKSDITRESSFTSADTGNSLSAFPSYTGAGISTEGSSDFSWGYGELDQNATEKVQTMFTAIDELLYEQKLSVHTKSLQEECQQWTASFPHLRILGRQIITPSEGYRLYPRSPSAVSASYETTLSQERDSTIFGIRGKKLHFSSSYAHKASSIAKSSSFCSMERDEEDSIIVSEGIIEEYLAFDHIDIEEGFHGKKSEAATEKQKLGYPPIAPFYCMKEDVLAYVFDSVWCKVVSCMEQLTRSHWEGFASDDESNVAVTRPDSESSCVLSELHPLVLPRVPQSKVLYITSNPMSLCQASRHQPNVNDLLVHGMPLQPRNLSLMDKLLDLDDKLLMRPGSSTILSTRNWPNRAVEFSTSSLSYTVQSTRRRNPPPRTLHPISTSHSCAETPRSVEEILRGARVPVAPDSLSSPSPTPLSRNNLLPPIGTAEVEHVSTVGPQRQMKPHGDSSRAQSAVVDEPNYQQPQERLLLPDFFPRPNTTQSFLLDTQYRRSCAVEYPHQARPGRGSAGPQLHGSTKSQSGGRPVSRTRQGP

SEQ ID NO: 2729 - DNA, 2446 bp, Homo sapien
attcacgagtcctgcatgagccagataggctggaaccgcatcatcgtggagaagcccttcgggagggacctgcagagctctgaccggctgtccaaccacatctcctccctgttccgtgaggaccagatctaccgcatcgaccactacctgggcaaggagatggtgcagaacctcatggtgctgagatttgccaacaggatcttcggccccatctggaaccgggacaacatcgcctgcgttatcctcaccttcaaggagccctttggcactgagggtcgcgggggctatttcgatgaatttgggatcatccgggacgtgatgcagaaccacctactgcagatgctgtgtctggtggccatggagaagcccgcctccaccaactcagatgacgtccgtgatgagaaggtcaaggtgttgaaatgcatctcagaggtgcaggccaacaatgtggtcctgggccagtacgtggggaaccccgatggagagggcgaggccaccaaagggtacctggacgaccccacggtgccccgcgggtccaccaccgccacttttgcagccgtcgtcctctatgtggagaatgagaggtgggatggggtgcccttcatcctgcgctgcggcaaggccctgaacgagcgcaaggccgaggtgaggctgcagttccatgatgtggccggcgacatcttccaccagcagtgcaagcgcaacgagctggtgatccgcgtgcagcccaacgaggccgtgtacaccaagatgatgaccaagaagccgggcatgttcttcaaccccgaggagtcggagctggacctgacctacggcaacagatacaagaacgtgaagctccctgagccctacgagcgcctcatcctggacgtcttctgcgggagccagatgcacttcgtgcgcagcgacgagctccgtgaggcctggcgtattttcaccccactgctgcaccagattgagctggagaagcccaagcccatcccctatatttatggcagccgaggccccacggaggcagacgagctgatgaagagagtgggtttccagtatgagggcacctacaagtgggtgaacccccacaagctctgagccctgggcacccacctccacccccgccacggccaccctccttcccgccgccgacccgagtcgggaggactccgggaccattgacctcagctgcacattcctggccccgggctctggcaccctggccgcccctcgctgctgctactacccgagcccagctacattcctcagctgccaagcactcgagaccatcctggcccctccagaccctgcctgagcccaggagctgagtcacctcctccactcactccagcccaacagaaggaaggaggagggcgcccattcgtctgtcccagagcttattggccactgggtctcactcctgagtggggccagggtgggagggagggacaagggggaggaaaggggcgagcacccacgtgagagaatctgctgtgccttgcccgccagcctcagtgccacttgacattccttgtcaccagcaacatctcgagccccctggatgtcccctgtcccaccaactctgcactccatggccaccccgtgccacccgtaggcagcctctctgctataagaaaagcagacgcagcagctgggacccctcccaacctcaatgccctgtaaggattttgcccactgggcaactcagaaatacttcgatctcccaagatataagaggcagcagcaaacgtgcctattgacgtctgtttcatagttaccacttacgcgagtagacagaactcggcttttcagaaaataggtgtcaagtccactttataagaacctttttttctaaaataagataaaaggtggctttgcattttctgattaaacgactgtgtctttgtcacctctgcttaactttaggagtatccattcctgtgattgtagacttttgttgatattcttcctggaagaatatcattcttttcttgaagggttggtttactagaatattcaaaatcaatcatgaaggcagttactattttgagtctaaaggttttctaaaaattaacctcacatcccttctgttagggtctttcagaatatcttttataaacagaagcatttgaagtcattgcttttgctacatgatttgtgtgtgtgaaggacataccacgtttaaatcattaattgaaaaacatcatataagccccaactttgtttggaggaagagacggaggttgaggtttttccttctgtataagcacctactgacaaaatgtagaggccattcaaccgtcaaacaccatttggttatatcgcagaggagacggatgtgtaaattactgcattgctttttttttcagtttgtataacctctaatctccgtttgcatgatacgctttgttagaaacattaattgtagtttggaagcaagtgtgtatgggaattc

SEQ ID NO: 2730 - DNA, 5182 bp, Homo sapien
accttcagttcctccaagtcctggaagactgagacaaggggaagaaagcaagataagtgcgatggatgcatctccacggaatatttctccaggacttcagaatggagaaaaagaggatcgcttcttaacaactttgtccagccagagctccaccagttctactcatctccaattgcctacgccacctgaagtcatgtctgaacagtcagtgggagggccccctgagctagatacagccagcagttccgaagatgtgtttgatgggcatttgctgggatccacagacagccaagtgaaggaaaagtcaaccatgaaagccatctttgcaaatttgcttccaggaaatagctataatcctattccatttccttttgatccagataaacactacttaatgtatgaacatgaacgagtgcccattgcagtctgcgagaaggaacccagctccatcattgcttttgctctcagttgtaaagaataccgaaatgccttagaggaattgtctaaagcgactcagtggaacagtgccgaagaagggcttccaacaaatagtacttcagatagcagaccaaagagtagcagccctatcagattacctgaaatgagtggaggacagacaaatcgtacaacagaaacagaaccacaaccaaccaaaaaggcttctggaatgttgtccttcttcagagggacagcagggaaaagccccgatctctcttcccagaagagagagaccttacgtggagcagatagtgcttactaccaggttgggcagacaggcaaggaggggaccgagaatcaaggcgttgagcctcaagatgaagtagatggaggagatacgcaaaagaagcaactcataaatcctcatgtggaacttcaattttcagatgctaatgccaagttttactgtcggctctactatgcgggagagtttcataagatgcgtgaagtgattctggacagcagtgaggaagatttcattcgttccctctcccactcatcaccctggcaggcccggggaggcaaatcaggagctgccttctatgcaactgaggatgatagatttattttgaagcaaatgcctcgtctggaagtccagtccttcctcgactttgcaccacattacttcaattatattacaaatgctgttcaacaaaagaggcccacggcgttggccaaaattcttggagtttacagaattggttataagaactctcagaacaacactgagaagaagttagatctccttgtcatggaaaatcttttctacgggagaaagatggcacaggtttttgatttgaagggctctcttaggaatcggaatgtaaaaactgacactggaaaagagagttgtgatgtggtcctgctagatgaaaatctcctaaagatggttcgagacaaccctctatatattcgttctcattccaaagctgtgctgagaacctcgatccatagtgactcccatttcctttctagccacctcattatagattattctttgctggttgggcgagatgatactagcaatgagctagtagttggaattatagattatattcgaacatttacatgggacaaaaagcttgagatggttgtgaaatcaacaggaattttaggtggacaaggtaaaatgccaacagtggtgtctccggagttgtacaggactaggttttgtgaggcaatggacaagtatttcctaatggtaccagaccactggacaggcttgggtctgaattgctgaaatcaagcacatattttgaaatggactgtgaaggaaaaggggacaggaacaaaggaccaaaaataagctacatgttttatttcttcatcgtgttcaccactgtatgccaaggcttttcagttctgtgtctgtttagactgtccgtaatggaatggtaaaactccatgaatttgcactttggtttttgatacctgtggagctgtctgtacgttgggaagtggcatgaaaattttcttaagctaaaatacagacatgtttcaaagggctaaagttggagatgagtagatagggtgaaaaatgggttaaatttgctagcttaattgttttaagaagaaaacagtgtctcataaattgactatcctggcatcacatttaacatgttatctacttagaaagcatttgtagagctgctgaatttgttttgtgtttttctgtaataatttaatgttacttattatcagaatttctgaaacctttacaaaaattctgatttattccattaatggccagttaaacacgtgggcatttattgttttattgaggaatttgacttaaactgggaatcctgtcatgttgtttatctttccagcttgcctgtttttgagtatgtttgatgtttttaaaattttgtcttctctgtggatgacaggaggctacagcaattaactttaagcctccttttagagatatttttaaagcttgtttaaaatttttgtgcaattcatatattaaattgcacttacttgcatacgctcatattctagggttttttctctatttttagggtatcatagtaaatcattagtaaatgagtctgtagttactaaaccctaatggaataattattaatgaaagatttttgaaatataaaaaataaattaggcccaatccaagaaattgagtgagaaggaaacacttgttttattcacagaggtaaagtgtcttttcaatataaccagcaatttaggtggcatctataaaataaaaaatttctactgtggacatccccttttccaactttctacataatggctagttctgactactaagaaatgttaagaaataggccaagtgcggtggctcacgcctataatcctatcactttgggaggcctaggcaggcagatcacctgaggtcaggagttcaagaccagcctggccaacatgaggaaaccccatctctactaaaaagacaaaaaattagctgggcatggtggcatatacctgtaaccccaactacttgggtggctgaggcaggagaattgtttgaacctgggaggcggaggctgcagtgagctgggattacaccattgcattccagcctgggcaacagagcaagactgtctcaaaaaacaaaacgaaacaaaaaaagaaagttattcttagtaaggaacttcttgtttaatagcatttttgtttattttaaaaagtgatcagaagtagtaaactatctttgaggaaatactgtaaccccagaatatttcctcttgacttctttttgtaacaaggataatttagggatttataaagttgtaaggatttcactgttttcggactgcctataataatagcacattaaccttcacataataagaaatctggacaagttcagttacacagtatgatgaatacttgaattaggaacattgtggaaaatttgctttagagaatcaaggcagtagtttggtatttggtgcttattaaaaatgtggtttgttttgaactggaagcaagttgaccaaggacttatgactaatgtgatgctaagttccacttggccccttttaaaaacgtgtatgtgccttttgaagatacacaaaacactgaggattttagttttgaaatcaaagactattaaaggagctgtacagaggtaaaaaaataaatgtggaacattattaacttattttgtgtctaggaacaatggattttgtatctgatttaaaatgccaacactgttttgtctctgttcattttttctgtgaggatacttaaggttattattcctgtctgtttcctgtactcccctagtcatgagcacttgaagtacaaggtgtctccccctaggtgcaattaggttgtttctttgtttttagtttcaattctatgtgcatagcaggaatgctccacaggaatggcttctgacaataatctgtcctgttgattttgttttccttgcccatgacttgaacaactgtgttttaaagtactgtagtctagtaggtaactttgtggcaaaaattttcaatataatacattctgaaacaatagttgctgccttgcaaaggtaatctctcattttaaaattggacagtattaatgaaggggaaatatacaatttatttctattgagtggtagaactatatgtctggtcccttgctgctcttgtttaggccactatcatagatatatttcaaatattgtactactcagtgttaagtattgaatgactgtttccctttccttcaaggcctagagtatattctgaaaatttaggaatgaggaagaaatcttaatacttccttccttaacatacaacatgagtcccgagaataattgatagtagcaagagaaaactatgtcagtaacatgttgctttgtataaaaatcttatttataaatgtgaagctttttgatgccatcaaaacttattaaaaaataggatttacttttttctaattctgacctaagaaaaataatgagaacaagctgttgcaagctcttttgtagtctattgaatattttatagatattcaaaatttcctacaaactataattttttccatgatttagcagtgagtgattttctagctttggctcttattaggtattgtaaatagtagggttatatcgatatcagcttttgtgatggcattgtggtcatcagcttcatgacattttacccatttgcagtgatcctgtgtaaaactgccaaggaaagtaattacctgtaggagtttgctgagcttgaagagtgaaaactgttgtgaatgagcctgatcataaaacggaccaggccattcattattcctcaagtgttaatatactgacttatgcagtattcaaaccatctagtgcaatgtttttgtttttgttttttttttttttggtaacacaggtgcagtgtattatagaaaaaataaaaactacaatcattagcagttttaatactgctgtgtcagttttgtaaaaaatgtacattatgtcttttgacatgttgaattttaaactagggaaatgacattgtaaatcatagtagcctcttttaatttaatatgaaaaatgccactatattgaaagtacttaatgtattgtatatatttctctactttggttctagctattttatatgattgacatgttatttaaaagataactgccttgaacttttggagacttgtactgtaaataaagaaatcttaacaataaactcagaatctactt

SEQ ID NO: 2731 - protein, 578 aa, Homo sapien
PSVPPSPGRLRQGEESKISAMDASPRNISPGLQNGEKEDRFLTTLSSQSSTSSTHLQLPTPPEVMSEQSVGGPPELDTASSSEDVFDGHLLGSTDSQVKEKSTMKAIFANLLPGNSYNPIPFPFDPDKHYLMYEHERVPIAVCEKEPSSIIAFALSCKEYRNALEELSKATQWNSAEEGLPTNSTSDSRPKSSSPIRLPEMSGGQTNRTTETEPQPTKKASGMLSFFRGTAGKSPDLSSQKRETLRGADSAYYQVGQTGKEGTENQGVEPQDEVDGGDTQKKQLINPHVELQFSDANAKFYCRLYYAGEFHKMREVILDSSEEDFIRSLSHSSPWQARGGKSGAAFYATEDDRFILKQMPRLEVQSFLDFAPHYFNYITNAVQQKRPTALAKILGVYRIGYKNSQNNTEKKLDLLVMENLFYGRKMAQVFDLKGSLRNRNVKTDTGKESCDVVLLDENLLKMVRDNPLYIRSHSKAVLRTSIHSDSHFLSSHLIIDYSLLVGRDDTSNELVVGIIDYIRTFTWDKKLEMVVKSTGILGGQGKMPTVVSPELYRTRFCEAMDKYFLMVPDHWTGLGLNC

SEQ ID NO: 2732 - DNA, 2630 bp, Homo sapien
cggacgcgtgggcggacgcgtgggcggacgcgtgggctctgggagtgtgaaactgggagagacggttaagctggggacggtattcagaattcgagcgcaggagctccgcttctccacctgctcccggggagctattgggatccagagaatcacccgctgatggtttttccccaggcctgaaacaaccagagagctacgggaaaggaagggcttggcttgccagaggaattttccaagtgctcaaacgccaggcttacggcgcctgtgatccgtccaggaggacaaagtgggatttgaagatccactccacttctgctcatggcgggccagggcctgcccctgcacgtggccacactgctgactgggctgctggaatgcctgggctttgctggcgtcctctttggctggccttcactagtgtttgtcttcaagaatgaagattactttaaggatctgtgtggaccagatgctgggccgattggcaatgccacagggcaggctgactgcaaagcccaggatgagaggttctcactcatcttcaccctggggtccttcatgaacaacttcatgacattccccactggctacatctttgaccggttcaagaccaccgtggcacgcctcatagccatatttttctacaccaccgccacactcatcatagccttcacctctgcaggctcagccgtgctgctcttcctggccatgccaatgctcaccattgggggaatcctgtttctcatcaccaacctgcagattgggaacctatttggccaacaccgttcgaccatcatcactctgtacaatggagcatttgactcttcctcggcagtcttccttattattaagcttctttatgaaaaaggcatcagcctcagggcctccttcatcttcatctctgtctgcagtacctggcatgtagcacgcactttcctcctgatgccccgggggcacatcccatacccactgccccccaactacagctatggcctgtgccctgggaatggcaccacaaaggaagagaaggaaacagctgagcatgaaaacagggagctacagtcaaaggagttcctttcagcgaaggaagagaccccaggggcagggcagaagcaggaactccgctccttctggagctacgctttctctcggcgctttgcctggcacctggtgtggctgtctgtgatacagttgtggcactacctcttcattggcactctcaactccttgctgaccaacatggccggtggggacatggcacgagtcagcacctacacaaatgcctttgccttcactcagttcggagtgctgtgtgccccctggaatggcctgctcatggaccggcttaaacagaagtaccagaaggaagcaagaaagacaggttcctccactttggcggtggccctctgctcgacggtgccttcgctggccctgacatccctgctgtgcctgggcttcgccctctgtgcctcagtccccatcctccctctccagtacctcaccttcatcctgcaagtgatcagccgctccttcctctatgggagcaacgcggccttcctcacccttgctttcccttcagagcactttggcaagctctttgggctggtgatggccttgtcggctgtggtgtctctgctccagttccccatcttcaccctcatcaaaggctcccttcagaatgacccattttacgtgaatgtgatgttcatgcttgccattcttctgacattcttccacccctttctggtatatcgggaatgccgtacttggaaagaaagtccctctgcaattgcatagttcagaagccctcacttttcagccccgaggatggttttgttcatcttccaccacctttgaggacctcgtgtcccaaaagactttgcctatcccagcaaaacacacacacacacacacacacacacaaaataaagacacacaaggacgtctgcgcagcaagaaaagaatctcagttgccaagcagattgatatcacacagactcaaagcaaaggcatgtggaacttctttatttcaaaacagaagtgtctccttgcacttagccttggcagacccttgactccaggggagatgacctgggggaggaagtgtgtcaactatttctttaggcctgtttggctccgaagcctatatgtgcctggatcctctgccacgggttaaattttcaggtgaagagtgaggttgtcatggcctcagctatgcttcctggctctccctcaagagtgcagccttggctagagaactcacagctctgggaaaaagaggagcagacagggttccctgggcccagtctcagcccagccactgatgctggatgaccttggcctgaccctggtctggtctcagaatcacttttcccatctgtaaaattgagatgaattttggtgttgaaagttcttcctggagcagatgtcctagaaggttttaggaatagtgacagagtcaggccaccccaagggccatgggagccagctgacctgcttgaccgaaggatttctgacagactatctttggggatgttttcaagaagggatataagttatttactttgggcatttaaaagaaaatttctctcgggaataattttatagaaaaataaagcttctgtgtctaaggc

SEQ ID NO: 2733 - protein, 491 aa, Homo sapien
MAGQGLPLHVATLLTGLLECLGFAGVLFGWPSLVFVFKNEDYFKDLCGPDAGPIGNATGQADCKAQDERFSLIFTLGSFMNNFMTFPTGYIFDRFKTTVARLIAIFFYTTATLIIAFTSAGSAVLLFLAMPMLTIGGILFLITNLQIGNLFGQHRSTIITLYNGAFDSSSAVFLIIKLLYEKGISLRASFIFISVCSTWHVARTFLLMPRGHIPYPLPPNYSYGLCPGNGTTKEEKETAEHENRELQSKEFLSAKEETPGAGQKQELRSFWSYAFSRRFAWHLVWLSVIQLWHYLFIGTLNSLLTNMAGGDMARVSTYTNAFAFTQFGVLCAPWNGLLMDRLKQKYQKEARKTGSSTLAVALCSTVPSLALTSLLCLGFALCASVPILPLQYLTFILQVISRSFLYGSNAAFLTLAFPSEHFGKLFGLVMALSAVVSLLQFPIFTLIKGSLQNDPFYVNVMFMLAILLTFFHPFLVYRECRTWKESPSAIA

SEQ ID NO: 2734 - DNA, 1086 bp, Homo sapien
gggcgggcccgcacccctgcgaacatggcgctgcgagtggtgcggagcgtgcgggccctgctctgcaccctgcgcgcggtcccgttacccgccgcgccctgcccgccgaggccctggcagctgggggtgggcgccgtccgtacgctgcgcactggacccgctctgctctcggtgcgtaaattcacagagaaacacgaatgggtaacaacagaaaatggcattggaacagtgggaatcagcaattttgcacaggaagcgttgggagatgttgtttattgtagtctccctgaagttgggacaaaattgaacaaacaagatgagtttggtgctttggaaagtgtgaaagctgctagtgaactctattctcctttatcaggagaagtaactgaaattaatgaagctcttgcagaaaatccaggacttgtaaacaaatcttgttatgaagatggttggctgatcaagatgacactgagtaacccttcagaactagatgaacttatgagtgaagaagcatatgagaaatacataaaatctattgaggagtgaaaatggaactcctaaataaactagtatgaaataacgcaagccagcagagttgtcttaaattagtggtggatagaagacttagaatagaaacttttagtattaccgatggggaaaaaaaaactactgttaacactgctaatgaaagaaaatgccctttaactttctaatgattatagataaatataatatgcgtctttttcacaatatcctatgatttttagactaggctctagtgttcagaattcatgaaattatccatggtaaaaactagttataaaaattacataattcaaagataacattgttattcttaagccttatataatattgtaacttgcatgtatccatacctggatttgggatgaaatacttaatgatctttccattggaaataactggaagtgaagaggttttgttgcttgtacagtgtcagatgaggaacaccactatcttaattttgcgatacactgcatttgctggtgctatttttatacagtgaagcaacagctttgcagcaaaataataaaatacttcttcgtt

SEQ ID NO: 2735 - protein, 173 aa, Homo sapien
MALRVVRSVRALLCTLRAVPLPAAPCPPRPWQLGVGAVRTLRTGPALLSVRKFTEKHEWVTTENGIGTVGISNFAQEALGDVVYCSLPEVGTKLNKQDEFGALESVKAASELYSPLSGEVTEINEALAENPGLVNKSCYEDGWLIKMTLSNPSELDELMSEEAYEKYIKSIEE

SEQ ID NO: 2736 - DNA, 1378 bp, Homo sapien; identical to SEQ ID NO: 1383

SEQ ID NO: 2737 - protein, 252 aa, Homo sapien; identical to SEQ ID NO: 1384

SEQ ID NO: 2738 - DNA, 2173 bp, Homo sapien
cggtccggacagccgcgcgctgagggtctcggggcgggcgccgcgggacctctccgggccatggcagcccctgtcaaagggaacaggaagcagtccacggagggtgacgccctagacccacctgcatcccccaaacctgctggcaagcagaacggaatccagaaccccatctcgctggaggactcccccgaggcaggcggggagcgggaggaggagcaggagcgggaggaggagcaggccttcctggtcagcctctacaagttcatgaaggagcgacacacgcccatcgagagggtgccccatctcggcttcaagcagattaacctgtggaagatctacaaagcagtggagaagctgggggcctatgagctggtgaccgggcgccgcctctggaagaacgtgtacgacgagctggggggcagcccaggcagcaccagcgcggccacgtgcacgcgccgccactacgagaggctggtcctgccatacgtgcggcacctgaagggggaggatgacaagccgctgcccacctccaagcccaggaaacagtacaagatggctaaggagaacaggggggatgatggggccaccgagaggccgaagaaggccaaggaggagcggcgcatggaccagatgatgccaggaaagaccaaagcagatgctgctgacccagcaccacttcccagccaggagccccccaggaacagcacagaacagcagggcctggcctctgggtcttctgtgtcctttgtgggtgccagcggctgtcctgaggcctacaagcggctcctatccagcttctactgcaaggggacacacggcatcatgtcaccactggccaaaaagaagctcctggcccaggtgagcaaggtggaggccttgcagtgccaggaggagggctgccgccatggggcagagccccaggcgtccccagctgttcacctcccagagagtccccagagccccaaagggctgactgagaactccaggcaccggctgacccctcaggagggattgcaggccccaggtggcagcctcagagaggaggcgcaggcaggcccctgcccggcagcccccatcttcaagggctgcttctacacccaccccaccgaggtgctgaagcctgtcagccagcaccccagggacttcttctctagacttaaagatggggtgctattggggcctcctggcaaagaggggctgtcagtgaaagagccccagctggtgtggggcggagacgctaaccgcccttctgcgttccataaaggtggctccagaaagggcatcctctaccccaagcccaaagcctgctgggtgtcccccatggccaaggtcccagccgagagccccacgctcccgcccaccttccccagtagcccaggcctgggcagcaagcgcagcctggaggaagagggtgctgcccacagtgggaagagactgcgggccgtgtctccctttcttaaggaggcggatgccaagaagtgtggggccaaacctgcagggtccggcctggtctcctgccttctgggcccagccctggggcctgtgcccccagaggcctacaggggcaccatgctgcactgcccgctgaacttcactggcaccccgggccccttgaagggccaggctgcactccccttcagccccctggtcatcccggccttcccggcccacttcctggccaccgcaggcccctcgcccatggccgctggcctgatgcacttccccccaacgtccttcgacagtgccctccgccacagactttgcccggcctcatctgcctggcacgcaccaccagtcacaacctatgcagcgccccacttcttccacctcaacaccaagctgtaggccagcccatggtgttgtgtacactgtggagtcgacaggggcctacaacaggcaggtactgctgccagggggctctgaactagtgcctgctacccaggacacccgggccatgcccctggctgggcagcctggcacaagtgaagaagaaggcagtgggaaaactgggtttatctcaaggcagcagcctgagcccaggagcagaggacccagttgttataaggcgctgggagaggatgggcagctcccactgccccagagcggasstcgaagcacccaggttgcccacggaaaatccaataaaaagacaccagtgtgaatccaaaaaaaa

SEQ ID NO: 2739 - protein, 614 aa, Homo sapien
RSGQPRAEGLGAGAAGPLRAMAAPVKGNRKQSTEGDALDPPASPKPAGKQNGIQNPISLEDSPEAGGEREEEQEREEEQAFLVSLYKFMKERHTPIERVPHLGFKQINLWKIYKAVEKLGAYELVTGRRLWKNVYDELGGSPGSTSAATCTRRHYERLVLPYVRHLKGEDDKPLPTSKPRKQYKMAKENRGDDGATERPKKAKEERRMDQMMPGKTKADAADPAPLPSQEPPRNSTEQQGLASGSSVSFVGASGCPEAYKRLLSSFYCKGTHGIMSPLAKKKLLAQVSKVEALQCQEEGCRHGAEPQASPAVHLPESPQSPKGLTENSRHRLTPQEGLQAPGGSLREEAQAGPCPAAPIFKGCFYTHPTEVLKPVSQHPRDFFSRLKDGVLLGPPGKEGLSVKEPQLVWGGDANRPSAFHKGGSRKGILYPKPKACWVSPMAKVPAESPTLPPTFPSSPGLGSKRSLEEEGAAHSGKRLRAVSPFLKEADAKKCGAKPAGSGLVSCLLGPALGPVPPEAYRGTMLHCPLNFTGTPGPLKGQAALPFSPLVIPAFPAHFLATAGPSPMAAGLMHFPPTSFDSALRHRLCPASSAWHAPPVTTYAAPHFFHLNTKL

SEQ ID NO: 2740 - DNA, 1433 bp, Homo sapien
aatttggggccaagattaacacccctcctgcaggaggaagacagccaccagcggctgctcatggggctgatggtgtctgagctaaaagaccattttttgagacacctacagggtgtagaaaagaagaaaattgaacagatggttctggactacatttcaaaactgctggatctcatttgccacatcgtagaaaccaattggaggaaacataatcttcattcctgggttctccacttcaatagtcgtggcagtgctgctgaatttgcagtttttcacatcatgaccaggattctggaagctacaaacagtttgtttttacctctgcctcctggttttcatactctgcacaccatcctcggggtccagtgtctccctttgcataacctgctgcattgcattgacagtggagtgttgcttctcactgaaacagctgtcataaggctcatgaaagatctggataatacagagaaaaatgaaaaactgaaattcagtatcattgtgcggcttcctccgcttattgggcagaagatttgtagactttgggatcatcctatgagttctaacatcatttcgcggaaccacgtgacgcgactgcttcagaactataagaaacagcctcggaattctatgattaacaagtcatcgttcagtgtagaatttctgcctctgaactacttcattgaaattctgacagatatagagtcctccaatcaagccctgtatccttttgaaggacatgacaatgtggatgcagaatttgtagaggaagcagctctgaaacacaccgcgatgcttttaggcttatgaaaaagaaaacgcaattggatctgctgctgccattttaatcttgctcattaaccttactcctctgagaattctttaacaatatttaaaattggtaacaaaaatagtttagccataattgtttagccatgtgagtttcaggttggtacacgttcagacagaactgctgtatcacattccaattttgaatagccagtgagcaatcaagtgtagagaaatgataaatggcctaagaaggcatacagtggcataaacgatgctcttcctagtagcttaataggccacaagctagtttctgttgcactctgaaataaaatatgctttaaaaatgtagggaacagtgcttagaaaagcaaaaactaggtgtgtcattgaaataataggcataaaaattaaatgttacataagaacactatttggaaagagggtccttttaaaaactgaatttgtactaaatcagatttgccatgtcccagtccagaataatttgtacttagtatttgcagcagggtttgtctttgtgaattcagatgaaacatatttatttttttttatttataaaaggttgatttaggaatattttgtcagtcattaaaaaacctgaaaacataaaaaaaaaaaaaaaaaaa

SEQ ID NO: 2741 - protein, 268 aa, Homo sapien
NLGPRLTPLLQEEDSHQRLLMGLMVSELKDHFLRHLQGVEKKKIEQMVLDYISKLLDLICHIVETNWRKHNLHSWVLHFNSRGSAAEFAVFHIMTRILEATNSLFLPLPPGFHTLHTILGVQCLPLHNLLHCIDSGVLLLTETAVIRLMKDLDNTEKNEKLKFSIIVRLPPLIGQKICRLWDHPMSSNIISRNHVTRLLQNYKKQPRNSMINKSSFSVEFLPLNYFIEILTDIESSNQALYPFEGHDNVDAEFVEEAALKHTAMLLGL

SEQ ID NO: 2742 - DNA, 5312 bp, Homo sapien
  Unsure 2189, 2194, 2196, 2198, 2208, 2210, 2213: Unknown base
gaaatcagaaaaatgattaagtgagataagtacctgggtgacacagatattagcccgttggtaaaagacaacaaatattagcttaaaatctgcatatgtagaatcattttcattagatttagagcttgaagcaccttggctctcagctactttaaactcctccccatataaatcagggcaccaataaataagtttcagctttttaaaccctggtttgatgttaagcattataaagtacgaagtttgttaccacagtagagataatttagtagaaaaatgctttgaggcttcagtatttgtaagattttgcattagccagatgctaggttgttgaaggcatttcagtgttgataatagcctgagcagacttctttacaaatgggatctgtttctatatgtgtatatgcccacttaccattcagagagactggtctttctctttgtcttccttcacattgctgtgtcagttctacacctagtcttttcagcacttagcaaattcaaattttgatttttttgtcagcttagttcactttaaggcatattggcatggtgtgtgaaagtgatgttttgccccagtattgaggacttttagatccaaataatgactcattaaatataattatgttttaagtatactgaatttctgttagcttaaaatgttaattctcaggaatgattttctcacactttgtgttggctaataataaaagcactgttttattctcaaaactcctttttcaaaaattagggagagagcagtagtgatcatttatgtgagcccctttgaaatgatggtgtcagagtgcagagaaacaatggagttttgatgccaaaaaggtttttttgcagtaaaagtaaaaatttggaattagttggcatatagaggaacccttttgtactggaacgtatgaggctggattgtgaaaaggtaatctttcgattgctagacttggttaacttagggctgcaaatctttttcttctatcaaggtcacttaatatggaatgtttttgtcagactgtcctttgttggaatactttagctgttcagctactttgactcctaggagagaatttagttaaggttcaaagtaattaactggctttgccagtggtgagtcccacaccattattcacttagtagtcatataaatgtttttatttaaacttctctctcttcaatgctgagaataaggctttaaattactgattcacctttaaaggaatgttgtgagaattgatgtaatttctgtttctgtttccatctaaacttctttataaaaagagggattagtttttttgttttggggtaagcacctaatttatccagtaaccaacaaccctaaccattggcatatatagtctttcactcagaaataaacaaaaactgtttggtatatctgtatcattgctaatcttgtgcactttactttttgggcagtaccatacatagtctgaggctattgacttaaaccaataactgtactttatgtaatgactcttaaatttggttacctgggttcacagcttgcttgaagagaaaggatgctagaataaagtaagcagctgaagagcgagcaaatcaagacaaaacacagtggtctcagatttttcgtagtgtgggaacagtggttttgctctataccactgaaaagcactataacataattgttgtccatgatactgaagcttttcccctcacttctaggttgtttacattcagagctctatcaataagaggaatacatattacagtgaattcgacaaccgcacaagttggcagtaggtatccccaacctaatttatcttggtaaattcaccctgtttcctagtgctgctggataaaagagtgtttactttttattgctcttagacagagtagtctagataagttttcaatttatcaacatagcctagacttctgtaagtggaatgttcattagtaactcatctttttgttgttataattggaaacagaaacgaggcttattgctattgcagaaatcccaaactggcaaaggccagtatatatggtattccataatataaccagcttttgaaatttatgtgtttggattagtgccttctggttaccagtattgactctgctagtttgcacctttccgttcttaacagaaaatttgtatttgttattcctcttaaattttgtcgtaactagtgaagggngtatnangntaacgaatancntgnatgacattgacatactttatgtgcagcctttatttaggttcagtgaaaccaggtagttctgtatttgtgttgtagcctaaatgttgtttcttttatatccattaaaaacttaaagttacttatgttctgtgatcttaattttgttgtgtttccattgtaggttgataggtatatcgagaacaggtacgtgacaacagtttatattccatgatagaaagctaaagtccatagaaagcacaaaatcgtgttcacacattagtgtacccacacatagaaagcacaagactaatagtattctctgtatcccacaagtgccagtcataaaggccaccaggtatttgtctcagagttgctatgagcactacagtattgataagcccaagacaatgcggtatctaaactggtcctaatggtaagggacccaaaggaataatctcaataagtttgtaccacattgatggagggagagaatataaatgtcaagaatgccaaaattatatttgggggttactagctaaaatggggtttgagggctttttactgcaacttgaaactggagaaatagggacagatgtctaggtttttggtgggtggaacaggtgacatatttctgttttaagctgtagtgtgattggggttttttgtaaaaaatcttaaatcttttaggaaatattacctcttaacagtgcccccccaaacatgcagaaagtcatactttaacagggcaaatactacttgtctttgattttttttgtgtacgtttgtatgtgagagatgaagttacctttatttttttcctatacttgactgtgcttcattttaataaaggataatttgatctgagtgttctgagcatcagactaattctgaagcatatttgctagaggagctactttgcttttcacaatggggtggagaggattctttcacttgtcccattaaccctcttctagtctagatgagatgaaatctgttaatgtgtgtgtagaagaaaacgtatgttcttctactcagcattgcccttttccacctcctcacttcacctccgagtagcttgtttatcaagaatgaatgaatgtctttgtcttaaattttgcccatgtgttaaaagatgtaattctcagaatgggagagaaatgactacctttgttcctactcttttatataattatccttttagggaaagacttggtcaactctaatatatctagaaggaagactatatctggtgtagactaatatgagatgttttagaagagttaacctgaacactttgagggagagattattcttgccagcaaaaagctagccaggaatgagcctaccacattatttgagaatatcaaacctcaggcctggggggatgaggggaagaagattaccagaagtgcaggaaagagaagtttgaggaacacccttggcttagcaacatgtgataatgcaaagctgttataacctgttaatcctacgtactatgtgttctgtacctttacatgtttttaaatttaagatagtttgtaagaactgtacaaaaaaatgcttctggagatttctttggcagaaatgcctttcatctataatttcatggagaactgctttaattagcctaggtgaaaagtagtcctagcagtgtaaatatgtataattagagttttctaatttcactgtgagatctctaacttttgagtggcaaacagatcaagtcttttgctcatagacttttctgtggggttattaaaatgcaaaagctttattttttttaataatgccatactccattagtgtcagatgatggtatggaatttgttcccttgctttcccccactgttactgcttcagtttatagattgccagcagagttcagaaatagagcagggatttacccgttctttgcttggacatcccattttcttttgtccagacccatgttggcaatcatgtatgaactgtgttatacttctcagtgctttcttttttctttttgataagatggatatcaaaaatagttgctgtgcaaaagttagtagtcttcttcaagaagaaaaccaattctttttctaataatatcctgtgaaattgcttcattcaattcatttatttttaagccaaatgtcagcagagtgctgctgcttttatctagtaattttgatatgtaagtattaatgcatttttaaaagatgtctacattgaaacatgttcttcccagtgtcctgcttatgatgctttgttcagattttttgtaagagaccagttagtacactgggggtgtatattgtgtacatgtgtcattttagttaggcattgtaggccaaatgtgattataaatgaagttgatgaacattaattttgttattagtgagttttttgaattgtaaatggatttccagtttaccttctgttgtctacagcttttttaattttaaggttttactaattgtatccatctcattgtacagtgttttagttgcaagcagaaagtagaatttggtataaagcaggttatttctatattgaaaggagtacagttgaaattgtagatttaagattgttaaaatcatgacaattctaacttgtctattctaacctattgtgtacaatctgattttttaaaattgtaaacatgtatgatcttggtttcatgtgtttttgaaagtgttattgtttaaaaaatgaaaaaagcatatctgctaaagagctgtcagttttcattactgactctgtaaaatacactgttctttgtgtactgtgtgttattttgccagctgctgcattagccttcaaaagtatttggaaacttaagatgaactacatttcttgcaaagtacattcctttctgtggtattttgtcctgtaactgaagtatagtaattattttatggaaatgttagcaattctgtaccaactttgaataaaatgaaaaatttatatttctgtgactaagtattttcagtatgaacactgccacaatgtagtgttctgggtctcagagttgaagaagagtattgtacctcgagtttctttatgcccttggcccatagaatggtttccagtgaatttccccctactaatattttagtcatttttaatctttgtaaacac

SEQ ID NO: 2743 - protein, 89 aa, Homo sapien
  Unsure 2189, 2194, 2196, 2198, 2208, 2210, 2213: Unknown amino acid
MVWNLFPCFPPLLLLQFIDCQQSSEIEQGFTRSLLGHPIFFCPDPCWQSCMNCVILLSAFFFLFDKMDIKNSCCAKVSSLLQEENQFFF

SEQ ID NO: 2744 - DNA, 883 bp, Homo sapien
gaattcccggcgggtatcagagccatcagaaccgccaccatgacggtgggcaagagcagcaagatgctgcagcatattgattacaggatgaggtgcatcctgcaggacggccggatcttcattggcaccttcaaggcttttgacaagcacatgaatttgatcctctgtgactgtgatgagttcagaaagatcaagccaaagaactccaaacaagcagaaagggaagagaagcgagtcctcggtctggtgctgctgcgaggggagaatctggtctcaatgacagtagagggacctcctcccaaagatactggtattgctcgagttccacttgctggagctgccgggggcccagggatcggcagggctgctggcagaggaatcccagctggggttcccatgccccaggctcctgcaggacttgctgggccagtccgtggggttggcgggccatcccaacaggtgatgaccccacaaggaagaggtactgttgcagccgctgcagctgctgccacagccagtattgccggggctccaacccagtacccacctggccgtgggggtcctcccccacctatgggccgaggagcaccccctccaggcatgatgggcccacctcctggtatgagacctcctatgggtcccccaatggggatcccccctggaagagggactccaatgggcatgccccctccgggaatgcggcctcctccccctgggatgcgagggccccctcccccgggaatgcgcccaccaaggccctagactcatcttggccctcctcagctccctgcctgtttcccgtaaggctgtacatagtccttttatctccttgtggcctatgaaactggtttataataaactcttaagagaacattataattgc

SEQ ID NO: 2745 - protein, 240 aa, Homo sapien
MTVGKSSKMLQHIDYRMRCILQDGRIFIGTFKAFDKHMNLILCDCDEFRKIKPKNSKQAEREEKRVLGLVLLRGENLVSMTVEGPPPKDTGIARVPLAGAAGGPGIGRAAGRGIPAGVPMPQAPAGLAGPVRGVGGPSQQVMTPQGRGTVAAAAAAATASIAGAPTQYPPGRGGPPPPMGRGAPPPGMMGPPPGMRPPMGPPMGIPPGRGTPMGMPPPGMRPPPPGMRGPPPPGMRPPRP

SEQ ID NO: 2746 - DNA, 3209 bp, Homo sapien
ccccagtgaatcttcaacagaatctcttaaagatctccaggaagttaagagtaaacaaaggaaaaagaagaagactaagaataaaaagaataaagactcaaaagaagaccaagtcccatatgtggtagaaaaggaagagcagttgaggaaagaacaagcaaatccacactcagtcagtagacttataaaagatgatgcaagtgatgttcaagaggattctgcaatggaagacaagttctatagcctggatgaattgcatattctggacatgatagagcagggctcagctggcaaagtaactacagactatggagaaactgaaaaggaaaggcttgctcgtcaaaggcagctttataaattgcactatcagtgtgaagatttcaaaagacagttgagaacagtgacttttcggtggcaagaaaaccaaatgcagattaaaaagaaagacaaaattatcgcatctcttaatcaacaagttgcttttggaatcaataaggtttccaaattacagcgtcaaatccatgctaaagataatgaaatcaagaaccttaaagagcaactttctatgaaaagatctcagtgggaaatggaaaaacataatctggaaagcacaatgaaaacatacgtaagcaaactgaacgcagaaactagcagagctttaacagccgaggtgtatttcttacagtgtcgtagggattttggtttgcttcatctagagcagactgaaaaggaatgtctcaatcagcttgccagggtgactcacatggcagcaagcaacctagaatcacttcaattaaaggctgcggtagacagttggaatgccattgtggcagatgttagaaacaagattgcattcctcaggacacagtacaatgaacaaataaacaaagtcaagcaaggatttgccttgagtaccttgcctccagtccagcttcctcctccaccacccagtcctgagatactgatgcagcagttcttaggaagaccccttgtgaaagaatctttctttagacccatacttactgttcctcaaatgcctgcagtttgcccgggagtcgtctctgcaactggccaacctagagcccccctgatgactggcatagcctgggctctgccagcgcctgtgggagacgctgtgcctcccagtgcaggtctgcggagtgatccctccatcatgaattgggagagaattacagacaggctgaaaactgcctttccacagcaaaccagaaaggaacttacagatttcttacggaaattgaaggatgcttatggaaaatccttgtctgaactgacatttgatgaaattgtttgcaagatttcccagtttattgaccccaaaaagtctcagagtcaaggaaaatcagtgtcaaatgttaattgtgtttcacctagtcattctccatcacagcctgatgctgcccagcccccaaaaccagcctggaggccactcacttcacgggtcctgccacatgggaaggagccagtaatccagatgaggaagaggaagaagaagagccttgtgtgatctgtcatgagaatctgtctccagaaaatctttcagttttgccttgcgctcacaaattccatgctcagtgcattagaccatggttgatgcaacaggggacatgtccaacgtgcagactccacgttttgctaccagaagaattccctggtcaccccagccggcagttgcccaagatctgatacaaggtacccatgaagagattatgaactacttgaaggtggagactgtacggtggtgtgttggagctggcttgtaatgtcttatgagtgacaatcgttagtttgaggaattttgtgagacagttgtcaaattgttgctagcttgaaatctgcggcaattggagtatttacaccatagaaatgctataagtgaagacctacctttcccttaagagctagttgttaaacctttaccagcataccactggaccttgtctaaaatttctttgtgttcccagtgtcttgcccagtagatacaagataaatattgccagaatcagatatcaggaagtagtaagaaaaggagttaatatgcaaactaaatcactcgctcaattgaataattgagatcttctgttcatttgttccttggaccttaatcatttgcattttggagaaaattttttctgctttaaaagtctgtaatttcagtttttgtgtcggggagagggaaaaactatttgtctgtagttgctttttgtgacaaagtgaatacccactgggctaagtttcatatctaaagcttgtcactaagaattttcatttttaggggtcaaaaacctattttgaaaatagtgttgtgtgaatgctgtaagtgttgtacatgtctctggtttcagaattaaaagaattcagagttaccttgtgagataaatgttctttgcttcatattcacagtttcacctccatttaaatttatggggaagaataaatgtttcctgactcagaaacaattttgcctccatatttcagtgcaaatatattttgaagttacttttaaatatttatttaaaacctctgtttctgtaactgtatgttaaacgtattcttctgtaatgagaatagactggaacatgtgagggaaaaatattaaaaaaaagatggcagtcatctagacatgtaaaatgccaagaatgtcttagaattgcacaatttagaatttatagagcctttaatcaccttgtctagcaccttgtattagtccattttcatgctgctgataaagacatacctgagattgggcaatttacaaaagaaagaggtttaatggacttacagtccacatgactaaggaggcctcacaatcatggtggaaggcaaagaggagcaagtcacatcttacatggatggcagcagacaaggagagagagcttgtgcagggaaactcccatttttwaaaccatcagatctcatgaggcttactatcacgagaacagcatgggaaagacctgcccccgtgattaaattatttyccaccaggcccctcccccaacatggaataatgggagatacaagatatttgggtggagacacagagccaaaccatatcacaccttaaggtcatggtcatatggctagttatcttgtaaaaccaatgtttcttagttcatacttacaactgcaatttcactttcatttagaaaagaataaatgtttctttattgdaaaaaaaaaaaaaaaaa

SEQ ID NO: 2747 - DNA, 3202 bp, Homo sapien
atttctacagcagaaatgaaatcattacatccgcttcaaatgggtggactgaaagtggaaatgcccatgaacttaaaggttattatttatgaaaaacctcacttccatggacaggctaaagagtttagtgaacatatagattctgttcctaattttttgaaaaataatggagattttcacagaattggatcaattcgtgtcattggtggagtgtgggttgcctatgaaaaagaacattttaaaggccagcagtttctgcttgaagaaggagactttgaagacagtaatgcttgtggtgcattaagtagccctatcttgtctttccggtacttacaagctaattttatagaatcttctgtcacactatttgaatctgacctagaaagtgggaagtttattgacattacaaatcaggaaatttctgatttggaagaaattggctttggcagtaaaacaagatccattcatgttaaaagtggagtatgggttgcctaccagcaaaagttcttctgtggagaacaatacattttagaaaaagggaaatacaaatgcttttttgactggggaggatcaaataatataatcatgtcgatacggccaatccaactggaaccacttgggataaatgaacctccgcatttgctcaaagcattcagcaaaccagggttccaaggtgaatgtatagattttacagaagaaacttctgatttgacttcactcatgccatgttcttttaaagttcttcgaggttgctggctcctctattaccaagaagacatgtttgttaatcactgtgtgttagaagaaggcctctatgctgaccttacttcctgcggttgcccagcatctaaagtcaaatctctcaagcccattgactatgtttttgaagaaccctccatcagcctttttgctctggagcattgtgagggaagagagttacatctagaagaggctgtgaactctgttctgaacaaggacctacacttctacacccagtctgtgtgggtaaaaagtggactatggatagcttatgaaggatccaatttcttgggaagacaaatcctactcaggcctaatgagatcccaaactggacagcattcagcagatggaaaacaattggttccctccgtcctatgaagcagcctgcagtgtacatcagaataaagaaccgtgcccagggtgaatatctgacagtcactggaagtctagcagacaccagggcaacatctgtgtgcatttctccctatagtggaaagaatactcagatctggtactactgccgaggactctttaaatccaaggccagtgatacatgtcttgatgtgattggtggccgggacacacctggagctaaagtagctctatggactgaacatgggcaattcaggcagaagtggagactgaataaaaatggaactatcagctcttatctcagtgatcaacttgtccttgatgttaaaggaggaaattattgtgacaagactcatgtaattgtaaatcagcccctggagggagaagaaacacagaaatgggacattgaaatattgtgagagaatcaacatccctagaaagatccctagaaagagcaaagaaggaaacacatctgtcattgtcttgtggacgtggaaaggaagctactgtcctcacactcctggatcactgagcagaatgaacattttctccagcctctgagactatcgctcttaaccatggaaaagctcaaaatattcttgccattactcagtgttcctataaagaaaatattatgatatcttggaaaggttctattcctgatctccagctgtggtgagcaagtttcctgaagtgtttattttctctcatatccaccaaacgtgaatcctgttcctgatggcccgttattggacactggtgatgctattatcctgtattatttattaatatcctacctagatgcttgtatgagtacaaagcataaagaaacagatttctataggtcaagtcatacttttgcaaacagatgagtaattttttagcaacacctgaaaatatactaaactttcctagataaactttaaggtttctatactgaggcttttataatgaacgcacctcgttaagtatttatacttgtaactaaccccaggcagggacctcagctttgttaggagtaaggcacaagaagtattttctgtagctattgtttcctcagtccttcaaactaaaaaagtacaaataaataacctatggccaaacttgcactgttacgtgttaaccaagacatccctttaggtgacaagactctataacagtggttacctgtctccatgttgacacttcatcctagatttaaggagaggcatcaatttttttttttttttgcctcaagagaaatttcaaatatccaaattaaaacacagtagcatttgaaccttgaccttaccatctctttaagtaaacgtggagttgatttctctactaaataacagaaacctcagtttttcactcccattgtaagtaacttttatttaagtaagtaaaatcaggtaggaaatcacctttgacttagcttccagtagtcattaccaccttttactgcacaattcacaagcatgttttcctggtgaattggactgaaaattacattttgacaactttttttccttttatccccaacttttgccagaaagcagaaaaatgctctatttttataaagaaagattaaattctccaatgatattttaaaaaatatcaacctacatgcactttagaatgtaaaataacaatgactattttaaactcgaagacccactattttgagtattttttatagactttaaatactgggtttttttcctccttcaatctcaggcttttctccatcttttaagcagcctctgtaactcccttttgtccataggtgttgcgtgcctctcatctgtggggaagtattatttaataaaatttatgttacaggataactttattttaatgggcatgggcttgtctatacacaaaggtatgtatattttcattataaaaaaccagtttaaaattttttcttattttaattgtttgaaatttttctagagccaaagaagctctttaaagaagttgtttcttccaaagaacaaagccaggttaatgacattcaattctaaatgatacattggaattgtgccttttctaccacactggattaaataaacttgtcaaaatatg

SEQ ID NO: 2748 - protein, 511 aa, Homo sapien
MKSLHPLQMGGLKVEMPMNLKVIIYEKPHFHGQAKEFSEHIDSVPNFLKNNGDFHRIGSIRVIGGVWVAYEKEHFKGQQFLLEEGDFEDSNACGALSSPILSFRYLQANFIESSVTLFESDLESGKFIDITNQEISDLEEIGFGSKTRSIHVKSGVWVAYQQKFFCGEQYILEKGKYKCFFDWGGSNNIIMSIRPIQLEPLGINEPPHLLKAFSKPGFQGECIDFTEETSDLTSLMPCSFKVLRGCWLLYYQEDMFVNHCVLEEGLYADLTSCGCPASKVKSLKPIDYVFEEPSISLFALEHCEGRELHLEEAVNSVLNKDLHFYTQSVWVKSGLWIAYEGSNFLGRQILLRPNEIPNWTAFSRWKTIGSLRPMKQPAVYIRIKNRAQGEYLTVTGSLADTRATSVCISPYSGKNTQIWYYCRGLFKSKASDTCLDVIGGRDTPGAKVALWTEHGQFRQKWRLNKNGTISSYLSDQLVLDVKGGNYCDKTHVIVNQPLEGEETQKWDIEIL

SEQ ID NO: 2749 - DNA, 2221 bp, Homo sapien
acaccggtgacgagcgcacggaaagtttggaggcttagcaaggagggtggtgccggcctccgcccggtggtggcagaactgcctgtgcgagcacggcttccacgtgggctgcgccgccgggcgtcatgtcgggcctaagagacacgctctacagctgtgaaatctgaagttcaggtttgcatttccttactgctttgtcttgaagacagaacgatgccaaagaaagcaaagcctacagggagtgggaaggaagaggggccggctccctgtaagcagatgaagttagaagcagctggggggccttcagctttaaactttgacagtcccagtagtctctttgaaagtttaatctcgcccatcaagacagagacttttttcaaggaattctgggagcagaagccccttctcattcagagagatgaccctgcactggccacatactatgggtccctgttcaagctaacagatctgaagagtctgtgcagccgggggatgtactatggaagagatgtgaatgtctgccggtgtgtcaatgggaagaagaaggttttaaataaagatggcaaagcacactttcttcagctgagaaaagattttgatcagaaaagggcaacgattcagtttcaccaacctcagagatttaaggatgagctttggaggatccaggagaagctggaatgttactttggctccttggttggctcgaatgtgtacataactcccgcaggatctcagggcctgccgccccattatgatgatgtcgaggttttcatcctgcagctggagggagagaaacactggcgcctctaccaccccactgtgcccctggcacgagagtacagcgtggaggccgaggaaaggatcggcaggccggtgcatgagtttatgctgaagccgggtgatttgttgtactttcccagaggaaccattcatcaagcggacactcctgcggggctggcccactcgactcacgtgaccatcagcacctaccagaacaattcatggggagatttccttttggataccatctcggggcttgtatttgatactgcaaaggaagacgtggagttacggaccggcataccccggcagctgctcctggtggaatccacaactgttgctacaagacgattaagtggcttcctgaggacacttgcagaccggctggagggcaccaaagaactgctttcctcagacatgaagaaggattttattatgcacagactccccccttactctgcgggagatggggcagagctgtcaacaccaggtggaaagttaccgaggctggacagtgtagtgagactgcagtttaaagaccacattgtcctcacagtactgccggatcaagatcaatctgatgaagctcaagaaaagatggtgtacatctatcattccttaaagaatagtagagagacacacatgatgggaaatgaggaggaaacagagtttcatggacttcgcttccctttgtcacatttggatgcactgaagcaaatttggaatagtccagctatttctgtcaaggacctgaaacttactacagatgaggaaaaggaaagcctggtattatccctctggacagaatgtttaattcaagtagtctagtgcctttgcagaatcaaatgcctactattttatatgcatatattaaaagaaaagcaaagacctgagccgaggagaggatgaattcaagtttccttacctgcgtatctactaacaaacatgagacctccctgttacaggtggtcagttggccaaatgtactaacgggcacatgaaagaaagaacagcaaattaccaagtgtctcagaaaatgacaaaaccatattttgacaagtttatttaatccagtgtggtagaaaaggcacaattccaatgtatcatttagaattgaatgtcattaacctggctttgttctttggaagaaacaacttctttaaagagcttctttggctctagaaaaatttcaaacaattaaaataagaaaaaattttaaactggttttttataatgaaaatatacatacctttgtgtatagacaagcccatgcccattaaaataaagttatcctgtaccatacatttattaaataatacttccccacagatgagaggcacgcaacactatggacaaaagggagttacgaggctgttaaagatgggcaaagctggatgaggggaaaaaccagtatttaagtctataaaatactcaatgtggc

SEQ ID NO: 2750 - protein, 464 aa, Homo sapien
MPKKAKPTGSGKEEGPAPCKQMKLEAAGGPSALNFDSPSSLFESLISPIKTETFFKEFWEQKPLLIQRDDPALATYYGSLFKLTDLKSLCSRGMYYGRDVNVCRCVNGKKKVLNKDGKAHFLQLRKDFDQKRATIQFHQPQRFKDELWRIQEKLECYFGSLVGSNVYITPAGSQGLPPHYDDVEVFILQLEGEKHWRLYHPTVPLAREYSVEAEERIGRPVHEFMLKPGDLLYFPRGTIHQADTPAGLAHSTHVTISTYQNNSWGDFLLDTISGLVFDTAKEDVELRTGIPRQLLLVESTTVATRRLSGFLRTLADRLEGTKELLSSDMKKDFIMHRLPPYSAGDGAELSTPGGKLPRLDSVVRLQFKDHIVLTVLPDQDQSDEAQEKMVYIYHSLKNSRETHMMGNEEETEFHGLRFPLSHLDALKQIWNSPAISVKDLKLTTDEEKESLVLSLWTECLIQVV

SEQ ID NO: 2751 - DNA, 1030 bp, Homo sapien
agatgtaaaccaatttcaggccacaactcccttttctggtacagacagaccatgatgcggggactggagttgctcatttactttaacaacaacgttccgatagatgattcagggatgcccgaggatcgattctcagctaagatgcctaatgcatcattctccactctgaagatccagccctcagaacccagggactcagctgtgtacttctgtgccagcagtttctcgacctgttcggctaactatggctacaccttcggttcggggaccaggttaaccgttgtagaggacctgaacaaggtgttcccacccgaggtcgctgtgtttgagccatcagaagcagagatctcccacacccaaaaggccacactggtgtgcctggccacaggcttcttccccgaccacgtggagctgagctggtgggtgaatgggaaggaggtgcacagtggggtcagcacagacccgcagcccctcaaggagcagcccgccctcaatgactccagatactgcctgagcagccgcctgagggtctcggccaccttctggcagaacccccgcaaccacttccgctgtcaagtccagttctacgggctctcggagaatgacgagtggacccaggatagggccaaacccgtcacccagatcgtcagcgccgaggcctggggtagagcagactgtggctttacctcggtgtcctaccagcaaggggtcctgtctgccaccatcctctatgagatcctgctagggaaggccaccctgtatgctgtgctggtcagcgcccttgtgttgatggccatggtcaagagaaaggatttctgaaggcagccctggaagtggagttaggagcttctaacccgtcatggtttcaatacacattcttcttttgccagcgcttctgaagagctgctctcacctctctgcatcccaatagatatccccctatgtgcatgcacacctgcacactcacggctgaaatctccctaacccagggggaccttagcatgcctaagtgactaaaccaataaaaatg

SEQ ID NO: 2752 - DNA, 1698 bp, Homo sapien
gttccgaggaagccagacccggagccgtggcctgccgggccggcgacatggatcccctgttccagcaaacgcacaagcaggtccacgagatccagtcttgcatgggacgcctggagacggcagacaagcagtctgtgcacatagtagaaaacgaaatccaagcaagcatagaccagatattcagccgtctagaacgtctggagattttgtccagcaaggagccccctaacaaaaggcaaaatgccagacttcgggttgaccagttaaagtatgatgtccagcacctgcagactgcgctcagaaacttccagcatcggcgccatgcaagggagcagcaggagagacagcgagaagagcttctgtctcgaaccttcaccactaacgggactcagaagaagatccttgacattgccaacatgctgggcttgtccaacacagtgatgcggctcatcgagaagcgggctttccaggacaagtactttatgataggtgggatgctgctgacctgtgtggtcatgttcctcgtggtgcagtacctgacatgagccagccacgctcagtggctgaacagcattcccacagcctgcaagtgtgtgtgtgtgtgaaagagagaggggggcccagaggccgccttttgaaatgtttgcctgtctgaactgtgaagacacttgggagtgattgtggtctaatttccaacctgctctgttttctgtgacatcttggagggggagctagtgccaccaccatgcgcggtgcttaggaaatgaaagaagtcccgggtctgtctctctcactctcgctctcactgggggagggaaagaatggctttggtggctttgttcacacagctgatgcgtgccctgggaaggtgtccacagtgagccctgtgtgcaggactgtccacacgggttcacaccttgtcaaccatcaggcctttctggctcctgatagggtggagcaaaagtggaaaggaaaggaaagaggccttttctcacagccattatattaaatagtaggtcgattcacatcctcgtgctcctggccaccctctagtggaggcgggggtgaattcttaggtcgagctgatgcaagaaactctggtagccagcctctgtgaccttgtacatgagtttggtgtgcctattgtgatttaaaacaggtgggttatcaagaggaacttgagatctctttattacatggacatttacttcagggggaccactgtaagaaaagccaaactccaagaccaagtaagttagaggagtcttgattttttagacttcactgcggagttctgtacaccctttgccctgatgaatttgaatgggtttgatttgcaaatttggatttacacccattgttttggaagcacatcagctgaataaagttgaggtttattttatttagaaaatcacattttgtaaaagaattcgatattcatttttataactaatggccccctttttttatgtttctaggccagagattctcaaacactgctccatggccaggggctgggctggctgcttcagaagcagtggggaagctttttaaaattacatattcctggggcctaccccagatctgaattagaaccttttttaaatctctaaggtgattctgatgtgtgtattttggaaccactgtctcctagacagaaagcttctgtctcaaagatgatcacattggtgtaaagag

SEQ ID NO: 2753 - protein, 180 aa, Homo sapien
SEEARPGAVACRAGDMDPLFQQTHKQVHEIQSCMGRLETADKQSVHIVENEIQASIDQIFSRLERLEILSSKEPPNKRQNARLRVDQLKYDVQHLQTALRNFQHRRHAREQQERQREELLSRTFTTNGTQKKILDIANMLGLSNTVMRLIEKRAFQDKYFMIGGMLLTCVVMFLVVQYLT

SEQ ID NO: 2754 - DNA, 2821 bp, Homo sapien
  Unsure 2794, 2802, 2808-2813, 2816, 2818: Unknown base
cgggatacttgaactgcaagaacagccgccgctccagcgggctgctcgctgcatctctgggcgtctttggctcgccacgctgggcagtgcctgcctgcgcctttcgcaacctcctcggccctgcgtggtctcgagctgggtgagcgagcgggcgggctggtaggctggcctgggctgcgaccggcggctacgactattctttggccgggtcggtgcgagtggtcggctgggcagagtgcacgctgcttggcgccgcaggctgatcccgccgtccactcccgggagcagtgatgttgggcaactctgcgccggggcctgcgacccgcgaggcgggctcggcgctgctagcattgcagcagacggcgctccaagaggaccaggagaatatcaacccggaaaaggcagcgcccgtccaacaaccgcggacccgggccgcgctggcggtactgaagtccgggaacccgcggggtctagcgcagcagcagaggccgaagacgagacgggttgcaccccttaaggatcttcctgtaaaatgatgagcatgtcaccgttcctccttggaaagcaaacagtaaacagcctgcgttcaccattcatgtggatgaagcagaaaaagaagctcagaagaagccagctgaatctcaaaaaatagagcgtgaagatgccctggcttttaattcagccattagtttacctggacccagaaaaccattggtccctcttgattatccaatggatggtagttttgagtcaccacatactatggacatgtcaattgtattagaagatgaaaagccagtgagtgttaatgaagtaccagactaccatgaggatattcacacataccttagggaaatggaggttaaatgtaaacctaaagtgggttacatgaagaaacagccagacatcactaacagtatgagagctatcctcgtggactggttagttgaagtaggagaagaatataaactacagaatgagaccctgcatttggctgtgaactacattgataggttcctgtcttccatgtcagtgctgagaggaaaacttcagcttgtgggcactgctgctatgctgttagcctcaaagtttgaagaaatataccccccagaagtagcagagtttgtgtacattacagatgatacctacaccaagaaacaagttctgagaatggagcatctagttttgaaagtccttacttttgacttagctgctccaacagtaaatcagtttcttacccaatactttctgcatcagcagcctgcaaactgcaaagttgaaagtttagcaatgtttttgggagaattaagtttgatagatgctgacccatacctcaagtatttgccatcagttattgctggagctgcctttcatttagcactctacacagtcacgggacaaagctggcctgaatcattaatacgaaagactggatataccctggaaagtcttaagccttgtctcatggaccttcaccagacctacctcaaagcaccacagcatgcacaacagtcaataagagaaaagtacaaaaattcaaagtatcatggtgtttctctcctcaacccaccagagacactaaatctgtaacaatgaaagactgcctttgttttctaagatgtaaatcactcaaagtatatggtgtacagtttttaacttaggttttaattttacaatcatttctgaatacagaagttgtggccaagtacaaattatggtatctattactttttaaatggttttaatttgtatatcttttgtatatgtatctgtcttagatatttggctaattttaagtggttttgttaaagtattaatgatgccagctgtcaggataataaattgatttggaaaactttgcaagtcaaatttaacttcttcaggattttgcttagtaaagaagtttacttggtttactatataatgggaagtgaaaagccttcctctaaaattaaagtaggtttaggaaaacagaccctcaaattctgacattcattttcctaagcaactggatcaatttgctgacttgggcataatctaatctaagcatatctgaatacagtattcagagatagatacagtagagattccccagactttttcgctctttgtaaaacctgtttgtttaggttttgcgaggtaaactcaacagaggttgggagtggaagagggtgggaagcttatatgcaaattaacagacgagaaatgctccagaaggtttattattttaaagcacattaaaaacaaaaaactatttttaaaatcctgctagattttataatggatttgtgaataaaaaatacccagggttctcagaatggaataaatatcccttttaatagttatatatacagatatacaactgttagctttaattggcagctctcttcttttttcttcttttcactggctttttacttggtgctttttcttgttttgcactggtggtctgtgttctgtgaataaagcaaagtaagaatttactaagagtatgttaagttttggattattgaaataagaggcatttcttagttttccagtaggatctaaaatgtgtcagctatgagtaagactggcatccaagaagtttatattatagatttaggtcctaatttttataaatcacaaggtaaaaaaatcacagaacagatggatctctaatgaaaaagggatgtctttttgtttatagtcatgtggcaagatgagagtaaaaccagagagcaaacctctataagtgttgagtatatgtatacatttgaaataaaccagaaatttgttaccttaaaaaaaaaanaacttcanaatacnnnnnnaancncac

SEQ ID NO: 2755 - protein, 285 aa, Homo sapien [sequence omitted]

SEQ ID NO: 2756 - DNA, 6550 bp, Homo sapien
tcccggaaggcaaatggctggcgtggaagcacaacccgctttcactcttcgaatttgtgcttagctcttttcttgtaccttgcgactcgtgaccaacatgctgtgatgtgtgccgagggaggaattggtcagctacacaacctggatcttaccacagtttggatatgactgaggctctccaatgggccagatatcactggcgacggctgatcagaggtgcaaccagggatgatgattcagggccatacaactattcctcgttgctcgcctgtgggcgcaagtcctctcagacccctaaactgtcaggaaggcaccggattgttgttccccacatccagcccttcaaggatgagtatgagaagttctccggagcctatgtgaacaatcgaatacgaacaacaaagtacacacttctgaattttgtgccaagaaatttatttgaacaatttcacagagctgccaatttatatttcctgttcctagttgtcctgaactgggtacctttggtagaagccttccaaaaggaaatcaccatgttgcctctggtggtggtccttacaattatcgcaattaaagatggcctggaaggttatcggaaatacaaaattgacaaacagatcaataatttaataactaaagtttatagtaggaaagagaaaaaatacattgaccgatgctggaaagacgttactgttggggactttattcgcctctcctgcaacgaggtcatccctgcagacatggtactactcttttccactgatccagatggaatctgtcacattgagacttctggtcttgatggagagagcaatttaaaacagaggcaggtggttcggggatatgcagaacaggactctgaagttgatcctgagaagttttccagtaggatagaatgtgaaagcccaaacaatgacctcagcagattccgaggcttcctagaacattccaacaaagaacgcgtgggtctcagtaaagaaaatttgttgcttagaggatgcaccattagaaacacagaggctgttgtgggcattgtggtttatgcaggccatgaaaccaaagcaatgctgaacaacagtgggccacggtataagcgcagcaaattagaaagaagagcaaacacagatgtcctctggtgtgtcatgcttctggtcataatgtgcttaactggcgcagtaggtcatggaatctggctgagcaggtatgaaaagatgcattttttcaatgttcccgagcctgatggacatatcatatcaccactgttggcaggattttatatgttttggaccatgatcattttgttacaggtcttgattcctatttctctctatgtttccatcgaaattgtgaagcttggacaaatatatttcattcaaagtgatgtggatttctacaatgaaaaaatggattctattgttcagtgccgagccctgaacatcgccgaggatctgggacagattcagtacctcttttccgataagacaggaaccctcactgagaataagatggtttttcgaagatgtagtgtggcaggatttgattactgccatgaagaaaatgccaggaggttggagtcctatcaggaagctgtctctgaagatgaagattttatagacacagtcagtggttccctcagcaatatggcaaaaccgagagcccccagctgcaggacagttcataatgggcctttgggaaataagccctcaaatcatcttgctgggagctcttttactctaggaagtggagaaggagccagtgaagtgcctcattccagacaggctgctttcagtagccccattgaaacagacgtggtaccagacaccaggcttttagacaaatttagtcagattacacctcggctctttatgccactagatgagaccatccaaaatccaccaatggaaactttgtacattatcgactttttcattgcattggcaatttgcaacacagtagtggtttctgctcctaaccaaccccgacaaaagatcagacacccttcactgggggggttgcccattaagtctttggaagagattaaaagtcttttccagagatggtctgtccgaagatcaagttctccatcgcttaacagtgggaaagagccatcttctggagttccaaacgcctttgtgagcagactccctctctttagtcgaatgaaaccagcttcacctgtggaggaagaggtctcccaggtgtgtgagagcccccagtgctccagtagctcagcttgctgcacagaaacagagaaacaacacggtgatgcaggcctcctgaatggcaaggcagagtccctccctggacagccattggcctgcaacctgtgttatgaggccgagagcccagacgaagcggccttagtgtatgccgccagggcttaccaatgcactttacggtctcggacaccagagcaggtcatggtggactttgctgctttgggaccattaacatttcaactcctacacatcctgccctttgactcagtaagaaaaagaatgtctgttgtggtccgacaccctctttccaatcaagttgtggtgtatacgaaaggcgctgattctgtgatcatggagttactgtcggtggcttccccagatggagcaagtctggagaaacaacagatgatagtaagggagaaaacccagaagcacttggatgactatgccaaacaaggccttcgtactttatgtatagcaaagaaggtcatgagtgacactgaatatgcagagtggctgaggaatcattttttagctgaaaccagcattgacaacagggaagaattactacttgaatctgccatgaggttggagaacaaacttacattacttggtgctactggcattgaagaccgtctgcaggagggagtccctgaatctatagaagctcttcacaaagcgggcatcaagatctggatgctgacaggggacaagcaggagacagctgtcaacatagcttatgcatgcaaactactggagccagatgacaagctttttatcctcaatacccaaagtaaagatgcctgtgggatgctgatgagcacaattttgaaagaacttcagaagaaaactcaagccctgccagagcaagtgtcattaagtgaagatttacttcagcctcctgtcccccgggactcagggttacgagctggactcattatcactgggaggaccctggagtttgccctgcaagaaagtctgcaaaagcagttcctggaactgacatcttggtgtcaagctgtggtctgctgccgagccacaccgctgcagaaaagtgaagtggtgaaattggtccgcagccatctccaggtgatgacccttgctattggtgatggtgccaatgatgttagcatgatacaagtggcagacattgggataggggtctcaggtcaagaaggcatgcaggctgtgatggccagtgactttgccgtttatcagttcaaacatctcagcaagctccttcttgtccatggacactggtgttatacacggctttccaacatgattctctattttttctataagaatgtggcctatgtgaacctccttttctggtaccagttcttttgtggattttcagggacatccatgactgattactgggttttgatcttcttcaacctcctcttcacatctgcccctcctgtcatttatggtgttttggagaaagatgtgtctgcagagaccctcatgcaactgcctgaactttacagaagtggtcagaaatcagaggcatacttaccccataccttctggatcaccttattggatgctttttatcaaagcctggtctgcttctttgtgccttattttacctaccagggctcagatactgacatctttgcatttggaaaccccctgaacacagccgctctgttcatcgttctcctccatctggtcattgaaagcaagagtttgacttggattcacttgctggtcatcattggtagcatcttgtcttattttttatttgccatagtttttggagccatgtgtgtaacttgcaacccaccatccaacccttactggattatgcaggagcacatgctggatccagtattctacttagtttgtatcctcacgacgtccattgctcttctgcccaggtttgtatacagagttcttcagggatccctgtttccatctccaattctgagagctaagcactttgacagactaactccagaggagaggactaaagctctcaagaagtggagaggggctggaaagatgaatcaagtgacatcaaagtatgctaaccaatcagctggcaagtcaggaagaagacccatgcctggcccttctgctgtatttgcaatgaagtcagcaagttcctgtgctattgagcaaggaaacttatctctgtgtgagactgctttagatcaaggctactctgaaactaaggcctttgagatggctggaccctccaaaggtaaagaaagctagataccctccttggagttgcaagtattctttcaaggttggaagagggattttgaagaggtatctctccaagcaagaatgacttgtttttccataagggacatgagcattttactaggcttggaagagctgacatgatgagcattattgtatgtttgtatatacatttgtgatagagggctagagtttgacctagagagagtttaaggaagtgaaatatttaattcagaaccaaatgcttttgtaaaactttttggattttgtaaaagcattttcattctcttagaaattcaagtattttcaaggggagtcatttgagatatatttattttactaggagatcttatattctagggaaatgctttaaatggtcaggctccagtcggaatttttttaagaaaaaagtagtttttaatacattggttaggactcagaggaaatacggaaaaaacattgtagatggttaatttacagataaaatcccaagagccttttaaacaacaaggtacctaaaatagggtataattatactgcttaaaatacagttagtgcctattaatagctttttatttcctatgggaagatgcttttggtcttctggctgaagatgtaggcatacctctcactcatttcaatgttttcctgaggtggagccttcattggaaaggggaaagagggattctagggtttcatcagggaccaggaatgcattcctctgtcaggttccaatcaagagaagaccttttatgagatctgcctctgtatagatgttgtcagttaggaaactgaagccataggtcaggcagacatcagctcagcctgtggcccattgggtgatttcctgtattttaaaactgacagtagcctgatcaaagtgatacaatcaatttcaaaacaatcttccagagaccacttgaaggttcatagtttttacaataccctgagacttttcaggtgttggagcctctaaaatatgagatataaacagaaactaatacaagttgttctctggaggtttctatgaggttcttagaaaaatttggttttaaaatcatttgaggacaggaatgtctatagcaagtttactcctattgcgaatcatgtatgctggctttagttgtaacaaacgattttattctaagtaaggccaggtgctactataaaatcatatattcctgttgaagttcttttgaagtcctatctctatttattatatttgaaagttgtcagccaccagtcatccagaatttccttcctgaatctccatgctcatatgcaatgtctacatcaaggtcttcttaatgactattattctcagggtttagttttctaccttctgcctactattttggtctgacatttttgtagccttctgttattattggaaatagtctcttacataagctgatttcgagaactttcaaaatctcacatagctaatggaagttgctttctgctttcttatgactgtttttataaataaactgtttcataaataatgtatactggaaaattgtcatcactcttgtaaacatttgccaaatccaactgtaattagtaccagaacttagaaggaaagtcacaaagcatgccttttaccagaatattgctttgccttttcttatatggaaaatcactgatgtcatatcatttattatcctcacagcagctggcattcattccctgaaatcgtcgtctcctgataaacaataatttagagatatgttcacttgtaaataaaaaggttagaatctaaggacaaagaatgatccaaaaatactaaggaaaaagaacaattttcaattttcagaaatgaattatctgtacatatgaatagaggaaaatactgagtgctaatgttacagggccacaatctcatatccacaattccaaaatctccaaacctctgaaaactgaaatatttttcataaattaggcgtaaattctatgccctgaacaaatgtaaagctatttatgtactttgcttaatgtaatcattcatatactttgctacaaaaatattaatatatttcattactgaatgctaaactgtatttctttttaaaatttggaaaatttttaattctgaaacacaatctagaccttag

SEQ ID NO: 2757 - protein, 1426 aa, Homo sapien
MTEALQWARYHWRRLIRGATRDDDSGPYNYSSLLACGRKSSQTPKLSGRHRIVVPHIQPFKDEYEKFSGAYVNNRIRTTKYTLLNFVPRNLFEQFHRAANLYFLFLVVLNWVPLVEAFQKEITMLPLVVVLTIIAIKDGLEGYRKYKIDKQINNLITKVYSRKEKKYIDRCWKDVTVGDFIRLSCNEVIPADMVLLFSTDPDGICHIETSGLDGESNLKQRQVVRGYAEQDSEVDPEKFSSRIECESPNNDLSRFRGFLEHSNKERVGLSKENLLLRGCTIRNTEAVVGIVVYAGHETKAMLNNSGPRYKRSKLERRANTDVLWCVMLLVIMCLTGAVGHGIWLSRYEKMHFFNVPEPDGHIISPLLAGFYMFWTMIILLQVLIPISLYVSIEIVKLGQIYFIQSDVDFYNEKMDSIVQCRALNIAEDLGQIQYLFSDKTGTLTENKMVFRRCSVAGFDYCHEENARRLESYQEAVSEDEDFIDTVSGSLSNMAKPRAPSCRTVHNGPLGNKPSNHLAGSSFTLGSGEGASEVPHSRQAAFSSPIETDVVPDTRLLDKFSQITPRLFMPLDETIQNPPMETLYIIDFFIALAICNTVVVSAPNQPRQKIRHPSLGGLPIKSLEEIKSLFQRWSVRRSSSPSLNSGKEPSSGVPNAFVSRLPLFSRMKPASPVEEEVSQVCESPQCSSSSACCTETEKQHGDAGLLNGKAESLPGQPLACNLCYEAESPDEAALVYAARAYQCTLRSRTPEQVMVDFAALGPLTFQLLHILPFDSVRKRMSVVVRHPLSNQVVVYTKGADSVIMELLSVASPDGASLEKQQMIVREKTQKHLDDYAKQGLRTLCIAKKVMSDTEYAEWLRNHFLAETSIDNREELLLESAMRLENKLTLLGATGIEDRLQEGVPESIEALHKAGIKIWMLTGDKQETAVNIAYACKLLEPDDKLFILNTQSKDACGMLMSTILKELQKKTQALPEQVSLSEDLLQPPVPRDSGLRAGLIITGRTLEFALQESLQKQFLELTSWCQAVVCCRATPLQKSEVVKLVRSHLQVMTLAIGDGANDVSMIQVADIGIGVSGQEGMQAVMASDFAVYQFKHLSKLLLVHGHWCYTRLSNMILYFFYKNVAYVNLLFWYQFFCGFSGTSMTDYWVLIFFNLLFTSAPPVIYGVLEKDVSAETLMQLPELYRSGQKSEAYLPHTFWITLLDAFYQSLVCFFVPYFTYQGSDTDIFAFGNPLNTAALFIVLLHLVIESKSLTWIHLLVIIGSILSYFLFAIVFGAMCVTCNPPSNPYWIMQEHMLDPVFYLVCILTTSIALLPRFVYRVLQGSLFPSPILRAKHFDRLTPEERTKALKKWRGAGKMNQVTSKYANQSAGKSGRRPMPGPSAVFAMKSASSCAIEQGNLSLCETALDQGYSETKAFEMAGPSKGKES

SEQ ID NO: 2758 - DNA, 6827 bp, Homo sapien
ctccagaaggtttttgttgcatttagagaatttaatctgtctgaaagcaaagtttgtgaactgcagttgccggatatcaatctcgtgaatgaccagaagaaattagtatcttcagatctttggagaattgtcttgaacagcagtcaaaatggagctgatgaccaaagctctgcaagtgagtctggttctcaaagcacttgtgatccacttgtgactccaacagccctggctgcctgtaccagagttgactcctgctttaccccatggtttgtcccatccctttgcgtttctttccagtttgctcacctggaattccatctttgtcatcaccttgaccaactaggcacagctgcaccacagtacctacagccatttgtttccgacagaaatatgccatctgaactagaatacatgattgtttccttcagagaaccacacatgtatcttcgacagtggaataatggttctgtctgtcaggagatccagttcttagctcaagcagactgtaaacttctagagtgcagaaatgtcactatgcaaagtgtggtgaaacccttcagcatcttcgggcagatggcagtttccagcgatgtagtggaaaagctgcttgactgcaccgtgatagttgattctgtatttgtaaaccttggacagcatgtagtccattcactaaacactgcaatacaagcttggcaacagaacaaatgccctgaggtagaggagttggtcttcagccattttgtgatctgtaatgacacacaggagacactgcggtttggccaggtggatactgatgaaaatattctgctggcgagtctccacagtcaccagtacagctggcgctctcacaaatccccacagctgttacacatctgtattgaaggttggggcaactggcgttggtcagagcctttcagtgtggaccatgccgggacttttattagaacaattcagtacaggggtcgaactgcttctctcatcatcaaggttcagcaactcaatggagtacaaaaacagattatcatctgtggaagacagatcatctgtagttacttgtctcaaagcatagaactaaaagtcgttcagcattacattggtcaagatggacaagctgtagttcgggaacattttgactgcctcacagccaaacagaaattgccttcgtacatactagaaaacaatgaactgacggagctgtgtgtgaaggccaaaggagatgaagactggtcaagagatgtgtgcctggaatccaaagcccctgagtacagcattgtcattcaggtgccatcttcaaacagttccattatttatgtctggtgcacagttttgactttagaacccaactctcaagtgcaacaacgaatgattgtgttcagccctctttttatcatgaggagtcatcttccagaccccattatcatacatttggagaaaaggagtctgggattgagtgaaacacaaattattccaggaaaagggcaggaaaaaccactgcaaaacatagaacctgaccttgtacatcacctgacattccaagcaagagaagaatatgatccttcagattgtgcagttcccatctcaacatccctcattaagcaaatagccactaaggtacaccctggaggcacagttaatcagatccttgacgaattctatgggccagaaaagtcgcttcaacccatatggccctataataagaaggattctgacaggaatgaacagctaagtcagtgggatagcccaatgcgagtgaagctgtcaatctggaagccatatgttagaactttgttgatagaacttctgccctgggccctgcttatcaatgaatccaaatgggacctctggctatttgaaggagagaaaattgttctacaggttcctgctggcaaaattattattcctcctaattttcaggaagcttttcaaattggaatatactgggcaaatacaaacactgtgcacaagtcagtagcaattaaactggtccataacctgacatctccaaagtggaaagatggaggtaatggtgaagttgtgacactggatgaagaagcgtttgttgatactgaaataagacttggtgcttttccaggacatcagaagttatgtcagttctgcatttcctccatggtacagcaaggtatacaaattattcagattgaagacaagactacaataatcaataatacaccatatcaaatattttataaaccacagctatctgtctgcaatccccattctggaaaggagtattttcgtgttccagacagtgctacttttagcatttgcccaggtggagagcagcctgctatgaaatccagctcccttccttgctgggacttgatgcctgacatcagtcagtcagtactggatgcatccctgcttcagaaacagatcatgctgggcttttctcctgccccaggtgctgacagctcacagtgctggagcctgccagctatagttagaccagagtttcccagacagagtgtggcagtacccctcgggaatttccgggaaaatggattctgtaccagggctatagtgctgacatatcaagaacacctcggagtgacttatttaaccctctcagaagaccctagtcctcgagtaattatccacaatagatgtccagtaaaaatgcttataaaggaaaacattaaagatattccaaagtttgaggtttattgcaaaaaaattccctccgagtgctcaattcatcatgagctgtatcatcagatttccagttatccggactgcaagaccaaagacttacttccaagcctacttttgagagttgaacctctagatgaagtaacaactgagtggagtgatgccattgacatcaacagtcagggaacacaggttgtgttcctgactggctttggctatgtgtatgtggatgttgtacatcagtgtggcacagtcttcatcactgtggccccagaaggaaaagcaggacctattttaaccaataccaacagagcgccagagaagattgttacatttaaaatgttcatcactcagttaagcctggcagtgtttgatgacctcacccaccacaaagcatcagctgagcttctgagactcacactggacaacatttttctctgtgtggccccgggagctggtcccctccctggggaagagcctgtggctgcgttgtttgaactttactgtgtggagatctgctgtggggacctgcagctagacaaccagctttataacaagtccaatttccactttgctgtcttagtctgccagggagaaaaagcagaacccattcagtgttccaaaatgcagagtctcctcatatccaacaaagagttggaagaatacaaggaaaaatgttttatcaaactttgcatcaccttaaatgaaggcaagagcatcctctgtgatattaatgagttcagctttgaattaaaacctgctcggttatacgtggaagacacatttgtatactacatcaagactttgtttgacacctaccttcctaacagcaggttggctggtcactccacacacctctccgggggtaaacaggtgttgcccatgcaggtcacacagcacgccagggccttggtgaatcctgtgaagttacggaaactggtgatccagccagtaaatttgctcgtcagcatccacgcttccctcaagctgtacatagcctcagaccacactcctctctccttctcggtgtttgaaagaggacccatcttcaccactgcgaggcagcttgtgcacgccctggcaatgcactatgccgctggggccctttttagagcaggctgggtagttgggtctctggatattcttggcagccctgcaagcctggtgagaagcatcgggaacggggtcgccgacttcttcaggcttccgtatgaggggctgacccggggccctggagccttcgtgagtggcgtctccagagggaccacatcgtttgtaaagcacatctccaaaggtaccctcacatccatcaccaacctcgccacaagcctggcccggaacatggaccggctctcactggatgaggagcactacaaccggcaggaggagtggcggcggcagctccccgagagcctgggcgaggggcttcgacagggcctgtcccggctgggcatcagcctgcttggtgcaattgctggtatagttgatcagccgatgcagaacttccagaaaacatctgaggcacaggcttcagcaggacacaaggccaagggtgtcatctcgggtgtggggaaaggaatcatgggggtgttcacaaagcccatcggaggagctgctgagctggtgtcacagactggctatggtattttacatggagctggactttctcagcttcccaaacagcgccatcagccaagtgatctacatgctgaccaggctccaaacagccatgtcaaatatgtctggaaaatgcttcagtctctgggcagaccagaagtccacatggccctggacgtggttctggtgaggggctcaggccaggagcatgaagggtgcttgctgctgacatcagaagtgctcttcgtggtgagtgtcagtgaggacacacagcagcaggccttccccgtcacagaaatcgactgtgcacaggacagcaagcagaacaacttactcacagtgcagctcaagcagccaagagtggcctgtgatgtggaggtagatggagtccgagagagactgtcagagcaacagtacaacagactggtggactacatcacaaagacatcttgtcacctggcccccagctgttcttccatgcaaataccatgccctgtggtggctgcagaacctcccccctccactgttaaaacataccattacctggttgatccacattttgctcaggtcttccttagtaaatttaccatggtgaaaaataaagccctgaggaaagggtttccttgagtcccctctgaggtgtttattcctgcttgtgtgatttagtttttgggtttctttgagacagggtctcactgcattgcccttgctgacctcaaattctggggttcaagcaatcctcccacctcaacccacaagtagctacgactgcaagcacctgccaccataaagggctgcattttgccaccataaagggctgcatttttttaaaaagcctaggcagctctaacatcatctgatatggacacaaggccaacagtttccttatttacatccttacctctaaaagatacttcaaagtgacaaaaacgtgttccttccccacttagagacaatgattaacagggccctatatgttcttaccacatacagaggatgcatttatttttgctctatgacacttgcaaaaatctctactgtaattaatttgggtctattattaactctctgttccatcatagaatgtggccaggccttacaatggagagccagagttaaaacttcaagttgcatctgtttttgggctgagtcaccacctttgcctcatgctcctttgtctgcaaaggcctaggattctttctttaaatgaaatgcttaggactttgtggcttgttacatttgtcatttaactgcagtgctattctttgaaagctgctatgtgtattttctctgaagtctgcattttactaaaatttacaacagtctgatgattgattgattactgtccaggtacattttagaaaaagtgttcttcttccagtttgttttactaagcaaactttgagtaaatcctttgtcctatattgaatccagtcccaaagtgttcaggtgagtttctctagttccataaacaaaacatacatagtgggaactccctggtatgccatagagcacacaagaaccccaatattaatgctaacaattataccagtccattttgtttattctgtggaattgacttgacaaagcatgaagatattcccagtgtctgtctgataatattttgcatctaagaatgggtttgactcaagatcttgggttaccaagatgtcttaaatgttcagtaaatatctttcttacagtccagtagcttagagcatgtttgctgattgatattacatttaaacttggggctacagcttgttacctagaattttgagatactaagagaatgcaattttaaatgcccactggttttatttgttttggagagagggtctcattctgtcacccaggctagagtacagtgggaacagtcatggctcactgcagcttaagctcactgcctgggctcaagtgatcttactccagcctcccaagcagctgggactacaccaccacaggtatgcaccaccatacctggctgatttttaaaattttttctagagatgaggtctcactatgttgcccagctggtctcatactcctcagttcacgcattcctcccacctccacctcccaaactgctgggattacaggtgtgagccaccatgcccaacacccactgatctttaactctcacatgttgggcataagaagtcactatataattgttactggaaagcaagacttaacgaacaattctgactatgaaaaatgtctctttcagtttgttctgtaaatatttagaaaagtgacagctgtcaacctcagagtaactatttctaaaaatgtaaatatgtattaatccttgtatcttttatggtaattttgcatattgatatgaattatataaaattgtttaaaataaaaggtgtccttgaattactgaccacccatagatgtctactgttaccaggttttacaatgcaaattttcactaatacctgggtttaatacagctcacatcactgaatgttacacatgagtttaaatgggtaatatacaggttttgttataataaagttactgattaaatt

SEQ ID NO: 2759 - protein, 1637 aa, Homo sapien
LQKVFVAFREFNLSESKVCELQLPDINLVNDQKKLVSSDLWRIVLNSSQNGADDQSSASESGSQSTCDPLVTPTALAACTRVDSCFTPWFVPSLCVSFQFAHLEFHLCHHLDQLGTAAPQYLQPFVSDRNMPSELEYMIVSFREPHMYLRQWNNGSVCQEIQFLAQADCKLLECRNVTMQSVVKPFSIFGQMAVSSDVVEKLLDCTVIVDSVFVNLGQHVVHSLNTAIQAWQQNKCPEVEELVFSHFVICNDTQETLRFGQVDTDENILLASLHSHQYSWRSHKSPQLLHICIEGWGNWRWSEPFSVDHAGTFIRTIQYRGRTASLIIKVQQLNGVQKQIIICGRQIICSYLSQSIELKVVQHYIGQDGQAVVREHFDCLTAKQKLPSYILENNELTELCVKAKGDEDWSRDVCLESKAPEYSIVIQVPSSNSSIIYVWCTVLTLEPNSQVQQRMIVFSPLFIMRSHLPDPIIIHLEKRSLGLSETQIIPGKGQEKPLQNIEPDLVHHLTFQAREEYDPSDCAVPISTSLIKQIATKVHPGGTVNQILDEFYGPEKSLQPIWPYNKKDSDRNEQLSQWDSPMRVKLSIWKPYVRTLLIELLPWALLINESKWDLWLFEGEKIVLQVPAGKIIIPPNFQEAFQIGIYWANTNTVHKSVAIKLVHNLTSPKWKDGGNGEVVTLDEEAFVDTEIRLGAFPGHQKLCQFCISSMVQQGIQIIQIEDKTTIINNTPYQIFYKPQLSVCNPHSGKEYFRVPDSATFSICPGGEQPAMKSSSLPCWDLMPDISQSVLDASLLQKQIMLGFSPAPGADSSQCWSLPAIVRPEFPRQSVAVPLGNFRENGFCTRAIVLTYQEHLGVTYLTLSEDPSPRVIIHNRCPVKMLIKENIKDIPKFEVYCKKIPSECSIHHELYHQISSYPDCKTKDLLPSLLLRVEPLDEVTTEWSDAIDINSQGTQVVFLTGFGYVYVDVVHQCGTVFITVAPEGKAGPILTNTNRAPEKIVTFKMFITQLSLAVFDDLTHHKASAELLRLTLDNIFLCVAPGAGPLPGEEPVAALFELYCVEICCGDLQLDNQLYNKSNFHFAVLVCQGEKAEPIQCSKMQSLLISNKELEEYKEKCFIKLCITLNEGKSILCDINEFSFELKPARLYVEDTFVYYIKTLFDTYLPNSRLAGHSTHLSGGKQVLPMQVTQHARALVNPVKLRKLVIQPVNLLVSIHASLKLYIASDHTPLSFSVFERGPIFTTARQLVHALAMHYAAGALFRAGWVVGSLDILGSPASLVRSIGNGVADFFRLPYEGLTRGPGAFVSGVSRGTTSFVKHISKGTLTSITNLATSLARNMDRLSLDEEHYNRQEEWRRQLPESLGEGLRQGLSRLGISLLGAIAGIVDQPMQNFQKTSEAQASAGHKAKGVISGVGKGIMGVFTKPIGGAAELVSQTGYGILHGAGLSQLPKQRHQPSDLHADQAPNSHVKYVWKMLQSLGRPEVHMALDVVLVRGSGQEHEGCLLLTSEVLFVVSVSEDTQQQAFPVTEIDCAQDSKQNNLLTVQLKQPRVACDVEVDGVRERLSEQQYNRLVDYITKTSCHLAPSCSSMQIPCPVVAAEPPPSTVKTYHYLVDPHFAQVFLSKFTMVKNKALRKGFP

SEQ ID NO: 2760 - DNA, 8859 bp, Homo sapien
ggtcttcaggagagccaggagaggccagttgtcacgtgcctgaaacatgaggacttcgagttggctttccttctcttgaccaagggcgcagacccccgtgctatttctctcacggaaggtgatactcctttgcatgcagcactccacatctttctagagattaaagctgacattggttttagcttcctcagccatctgttggatctgttttggtccaaccccactgaattcgactacctcaaccccaatgtccaggacagcaatgggaacacgctgatgcacatcctcttccagaagggcatgctaaagcgcgtgaagaagctgttagacctgctggtgaagtttgacatcaacttcaatctgaagaacaaagagggcaaagatgcacggcaccggattaagaagaacgactctctgctcttggcctggaacaaagctctgatggagaacaggaggaggagccggcaggactctgctgcccacctggggaagctctcaaagtccactgcccctggtcacacatctcagctcaagtcccagggttcattcaagtcagtgccatgtggtgccactgccagaacactgcctgaaggaagtgcagtccctgacagctgggagactctcccaggtacccaggtgaccaggaaggagcctggagctctcaggccctgctcgctgagagactgccttatgcaggacatcacagttttgattcagcaggttgaagtggatccgtctttcccagaggactgtcttcagagctctgagcctctggaggcaggagctggcaaagaaggaaagaaagatgacaagccgactctgggtgcaggggcccctgactgtagtgaggtgggggaaggacatgctcaggtgggtcttggggccttgcagcttgtgcctgatgataacagggggaaggagggcaatgatgatcaggatgactggagcacgcaggagattgaggcctgcctccaggacttcgataacatgacctgggagatcgagtgcacttcagaaatgctgaagaagctgtctagtaaggtaatgaccaaggtcatcaagaagaaaatcatccttgccattcagcagctgggaaatggcgagtggacccagggcctgcagaagcgactgaagcacctgaaaggaagcatccagctcttcgaagctaagctggacaaaggagcccggatgctctgggagctcgccattgacttctcccctcgatgcagtgagaaccctgagaagatcattgccacggagcagaacacgtgtgcaatggagaaatcagggcggatctacacggaaatcatccggatttgggacatcgtcttagatcactgcaaactggctgattccatcaaggccatctgcaatgcctacaaccggggcttgtcctgtgtcctgcggaagaagctgaaaggtatcaataaaggccaagtgtcagctaacatgaaaattcaaaagcgtatacctcgctgctatgtggaggacacagaggccgagaagggcagggagcatgtcaatcctgagtactttcccccagccagtgcagtggagacagaatataacatcatgaagttccacagcttcagcaccaacatggcctttaacatcctcaatgacacgacagccacagtggagtaccccttccgggtgggtgagcttgagtacgcggtgatcgacctcaatcccaggccactggagcccatcatccttattgggcgaagtggcactgggaagacaacctgctgcttgtacagattgtggaagaaattccacgtttactgggaaaaagctgagcaggcaggaagcccattgctggccaaacaggtctggctgaagagaaggttggaagtggaacccggaaaagagagtccaggtggggaggaagagggggaggaagaggacgaggaagaggaagattctattgaagtggaaacagtagaaagcatagatgagcaggagtatgaagcctgcgcaggaggagccggtgtggagccagcaggggacggccaagctgcagaagtatgtgcaccagaacatccccaccagctggagcatttacatcagatctttgtgaccaagaaccatgtgctgtgccaggaggtacaaaggaatttcattgagctttccaagtccaccaaggccactagtcattacaaaccactggaccccaacattcacaaactccaggacctgagggacgagaactttcctctgtttgtcacttccaagcagctgcttcttctgcttgatgcttctctgcccaaaccattttttctgagaaacgaagatggaagcttgaaaagaaccatcataggatggtctgcacaggaagagtcaaccattcctagttggcaagaggatgaagaggaggctgaggtggatggggactacagtgaggaggataaagctgtagaaatgcgtacgggtgacagtgacccccgggtgtacgtgacgtttgaggtgttcaaaaatgaaatatggcccaaaatgaccaaagggaggactgcctacaaccctgcactgatttggaaagaaataaaatcttttctaaagggttcttttgaggccctcagctgtccccatgggagactcactgaagaagtatataagaaattagggaggaaacggtgccccaatttcaaggaagaccggagtgagatctacagcctcttcagtctgtatcagcaaatcaggtcccagaaaggttattttgatgaagaggatgttctgtacaacatatcccggaggctgtcgaagctcagggtgctcccatggtccatccacgagctctatggtgatgagattcaagactttacccaggccgagctggcgctgctgatgaaatgcatcaatgaccccaactctatgttcctcacgggggacacggcccagagcatcatgaagggcgtggccttccgcttcagcgatctgcgctctctgttccattatgccagcagaaacaccatagacaagcagtgtgctgtccggaagcccaagaagatccaccagctgtaccagaattacaggtcccactcaggaatcctcaatctggcatctggagtggtggatttacttcagttctatttcccagaatcttttgatcgccttccaagggattctggcctctttgatggtcctaagccaactgttctggagtcttgtagtgtaagcgacttggcaattttgctacgagggaataaaaggaaaactcagcccattgaatttggagcccaccaggtaatccttgtggccaatgaaacggcaaaggagaaaattccagaagagctggggttagcacttgtgctaacaatttatgaagcaaaaggcttagaatttgatgatgtcctcctttacaacttttttactgattctgaggcttataaggaatggaagatcatttcctcattcacacctacctcaactgactccagagaggaaaaccggccattggttgaagtacccctggacaaaccaggctcttctcagggtcgatctctcatggtgaatccagaaatgtacaagctcctcaacggagagctgaagcagctgtacaccgccatcacacgggctcgggtcaacctctggatctttgatgaaaaccgagagaaacgggctcccgcattcaaatatttcattagaagagattttgtccaagttgtaaagacagatgaaaataaagactttgatgatagcatgttcgttaagacctcaactcctgcggagtggattgcacagggagattactacgccaagcaccagtgctggaaggttgcagccaagtgttaccagaaaggaggtgcatttgagaaggagaagttggccctggcccatgacactgccctgagcatgaaatccaagaaagtcagccccaaggaaaagcagttggaatatttggaattggctaagacctatttggagtgcaaagagccaacactgtcccttaagtgtctgagctatgccaaggagttccagctctctgcccagctgtgcgagaggctgggaaagataagagatgctgcctatttctataagcgaagccagtgctacaaagacgctttcagatgctttgagcagattcaggaatttgatctagcactcaaaatgtactgccaagaggagctttttgaagaagctgctattgcagtggaaaagtatgaagaaatgctaaagactaagacccttcccatttccaagctctcctattctgccagtcagttttacttggaagctgcagcaaagtatctgagtgcaaataagatgaaggaaatgatggctgtcctctcaaagctagacatagaagaccagctggtgttcttgaagtctcggaaacgcttagcagaagctgcagacctgctgaacagggaaggtaggagagaagaggctgccctgctgatgaagcaacatggctgcctcctggaggctgccaggctcactgccgacaaggacttccaggcctcatgtctgctgggggccgcccgcctcaatgtggccagggattccgacatagaacacaccaaggacattctgagagaagcacttgatatctgctatcaaactggccagttgtctggcattgcggaggcccacttcctgcaaggggtaatcctgagagactttcagaagctcagggatgccttcttcaagtttgacacgctcaaccactcagctggagtggtggaagcactctacgaagcagccagccagtgtgaggccgagcctgagaagattctgggcctggctccagggggcttggaaatcctcctcagtctggtcagggctctcaaaagagtgaccaacaatgctgagaaggaaatggtcaaatcttgctttgagttttttgggatttcccaggtggatgccaagtattgccagatagctcagaatgaccctgggcccatattaagaataatttttgacctggatttgaacttgagagagaaaaaaacaaaagatcattttttgataatgactgaccaagtgaaattagccctaaacaaacaccttttgggcaggctgtgtcagatcacacggagcctgcttgggaagacctaccgaggagtctgcatgaggtttattgtaggcttaaaatgtgaggatgaaaactgtgaacattttcacaggcctctgcggcgttgtgaagccaagtgtttagttcagtcgaaaatgaacttggtggcaatcaacgggttgcttttggaagccaaaaaagtattccctaaaatcttagcagaagaacttaaagaaattgattatattttgtctacagatatgtatggcctttgcaagtccattctggatgtccttttccctaagcatttccatcagagagtgttgtcagaaaaccccatggcatgcaaagaaatcctcaaaccaaattacaaatccttccggttctacagatttgctttgaaggagtacatccactttctgtttgaaaatgaaagcgcacgcaaccgccgggaatccacagacctgtggctgagtgccatgcaagctttccttctctcttccaactacccggaggagtttgaaaagctgctccaccaggaggaggacaactacaacagggaactcaaagctctagagtctgaaaaggatgaaaggggcagggggagaggcagcaggataaaaggaatagaagggaaatttggcatgctggcacccaacagggatgatgaaaatatggacaagacccacctgtgcttcatccggcttctggagaattgcattgatcaattctacgtgtacaggaacccagaagactacaagaggctctttttccgtttcatgaatgtcctcatcaagaggtgcaaagaaccactcatccccagcattggaaacacagtagccctcctggagttccagttcatccactgtggggtggtgctggcccgcctctggaagaatgtcattctatgcctccccaagagctacattgcactcttgcactactgggagttcctgtttagcaagaaggacaaggagcttggggatgtgttctccatcattcaggaatacaaacccaaggacgtgacaagagccattcaggatttccggttccatctctcctacctcgccaaggtgctatgtggctatgagaatgtgaacttcaacgtcctgcttgatgccttcagtgaaatagactatgtggtctcgggtgaggctgagcggacactggtgctgtgcttggtgatgctagtgaatgctgaggagatcctgcagccatactgcaagcctctcctgtatcgccacttccgggagattgagtcaaggctgcagctcatgagcatggactgccctggccaggttcccgagaggctcctgaaggtggtgaagcgggtcttggtggcagtcaatgtgaagtctgtggctgaggcactgcaggacctgctctttgagcgggatgaagagtacctaatggactgtgactggcggtgggaccctgtgcacaccaaagggtccatagtccgtggcctctattatgaggaggtcagactaaaccgcctgctctgtttggaccctgtggactactttgctgaacctgagtgtgagtttggccaggatgagatggatgaactggcattagaagaccgagaccacgtcctggccaccattctttcccaaaagcaacggaaggcctccatacagcggaagttgaggagggcatgcctggtggtgtctctgtgcatcagttggaggagaagagtgggcacccagatggagcgtgtcagggaggaggccagggagcccagggctgggaacttcaaaaaggcagacgtggacaggacccagtgtgacctatgtggagtgaagtttacccgtggcccagagaactatttcagccccagcaaagcgtttgagggggcagcttccgaggtggcagtcctttccagggctgagctggaaagggaggagtgtcaggagaggaacagcgagtcttacgagcagcatatccatctagaacaccaccagaggcagcaagtggcctaccagaaatactcagaatttttccacgagaaggtggacccggccattgatgaaggcaagctggtggtgcaggacatcgagcaaagtgtatggatccacagtcacgtgggctccaaggagcacagccacatgctgcagaaggtccaggagcacatcaagagggtttcggatatggtggaggacctctacaggcggaaggcctgggctggcgcggaggaggcgatgactcggctggtcaacattctgatcctgtcagtcagggatgcacgagactggttgatgaaaacagagacccgcttaaagaaggaaggtattgttcaggaagatgattatgaaaatgaagttgaagactttggtgagcttcggcctagaaggcgttctcggaaatgtggaaagcagagaaaatactaatgtccacacagctgcagcctcctcatccttcggaacattccattctgacttagaattctgagcgctggggcagaagacaaaaagaatgtgaattagcattttaaaaataggggagtctaacaacaccattgctttttattctcattacttctctttcagtggcttaggatctgattgctccctcacctctaaagtgtttccaagtagagtctggcagtattagtttcccccacaaacaaattcaggtagagaagttgtagtcgaagggaatgttgggactcctcactgcatggtccctggggtgtctggctcatccccatcatgacgtgagttggtagcagaggactaggtgttaggacagactctcctcacctcagttgctgctgctctgggccaggaaatctctctatggattccctcatctcctgccacactgctgcagcatcaagtgtgctatgagagctgtatgtgcccaggggtgggccctgccactggccaccccgagcccaggacgcattctggtcatctctgagcccacttgtagtgtagcttcttctgttagagatgttagccttttctctctgtggcgacttttctgccttcccttcttctgttttttgtgatcattcttagctacctgtgccaagtcacagttagactacctcagaatgtagtcaagaattcacccagtgttctttggatgtcccttccctagggggaaaggctggggaatgttgctgggagcattcccagctgcctctccaaagtggtcctaactctgccttggctatggtgcagacattccaaaaagtgttttgtatacagccctgtacatctagttttcttggttctccctggcaagttcgctaccctagcttaggctgacgttctgatgagtctctgcttgctgagctcatcactgtgggatggtgacctgcagagctgcagattggagcaagtggacagaggagggagccagctaagccaaatccgtcactgccacttggctggcaggccttataagagggcggatctgggcccgtttgcaggaggccattgcctaccctctccccacagtgagccagcagccatcagctgatcccacctgggaaaccttcatgcctctctgatggttactgcccacccttaccccacccctcagctcagcctggtatggaaagcaaggtgcacgttggtctttgattgttctgtcctcacagcagagccagctttccccccatgttgctgctgcttttgctgctcatgctgcttgttgttttctcttccttatctttccaaattgtttccttgaaatgcttgtttccaatttttcttagattatgtttctaatttttattccaggtgtttttttttcttacttgacagaaaaaaagaaaaccccaacaatatcttgctgtattatcacattttttataaagttaaagcatttctctt

SEQ ID NO: 2761 - protein, 1347 aa, Homo sapien
GSPKRGRAYKEWKIISSFTPTSTDSREENRPLVEVPLDKPGSSQGRSLMVNPEMYKLLNGELKQLYTAITRARVNLWIFDENREKRAPAFKYFIRRDFVQVVKTDENKDFDDSMFVKTSTPAEWIAQGDYYAKHQCWKVAAKCYQKGGAFEKEKLALAHDTALSMKSKKVSPKEKQLEYLELAKTYLECKEPTLSLKCLSYAKEFQLSAQLCERLGKIRDAAYFYKRSQCYKDAFRCFEQIQEFDLALKMYCQEELFEEAAIAVEKYEEMLKTKTLPISKLSYSASQFYLEAAAKYLSANKMKEMMAVLSKLDIEDQLVFLKSRKRLAEAADLLNREGRREEAALLMKQHGCLLEAARLTADKDFQASCLLGAARLNVARDSDIEHTKDILREALDICYQTGQLSGIAEAHFLQGVILRDFQKLRDAFFKFDTLNHSAGVVEALYEAASQCEAEPEKILGLAPGGLEILLSLVRALKRVTNNAEKEMVKSCFEFFGISQVDAKYCQIAQNDPGPILRIIFDLDLNLREKKTKDHFLIMTDQVKLALNKHLLGRLCQITRSLLGKTYRGVCMRFIVGLKCEDENCEHFHRPLRRCEAKCLVQSKMNLVAINGLLLEAKKVFPKILAEELKEIDYILSTDMYGLCKSILDVLFPKHFHQRVLSENPMACKEILKPNYKSFRFYRFALKEYIHFLFENESARNRRESTDLWLSAMQAFLLSSNYPEEFEKLLHQEEDNYNRELKALESEKDERGRGRGSRIKGIEGKFGMLAPNRDDENMDKTHLCFIRLLENCIDQFYVYRNPEDYKRLFFRFMNVLIKRCKEPLIPSIGNTVALLEFQFIHCGVVLARLWKNVILCLPKSYIALLHYWEFLFSKKDKELGDVFSIIQEYKPKDVTRAIQDFRFHLSYLAKVLCGYENVNFNVLLDAFSEIDYVVSGEAERTLVLCLVMLVNAEEILQPYCKPLLYRHFREIESRLQLMSMDCPGQVPERLLKVVKRVLVAVNVKSVAEALQDLLFERDEEYLMDCDWRWDPVHTKGSIVRGLYYEEVRLNRLLCLDPVDYFAEPECEFGQDEMDELALEDRDHVLATILSQKQRKASIQRKLRRACLVVSLCISWRRRVGTQMERVREEAREPRAGNFKKADVDRTQCDLCGVKFTRGPENYFSPSKAFEGAASEVAVLSRAELEREECQERNSESYEQHIHLEHHQRQQVAYQKYSEFFHEKVDPAIDEGKLVVQDIEQSVWIHSHVGSKEHSHMLQKVQEHIKRVSDMVEDLYRRKAWAGAEEAMTRLVNILILSVRDARDWLMKTETRLKKEGIVQEDDYENEVEDFGELRPRRRSRKCGKQRKY

SEQ ID NO: 2762 - DNA, 6188 bp, Homo sapien
cagtgaaagctaggtgagtgcccggagtgaagaaaagttggcaggtttcccactgataccagctgctgttggtttctgaacactcaaagccgcaaataccttagggctgggggcaatgaacccaaggctgaattccaagttcagaagcagcgaagtctgaatttagaacctaggaacttaaactgctgcaggtccaacttcaagccccagttttagacagaggcttgggaaagatctgacttctaacccggttccccctcccctcctcccctcgatgcttctcacaggaaagtacacctggtcctgccaaatcgcactcttatatcctggcatcctatccaggctctgcgaggatggaaactgcgaggcaggggagggaagcgggctgtttggccaccacctccctagtgctgcaggcgaccctgtcacactaactcctggcagcccagtgaggtggacggcaccggccccacctgcagatgagggaaatgaagctcggaggagttccgtgatttgcttgcttcacactgtggtagcctggccacgaaagaaccaggattcccgacttcgggattctttccaccacacactttcgtccctaaggggtggggggcggggggagaataaaataaccgcggaaaaggaaccacttacatgtgtctagcgcttcctagaggctacccaggatatgcgcccaccacccggccgggagtgcagagatttgaagtccaggttctaccccgggctccgagtactactgcgtgactttatgcgagtgtccgccgccttctgggcttgttttcccggaagcaactcggcgcggatggagtgtgtgtgtgcgcgcgcgcgcgcgttatgttgtgcgtgttgtgttaagcgtgtgcgtgttgtccgggggcgggagggggagtagactaacaccggggttccccgagtttcggatcgcctacacgcttgttcccatctggaccctgttacccaccaattgcgcccactataaaaactgcccctccgaggcaaagctgtgaacccccgcgccctttcccccacggtcccggaggatgaagtggggtgcaacggagactcagctgagcgtccagtttcgggcaatacaaatctctcggcttctacgagcagccagacgaccccgcggaccgtcgctcctgaacttgaccgagacgcaaacttcggagtgttctcaacgtggggggcccactctcgggagaccgcccctaaacttaagtccccttaggctcgcccccacctgggacttcacagagccaccttaagggcggtattcccgcccccccggaagtgcgggggggtggcagcgtacttggattctcagcctccagccccgcgcggtggcggccgccggtggatgacttcgggccccacaagtggggaaacaacaaccacccctcgcccgcacccctggcccaaaacaactggccaggttccctggcctcccgggtccctgcatcccccgcatccccgtccgcagccgtgaacttgagcccccctccatcagaggttgcgagcgtccgcccgctcgcggcagccaccgtcactagacagtcaaaccccaagacgtcagcccacaatgcaccgggcgggccgggaaaaacggcccggggaggggaccggggaagagagggccgagaggcgtgcggcaggggggagggtaggagaaagaagggcccgactgtaggagggcagcggagcattacctcatcccgtgagcctccgcgggcccagagaagaatcttctagggtggagtctccatggtgacgggcgggcccgcccccctgagagcgacgcgagccaatgggaaggccttggggtgacatcatgggctatttttaggggttgactggtagcagataagtgttgagctcgggctggataagggctcagagttgcactgagtgtggctgaagcagcgaggcgggagtggaggtgcgcggagtcaggcagacagacagacacagccagccagccaggtcggcagtatagtccgaactgcaaatcttattttcttttcaccttctctctaactgcccagagctagcgcctgtggctcccgggctggtgtttcgggagtgtccagagagcctggtctccagccgcccccgggaggagagccctgctgcccaggcgctgttgacagcggcggaaagcagcggtacccacgcgcccgccgggggaagtcggcgagcggctgcagcagcaaagaactttcccggctgggaggaccggagacaagtggcacagagtcccggagcgaacttttgcaagcctttcctgcgtcttaggcttctccacggcggtaaagaccagaaggcggcggagagccacgcaagagaagaaggacgtgcgctcagcttcgctcgcaccggttgttgaacttgggcgagcgcgagccgcggctgccgggcgccccctccccctagcagcggaggaggggacaagtcgtcggagtccgggcggccaagacccgccgccggccggccactgcagggtccgcactgatccgctccgcggggagagccgctgctctgggaagtgagttcgcctgcggactccgaggaaccgctgcgcccgaagagcgctcagtgagtgaccgcgacttttcaaagccgggtagcgcgcgcgagtcgacaagtaagagtgcgggaggcatcttaattaaccctgcgctccctggagcgagctggtgaggagggcgcagcggggacgacagccagcgggtgcgtgcgctcttagagaaactttccctgtcaaaggctccggggggcgcgggtgtcccccgcttgccagagccctgttgcggccccgaaacttgtgcgcgcagcccaaactaacctcacgtgaagtgacggactgttctatgactgcaaagatggaaacgaccttctatgacgatgccctcaacgcctcgttcctcccgtccgagagcggaccttatggctacagtaaccccaagatcctgaaacagagcatgaccctgaacctggccgacccagtggggagcctgaagccgcacctccgcgccaagaactcggacctcctcacctcgcccgacgtggggctgctcaagctggcgtcgcccgagctggagcgcctgataatccagtccagcaacgggcacatcaccaccacgccgacccccacccagttcctgtgccccaagaacgtgacagatgagcaggagggcttcgccgagggcttcgtgcgcgccctggccgaactgcacagccagaacacgctgcccagcgtcacgtcggcggcgcagccggtcaacggggcaggcatggtggctcccgcggtagcctcggtggcagggggcagcggcagcggcggcttcagcgccagcctgcacagcgagccgccggtctacgcaaacctcagcaacttcaacccaggcgcgctgagcagcggcggcggggcgccctcctacggcgcggccggcctggcctttcccgcgcaaccccagcagcagcagcagccgccgcaccacctgccccagcagatgcccgtgcagcacccgcggctgcaggccctgaaggaggagcctcagacagtgcccgagatgcccggcgagacaccgcccctgtcccccatcgacatggagtcccaggagcggatcaaggcggagaggaagcgcatgaggaaccgcatcgctgcctccaagtgccgaaaaaggaagctggagagaatcgcccggctggaggaaaaagtgaaaaccttgaaagctcagaactcggagctggcgtccacggccaacatgctcagggaacaggtggcacagcttaaacagaaagtcatgaaccacgttaacagtgggtgccaactcatgctaacgcagcagttgcaaacattttgaagagagaccgtcgggggctgaggggcaacgaagaaaaaaaataacacagagagacagacttgagaacttgacaagttgcgacggagagaaaaaagaagtgtccgagaactaaagccaagggtatccaagttggactgggttgcgtcctgacggcgcccccagtgtgcacgagtgggaaggacttggcgcgccctcccttggcgtggagccagggagcggccgcctgcgggctgccccgctttgcggacgggctgtccccgcgcgaacggaacgttggacttttcgttaacattgaccaagaactgcatggacctaacattcgatctcattcagtattaaaggggggagggggagggggttacaaactgcaatagagactgtagattgcttctgtagtactccttaagaacacaaagcggggggagggttggggaggggcggcaggagggaggtttgtgagagcgaggctgagcctacagatgaactctttctggcctgccttcgttaactgtgtatgtacatatatatattttttaatttgatgaaagctgattactgtcaataaacagcttcatgcctttgtaagttatttcttgtttgtttgtttgggtatcctgcccagtgttgtttgtaaataagagatttggagcactctgagtttaccatttgtaataaagtatataatttttttatgttttgtttctgaaaattccagaaaggatatttaagaaaatacaataaactattggaaagtactcccctaacctcttttctgcatcatctgtagatactagctatctaggtggagttgaaagagttaagaatgtcgattaaaatcactctcagtgcttcttactattaagcagtaaaaactgttctctattagactttagaaataaatgtacctgatgtacctgatgctatggtcaggttatactcctcctcccccagctatctatatggaattgcttaccaaaggatagtgcgatgtttcaggaggctggaggaaggggggttgcagtggagagggacagcccactgagaagtcaaacatttcaaagtttggattgtatcaagtggcatgtgctgtgaccatttataatgttagtagaaattttacaataggtgcttattctcaaagcaggaattggtggcagattttacaaaagatgtatccttccaatttggaatcttctctttgacaattcctagataaaaagatggcctttgcttatgaatatttataacagcattcttgtcacaataaatgtattcaaataccaataacagatcttgaattgcttccctttactacttttttcttcccaagttatatactgaagtttttatttttagttgctgaggttaacattgctgcaatctgaagtgatttgaaaattaagaagcaaagaatttaggaagagtcaaactagaagttgtgatctgaatgaaacagtctcccaatttcattaattctttccctctttctccatctctatctctctctctactacctcacccccaaataaacccctatgcctatggaaactaacagtttagcattttgggtctgtctgtagcttatttcttaatttgtttctaaaataatcaaccttgtttaaatatagaataagtctcaaaagatagtaatctaatactatggaaaagattcacaagagaaaacatgaactagtactaactcaatgattacatgcgtaaatcaaacctcagctctggggaaatgggaaacttgaattctgcctacagatataacttaggagatcaacaaggcagtgcttaacaagggaacaattttttgcttggttgcttttcataccaagagccagtgtgattatcaggcagcaaaagcaatttgatatccaggaatatttcacaaaccactaattgagtcagggctgtttgctcattagcagtgttctagtacccagtaggtctgggagtgctaatatcctgcctgtggctgtaaatccaaatacacaaagagtttctccttaggagtatatctaggagtggaagagattggacaggcttgttagcttcggatcctttgtaataacacttcttgaacaaagggttactgggagcagagcccagtttgccaaactgaatttgccgatgtcagcaacccggaaggtgagatgattttgaccatatgtagaaatagcagagggacaataaagcattttggggtggggctctgtggaagctaaacaagagccaactagaaaaaataagcaggctggggaattaattacctgcaaaggtagactaagcccagac

SEQ ID NO: 2763 - protein, 331 aa, Homo sapien; identical to SEQ ID NO: 332

SEQ ID NO: 2764 - DNA, 2815 bp, Homo sapien
gaattcggcacgagctcttctcccctgattcaagactcctctgctttggactgaagcactgcaggagtttgtgaccaagaacttcaagagtcaagacagaaggaagccaagggagcagtgcaatggatttctcagtaaaggtagacatagagaaggaggtgacctgccccatctgcctggagctcctgacagaacctctgagcctagattgtggccacagcttctgccaagcctgcatcactgcaaagatcaaggagtcagtgatcatctcaagaggggaaagcagctgtcctgtgtgtcagaccagattccagcctgggaacctccgacctaatcggcatctggccaacatagttgagagagtcaaagaggtcaagatgagcccacaggaggggcagaagagagatgtctgtgagcaccatggaaaaaaactccagatcttctgtaaggaggatggaaaagtcatttgctgggtttgtgaactgtctcaggaacaccaaggtcaccaaacattccgcataaacgaggtggtcaaggaatgtcaggaaaagctgcaggtagccctgcagaggctgataaaggaggatcaagaggctgagaagctggaagatgacatcagacaagagagaaccgcctggaagatcgagagacagaagattctgaaagggttcaatgaaatgagagtcatcttggacaatgaggagcagagagagctgcaaaagctggaggaaggtgaggtgaatgtgctggacaacctggcagcagctacagaccagctggtccagcagaggcaggatgccagcacgctcatctcagatctccagcggaggttgacgggatcgtcagtagagatgctgcaggatgtgattgacgtcatgaaaaggagtgaaagctggacattgaagaagccaaaatctgtttccaagaaactaaagagtgtattccgagtaccagatctgagtgggatgctgcaagttcttaaagagctgacagatgtccagtactactgggtggacgtgatgctgaatccaggcagtgccacttcgaatgttgctatttctgtggatcagagacaagtgaaaactgtacgcacctgcacatttaagaattcaaatccatgtgatttttctgcttttggtgtcttcggctgccaatatttctcttcggggaaatattactgggaagtagatgtgtctggaaagattgcctggatcctgggcgtacacagtaaaataagtagtctgaataaaaggaagagctctgggtttgcttttgatccaagtgtaaattattcaaaagtttactccagatatagacctcaatatggctactgggttataggattacagaatacatgtgaatataatgcttttgaggactcctcctcttctgatcccaaggttttgactctctttatggctgtgctccctgtcgtattggggttttcctagactatgaggcaggcattgtctcatttttcaatgtcacaaaccacggagcactcatctacaagttctctggatgtcgcttttctcgacctgcttatccgtatttcaatccttggaactgcctagtccccatgactgtgtgcccaccgagctcctgagtgttctcattcctttacccacttctgcatagtagcccttgtgctgagactcagattctgcacctgagttcatctctactgagaccatctcttcctttctttccccttcttttacttagaatgtctttgtattcatttgctagggcttccatagcaaagcatcatagattgctgatttaaactgtaattgtattgccgtactgtgggctggaaatcccaaatctagattccagcagagttggttctttctgaggtctgcaaggaagggctctgttccatgcctctctccttggcttgtagaaggcatcttgtccctatgactcttcacattgtctttatgtacatctctgtgcccaagttttccctttttattaagacaccagtcatactggctcagggcccaccgctaatgccttaatgaaatcattttaacattatattctctacaaagaccttatttccaaataagataatatttggaggtattgggaataaaatttgaggaaggcacgatttcactcataacaatcttaccctttcttgcaagagatgcttgtacattattttcctaataccttggtttcactagtagtaaacattattattttttttatatttgcaaaggaaacatatctaatccttcctatagaaagaacagtattgctgtaattccttttcttttcttcctcatttcctctgccccttaaaagattgaagaaagagaaacttgtcaactcatatccacgttatctagcaaaagtcataagaatctatcactaagtaatgtatccttcagaatgtgttggtttaccagtgacaccccatattcatcacaaaattaaagcaagaagtccatagtaatttatttgctaatagtggatttttaatgctcagagtttctgaggtcaaattttatcttttcacttacaagctctatgatcttaaataatttacttaatgtattttggtgtattttcctcaaattaatattggtgttcaagactatatctaattcctctgatcactttgagaaacaaacttttattaaatgtaaggcacttttctatgaattttaaatataaaaataaatattgttctgattattactgaaaagatgtcagccatttcaatgtcttgggaaacaattttttgtttttgttctgttttctttttgcttcaataaaacaatagctggctctaaaaaaaaaa

SEQ ID NO: 2765 - protein, 442 aa, Homo sapien
MDFSVKVDIEKEVTCPICLELLTEPLSLDCGHSFCQACITAKIKESVIISRGESSCPVCQTRFQPGNLRPNRHLANIVERVKEVKMSPQEGQKRDVCEHHGKKLQIFCKEDGKVICWVCELSQEHQGHQTFRINEVVKECQEKLQVALQRLIKEDQEAEKLEDDIRQERTAWKIERQKILKGFNEMRVILDNEEQRELQKLEEGEVNVLDNLAAATDQLVQQRQDASTLISDLQRRLTGSSVEMLQDVIDVMKRSESWTLKKPKSVSKKLKSVFRVPDLSGMLQVLKELTDVQYYWVDVMLNPGSATSNVAISVDQRQVKTVRTCTFKNSNPCDFSAFGVFGCQYFSSGKYYWEVDVSGKIAWILGVHSKISSLNKRKSSGFAFDPSVNYSKVYSRYRPQYGYWVIGLQNTCEYNAFEDSSSSDPKVLTLFMAVLPVVLGFS

SEQ ID NO: 2766 - DNA, 5338 bp, Homo sapien
ggccgcgagtgcatcttccacgaacctaattcatctctccagcaaaggacacatctctccagcaaaggacacctctctccagcaaaggacacctgcagagatgtccccagtccttcacttctatgttcgtccctctggccatgagggggcagcctctggacacactcggaggaaactgcaagggaaactgccagagctgcagggcgtcgagactgaactgtgctacaacgtgaactggacagctgaggccctccccagtgctgaggagacaaagaagctgatgtggctgtttggttgccccttactgctggatgatgttgctcgggagtcctggctccttcctggctccaatgacctgctgctggaggtcgggcccaggctgaacttctccaccccaacatccaccaacatcgtgtcagtgtgccgcgccactgggctggggcctgtggatcgtgtggagaccacccggcgctaccggctctcgtttgcccaccccccgtcagctgaggtggaagccattgctctggctaccctgcacgaccggatgacagagcagcacttcccccatcccatccagagtttctcccctgagagcatgccggaacccctcaatggccctatcaatatactgggtgagggccggcttgcgctggagaaggccaaccaggagcttggtctggctttagactcttgggacctagacttctacaccaagcgcttccaggagctacagcggaacccgagcactgtggaggcctttgacttggcgcagtccaatagcgagcacagccgacactggttcttcaagggccagctccacgtggatgggcagaagctggtgcactcactgtttgagtccatcatgagcacccaggaatcctcgaaccccaacaacgtcctcaaattctgtgataacagcagtgcaatccagggaaaggaagtccgattcctacggcctgaggaccccacacggccaagccgcttccagcaacagcaagggctgagacatgttgtcttcacagcagagactcacaactttcccacaggagtatgcccctttagtggtgcaaccactggcacagggggccggattcgagatgtccagtgcacaggccgcggggcccacgtggtggctggcactgccggctattgctttggaaatctgcatattccaggttacaatctgccctgggaggatctaagcttccagtatcctgggaattttgcccggcccctggaggttgccattgaagccagtaatggagcttctgactatggcaacaagtttggggaaccagtgctggctggcttcgcccgctccttgggcctccagctcccagacggccagcggcgtgagtggatcaagcccatcatgtttagtgggggcattgggtccatggaagctgaccacataagcaaggaggccccagagccaggcatggaagttgtaaaggttggaggtcccgtctacaggattggagttggaggtggagctgcttcatctgtgcaggtgcagggagataacaccagtgacctggactttggggctgtgcagcgaggagacccggagatggaacagaagatgaaccgtgtgatcagggcttgtgtggaggcccccaagggaaaccccatctgcagccttcatgatcagggcgctggtggcaatggcaatgtcctaaaagagctgagtgacccagctggagccatcatttacaccagccgcttccagcttggggacccaaccctgaatgccctggaaatctggggggctgagtaccaggaatcaaatgctcttctgctgaggtcccccaaccgggacttcctgactcatgtcagtgcccgtgaacgttgcccggcttgcttcgtgggcaccatcactggagaccggagaatagtgctggtggacgatcgggagtgtcctgtcagaagaaatggccagggggatgcccccccgacacccccgccaacccctgtggacctggagctcgaatgggtgctgggcaagatgcctcggaaggagttcttcctgcagaggaagccccccatgctgcagcctctggccttgcccccagggctgagcgtgcaccaggctctggagagggttctgaggctgcccgccgtggccagcaagcgctacctcaccaataaggtggaccgctccgtgggaggcctggtggcccagcagcagtgcgtggggcccctgcaaactcctctggcagatgtagcggttgtggcactgagccatgaggagctcataggggctgccacagccttgggagaacagccagtcaagagcctgctggacccaaaagtcgccgcccggctggccgtggccgaagccctcaccaacctggtgtttgctctggtcactgacctccgggatgtgaagtgtagcgggaactggatgtgggcagccaagctcccaggggagggcgcagctttggcggatgcctgtgaggctatggtggcagtgatggcagccctgggtgtggcagtggatggtggcaaggactccctcagcatggctgctcgggttggcactgagaccgtgcgggctcctgggtcactggtcatctcagcctatgccgtctgcccagacatcacagccactgtgaccccagacctcaagcatcctgaagggagaggccatctgctctatgtggctctgagccctgggcagcaccggctcgggggcacagctctggcccagtgcttctcccagcttggggaacaccctccagacctggaccttcctgagaacttggtgcgggccttcagcatcactcaggggctgctgaaagaccgcctcctctgctcaggccacgatgtcagtgacggaggcctcgtcacatgcctgctggagatggcctttgctggaaattgcgggctacaggtggatgtgcctgtccccagggttgatgtcctgtctgtgctgttcgctgaggagccaggcctcgtgctggaggtgcaggagccagacctggcccaggtgctgaagcgttaccgggatgctggcctccattgcctggagctgggccacacaggcgaggccgggccccacgccatggtccgggtgtcagtgaacggggctgtggttctggaggagcctgttggggagctgcgagccctctgggaggagacgagtttccagctggaccggctacaggcagagcctcgctgtgtggcagaggaggaacggggcctgagggagcggatggggcccagctattgcctgccccccacctttcccaaagcctccgtgccccgtgagcctggtggtcccagcccccgagtcgccatcttgcgagaggagggcagtaatggagaccgggagatggccgatgccttccacttagctgggtttgaggtatgggacgtgaccatgcaggacctctgctctggggcaattgggctggacactttccgtggcgtggccttcgtgggcggcttcagctatgcagatgtcctgggctctgccaaagggtgggcagctgctgtgacctttcatcccagggctggggctgagctgaggcgcttccggaagcggccagacaccttcagcctgggcgtgtgtaatggctgtcaactgctggctctgctcggctgggtgggaggcgaccccaatgaggatgctgcagagatgggccctgactcccagccagcccggccaggccttctgctacgccacaacctgtctgggcgctacgagtctcgctgggccagcgtgcgtgtggggcctgggccagccctgatgctgcgagggatggagggcgccgtgctgcccgtgtggagtgcgcacggggaaggttacgtagcattttcttctccggaactccaagctcagattgaggccaggggcttggctccactgcactgggctgatgatgacgggaaccccacagagcagtaccctctgaatcccaatgggtccccagggggcgtggctggcatctgctcctgtgatggccgccacctggctgtcatgcctcaccctgagcgggccgttaggccttggcagtgggcatggcgaccccctccatttgatactctgaccacctccccctggctccagctctctatcaatgcccgaaactggaccctggaagggagctgctgactggccacaggggctcacctgggccccatggcttttcacctaagtgggtcctgccccctcccccatgaccttcaggagcaccccatattatttccaaaaatatcttggacagacaaggaccaaaatgccaaaatctcagcggactcgatgatctgcctgctgatgttccttctgtggctgtgtctattttcagttctgctctaacatggcatgccctttctcagcccaggaaacagcatgtggttcagagaaaagagcgacaaggaaaagttaggactcctgaggtccgaacaggggcttctgttgcccacttcacaacacccagtgatcaccggtgtgcaattgcctccttggctctgagggatgttttgcgctcccttttctcatcattggggttagcgggtgcagacaaattcagcaatagtatgcagatcagcccctcaccacctcattgttctcatctggaactgaaactttctggatttctcttgaagtgctacactgcactgaatgtaaggaattgttgcttgtggaagtttctcagcgtttctggctgtcttagggctggcctcagaacccagcattcctgttatttgcttctaaattagcagctctctttttttttttttttttgaggcagtctcactctgtcacccaggctggagtgcagtggcgtgatctcggcccactgcaacctctgcctcctgggttcaagcaattttcctgcctcagcctcccgagtagctgggagtacaggcacacaccaccacacccagctaatttttgtatttttagtagagatagggtttcaccgtgtctcccaggctggtctcaaactcctaacctcaagtgattcgcctgcctcggcctcccaaagtgctgggattacaggtgggagccactacagctggcccagcagctctgtttctgatagaggtggttggggctctcatccctagatcctaaccctttagtatgctggaattctactcttcacttactgcattgactgttgttgattagttattattgcaaagcactgccaccggcctcagggagtttatgtgtaatagaattaaaaataatagctgtgtataacacttagctcaagccacgcatgtgtgaggcatttggtatgtatctgaattaattctcactaaaattcagcaaaggacttgatagcctctccccgccttttcaataaaggatgaatgaaggttg

SEQ ID NO: 2767 - protein, 1371 aa, Homo sapien
AASASSTNLIHLSSKGHISPAKDTSLQQRTPAEMSPVLHFYVRPSGHEGAASGHTRRKLQGKLPELQGVETELCYNVNWTAEALPSAEETKKLMWLFGCPLLLDDVARESWLLPGSNDLLLEVGPRLNFSTPTSTNIVSVCRATGLGPVDRVETTRRYRLSFAHPPSAEVEAIALATLHDRMTEQHFPHPIQSFSPESMPEPLNGPINILGEGRLALEKANQELGLALDSWDLDFYTKRFQELQRNPSTVEAFDLAQSNSEHSRHWFFKGQLHVDGQKLVHSLFESIMSTQESSNPNNVLKFCDNSSAIQGKEVRFLRPEDPTRPSRFQQQQGLRHVVFTAETHNFPTGVCPFSGATTGTGGRIRDVQCTGRGAHVVAGTAGYCFGNLHIPGYNLPWEDLSFQYPGNFARPLEVAIEASNGASDYGNKFGEPVLAGFARSLGLQLPDGQRREWIKPIMFSGGIGSMEADHISKEAPEPGMEVVKVGGPVYRIGVGGGAASSVQVQGDNTSDLDFGAVQRGDPEMEQKMNRVIRACVEAPKGNPICSLHDQGAGGNGNVLKELSDPAGAIIYTSRFQLGDPTLNALEIWGAEYQESNALLLRSPNRDFLTHVSARERCPACFVGTITGDRRIVLVDDRECPVRRNGQGDAPPTPPPTPVDLELEWVLGKMPRKEFFLQRKPPMLQPLALPPGLSVHQALERVLRLPAVASKRYLTNKVDRSVGGLVAQQQCVGPLQTPLADVAVVALSHEELIGAATALGEQPVKSLLDPKVAARLAVAEALTNLVFALVTDLRDVKCSGNWMWAAKLPGEGAALADACEAMVAVMAALGVAVDGGKDSLSMAARVGTETVRAPGSLVISAYAVCPDITATVTPDLKHPEGRGHLLYVALSPGQHRLGGTALAQCFSQLGEHPPDLDLPENLVRAFSITQGLLKDRLLCSGHDVSDGGLVTCLLEMAFAGNCGLQVDVPVPRVDVLSVLFAEEPGLVLEVQEPDLAQVLKRYRDAGLHCLELGHTGEAGPHAMVRVSVNGAVVLEEPVGELRALWEETSFQLDRLQAEPRCVAEEERGLRERMGPSYCLPPTFPKASVPREPGGPSPRVAILREEGSNGDREMADAFHLAGFEVWDVTMQDLCSGAIGLDTFRGVAFVGGFSYADVLGSAKGWAAAVTFHPRAGAELRRFRKRPDTFSLGVCNGCQLLALLGWVGGDPNEDAAEMGPDSQPARPGLLLRHNLSGRYESRWASVRVGPGPALMLRGMEGAVLPVWSAHGEGYVAFSSPELQAQIEARGLAPLHWADDDGNPTEQYPLNPNGSPGGVAGICSCDGRHLAVMPHPERAVRPWQWAWRPPPFDTLTTSPWLQLSINARNWTLEGSC

SEQ ID NO: 2768 - DNA, 4064 bp, Homo sapien; identical to SEQ ID NO: 473

SEQ ID NO: 2769 - protein, 514 aa, Homo sapien [sequence omitted]

SEQ ID NO: 2770 - DNA, 3961 bp, Homo sapien
agcgggaaacgtacctaagtattattggacagccggagtattttacagtggttgctgctcaggaaatttgagtgaaggactgcaaaagaggagcaaagcagacccgagagagaaggcagcagtgctcccctgtgacgtgctccatcaccgggcagggaagacaccgctgccacctctccacagccttgttcaagagcactggaaattgatggtacaaaacagaagagggaacggaaaaagacagtctcattcagcagcatgccaacagagaagaagatcagcagtgcaagtgattgtattaattcaatggttgagggttcagaactcaaaaaggttcgctccaactctagaatttatcataggtactttttactggatgctgacatgcagagcctaaggtgggagccatctaagaaggattctgagaaagccaagattgacattaaatccatcaaggaagtgagaacaggaaaaaacacagacatattccgcagcaatggcatttctgaccggatatctgaagattgtgcgttttccgtcatatatggagagaattatgagtcactggatttggttgccaactccgcagatgttgcaaacatctgggttacaggactgcggtacctaatttcttatggaaaacatacacttgatatgttagaaagtagccaagataacatgaggacttcttgggtttcacaaatgtttagtgaaattgatgtagataaccttggacatataactctgtgtaatgctgtgcaatgtatcagaaacctcaatcctggtttaaaaacgagcaaaattgagcttaagttcaaagaattgcataaatcaaaggacaaagctggtaccgaggtcacaaaggaagaatttattgaggtttttcatgagctttgtactagacctgaaatttatttccttttagttcagttttcaagcaataaagaattccttgataccaaggaccttatgatgtttcttgaggcagaacagggtgtggcacatataaatgaggaaataagccttgaaattattcacaaatatgaaccatccaaagagggtcaggaaaagggctggctctccatagacgggttcactaattaccttatgtcacctgactgttatatattcgatccagaacataagaaggtctgtcaggatatgaagcaacctctgtctcattactttataaactcatctcataatacatacttaatagaggatcagttccgaggtccctccgacatcacaggatatattcgagctcttaaaatgggttgccggagtgttgaattagatgtatgggatgggccggacaatgaacctgtaatttacacaggccacaccatgacctctcagatagttttccgcagtgtcattgatattattaacaagtatgcattctttgcttcagagtatcctcttatcttgtgtttagaaaaccactgttccattaaacaacagaaggtaatggttcagcacatgaagaaacttttaggagacaagctctatacaacatcacccaatgttgaggaatcttatctaccatccccagatgtcctgaaagggaaaatactaattaaagcaaagaagctgtcctcaaattgctctggggtagaaggagatgttactgacgaagatgaaggagcagaaatgtctcagaggatgggaaaagagaacatggagcaacccaataatgtgcctgtgaagcgatttcagctttgtaaagaactgtctgaactggtcagcatctgcaaatcagttcagttcaaagaatttcagatgtcgtttcaggttcagaagtactgggaagtctgttcctttaatgaagtgcttgccagcaagtacgccaatgaaaatccaggggactttgtaaattacaacaaacgttttcttgctagggtttttcccagtccaatgagaattgattccagtaacatgaatcctcaagatttttggaaatgtggttgccaaattgtagccatgaactttcagacaccaggactgatgatggacctgaatattggctggtttaggcagaacggaaactgtggctatgtcctccggccagccatcatgagggaggaggtctccttcttcagcgtcaatacaaaagactctgtcccaggggtctcacctcaacttcttcacattaaaatcatcagtgggcagaactttcccaagcccaaaggatcaggtgccaaaggtgatgtggtagatccttatgtctatgttgaaatccatggaatccctgctgattgtgcagaacaaaggacaaaaacagtgcaccagaatggagacgctcacatttttgatgaaagctttgaatttcaaatcaacctgcctgaactggccatggtgcgctttgtagtgctggatgatgactacattggggatgaattcatcggccagtacacaattccctttgaatgtttacagacgggctaccgccatgtccccctgcagtccttaactggagaggtccttgcacatgcttctttatttgtccacgtggctattactaaccgaagaggaggaggaaagcctcgtaaaaggggcctttctgtgagaaaagggaagaaatccagggaatatgcatctttgagaacactgtggattaaaaccgtggatgaggtattcaagaatgcccagccccctatacgggatgccacagatctgagagaaaacatgcagaatgcggtggtgtcattcaaggagctgtgtggcctctcctctgtggccaatctcatgcagtgcatgttggcggtgtctccccgctttctggggcccgataacacacccctagtggtcctaaatctcagcgagcagtaccccacaatggagctgcagggaattgtgccggaggttctgaagaagatcgtaacaacttatgacatgatgattcagtccctcaaggcgttgattgaaaatgcagatgctgtatatgaaaagatcgtacattgtcagaaggcagccatggaattccatgaacacttgcacagcataggcaccaaggaaggtttgaaggaaagaaaactacaaaaagcagtggagagctttacctggaatattaccatcttaaagggacaagcagatcttttgaaatatgctaagaatgagacattggagaacctgaaacaaatccattttgctgctgtttcatgtggactgaataaaccaggcaccgaaaatgctgatgtccagaagccacgccggagcttggaagtcatacccgaaaaagcaaacgatgaaactggagaatgaggaaacttacaataaaccattatggagtttataactctaggaccaattgtagtcagatgggacatttgctttgcactcactaatgagaataatattcgggattttaaagcacaactggaatagctaattacagtctattaaaactgtgaatgtatgtagcaatcgtgcgtgtgaaggcaaataaactctttaacaggcaattatattgctggccaaaatatgctatatttgtatacaaagacattctaactcagttccagtatgaagaaagattattcactctagctccactgagaaacattttcctaagtgaaaacaatttcttaagatggaaatggattggattgtcaaattattatttattggagaaaaaaacctgatctacacatttttacttatatggggttgccagagtctctgggttctagatgattttggtggcatgcttgctgagccataattactaaagagaatgtaagtggacgggttccctgaatccccggggtccttggagagccatcgaggagaatgtgcaattggactgaagctccctggctgaagatacatgccgagtcagcacatgggtagagatgatgtaaaagcagccaatctggaaacaatacattgtaaatagtttttcattgtatgaagtagtgttcacattaaaaagatgttttatgacaaaaaaaaaaaaaaa

SEQ ID NO: 2771 - protein, 1001 aa, Homo sapien
MPTEKKISSASDCINSMVEGSELKKVRSNSRIYHRYFLLDADMQSLRWEPSKKDSEKAKIDIKSIKEVRTGKNTDIFRSNGISDRISEDCAFSVIYGENYESLDLVANSADVANIWVTGLRYLISYGKHTLDMLESSQDNMRTSWVSQMFSEIDVDNLGHITLCNAVQCIRNLNPGLKTSKIELKFKELHKSKDKAGTEVTKEEFIEVFHELCTRPEIYFLLVQFSSNKEFLDTKDLMMFLEAEQGVAHINEEISLEIIHKYEPSKEGQEKGWLSIDGFTNYLMSPDCYIFDPEHKKVCQDMKQPLSHYFINSSHNTYLIEDQFRGPSDITGYIRALKMGCRSVELDVWDGPDNEPVIYTGHTMTSQIVFRSVIDIINKYAFFASEYPLILCLENHCSIKQQKVMVQHMKKLLGDKLYTTSPNVEESYLPSPDVLKGKILIKAKKLSSNCSGVEGDVTDEDEGAEMSQRMGKENMEQPNNVPVKRFQLCKELSELVSICKSVQFKEFQMSFQVQKYWEVCSFNEVLASKYANENPGDFVNYNKRFLARVFPSPMRIDSSNMNPQDFWKCGCQIVAMNFQTPGLMMDLNIGWFRQNGNCGYVLRPAIMREEVSFFSVNTKDSVPGVSPQLLHIKIISGQNFPKPKGSGAKGDVVDPYVYVEIHGIPADCAEQRTKTVHQNGDAHIFDESFEFQINLPELAMVRFVVLDDDYIGDEFIGQYTIPFECLQTGYRHVPLQSLTGEVLAHASLFVHVAITNRRGGGKPRKRGLSVRKGKKSREYASLRTLWIKTVDEVFKNAQPPIRDATDLRENMQNAVVSFKELCGLSSVANLMQCMLAVSPRFLGPDNTPLVVLNLSEQYPTMELQGIVPEVLKKIVTTYDMMIQSLKALIENADAVYEKIVHCQKAAMEFHEHLHSIGTKEGLKERKLQKAVESFTWNITILKGQADLLKYAKNETLENLKQIHFAAVSCGLNKPGTENADVQKPRRSLEVIPEKANDETGE

SEQ ID NO: 2772 - DNA, 1404 bp, Homo sapien
ggaagagttatagaccgctaacacctgtcactggccactggtttcccggagttagcggcaacgaccttgcagcctggacactagccaggcgctccctcttctcacagcggcccacgtctccttgcttgggagcccatcgtcctggctccggtggcctcgctgggtctcggggaagcagaggactgttcattcctgtggcgaaaagccggagtcggccctagacacccacgactcgcagggtccatggttccggaggccgtgagacctgccggggctgacaggtgccaggacccatgctgcgggagcctgtgtgctcagccttctagggccaggtaaagaagctaagtggaagagtgtttcctcctctggccgtaaagcagctgtccccgccctactccggaccgccccaaagactccatgggatggacctgagtcagccgaatcccagccccttcccttgggcctgctgtggtgctggacatcagtgacagacggaagcaggagaccatcaaggctacgggaggcccggggcgcttgcgaagatgaagtttggctgcctctccttccggcagccttatgctggctttgtcttaaatggaatcaagactgtggagacgcgctggcgtcccctgctgagcagccagcggaactgtaccatcgccgtccacattgctcacagggactgggaaggcgatgcctggcgggagctgctggtggagagactcgggatgactcctgctcagattcaggccttgctcaggaaaggggaaaagtttggtcgaggagtgatagcgggactcgttgacattggggaaactttgcaatgccccgaagacttaactcccgatgaggttgtggaactagaaaatcaagctgtactgaccaacctgaagcagaagtacctgactgtgatttcaaaccccaggtggttactggagcccatacctaggaaaggaggcaaggatgtattccaggtagacatcccagagcacctgatccctttggggcatgaagtgtgacaagtgtgggctcctgaaaggaatgttccagagaaaccagctaaatcatgacaccttcaatttgccatcatgacgcagacctgtatacattaggttaaatctgaatttccactgctttggagagtcccacccactaagcactgtgcatgtaaacaggttcctttgctcagatgaaggaagtagggggtggggctttccttgtgtgatgcctccttaggcacacaggcaatgtctcaagtactttgaccttagggtagaaggcaaagctgccagtaaatgtctcagcattgctgctaattttggtcctgctagtttctggattgtacaaataaatgtgttgtagatgaaaaaaaaaaaaaaaaaaaaaaaaaaaaaaaaaaaaaaa

SEQ ID NO: 2773 - protein, 158 aa, Homo sapien
MKFGCLSFRQPYAGFVLNGIKTVETRWRPLLSSQRNCTIAVHIAHRDWEGDAWRELLVERLGMTPAQIQALLRKGEKFGRGVIAGLVDIGETLQCPEDLTPDEVVELENQAVLTNLKQKYLTVISNPRWLLEPIPRKGGKDVFQVDIPEHLIPLGHEV

SEQ ID NO: 2774 - DNA, 1528 bp, Homo sapien
aggcttttaaacgagaggtagagtgacctagcactaagcaaatgagctgaaatgtcggaaacagagtccatcagcttatttggccacacgatcccaaactagttttatcttgggaaatggccctgtcctcagcattcccttcttgtgctggtggggccagtgaagtcttgatcttatcagaaaaaggccacaccaagtgcgagttttcccaggctgactttccaggcccttatcaaatgaaacaacagaagctcttcacagttctgtgccccatggccactccacagacagacaataccaagcatcttagaactgtcataagataggtcatgcctgaaatagatcttgaccatatgagagtcccagaaatcagcaaggcctggacaaatagaactaagagagaggcagaggcaggaagctgcgggtctatcttgtaaagagtttagcatcactgtgagagtgtgtgtctaaaattaaattaaactagaagcagcaggtgagtatttggtaagtacttctgtgactcgcctcaattcccactggccaggggccatctcaactgcacggtgaatcaagatgctggtgtcatcctccttggaaaaaggaaatgttaactcatggttaaaactaagtacaatgattcccaagggatcactttcttatttttttaaatgacattaaggagaatcttaagaaagcatcagagaaagacatgtgcatgtgaagcaccctgattctgatgttaggaaaacttaagcgaacaggacctgctgcacacagccccattgtcttctatccatttctctttatcattcaaatcaagcaacatgtgccctcctcatcaacacacattcttcccctttgtcagtatgcatctcccagcttagtgtcaggatactttcgattcataattatgtatgatccaaagtgtgcataatttcatttaacgttaaagaaatagatccaattcctttcttgcaaccaaaaataaataaaatacgttgcctcaatataaggtttgggctattctgtgtttctatagaagcaatctgtttttggtaaaatgtacttttaaggatccagtcatctgaagtattttatgtagagttagagatttcacaatattgactatacatatatttaaaatataaattatccagctgatgtttgaatttgtcttactttcctggccacctcgttgtcctattttataagctggggagttaactagcttaacaaaagatgcttagcttttgtaaaagaacaagtgtttcattttacaaagacactccaaatgatagttacttgattttctcgagacctttaactatggtgatgaataacaggacttgctttcaagccttaataaatgtaaaatgccttttaatgaagatacagctgagtgttttcctcatgaatctgaaccaattaccaatttgtgttccagtcttgattggtattgactgattcaaataaagttggtttattttcaaatattaaaaaaaaaaaaaaaaaaaaaaaaaaaaaa

SEQ ID NO: 2775 - protein, 69 aa, Homo sapien
MALSSAFPSCAGGASEVLILSEKGHTKCEFSQADFPGPYQMKQQKLFTVLCPMATPQTDNTKHLRTVIR

SEQ ID NO: 2776 - DNA, 2529 bp, Homo sapien
gaagcgattgcgagccagcgcgcgcgcttcggcgttcccggcggtctgcgaagtttccggagccccggtcccgccgcgggttcgcgcttgtgctcgcgctcgttcctggagtcggcggccgctgcgcgcgctcgttgcccaacccggtccccgcccccagacacgccgggctctcggggcaccacagccatgtgctcgttagcgtcaggcgctaccggttattcacatctgctgaagaaacattttcacactgtaagtctgagcatcagtttaatattgacagcatggttcataaacatggacttgaattttatggatacattaagctaataaattttattagacttaagaatcctacagttgagtacatgaattccatatacaacccagtgccttgggagaaagaagagtatttgaagccagtattagaagatgaccttttacttcaatttgatgtagaagatctttatgaaccggtgtcagtacccttctcataccccaatggactcagtgaaaatacatctgttgttgaaaaattgaaacatatggaagccagggcactgtctgctgaagccgcattggccagagcacgtgaggatctgcaaaaaatgaaacaatttgctcaggattttgtgatgcacacagatgtcagaacctgctcgtcatctactagtgtcattgcggacctccaggaggatgaggatggtgtttatttcagctcatacgggcattatgggatacatgaagaaatgctaaaggacaaaatacgaacagaaagctaccgagatttcatataccaaaatccacatatcttcaaagacaaggtagttttggatgttgggtgtggaactggaattctctctatgtttgctgctaaagctggggcgaagaaggttcttggagttgatcaatctgaaatactttaccaggcaatggatattataagactaaataaacttgaagatactattacactaattaaaggaaagattgaagaagttcatcttcctgtagaaaaagtagatgttatcatatctgagtggatgggctattttcttctgtttgagtctatgttagattctgtcctttatgcaaagaacaaatacttggcaaaaggaggctcggtctaccctgacatttgcactatcagccttgtagcagtgagtgatgtgaataaacatgctgatagaattgctttttgggatgatgtctatggcttcaagatgtcctgcatgaagaaagcagttattccagaagctgttgtggaagttttagatccgaagactcttatttcagaaccttgtggtattaagcatatagattgccatacgacgtctatctcagatttggaattttcatcagattttaccctgaaaatcacaaggacatccatgtgcacggcaattgctggctactttgatatatattttgagaagaattgccacaacagggtcgtgttctctacgggccctcagagcaccaaaacacactggaaacaaacagtatttctactggaaaaaccattttcagttaaagcaggtgaagccttgaaaggaaaggtcacagttcacaagaataagaaagatccacgttctctcaccgtgaccctcacgttgaataattcaactcaaacttatggtctccagtgaaacagccataaaagcacactaccttgtagtttttaatgtgggggtagagtgggtcagcaggagggagctggttttatgtgagcagatggatggatgatggaccctttcctaatgagcctcctcaataagagagaagttctcattgtgggaatctgacatagttcagctgaggaagagaatcagctgatcctcatggtctgccacgtaatcattttcttagacgtttgctccaccagatttaaccaaatgtaactcccacattgagtttatctatattgaaaatcatttacattggcctatatttggaagagagatagtcttttgtttttaataagtttcttactataaattttaaacaaattggttagttatttggatattttattaaactagtaacacaggtactacacattttattatggactcctctgaggaggagtttttaattgtatttgctagaaaatcaggatgtaataaagatttgtataaaaaaactaaaatatggaaaagagcttcagccttcatatacaaatcatatatgcagacagcctagttgattatctagcatacttagggttctcattttgtagtttcttccctctttgtgactattccttagccttatagatttctagtactgcccaggaaatctaatttcaatacatttatcctaggtttcatgaaagtttttaaagattgggataaatatgtacttatttactaacgtattatctttttcaaaccagatttatgtgcaaaggttaaacatgtaactgttactaagcagtctataaagttgtcatttacaattactgattcaatttgaaatgtagaataaaattttaataaaatgtatccttataaaaaaaaaaaaaaaaaa

SEQ ID NO: 2777 - protein, 548 aa, Homo sapien
SDCEPARALRRSRRSAKFPEPRSRRGFALVLALVPGVGGRCARSLPNPVPAPRHAGLSGHHSHVLVSVRRYRLFTSAEETFSHCKSEHQFNIDSMVHKHGLEFYGYIKLINFIRLKNPTVEYMNSIYNPVPWEKEEYLKPVLEDDLLLQFDVEDLYEPVSVPFSYPNGLSENTSVVEKLKHMEARALSAEAALARAREDLQKMKQFAQDFVMHTDVRTCSSSTSVIADLQEDEDGVYFSSYGHYGIHEEMLKDKIRTESYRDFIYQNPHIFKDKVVLDVGCGTGILSMFAAKAGAKKVLGVDQSEILYQAMDIIRLNKLEDTITLIKGKIEEVHLPVEKVDVIISEWMGYFLLFESMLDSVLYAKNKYLAKGGSVYPDICTISLVAVSDVNKHADRIAFWDDVYGFKMSCMKKAVIPEAVVEVLDPKTLISEPCGIKHIDCHTTSISDLEFSSDFTLKITRTSMCTAIAGYFDIYFEKNCHNRVVFSTGPQSTKTHWKQTVFLLEKPFSVKAGEALKGKVTVHKNKKDPRSLTVTLTLNNSTQTYGLQ

SEQ ID NO: 2778 - DNA, 4348 bp, Homo sapien
gggctcggggtccgcccgcgggctgccggtgcgagcgggcggcccggctcccctcctcccccgcccgccgccgccgctgtgattgggtggaagatggcgctggccggatggaaatcctaatgacagtctccaaattcgcctccatctgtaccatgggcgccaatgcttcggcattagagaaagagattggtccagaacagtttccggtcaatgagcactattttggattagtcaattttgggaatacctgctactgcaattcagttcttcaagcactttatttttgtcgtccatttcgggaaaaagttcttgcgtataagagtcaacctaggaaaaaggagagccttcttacatgcttagcagatctcttccatagcatagccactcagaagaaaaaggttggagtaataccccctaagaagttcatcacaagattacggaaagaaaatgagctttttgacaactacatgcaacaagatgcccatgaattcttaaattacctactaaatacaattgctgatattttacaagaagagagaaagcaggaaaaacaaaatggtcgtttacctaatggtaatattgataatgaaaataataacagcacaccagacccaacgtgggttcatgagatttttcagggaacattaactaatgaaaccagatgtcttacttgtgaaactataagcagcaaagatgaagattttttagacctttctgttgacgtggaacaaaatacatcaattactcactgcttaaggggtttcagcaacacagaaactctgtgcagtgaatacaagtattactgtgaagagtgtcgcagcaaacaggaagcacacaaacggatgaaagttaaaaaactgcccatgattctagctctacacctgaagagatttaaatatatggatcaacttcatcgatatacaaaactctcttaccgggtagtttttcctttagaacttcgtctgtttaacacttcaggtgatgccaccaatccagacagaatgtacgaccttgttgctgttgtggttcactgtggaagtggtcccaatcgaggccattatattgcaatagttaagagtcatgatttttggttgttgtttgatgacgacattgtagaaaaaatagatgcacaagctattgaagaattctacgggttgacatcagatatctcaaagaactctgagtctggttacatccttttctatcagtctcgggactgagagggaaccgtgatgaagagacactttctgcctcatttcttctctggttattttggaaaggatcaagcactgatttttcaagaaaagagaaatgcaggaagctcagggggcagtagcacactttgcacacgataaagcaaagacgatggattgacaagcccttccgatcatggtagttgatttatttgctcaggtatcatgctgtctgtacagttccatacaacaaggaggtgaaatcagagataccagctcctcttttaaaacagccttccagtcattggcacgcattttctctttattaattgcaccaataatgctttgaattccttgggggtgcagtagaaagaatcggaatctgtgccgtattgataaggagatgatgttgaacacactgcataaatttgcctggttcagtatgtatagaaggcatattcagtggtcttttcaagagtaaaccagaaatacttttgggcccaacacttgcagttgccttcctgatgtaaaaactaacatgctagataatccagtgtcgggaagacaaagatgttttgcttctctgaagaagcttataataatatacagtatatgtatatgtagggagcaattggtcaaaagtggctttttgtttccccaagggaaagactggctttgtaattataattttttccttatttattttacttaaaactggtagagtctaagtattatatgaagtgcccatgattctgtcagtaaatttgaacatatttttattagttaatgtcagtttaagttgtccttttgtttgtttctatttttaaggtgaattttaatttctatctgaaatcagttaagataccttgagaaaaactgcagtgagaggagataaatatcctttttcaggaggaactgatatctctggctaaatatttgtccttttattatggtttctaaatcagttattttcttcagctttaatttcataaaattaaaaaactattttaaaaattcctgtagttgttggaataattaaaaattctggtgcagtggtggtataccaatctttagaattcttaagtattctaatgtttcaagttgagatcatgcttgggaaaatcatgtcatagcatttatgttattttcagatgccattttttaccctggaaagaagtcataatgttcatcataaccctagcagcctggatagtgagctaaacaaacccttcaaagattaaattttaatcaagtagaccgggaatacaaaagacaagtccttccttcccttccccccacctttacaaatcttactggaagggtgttcagaaattaaaatctgtgtttgctaagacttcattctgttgggggttttaagaagtaatatatgtaacataaaatatatgtaaacgattgcagtttttttggacgtttttccatgcatcagtaagttgtctgacagtagccaaatgtaacttgcagaaaattattgaaaattatattcagaataatagcaatcaggccttggatgttctttattaaactcttttcaggcagtaaatttaaaaaaaattgtcattttctaaagtccttttgctaaaactgttgactatggaaaacaacaaaaaggaattttttagtctgctgctattattaacatttattatctgtatcttttggctcaggaaatgacttcacctattttttccataagcagacctttaacagagtcacttaattgggctgcttaaacggatgttctgggagaaaattataatatttagtatttgtacaaaatatcaaaaagtattttgacaagtttctttttaagatagttcctaaagccttaccctggctagaggtgttttgtacaaattatatataagccagcctgatctaccaacatgccacagagaatcacaatcaacagtgtggggaaagtcagggcagtggaagtggatgcactctttttattttgaaggcttaaaccaaattgtcttggaattaaagctgtatttctgcagctttcggtacagagaaaaagaggaaagtgaagctgtgtcagttttaacattagctatatcaacatgtttaagaaagatagatgaagtcatttgcataaaggtacagcattgaaatactatgttgtgtttgtttttacatttttgcattaaaaaaaaacatgccgtaaaagccaagttaaatttcatattaaagcaagttctagtgtatgtgttgagttcctggtaatcacatacttgttcacatctacaccgtacttcatagtatgatttgtcaggggagggattgtggggtgacagttttacatttactttttcttcttaatgcagctggatctaagtaaaatgttttgaagtttatcagaaactaaatgtacttttaaaacgtatagggtcagggttgggggaaaaatacaggtatagtaagtaagaaaagtgacccatgaagaaagcatcgtgaggttgtatgttggttgactgtgattaaaatgcggggctggtgtaagttgtaagtggtggctgattgccgtgtaactatgtacatgattgttgggatggctgtcccatattttgtatattggaataaaaatttctataaattattgtaactaaaagtaaatattctaaattaagtcccacttcttaagtcacatggcttctgtcttggaaattttacctttaaaagattatttaagacaggaaccaggaggcttgggaacagggaaagagggaaatgttgtattatgtgggtcttggggcctctaaccatcagtatagggttttttctttccttgatggcagtagaaagacctcattttcataacataactactcttgatactttctttaaaaacactttttattaaagattctatcatgaggtatttggctgggagctgggaggctaaagcgctcatgtcctggctcttcagtgaatttaactgtgtgaccttgggcaagtcacttaacctctctgtgcttcagtctccctgtcttgtaaaatgggagtaatacctacctcacagggttgttgtggggattaattagagataatgtctgtaaagcatttaaggttcttgaagaaggcactatataaatacaaaataatatctattaaagttggtttatttgtga

SEQ ID NO: 2779 - DNA, 2113 bp, Homo sapien; identical to SEQ ID NO: 2492

SEQ ID NO: 2780 - protein, 543 aa, Homo sapien; identical to SEQ ID NO: 2493

SEQ ID NO: 2781 - DNA, 3846 bp, Homo sapien
cacataaatgcatttcttaaagtatttaaaaacaacacacaaaaaataagcacattctaaatctaatagaactaaaaattatgaaaagtgtttaatacatagtctttaaaatagtaatcttcttttaaatatatctttttttattggttagcttttctataggagaaaaccaaaaggactaagtggtgccttgcaggaagtaggaatagaattctcaggacgagaacattctggttagtatacattaaaaattatgtaagccatttgacttttaaaaaatacttcatatgaatttcattttttggtaatgtcattagtaagggatatcttcagcctaaaaaaaaaaaactcctaatctaaacaattcacattgtttctaagactttcaaattaccactttcataaactattgtaagataaactgccatctagtggctttctagttgctaagaagaatgaaaagaatgagccaaatcaaatggagattaaacaagtgctcaaataatagaatggactagtgaaaaaactgaacaagactattagattattcacaaatcctggttcctgcagaacgctggccacattttggggaactgtctaatacattttcatatcctcctctataaatgtggacgagcttgtctttcactggtaatgctgccatagccttccacttccaagaccagtttatcatgattaaaattagtagatggtcataaaactaaaactgtgttccaatttctacacaagtggtgtttttctttttaagttatttctttagcactaaggaaatagtactagtaccactaaattcagtgtttgatatctgtatcctcagggttggacgattctcggaatactgcccttcttgcttggaaaatgatcagagatggttgtgtaatgaaaattacaaggtcgttgaacaaggttagtagtgtcttgcctttttattctgtcatctcaaacttcataaacagtcatacgttctttgaaacgtagatttaatgtgtgcagtcatttataaatcaatgacatttctcttttttgtcataaaactgtatactgaagaaattaacgaatgcacagtttctaaagctgttgcatttgtctgtggaatcataggttcccactaagaagaatttcagcattctggccagaaatttgaatacaattcaagttgaagaaatgtctgcctgtaacattagcatccagggtcccagcatatataataaggagcctaaaaatataataaatcctcatgaaaaagttcaaatgaagtcaatttgtgcaaattctcctataaaggcacaacaggatcaattacaagtaaaaaacaatataaaagcaagtcttcacaatgtcaaaagttccttacctctttttaatactaagtcctctacttctgtggggcagttgcagtctcctaccttgaattcacctatctgtatgcaaaagcaaggaaaaaatgaacatcttgcatttaataccaaatctaaggcttcaacagttggttcagaattggtacttgtttctaccaccgttccaactgttcatcatgtttctgatttggaaatgagctctactctggactgtttacctgtgttggctgattgggaggatgtggttttactgccagcatctcagcctgaggaaaacgtagactgtacagttcccattagtgactcagacttagagatttcatttaattctggagaaagattaatggttttgaaagaattggaaatgtcaagtcatgaaaactttggagacatagaggaaactcctcaaaaatctgagacttctaagtctattgtgtacaagagtcctcacactactatttataatgtaaaagaagccaaagatccaggttcagatatttctgcctttaagttacctgaacacaaatcaagtaccttcaacagagttaatgccaatatgtctcatcctttagttttggggaaacatcctcttctttcaggtggtaccaaaaggaatccatgcagtccccaagctttcccaccagcaaaaaaacaacccttcactattcatgaagaaaagcctacatcatctgattgctccccagtaagaagttcttcctggaggcgtctcccatctatattaacttctacagttaacctacaagagccatggaagagtgggaaaatgacacctccattatgcaagtgtggtcggagatctaagagacttgttgtttctaataatggaccgaaccatggaaaagtcttctattgttgccctatcgggaaataccaagaaaacagaaaatgttgtggttatttcaaatgggaacaaacacttcaaaaggaaagagccaacagcatggttccatctcattccacagggggactcacttttagttctccagaaacaagccatatttgtgacagaaatttaagtatttccaccaaaaattctttgagactcaggccttcaatgaggaattgataacctttcatgtatgaatcctaattgttccttgaatttccaaacatgagtattctgataacatcttacactattttatttttattttatatattaatgtttactgcatttaccatactttcttcaggaaccacaagtgtaatcttttgtaaacagtatttattagattacatataataagcaacaatagtatatgatccttcttttatagttagaccttgaaacaagtctaaactatttttaaattatttgcaaaaaatgtgactaataaaaatccctagtctattttcaggtagattcttgtactttgagattatcataatcttctaactgatattttatatttttctaaaaacttttataagttctttagttttatttcaggcttgaacattggttctgatttgtatatcaacatatcagaagaattagtcaactaaagtttgaaaacctatgtagcagagatctggttcagaaactgcttctatactatacatttaaaaattaatcagcaattgatggtattatttttatattaagaaatgataggaacattgacactaatgtggaggaatttgccaaatattttatttcaaaatttagcctctgatatcataaccacaagatattttaaatcaacagtttctaagcatactaccacagtttttatgacctctccatcatcttgtggtttctagagattgacagatactatgtttgttttatagatatggtaattaatgaaacaactttaaattgtcttccattctttcttcctcagttcatttctttttgtcttcccactgatagtctttggcagctcttgaataaattctacctgttggcatcaaggggaagaaaattagcctggaaatttttatctttacataaagccaattatatagcagtttgattatgaattctaggtggaagaattagaatagtctttggaatgggttttgggtaacagccaaaatagggaaaagggtattgttaggaaagttgtcttgatattaagtatttactgtgagtccagtaagccaaaggaccaaacaaaataggttcagggtttcattttaatctcaaagattctgattcttacccatatgtcatcagttcagtttgggacatgtggtgcagcatgtgtgaagaaaatattcattaaaatgtaaaaataaacacttgaaattgtccacaacactgagcaaatattcgttataattaggatgcctacctttctgggatatttgtaaggtgctgtagtttttttaacatgctcctgaatctcctttattagttgttcttgatcatgtgacttgtaatcaggatttagaacgacaaaagcctttactacctaaaataaatatttgaaacaccagg

SEQ ID NO: 2782 - protein, 447 aa, Homo sapien
VPTKKNFSILARNLNTIQVEEMSACNISIQGPSIYNKEPKNIINPHEKVQMKSICANSPIKAQQDQLQVKNNIKASLHNVKSSLPLFNTKSSTSVGQLQSPTLNSPICMQKQGKNEHLAFNTKSKASTVGSELVLVSTTVPTVHHVSDLEMSSTLDCLPVLADWEDVVLLPASQPEENVDCTVPISDSDLEISFNSGERLMVLKELEMSSHENFGDIEETPQKSETSKSIVYKSPHTTIYNVKEAKDPGSDISAFKLPEHKSSTFNRVNANMSHPLVLGKHPLLSGGTKRNPCSPQAFPPAKKQPFTIHEEKPTSSDCSPVRSSSWRRLPSILTSTVNLQEPWKSGKMTPPLCKCGRRSKRLVVSNNGPNHGKVFYCCPIGKYQENRKCCGYFKWEQTLQKERANSMVPSHSTGGLTFSSPETSHICDRNLSISTKNSLRLRPSMRN

SEQ ID NO: 2783 - DNA, 534 bp, Homo sapien
ctttccctgccgccgccgagtcgcgcggaggcggaggcttgggtgcgttcaagattcagcttcacccgtaacccaccgccatggccgaggaaggcattgctgctggaggtgtaatggacgttaatactgctttacaagaggttctgaagactgccctcatccacgatggcctagcacgtggaattcgcgaagctgccaaagccttagacaagcgccaagcccatctttgtgtgcttgcatccaactgtgatgagcctatgtatgtcaagttggtggaggccctttgtgctgaacaccaaatcaacctaattaaggttgatgacaacaagaaactaggagaatgggtaggcctttgtaaaattgacagagaggggaaaccccgtaaagtggttggttgcagttgtgtagtagttaaggactatggcaaggagtctcaggccaaggatgtcattgaagagtatttcaaatgcaagaaatgaagaaataaatctttggctcacaaaaaaaaaaaaaaaaaaaaaaaaaaaaaaaaaa

SEQ ID NO: 2784 - protein, 132 aa, Homo sapien [sequence omitted]

SEQ ID NO: 2785 - DNA, 3576 bp, Homo sapien
tttaacagtaggtattgagatttttatttaaacagtaggtattgagatttttatttttctaccttataagacatacaataagacatacaatattgttgctcagattcagggtgatggtaacatttagctcagaatattcccattctgattaatttactgaatttaggagtgcaagtaatttttagataataaactatgggtatcacatctggctttcaattagctgtaaaatacttattgtgatcaatatccagttgttacagtttggaaggcaaagtaccactaccagaaaaatgctgacacctttcagctgaaccttaaatgccaataatactgtatctttatcatagtgggtttgccagccatcttgtttggtcaggcatagtgcctgacttaagaggaaactgtgggcactttgatggtgagaaacgtcctctttccaaccttcttcttaggctttgtggcatgtgcatgacacaaactgggttgaccttaaaataatactcaatggctaatcctaatgagttataaggaaatagaaagggatggctttttatgcacaacctaaacacattttaattatattttgctcatttttggagaacccattcccttttacatctattatgaacattctaaaacttaaatttgtgaaaacaaaactctgggagatagattgtaattttattccatgaggaaggtgttaaaccagctttgcagtttgaattttattcttaaaggctctgcagttcttacctggatgtcgaaatgatttttaatttcaactgctgtagacctcatcctgtgggaactagaaataatgtccaactgccgtccagtctggcgacattccagccgttcccccaccccacgataacggcctgactcttcctcaattcatgacagcccattctacacataacctttctcctctggcaccggtcctcccagcagagagggatcctgcccttcccttcccactctccagcatacagaccagcaggaagccacaagagggaaaaacaaaagccttctgtataaggcctatgaaaggaccatgggccagcctcagaatctgctgcccctacaaaccagtattcctcaaatgatagttccacatttacttaataaggaggactaattttctaattttaaaaattgtgttcctgccagattcacataagtaattcatttccaccggcgaaggcaatgtcaacaatttaaaacgaaaaatcagtaaattacccttccaaaaatacctttctgctgttctgattcccaatctttttcttgcaatttcctgaaccagagatgttatcgggacttacatacataatcaatacataaaatcaatcctcaagtctccataatgtctctgttctatatgtttgttttgcagggttactatgaatgaaaaagacaatttcatgaatgcagaaaatctggggatcgtgtttgggcccactctgatgaggccccctgaggacagcaccctgaccaccctgcatgatatgcggtaccaaaagctgattgtgcagattttaatagaaaacgaagacgttttattctaatccatcagggaaatgagctgaatggccccagcaccatccaagttgacacagctaaaggaataaaaacatttcttaccacttgatttgttttccaagcaagtgctagaatttgctggactgcagaggatcgctgagtggggtactgtgtctcatagacatgcgccacctccacgtgagaacaagggtgaaggtgagggaagcccctcaccttgggtcttttgctgtgcctcctatgtatgtctggtttgctggaagagtgattaatacatctttaatttattaaaaaacaatgtagacctttaaacttcagtcttattggtaataaaagggaacttaattcatacaggtacttgatacagttatacattttccacttacaaaaagaagacaattctgttaaatgaaacctgtatcgtaaaatgtatttttattttacccacgagaatgttgttatttttagcaaatagaactcaatgcagtgcattggttattaccctgtgtaccttgtccctcattttgctgtgacaccctgaaaaagctgaccacaaatgcagtattatcttgacatacctctgtcctcctcagtgctttttaatgaaatttcacctgccccttgtgttcctgctttggatagtttttgctcttaagcattggcattcttctattgtatggtatgtatttatagcaattgtaggatggtctgaaatgtccacacactttctatgcatacaaattttgtgaattcccaaagtatgctttggaattggtcatagtcttttcgtatcatgagtgtgtatcccagaagatacagaatgcggtcattttacctgaaattatttgagaacactggatgtatctggtctgtgtaaaaagttagcacttttaccctcttttcttcctggccaagccctctgaattcatctgttaatatcaaattgtatttttgccacatttctgtattggtgaaaagcgaatctgcagaataactgccaacgtttttcattcttgttttacaaacctattttttaaagtgagaataaggttggtttttaccaaatatttgttcctccttgacaaaagtagctctgtgtggataatatgattttattactacagttccagtcacttggttatatttatcttagcatgagcctttcacaccaagatttctatattttgtaacataggtgaaatatttaaaacatcaaaaactgtaaatctagatttttaaaaaatccaactgcaatgtcttttcctttgattgagatgatttgtgtaaactcaccagtcttgctttggagtgagcagaagagaatgactattttacgtggagcatcattgtgtgactgttgacctggacagtcccaagggctatgcagatggactccattggcacagggaggtttgacctcttccctgctattatccctcctcccaactgtacagatttgtttgttgtagtttatgtacttcttgatactgtcaaaaaattatctggaaatggttttattttgtgaagtgaacaatactttgtaatttatgatagtgtaaatggaaggcaaagcatcacatgtattaaattcttctgtctattattctggagtatgtgcaagaaagtggtttggagggatggggtggtggatcatcaaaacattgtttccagatagacgctggcaacaaattttcagtcatcactgaaacacaatgagaaaacagcatctcatcgagtccccactccttctgcaagctcccttctagagagcctgcttcaagattaaggccctgaggctccacattcactttccataagccccactgcatggatgcatcatcatacagaggtgaaccgtttagggcaaatcaccctaggccacttggagggtagcagaacaagacttttaaagtcagaaagccctgagtttgatcccagatccgtccatttagtactacctgcatataaccatgggaagtttgcggctctgaaaaactgaagttgattatctga

SEQ ID NO: 2786 - protein, 9 aa, Homo sapien
LTVGIEIFI

SEQ ID NO: 2787 - DNA, 6249 bp, Homo sapien
ggtgcggagaaagaggtcactaaaatgttccccaggggccttcggcgagtcttttgtttggtttttgtttttaatctgtggctcttgataatttatctagtggttgcctacacctgaaaaacaagacacagtgtttaactatcaacgaaagaactggacggctccccgccgcagtcccactccccgagtttgtggctggcatttgggccacgccgggctgggcggtcacagcgaggggcgcgcagtttggggtcacacagctccgcttctaggccccaaccaccgttaaaaggggaagcccgtgccccatcaggtccgctcttgctgagcccagagccatcccgcgctctgcgggctgggaggcccgggccaggacgcgagtcctgcgcagccgaggttccccagcgccccctgcagccgcgcgtaggcagagacggagcccggccctgcgcctccgcaccacgcccgggaccccacccagcggcccgtacccggagaagcagcgcgagcacccgaagctcccggctggcggcagaaaccgggagtggggccgggcgagtgcgcggcatcccaggccggcccgaacgctccgcccgcggttgggccgacttcccctcctcttccctctctccttcctttagcccgctggcgccggacacgctgcgcctcatctcttggggcgttcttccccgttggccaaccgtcgcatcccgtgcaactttggggtagtggccgtttagtgttgaatgttccccaccgagagcgcatggcttgggaagcgaggcgcgaacccggcccccgaagggccgccgtccgggagacggtgatgctgttgctgtgcctgggggtcccgaccggccgcccctacaacgtggacactgagagcgcgctgctttaccagggcccccacaacacgctgttcggctactcggtcgtgctgcacagccacggggcgaaccgatggctcctagtgggtgcgcccactgccaactggctcgccaacgcttcagtgatcaatcccggggcgatttacagatgcaggatcggaaagaatcccggccagacgtgcgaacagctccagctgggtagccctaatggagaaccttgtggaaagacttgtttggaagagagagacaatcagtggttgggggtcacactttccagacagccaggagaaaatggatccatcgtgacttgtgggcatagatggaaaaatatattttacataaagaatgaaaataagctccccactggtggttgctatggagtgccccctgatttacgaacagaactgagtaaaagaatagctccgtgttatcaagattatgtgaaaaaatttggagaaaattttgcatcatgtcaagctggaatatccagtttttacacaaaggatttaattgtgatgggggccccaggatcatcttactggactggctctctttttgtctacaatataactacaaataaatacaaggcttttttagacaaacaaaatcaagtaaaatttggaagttatttaggatattcagtcggagctggtcattttcggagccagcatactaccgaagtagtcggaggagctcctcaacatgagcagattggtaaggcatatatattcagcattgatgaaaaagaactaaatatcttacatgaaatgaaaggtaaaaagcttggatcgtactttggagcttctgtctgtgctgtggacctcaatgcagatggcttctcagatctgctcgtgggagcacccatgcagagcaccatcagagaggaaggaagagtgtttgtgtacatcaactctggctcgggagcagtaatgaatgcaatggaaacaaacctcgttggaagtgacaaatatgctgcaagatttggggaatctatagttaatcttggcgacattgacaatgatggctttgaagatgttgctatcggagctccacaagaagatgacttgcaaggtgctatttatatttacaatggccgtgcagatgggatctcgtcaaccttctcacagagaattgaaggacttcagatcagcaaatcgttaagtatgtttggacagtctatatcaggacaaattgatgcagataataatggctatgtagatgtagcagttggtgcttttcggtctgattctgctgtcttgctaaggacaagacctgtagtaattgttgacgcttctttaagccaccctgagtcagtaaatagaacgaaatttgactgtgttgaaaatggatggccttctgtgtgcatagatctaacactttgtttctcatataagggcaaggaagttccaggttacattgttttgttttataacatgagtttggatgtgaacagaaaggcagagtctccaccaagattctatttctcttctaatggaacttctgacgtgattacaggaagcatacaggtgtccagcagagaagctaactgtagaacacatcaagcatttatgcggaaagatgtgcgggacatcctcaccccaattcagattgaagctgcttaccaccttggtcctcatgtcatcagtaaacgaagtacagaggaattcccaccacttcagccaattcttcagcagaagaaagaaaaagacataatgaaaaaaacgataaactttgcaaggttttgtgcccatgaaaattgttctgctgatttacaggtttctgcaaagattgggtttttgaagccccatgaaaataaaacatatcttgctgttgggagtatgaagacattgatgttgaatgtgtccttgtttaatgctggagatgatgcatatgaaacgactctacatgtcaaactacccgtgggtctttatttcattaagattttagagctggaagagaagcaaataaactgtgaagtcacagataactctggcgtggtacaacttgactgcagtattggctatatatatgtagatcatctctcaaggatagatattagctttctcctggatgtgagctcactcagcagagcggaagaggacctcagtatcacagtgcatgctacctgtgaaaatgaagaggaaatggacaatctaaagcacagcagagtgactgtagcaatacctttaaaatatgaggttaagctgactgttcatgggtttgtaaacccaacttcatttgtgtatggatcaaatgatgaaaatgagcctgaaacgtgcatggtggagaaaatgaacttaactttccatgttatcaacactggcaatagtatggctcccaatgttagtgtggaaataatggtaccaaattcttttagcccccaaactgataagctgttcaacattttggatgtccagactactactggagaatgccactttgaaaattatcaaagagtgtgtgcattagagcagcaaaagagtgcaatgcagaccttgaaaggcatagtccggttcttgtccaagactgataagaggctattgtactgcataaaagctgatccacattgtttaaatttcttgtgtaattttgggaaaatggaaagtggaaaagaagccagtgttcatatccaactggaaggccggccatccattttagaaatggatgagacttcagcactcaagtttgaaataagagcaacaggttttccagagccaaatccaagagtaattgaactaaacaaggatgagaatgttgcgcatgttctactggaaggactacatcatcaaagacccaaacgttatttcaccatagtgattatttcaagtagcttgctacttggacttattgtacttctgttgatctcatatgttatgtggaaggctggcttctttaaaagacaatacaaatctatcctacaagaagaaaacagaagagacagttggagttatatcaacagtaaaagcaatgatgattaaggacttctttcaaattgagagaatggaaaacagactcaggttgtagtaaagaaatttaaaagacactgtttacaagaaaaaatgaattttgtttggacttcttttactcatgatcttgtgacatattatgtcttcatgcaaggggaaaatctcagcaatgattactctttgagatagaagaactgcaaaggtaataatacagccaaagataatctctcagcttttaaatgggtagagaaacactaaagcattcaatttattcaagaaaagtaagcccttgaagatatcttgaaatgaaagtataactgagttaaattatactggagaagtcttagacttgaaatactacttaccatatgtgcttgcctcagtaaaatgaaccccactgggtgggcagaggttcatttcaaatacatctttgatacttgttcaaaatatgttctttaaaaatataattttttagagagctgttcccaaattttctaacgagtggaccattatcactttaaagccctttatttataatacatttcctacgggctgtgttccaacaaccattttttttcagcagactatgaatattatagtattataggccaaactggcaaacttcagactgaacatgtacactggtttgagcttagtgaaatgacttctggataattatttttttataattatggatttcaccatctttctttctgtatatatacatgtgtttttatgtaggtatatatttaccattcttcctatctattcttcctataacacacctttatcaagcatacccaggagtaatcttcaaatcttttgttatattctgaaacaaaagattgtgagtgttgcactttacctgatacacgctgatttagaaaatacagaaaccatacctcactaataactttaaaatcaaagctgtgcaaagactagggggcctatacttcatatgtattatgtactatgtaaaatattgactatcacacaactatttccttggatgtaattctttgttaccctttacaagtataagtgtttacaagtataagtgttaccttacatggaaacgaagaaacaaaattcataaatttaaattcataaatttagctgaaagatactgattcaatttgtatacagtgaatataaatgagacgacagcaaaattttcatgaaatgtaaaatatttttatagtttgttcatactatatgaggttctattttaaatgactttctggattttaaaaaatttctttaaatacaatcatttttgtaatatttattttatgcttatgatctagataattgcagaatatcattttatctgactctgtcttcataagagagctgtggccgaattttgaacatctgttatagggagtgatcaaattagaaggcaatgtggaaaaacaattctgggaaagatttctttatatgaagtccctgccactagccagccatcctaattgatgaaagttatctgttcacaggcctgcagtgatggtgaggaatgttctgaaatttgcgaaggcatttgagtagtgaaatgtaagcacaaaacctcctgaacccagagtgtgtatacacaggaataaactttatgacatttatgtatttttaaaaaactttgtatcgttataaaaaggctagtcattctttcaggagaacatctaggatcatagatgaaaaatcaagccccgatttagaactgtcttctccaggatggtctctaaggaaatttacatttggttctttcctactcagaactactcagaaacaactatatatttcaggttatttgagcacagtgaaagcagagtactatggttgtccaacacaggcctctcagatacaaggggaacacaattacatattgggctagattttgcccagttcaaaatagtatttgttatcaacttactttgttacttgtatcatgaattttaaaaccctaccactttaagaagacagggatgggttattcttttttggcaggtaggctatataactatgtgattttgaaatttaactgctctggattagggagcagtgaatcaaggcagacttatgaaatctgtattatatttgtaacagaatataggaaatttaacataattgatgagctcaaatcctgaaaaatgaaagaatccaaattatttcagaattatctaggttaaatattgatgtattatgatggttgcaaagtttttttgtgtgtccaataaacacattgtaaaaaaaagaatttgaattgatatctaaaaacagaatttgaattgatatttcatcttgacttttaaagccctagaggctaattgttagtaacatcaatttctattaggatatccgtttggccacacagcaggaggttagagcaatggagcattact

SEQ ID NO: 2788 - protein, 1032 aa, Homo sapien [sequence omitted]

SEQ ID NO: 2789 - DNA, 5954 bp, Homo sapien
  Unsure 3543-3566, 5007-5030: Unknown base
cggccgccggccgccgagcgcgggagggcaggcaggggcaggagccggagggcccggggcgcggcgcggcatgtagctgcgggctcccgcgtcgcgtgaggctgtcggcccggggccccgccatggctgggatggacagtggcaacctgaagaccgcgaggctgtggcgggacgccgccctgcgtgccaggaagctgcggagcaacctgcgccagctcacgcttaccgccgccggggcctgccccggggccggggccgacgcgctcgagtcccccgcctccccccagctcgtgctgccggccaacctcggggacattgaggcactgaacctggggaacaacggcctggaggaggtacccgaggggctggggtcggcgctgggcagcctgcgcgtcctggtcctgcgcaggaaccgcttcgcccggctgcccccggcggtggccgagctcggccaccacctcaccgagctggacgtgagccacaaccggctgaccgccctgggcgcggaggtggtgagtgctctgagggagctgcggaagctcaacctcagccacaaccagctgcccgccctgcccgcccagctgggcgctctcgctcacctggaggagctggatgtcagctttaaccggctggcgcacctgcctgactccctctcctgcctctcccgcctgcgcaccctggacgtggatcacaaccagctcactgccttcccccggcagctgctgcagctggtggccctggaggagctggacgtgtccagcaaccggctgcggggcctgcctgaggatatcagtgccctgcgtgccctcaagatcctctggctgagtggggccgagcttggcacgctgcccgccggcttctgcgagctggccagtttggagagcctcatgctagacaacaacgggctgcaggctctgcccgcccagttcagctgcctgcagcggctcaaaatgctcaacctgtcctccaacctcttcgaggagttccctgccgcgctgctgcccttggctggtctggaggagctctaccttagtcgcaaccagctcacctcggtgccatccgcttatctcgggcctgggccggctttctcaccttgtggctggataataaccgcatccgctacctgccggactccatcgtggagctgaccggcctggaggagctcgtgctgcaggggaaccagatcgcggtgctgcccgaccactttggccagctctcccgggtgggtttgtggaagatcaaagacaacccactgatccagcccccctacgaggtctgcatgaaggggatcccctacatcgcagcctaccagaaggaactggctcattcccagccggcggtgcagccccggctcaagctgctcctgatggggcataaggctgcaggaaagactttgctgcgccactgcctcaccgaggagagagtggagggatgcccaggaggaggggacaaggagaagtgctacccaccgtcacctccccctgtgagcaagggcatcgaggtgaccagctggacggccgatgcctcccggggcctgcggttcatcgtgtatgacttagctggggatgaaagttatgaggtgatccagcccttcttcctgtccccaggggccctatacgtgctggtggtcaacttggccacctatgagcctcgccactttcctaccaccgtgggctccttcttgcatcgggtcggggcgagagtgccccacgcggtggtgtgcatcgtgggcacccacgcagacctgtgcggagagcgtgagctggaggagaaatgtctggacattcaccgccagatcgccctgcaggagaagcacgacgcggagggactgagccgcttggccaaggtggtggacgaggcactggcccgggacttcgagctgcgctctgccagcccccacgcagcctactatggcgtttcggacaagaaccttcgacggcgcaaggcccattttcaatacctgctcaaccaccggctgcagatcctctcccccgtgttgcctgttagctgcagggacccgcgccacttacgacgccttcgggacaagttgctgtcagttgctgagcaccgagagatcttccccaacttacacagagtactgcctcgatcctggcaggtgctggaggaactgcatttccagccacctcaggcccagcgactgtggctaagctggtgggactcggcgcgcttgggcctgcaggcgggtctgaccgaggaccgactgcagagtgccctctcctacctgcatgagagcggcaagctactctactttgaggacagtccggctctcaaggagcacgtcttccacaacctcacccgcctcatcgacatcctcaatgtcttcttccagagggatccctctttgctgctgcataagctgctcctagggaccagtggagagggcaaggcggagggggaaagctccccgcccatggcgcggtccacccccagccaggaactgctccgggccacccagctccatcagtatgtggagggctttctgttgcatgggctcttgccagctcatgtcattcggttgctgcttaagcctcatgtccaggcccagcaggacttgcagctgttgctggagctgctggagaagatgggactctgttactgcctcaataaacccaagggcaagcctttgaatgggtccacagcttggtacaagttcccatgctatgtgcagaacgaggtgccccatgcagaagcctggattaatgggaccaacctagctgggcagtcttttgtggctgagcagttgcagattgaatatagctttccttttacttttccacctgggttgtttgcacgctacagtgtccagatcaacagccatgtggtgcacaggtcggatggtaaatttcagatctttgcctatagagggaaagttcctgtggttgtgagttacagacctgccaggggagtcctgcagccagacaccctgtccattgctagccatgcatcattaccaaatatatggaccgcatggcaagccataacccccttggtggaggaactgaatgtcctacttcaggaatggcctggactgcactacaccgtgcacattctctgttctaagtgccttaagagaggatcgcccaatccacatgcttttccaggggagttgctgagtcagcccagaccggaaggagtggcagagatcatttgccccaagaacggcagcgagcgagtaaatgttgccttggtttacccacccacgccaactgtgatcagcccctgttccaagaagaatgttggtgaaaagcacagaaaccagtgacgtttgtggctgtggaatttccatggagaaaagagagcatctgaacacctggaccatcttttgcacctggcagaccctctgcactcaccccagcgtgttctgtgaacttgagtgacaacgcgtgcttgcagggtgctttttggatgactggggaagaggtggggagggggtggtggggggaagcatggacgagaacatggagcaaatgttttacaacctgaacctcagaactgtgatcctccaaggagcgcgctacttgnnnnnnnnnnnnnnnnnnnnnnnngtcgaatggcttctcagggattttgttttccgtgcacatataagccatagttacagtacaggtggcagtatttagagcactcagatttcagttctgttaaatgtgaaagagggatcgactgacgttcattgctgttccataactagtgtaaaatatgtatatgtttatctttatttttataatatgcaaatacatttaaatttatacagtttgaagcttctagcgttagttcacactgggtgcaatattctgcatgagaactgtgccaagatggggctgatttcttattttagtataagacttttttgttttttctttattctttaatcctcttcacattaaaaaaaaaaaatctctctgttagcccatggattaagtgttggttcatagagattgccaataatcagaaagaaccttaaatgtgcatttaagacagtgtcccttcccttcttttcaatgaaggtccctgcctatataaatcatctggcacgctggtgggaaatcctttgctcttccaacgtgttattagtgctgggcagagatggggcacactcaggggccaaagaggacaaaaagtccatgcaaaacttgagtcttttaatggcttaagataatcaggagtcagttctgaatcttacaaagtgctctgcttaataagtaccttacttagcagagcactttgcaaacatattacttattagcagagctctttgtagaccttccacatctggctgtcagatcttaaggttgtgaatttaggctccagttacattcactggagagcataatcccacacgggttatttataaatacagagcctctgattggacggtctcctgccaagaactagtaatacccttgttttaaaatcttcacaaggtaaaacttaaaaagccaaccaaacaaattgctctccattctacttttaattgggccaaacagcatatgctacagtagtaacatgtttttcggagagtgtaaaaaactctgtttacatttgcctcctccgtgggttgatcgaaaatgtataaaactgactgcttctcgccagcctcagacaagaagagtgagttgctggtactcgctactcttttacttcttttgtaaagtattgactcttggaaggctacagtatacaaagtctcaacatgttttttaaaagaaataaggagcaagcgactgccctgctagaaatcacaaaccgatttttgtagaatattttgtgccccaggcattaatttcactgactccagaacctgcagttcagagaatgatttcttatgatgataaaaatcgaatgggatcagacgatgtttgcatttttttaatacttgaataggacacctcaagtttgagatttcattttcttttagaacacagtcacaagattaatctggtgaatccttttgtcacagttctcgtgtgtgtgtgcgcgtctccnnnnnnnnnnnnnnnnnnnnnnnnaaaactgaatggtcacatttaattgctttttggaccattgaatagttgggaagtaagaattttttaattggcatgagacggttcctcaactgttaaattaaccaactttgacctgtctttagaaaaaggcttatttgtatgattttgggctaactccccggggaccatattaaatgacaaaaatgctcctttgggtgacacaccctacaaagtatttgctgttacgaacataaacgcccacattcttaatatctaatatttttgaccagtgatgttttatgctgtcatctgaaccctagagaagcagtgtcagaggaaaccttggtgtcacatgtgtcttagcaaaagggttaccatgatcgagggtcatgtgaccaaaagatgctccagagaagcttgagaatttgtttcaagttgggaggagggttggagatacaaaaatcactctgctctacaggactcttcagctgtctatgcaagaaattccgttttctctttcagcacctggaaagacacagcagcccaccgaggcgataggtgattcactaagcacaagaggaatgttttctaagcaaggcgtcccttgcctctcaaacaaatgccctccaagtttgttagggtttctattcctgcaacttgtagtatcaaaaccacttcctggaattgtcaaagcactgccaaaataaatgtttttcccccttctaagaaaaaaaaaatgacagtgctcatatttgacacttgtgtattggactctcttttgaatgaataaaaaggaaaaggggtttggtgtaattcctgatggggtgcgtgttgtttttcatgccatggtttgtgaattttaattgtggtttcccatttcgttgttgtaactgggcagaaattaaaaaagaaaaatcaataaaaatacaaagaaatggttaaaaa

SEQ ID NO: 2790 - protein, 381 aa, Homo sapien
  Unsure 3543-3566, 5007-5030: Unknown amino acid
AAGRRAREGRQGQEPEGPGRGAACSCGLPRRVRLSARGPAMAGMDSGNLKTARLWRDAALRARKLRSNLRQLTLTAAGACPGAGADALESPASPQLVLPANLGDIEALNLGNNGLEEVPEGLGSALGSLRVLVLRRNRFARLPPAVAELGHHLTELDVSHNRLTALGAEVVSALRELRKLNLSHNQLPALPAQLGALAHLEELDVSFNRLAHLPDSLSCLSRLRTLDVDHNQLTAFPRQLLQLVALEELDVSSNRLRGLPEDISALRALKILWLSGAELGTLPAGFCELASLESLMLDNNGLQALPAQFSCLQRLKMLNLSSNLFEEFPAALLPLAGLEELYLSRNQLTSVPSAYLGPGPAFSPCGWIITASATCRTPSWS

SEQ ID NO: 2791 - DNA, 4480 bp, Homo sapien
tcggcctcccaatgtagtgggatttcaggcatgaccacctggcctagttcctatacttttcttaattcttcagacttctcacatttagtatagtgcattcatttcatcttgctgtttattagcaccctttgtggccaagggaaataaaaggtggtaaaattcagttttcagtttagttcttgaaagctctgggaaatggaggaaacacaaaactatgaattaaactagggctgttgatttctgaacccccagataaatcagttgacccacattttcattttaggtgttaggtccaaattagcataatgtcttgcattattattaggttcagtgtgaaactttacagtgctgcatttgaagtttagtaactggttattattaatcatttgggaaaaatgaaaatgtgttgggactttctatgactaggcatttgttgattatttttcatgattgctttttgttttctcattgtgtaggatttgtgaacttgtatattacaggaaacaagatactttgtaaaatttactggggaaaatccatttggagtgcatgacatttgccaggataagaaagcagtaatatgtttgtattataaaattacaccctgccagaaaactttctttcctagtaaggtaaatgtagaagggacttttacagcatagtaagttgattaggagccaaaattttattccagtttttttttgaactaagaatgttttaaattctgtaatgaacttttatgtttacccattactcatgcattctttcacaatatgtttaatagcctgaggaaataggaaagctgtgaagctactaccattctttacttttaataagaataataggaaagaaaagtcaggtcagtaatccaaatccaaatatgtatactgcaaatgctcaagaagtcacattttttgataaattgtattgagtacagaagaacttatatgaatttattatctgttaataacttagttttgacaacagaataacatttggaaattgtgagaataatcaagctgtttttccattaacagtgtaaattcataacatgtccttcaaaaggtgatattctaagctgtcttaattgtctacggttgataacttttaaataaagtacaggactttctgaaagtgtttggcacgttatgctgccaaaaacaatctgtgttttgaaataccaattaatcagttaatttctgaagactttgtataggacttgatatatgagtcagaatctgtctgtactcattctgtacattgtaactttgaacacttatgaaaaactgtatctgttggtgtgttttgattagttagtgtagatttgtttgcgtatttgaattccgattttagtttaggaagactaaaagtagccatttttgtaaagttcatatgctattttttaatgtcatttttgtttttaatatttatacaatagtgatgttactagtaaaaaatgtttatagataacacgtagagctattaactgttcaaaagcctacatgataggcatattttgtatttcgtgttgcactcgttctgtttcatattggactttttacatcccttttttagcaaaaaaaagagacacatttgaattctctttagcataaagctgtgcattggaaactatgtgactgtatccatacggttagcaaaatactctttgccaccaaaggtaaatgaaactgtaaaatacctctggatatttgtgccaatgaacttttcttagcatattaggattaaagcaaaaataatcttttcagtatgtttcatctaggacttacaataaatgtttaaaccatgaaaacttatatttcataccctaatttttctttgaaaatattcaagatttgtagcctagtgtgttctattttgtgtgattgcttgaatgttttctgattttattgggtaaaagtttgcctagtaatgatctttcagcaattcattgaaataattatttgaagtaatcttgcttcagatttaatttgtgatgtacattgttgtacaagccattttagtacaggtgtctcatttatgtagttgaaaggtgactgtggaatttcttttgttttttatgtatttccattcagtctctttatatagtcacatgtttcacaggggaacttgtccactggaacctaacatagtacaaccttttaatatgcgtatcttaaaggaaaatattataaaacaagatattaatactaaagtgttaacattaatatgttgttctcatggaagaaaagtagaaaatgtgataggcttagaaattattttttatcagcattaagtgcttcaatttctccccataaagattctaaggaaatttcagttcctcatattatagttttccccataatttaatattactaagtatttctctgcccagtaatgttgatgcagtttgcataaatagccttggaagtaaggaggcaggacagaaagccaaatatcgaaatctctggccttgatttagtgacagtttattctaatggggaccataggtgttattagtaaaaagatagtgtacaaggcctaagttcagtttacattgttctttgaaatgagttcatcttttgtgttgaataattgtattctaagtaggagatgcctgtatttaacataatcatgctttctatataatcaaatatgtatttgttggaatactggtagaaataaccttcccttcctccactgtgcagtggaaaaaaaactcccgatttatactgtatataaattaggaaattatgttacatatttacatttttaaaaatataaaaatgacatattattttgaagtgattgtattatagtttctgaagcttatgactggctataaatataacaacatacccatgagaaaccagaccaaaattgaatatatatcatcactgtgaccttgaacttatagtcatttgggataaaacagagtgtgccttgaaatgataaagagtgccctgcaattttataactgtacattttattatgggtggtcctctcaaattggccccaaatccttgtcttcgaggttggtgaaataaaagtttaaaataaaagttgactggtatttcctttagtatttccagaactattgctgtagaggcctcccttaattttcagagttctcattttgaattaaagtagacttacgctacatagatgtagaaaattaggtttggcttaggtttctgaaaaaatattctaggagaaggtggtagcattgttctgaacttaccacacttggaaaaactaatcttcaaatgtaattttttgtcttattaatgagtaatctgtcaaagacatgaattctttgacttgtgctcattctttctgaacttattgaggcttatatatatcaaataaggttaatttacacaataattatttttaataattaataaactcattcatgtagtatattttaaaacattatttcctctcatttttccttctcttttttcttcctatatatttttaaggtttcaagagaaaacgggcttcagtttttaaaaaaatgtagacttgcatttttactgtgcttatttaaaataatggatataatttatattaaggtccaaattattttattcacaggataatcatggtctctgataaaagatgcccacatttctgtgtactcacagttgttgtatatttttcaatttcaattttgaaagtaaactcaacacattgttttcccattttacctccactacctactcgccagacaaaaatatagatttctctaaaaacacatacaaagaaaacgtctttccttaaaacatgatcttattgacatgaaggtagtttgagcaagggtatgtaataaaataaatggctctcaacctgcatcaatttttatactatagttaaaaaatttatagaggacaacctatgtgttatgctgagatagactcagtaatcatttgtttgcaaattgattatttttttctcatccatccagaaagtacagtgcataacaacaacacttaacaagtgcagaggaacctgtcctgtagtatataataaaaaatgattgtcaccttgctgatctttccatttaaacatgcatgatctccagtactttgtacaatgtatagtatattaaatacatttatgtgtaattttgtgtgtatttttatatggtataattaaaattattacatttatgtgattgtaattcacaaaaagtactacttactatattctgtagagtgtgttgtgaatgtttttacctgtgtttgagcattatggtgtaggtttaatagatgaatatttgccttcagtctctgctcaggtattaatgtgtagtaatttttggtgctttctttttaatctgtgataatctggtgttctgaatgttcaaaaataaatttggttgaatacgcacatggtaaaaagattgcttaccaattgacatactctctataataccatcttggtaaaaactctttacaaaggatttattggccgggcg

SEQ ID NO: 2792 - protein, 30 aa, Homo sapien [sequence omitted]

SEQ ID NO: 2793 - DNA, 4994 bp, Homo sapien
gacgcgaggcgggttcttggactgagtgtgcggcgcggtgcgccgccttccgaggctcctcccgcgggtggcagcggacggggcgcgcccctcggccagtcctcggtcctcaggcttgtggctccgttgagcaccggccgccgggcctctgggtccgtcgagtggagactctctgaaaagcgtgggctccgtggcctccggcgcggccgcggcgggtcggtctcctagatcatccgggaagcccacgggaccctcaggcgggcaggatgaacgactggcacaggatcttcacccaaaacgtgcttgtccctccccacccacagagagcgcgccagccttggaaggaatccacggcattccagtgtgtcctcaagtggctggacggaccggtaattaggcagggcgtgctggaggtactgtcagaggttgaatgccatctgcgagtgtctttctttgatgtcacctaccggcacttctttgggaggacgtggaaaaccacagtgaagccgacgaagagaccgccgtccaggatcgtctttaatgagcccttgtattttcacacatccctaaaccaccctcatatcgtggctgtggtggaagtggtcgctgagggcaagaaacgggatgggagcctccagacattgtcctgtgggtttggaattcttcggatcttcagcaaccagccggactctcctatctctgcttcccaggacaaaaggttgcggctgtaccatggcacccccagagccctcctgcacccgcttctccaggaccccgcagagcaaaacagacacatgaccctcattgagaactgcagcctgcagtacacgctgaagccacacccggccctggagcctgcgttccaccttcttcctgagaaccttctggtgtctggtctgcagcagatacctggcctgcttccagctcatggagaatccggcgacgctctccgaaagcctcgcctccagaagcccatcacggggcacttggatgacttattcttcaccctgtacccctccctggagaagtttgaggaagagctgctggagctccacgtccaggaccacttccaggagggatgtggcccactggacggtggtgccctggagatcctggagcggcgcctgcgtgtgggcgtgcacaatggtctgggcttcgtgcagaggccgcaggtcgttgtactggtgcctgagatggatgtggccttgacgcgctcagctagcttcagcaggaaagtggtctcctcttccaagaccagctccgggagccaagctctggttttgagaagccgcctccgcctcccagagatggtcggccaccctgcatttgcggtcatcttccagctggagtacgtgttcagcagccctgcaggagtggacggcaatgcagcttcggtcacctctctgtccaacctggcatgcatgcacatggtccgctgggctgtttggaaccccttgctggaagctgattctggaagggtgaccctgcctctgcagggtgggatccagcccaacccctcgcactgtctggtctacaaggtaccctcagccagcatgagctctgaagaggtgaagcaggtggagtcgggtacactccggttccagttctcgctgggctcagaagaacacctggatgcacccacggagcctgtcagtggccccaaagtggagcggcggccttccaggaaaccacccacgtccccttcgagcccgccagcgccagtacctcgagttctcgctgccccgcagaactcacctgtgggaccagggttgtcaatttcccagctggcggcctccccgcggtccccgactcagcactgcttggccaggcctacttcacagctaccccatggctctcaggcctccccggcccaggcacaggagttcccgttggaggccggtatctcccacctggaagccgacctgagccagacctccctggtcctggaaacatccattgccgaacagttacaggagctgccgttcacgcctttgcatgcccctattgttgtgggaacccagaccaggagctctgcagggcagccctcgagagcctccatggtgctcctgcagtcctccggctttcccgagattctggatgccaataaacagccagccgaggctgtcagcgctacagaacctgtgacgtttaaccctcagaaggaagaatcagattgtctacaaagcaacgagatggtgctacagtttcttgcctttagcagagtggcccaggactgccgaggaacatcatggccaaagactgtgtatttcaccttccagttctaccgcttcccacccgcaacgacgccacgactgcagctggtccagctggatgaggccggccagcccagctctggcgccctgacccacatcctcgtgcctgtgagcagagatggcacctttgatgctgggtctcctggcttccagctgaggtacatggtgggccctgggttcctgaagccaggtgagcggcgctgctttgcccgctacctggccgtgcagaccctgcagattgacgtctgggacggagactccctgctgctcatcggatctgctgccgtccagatgaagcatctcctccgccaaggccggccggctgtgcaggcctcccacgagcttgaggtcgtggcaactgaatacgagcaggacaacatggtggtgagtggagacatgctggggtttggccgcgtcaagcccatcggcgtccactcggtggtgaagggccggctgcacctgactttggccaacgtgggtcacccgtgtgaacagaaagtgagaggttgtagcacattgccaccgtccagatctcgggtcatctcaaacgatggagccagccgcttctctggaggcagcctcctcacgactggaagctcaaggcgaaaacacgtggtgcaagcacagaagctggcggacgtggacagtgagctggctgccatgctactgacccatgcccggcagggcaaggggccccaggacgtcagccgcgagtcggatgccacccgcaggcgtaagctggagcggatgaggtctgtgcgcctgcaggaggccgggggagacttgggccggcgtgggacgagcgtgttggcgcagcagagcgtccgcacacagcacttgcgggacctacaggtcatcgccgcctaccgggaacgcacgaaggccgagagcatcgccagcctgctgagcctggccatcaccacggagcacacgctccacgccacgctgggggtcgccgagttctttgagtttgtgcttaagaacccccacaacacacagcacacggtgactgtggagatcgacaaccccgagctcagcgtcatcgtggacagtcaggagtggagggacttcaagggtgctgctggcctgcacacaccggtggaggaggacatgttccacctgcgtggcagcctggccccccagctctacctgcgcccccacgagaccgcccacgtccccttcaagttccagagcttctctgcagggcagctggccatggtgcaggcctctcctgggttgagcaacgagaagggcatggacgccgtgtcaccttggaagtccagcgcagtgcccactaaacacgccaaggtcttgttccgagcgagtggtggcaagcccatcgccgtgctctgcctgactgtggagctgcagccccacgtggtggaccaggtcttccgcttctatcacccggagctctccttcctgaagaaggccatccgcctgccgccctggcacacatttccaggtgctccggtgggaatgcttggtgaggaccccccagtccatgttcgctgcagcgacccgaacgtcatctgtgagacccagaatgtgggccccggggaaccacgggacatatttctgaaggtggccagtggtccaagcccggagatcaaagacttctttgtcatcatttactcggatcgctggctggcgacacccacacagacgtggcaggtctacctccactccctgcagcgcgtggatgtctcctgcgtcgcaggccagctgacccgcctgtcccttgtccttcgggggacacagacagtgaggaaagtgagagctttcacctctcatccccaggagctgaagacagaccccaaaggtgtcttcgtgctgccgcctcgtggggtgcaggacctgcatgttggcgtgaggccccttagggccggcagccgctttgtccatctcaacctggtggacgtggattgccaccagctggtggcctcctggctcgtgtgcctctgctgccgccagccgctcatctccaaggcctttgagatcatgttggctgcgggcgaagggaagggtgtcaacaagaggatcacctacaccaacccctacccctcccggaggacattccacctgcacagcgaccacccggagctgctgcggttcagagaggactccttccaggtcgggggtggagagacctacaccatcggcttgcagtttgcgcctagtcagagagtgggtgaggaggagatcctgatctacatcaatgaccatgaggacaaaaacgaagaggcattttgcgtgaaggtcatctaccagtgagggcttgagggtgacgtccttcctgcggcacccagctggggcctgtctgtgcccctcctgccctgcaggctgtcctccccgcctctctgcagcctttcacttcagtgcccacctggctgacctgtgcacttggctgaggaagcagagaccgagcgctggtcattttgtagtacctgcatccagcttagctgctgctgacacccagcaggcctgggttccgtgagcgcgaactccgtggtggtgggtctggctctggtgctgccatctacgcatgtgggaccctcgttatcgctgttgctcaaaatgtattttatgaatcatcctaaatgagaaaattatgtttttcttactggattttgtacaaacataatctattatttgctatgcaatattttatgctggtattatatctgttttttaaattgttgaacaaaatactaaactttt

SEQ ID NO: 2794 - protein, 1426 aa, Homo sapien
MNDWHRIFTQNVLVPPHPQRARQPWKESTAFQCVLKWLDGPVIRQGVLEVLSEVECHLRVSFFDVTYRHFFGRTWKTTVKPTKRPPSRIVFNEPLYFHTSLNHPHIVAVVEVVAEGKKRDGSLQTLSCGFGILRIFSNQPDSPISASQDKRLRLYHGTPRALLHPLLQDPAEQNRHMTLIENCSLQYTLKPHPALEPAFHLLPENLLVSGLQQIPGLLPAHGESGDALRKPRLQKPITGHLDDLFFTLYPSLEKFEEELLELHVQDHFQEGCGPLDGGALEILERRLRVGVHNGLGFVQRPQVVVLVPEMDVALTRSASFSRKVVSSSKTSSGSQALVLRSRLRLPEMVGHPAFAVIFQLEYVFSSPAGVDGNAASVTSLSNLACMHMVRWAVWNPLLEADSGRVTLPLQGGIQPNPSHCLVYKVPSASMSSEEVKQVESGTLRFQFSLGSEEHLDAPTEPVSGPKVERRPSRKPPTSPSSPPAPVPRVLAAPQNSPVGPGLSISQLAASPRSPTQHCLARPTSQLPHGSQASPAQAQEFPLEAGISHLEADLSQTSLVLETSIAEQLQELPFTPLHAPIVVGTQTRSSAGQPSRASMVLLQSSGFPEILDANKQPAEAVSATEPVTFNPQKEESDCLQSNEMVLQFLAFSRVAQDCRGTSWPKTVYFTFQFYRFPPATTPRLQLVQLDEAGQPSSGALTHILVPVSRDGTFDAGSPGFQLRYMVGPGFLKPGERRCFARYLAVQTLQIDVWDGDSLLLIGSAAVQMKHLLRQGRPAVQASHELEVVATEYEQDNMVVSGDMLGFGRVKPIGVHSVVKGRLHLTLANVGHPCEQKVRGCSTLPPSRSRVISNDGASRFSGGSLLTTGSSRRKHVVQAQKLADVDSELAAMLLTHARQGKGPQDVSRESDATRRRKLERMRSVRLQEAGGDLGRRGTSVLAQQSVRTQHLRDLQVIAAYRERTKAESIASLLSLAITTEHTLHATLGVAEFFEFVLKNPHNTQHTVTVEIDNPELSVIVDSQEWRDFKGAAGLHTPVEEDMFHLRGSLAPQLYLRPHETAHVPFKFQSFSAGQLAMVQASPGLSNEKGMDAVSPWKSSAVPTKHAKVLFRASGGKPIAVLCLTVELQPHVVDQVFRFYHPELSFLKKAIRLPPWHTFPGAPVGMLGEDPPVHVRCSDPNVICETQNVGPGEPRDIFLKVASGPSPEIKDFFVIIYSDRWLATPTQTWQVYLHSLQRVDVSCVAGQLTRLSLVLRGTQTVRKVRAFTSHPQELKTDPKGVFVLPPRGVQDLHVGVRPLRAGSRFVHLNLVDVDCHQLVASWLVCLCCRQPLISKAFEIMLAAGEGKGVNKRITYTNPYPSRRTFHLHSDHPELLRFREDSFQVGGGETYTIGLQFAPSQRVGEEEILIYINDHEDKNEEAFCVKVIYQ

SEQ ID NO: 2795 - DNA, 1648 bp, Homo sapien
atgcgggagatcgtgcacatccaggccggccagtgcggcaaccagatcggggccaagttctgggaagtcatcagtgatgagcatggcatcgaccccagcggcaactacgtgggcgactcggacttgcagctggagcggatcagcgtctactacaacgaggcctcttctcacaagtacgtgcctcgagccattctggtggacctggaacccggaaccatggacagtgtccgctcaggggcctttggacatctcttcaggcctgacaatttcatctttggtcagagtggggccggcaacaactgggccaagggtcactacacggagggggcggagctggtggattcggtcctggatgtggtgcggaaggagtgtgaaaactgcgactgcctgcagggcttccagctgacccactcgctggggggggggacgggctccggcatgggcacgttgctcatcagcaaggtgcgtgaggagtatcccgaccgcatcatgaacaccttcagcgtcgtgccctcacccaaggtgtcagacacggtggtggaaccctacaacgccacgctgtccatccaccagctggtggaaaacacggatgaaacctactgcatcgacaacgaggcgctctacgacatctgcttccgcaccctcaagctggccacgcccacctacggggacctcaaccacctggtatcggccaccatgagcggagtcaccacctccttgcgcttcccgggccagctcaacgctgacctgcgcaagctggccgtcaacatggtgcccttcccgcgcctgcacttcttcatgcccggcttcgcccccctcaccaggcggggcagccagcagtaccgggccctgaccgtgcccgagctcacccagcagatgttcgatgccaagaacatgatggccgcctgcgacccgcgccacggccgctacctgacggtggccaccgtgttccggggccgcatgtccatgaaggaggtggacgagcagatgctggccatccagagcaagaacagcagctacttcgtggagtggatccccaacaacgtgaaggtggccgtgtgtgacatcccgccccgcggcctcaagatgtcctccaccttcatcgggaacagcacggccatccaggagctgttcaagcgcatctccgagcagttcacggccatgttccggcgcaaggccttcctgcactggtacacgggcgagggcatggacgagatggagttcaccgaggccgagagcaacatgaacgacctggtgtccgagtaccagcagtaccaggacgccacggccgaggaagagggcgagatgtacgaagacgacgaggaggagtcggaggcccagggccccaagtgaaactgctcgcagctggagtgagaggcaggtggcggccggggccgaagccagcagtgtctaaacccccggagccatcttgctgccgacaccctgctttccccatcgccctagggctcccttgccgccctcctgcagtatttatggcctcgtcctcccccacctaggccacgtgtgagctgctcctgtctctgtcttattgcagctccaggcctgacgttttacggttttgttttttactggtttgtgtttatattttcggggatacttaataaatctattgctgtcagataccctt

SEQ ID NO: 2796 - protein, 450 aa, Homo sapien
MREIVHIQAGQCGNQIGAKFWEVISDEHGIDPSGNYVGDSDLQLERISVYYNEASSHKYVPRAILVDLEPGTMDSVRSGAFGHLFRPDNFIFGQSGAGNNWAKGHYTEGAELVDSVLDVVRKECENCDCLQGFQLTHSLGGGTGSGMGTLLISKVREEYPDRIMNTFSVVPSPKVSDTVVEPYNATLSIHQLVENTDETYCIDNEALYDICFRTLKLATPTYGDLNHLVSATMSGVTTSLRFPGQLNADLRKLAVNMVPFPRLHFFMPGFAPLTRRGSQQYRALTVPELTQQMFDAKNMMAACDPRHGRYLTVATVFRGRMSMKEVDEQMLAIQSKNSSYFVEWIPNNVKVAVCDIPPRGLKMSSTFIGNSTAIQELFKRISEQFTAMFRRKAFLHWYTGEGMDEMEFTEAESNMNDLVSEYQQYQDATAEEEGEMYEDDEEESEAQGPK

SEQ ID NO: 2797 - DNA, 4205 bp, Homo sapien; identical to SEQ ID NO: 1879

SEQ ID NO: 2798 - protein, 876 aa, Homo sapien; identical to SEQ ID NO: 1880

SEQ ID NO: 2799 - DNA, 1958 bp, Homo sapien
agcagccggcgcggccgccagcgcggtgtagggggcaggcgcggatcccgccaccgccgcgcgctcggcccgccgactcccggcgccgccgccgccactgccgtcgccgccgccgcctgccgggactggagcgcgccgtccgccgcggacaagaccctggcctcaggccggagcagccccatcatgccgagggagcgcagggagcgggatgcgaaggagcgggacaccatgaaggaggacggcggcgcggagttctcggctcgctccaggaagaggaaggcaaacgtgaccgtttttttgcaggatccagatgaagaaatggccaaaatcgacaggacggcgagggaccagtgtgggagccagccttgggacaataatgcagtctgtgcagacccctgctccctgatccccacacctgacaaagaagatgatgaccgggtttacccaaactcaacgtgcaagcctcggattattgcaccatccagaggctccccgctgcctgtactgagctgggcaaatagagaggaagtctggaaaatcatgttaaacaaggaaaagacatacttaagggatcagcactttcttgagcaacaccctcttctgcagccaaaaatgcgagcaattcttctggattggttaatggaggtgtgtgaagtctataaacttcacagggagaccttttacttggcacaagatttctttgaccggtatatggcgacacaagaaaatgttgtaaaaactcttttacagcttattgggatttcatctttatttattgcagccaaacttgaggaaatctatcctccaaagttgcaccagtttgcgtatgtgacagatggagcttgttcaggagatgaaattctcaccatggaattaatgattatgaaggcccttaagtggcgtttaagtcccctgactattgtgtcctggctgaatgtatacatgcaggttgcatatctaaatgacttacatgaagtgctactgccgcagtatccccagcaaatctttatacagattgcagagctgttggatctctgtgtcctggatgttgactgccttgaatttccttatggtatacttgctgcttcggccttgtatcatttctcgtcatctgaattgatgcaaaaggtttcagggtatcagtggtgcgacatagagaactgtgtcaagtggatggttccatttgccatggttataagggagacggggagctcaaaactgaagcacttcaggggcgtcgctgatgaagatgcacacaacatacagacccacagagacagcttggatttgctggacaaagcccgagcaaagaaagccatgttgtctgaacaaaatagggcttctcctctccccagtgggctcctcaccccgccacagagcggtaagaagcagagcagcgggccggaaatggcgtgaccaccccatccttctccaccaaagacagttgcgcgcctgctccacgttctcttctgtctgttgcagcggaggcgtgcgtttgcttttacagatatctgaatggaagagtgtttcttccacaacagaagtatttctgtggatggcatcaaacagggcaaagtgttttttattgaatgcttataggttttttttaaataagtgggtcaagtacaccagccacctccagacaccagtgcgtgctcccgatgctgctatggaaggtgctacttgacctaagggactcccacaacaacaaaagcttgaagctgtggagggccacggtggcgtggctctcctcgcaggtgttctgggctccgttgtaccaagtggagcaggtggttgcgggcaagcgttgtgcagagcccatagccagctgggcagggggctgccctctccacattatcagttgacagtgtacaatgcctttgatgaactgttttgtaagtgctgctatatctatccattttttaataaagataatactgtttttgagacaaaaaaaa

SEQ ID NO: 2800 - protein, 410 aa, Homo sapien
MPRERRERDAKERDTMKEDGGAEFSARSRKRKANVTVFLQDPDEEMAKIDRTARDQCGSQPWDNNAVCADPCSLIPTPDKEDDDRVYPNSTCKPRIIAPSRGSPLPVLSWANREEVWKIMLNKEKTYLRDQHFLEQHPLLQPKMRAILLDWLMEVCEVYKLHRETFYLAQDFFDRYMATQENVVKTLLQLIGISSLFIAAKLEEIYPPKLHQFAYVTDGACSGDEILTMELMIMKALKWRLSPLTIVSWLNVYMQVAYLNDLHEVLLPQYPQQIFIQIAELLDLCVLDVDCLEFPYGILAASALYHFSSSELMQKVSGYQWCDIENCVKWMVPFAMVIRETGSSKLKHFRGVADEDAHNIQTHRDSLDLLDKARAKKAMLSEQNRASPLPSGLLTPPQSGKKQSSGPEMA

SEQ ID NO: 2801 - DNA, 879 bp, Homo sapien
gcggagtctccaactgggagagctgcagctgccgagaggaggagaacgctgaggtcggtcggaccaacggacgcgctgaccgctgccaactgcagctcgcgctgcctcctgctcgcgccgtgccactaaggtcactcccgcctccgagagcccagagccgagatggaaacggtccaggagctgatccccctggccaaggagatgatggcccagaagcgcaaggggaagatggtgaagctgtacgtgctgggcagcgtgctggccctcttcggcgtggtgctcggcctgatggagactgtgtgcagccccttcacggccgccagacgtctgcgggaccaggaggcagccgtggcggagctgcaggccgccctggagcgacaggctctccagaagcaagccctgcaggagaaaggcaagcagcaggacacggtcctcggcggccgggccctgtccaaccggcagcacgcctcctaggaactgtgggagaccagcggagtgggagggagacgcagtagacagagacagaccgagaaggaagggagagacagagggggcgcgcgcacaggagcctgactccgctgggagagtgcaggagcacgtgctgttttttatttggacttaacttcagagaaaccgctgacatctagaactgacctaccacaagcatccaccaaaggagtttgggattgagttttgctgctgtgcagcactgcattgtcatgacatttccaacactgtgtgaattatctaaatgcgtctaccattttgcactagggaggaaggataaatgctttttatgttattattattaattattacaatgaccaccattttgcattttgaaataaaaaactttttataccaaaaaaaaaaaaaaaa

SEQ ID NO: 2802 - protein, 103 aa, Homo sapien
METVQELIPLAKEMMAQKRKGKMVKLYVLGSVLALFGVVLGLMETVCSPFTAARRLRDQEAAVAELQAALERQALQKQALQEKGKQQDTVLGGRALSNRQHAS

SEQ ID NO: 2803 - DNA, 2840 bp, Homo sapien
gagtgaagactataatctctacaatcagttcaagtctgcaccatctgacagtttaacatacaaactggctttgtgtctctgtatgatcaatttttaccatggagggttgaaaggagtggcacacctctggcaggaatttgttcttgaaatgcgtttccgatgggaaaacaactttctgattccaggattagcaagtggacccccagatctgaggtgttgtttactgcatcagaaactacagatgttaaattgttgtattgaaagaaagaaggcacgtgatgaggggaaaaagacaagtgcttcagatgtcactaatatatatccaggggatgctggaaaagcaggagaccagttggtgccagataatctaaaagaaacagataaggaaaagggagaggtaggaaaatcttgggattcctggagtgacagcgaagaagaattttttgaatgcctaagtgatactgaagaacttaaaggaagtggacaagagagtggcaagaaaggaggacctaaggagatggcaaatttaaggccggaaggacggctctatcagcatgggaaacttacactgctgcataatggagaacctctctacattccagtaacccaggaaccagcacctatgacagaagatctgctagaagagcagtctgaagttttagctaaattaggtacatcggcagagggggctcaccttcgagcacgcatgcagagtgcctgtctgctctcagatatggagtcttttaaggcagctaatccaggttgctccctggaagattttgtgaggtggtattcaccccgggattatattgaagaggaggtgattgatgaaaagggcaatgtggtgctgaaaggagaactgagtgcccggatgaagattccaagcaatatgtgggtagaagcctgggaaacagctaagccaattcctgctagaaggcaaaggagactcttcgatgatacacgggaagcagaaaaggtgctgcactatctggcaatccagaaacctgcagaccttgctcggcacctgttaccttgtgtgattcatgcagctgtactcaaggtaaaggaagaagaaagtctcgaaaacatttcttcagttaagaagatcataaagcagataatatcccattccagtaaagttttgcacttccccaatccagaagacaagaaattggaagaaatcattcaccagattactaatgtggaagctctcattgccagagctcggtcactaaaagccaagtttggaactgagaaatgtgaacaggaggaggaaaaggaagatcttgaaaggtttgtgagttgcctgctggagcagcctgaagtgttagtcaccggtgcaggaagaggacatgctggcaggatcattcacaagctgtttgtgaatgcccagagggctgcagctatgactccaccagaggaggaattgaagagaatgggctccccagaggaaagaaggcagaactccgtgtcagacttcccaccccctgctggccgggaattcattttgcgcaccactgtgccgcgccctgctccctactccaaagctctgcctcagcggatgtacagtgttctcaccaaagaggactttagacttgcaggtgccttttcatcagatacttccttcttctgattcttctagcattactcgttggtggcttcagagacagtgctgcctcctcctgagggagggaaggtaccagggagaacctgggaggtcctggagagggccctgtccagttgggtgatcaggaatcaaaccagcatcggaaagacttcccagcaccaagcttgagctgtgtcgtttcgtggagggggcagcgaggatgggcttgagctgttgagagatttctgccctagagatggcctttgtatatgggggggtggtggggggacacaaacacatcagacactccgtcctcacactggcaggacggtgttcatcgcattctcttctgtgaccagcctctaggctagcggctgcattcgtggtctgtgcaaacacttcgtggttctatatatcagcagcaagtgtgcaaaataaaggacctgttaactcagatttctggatattttggtggtagcttctagtcccagaatctgtgtttttaaaatactacatgacattctgtctattcaatcacctggtggtcatctttcttgtactaattaactgttgatgagcattttggatattctaggagaaagcctataatttcacatagtttctctttttcatgtaactgtaacctaaatgtattacttctgataaaactatatatcaaatgtcactgcaaattagttttatatctgtcatgtgagatttgtcttacttatttttcttttggttgccatggaagttatggccctgaaaatcgtctccctccccttctcttgctgtacagcatgcgttctctttttgtggttgctggctgggtactgtatttaatgaagtagagaatagcacttgcaaaaatacagtcttggtacctagagactgtcatgcagatagtataatttggtatatgtgctaatgcattgagtagaggattattttaacacactattttgcttttgtattttagttaaaataatcgatggggatgtgtagcccccccgtgtgaggatgacatcaccacatttctagtttcatggagctcaagatgtcttgtgtctgtgtggctagatggcctctgcttggtaatcttatttttaggcctaaaattcccacttaaatccaaagtaaaaatggttatactgaagcataaaccttgcctgtgtaattttaaaaaattaatagagctgtgcaaaccctgttatttttgtaaaaaaaaaaaaaa

SEQ ID NO: 2804 - DNA, 4704 bp, Homo sapien
ttcatgattttatatagagaatcttggaaaaaattattattaatctttgtaagtcacttgatcgttaatattctaggagaaatttctttttaaaggaacactgataaatcatttataaaataattttctcttggttgcattcacttttatgtttttctttgattgtatggaggatatttatagggcagaaaaaggggaaaatatccctgtcgttagtaaatataatgatagctattgattaaggtaaatattttgccattttattggtacatatagggtatatttacttctggcacatgggaagagaaatcagatgaaatttcctttgctgacttcaagttctcagtcactcatcattatcttgtacaagagtccactgataaagaaggaaaggatgagttattagaggatgttgttccacaatctatgcaagatttgctgggtatgaataatgactttcctccaagagcacattgcctggtaagatggtatgggctacgtgagttcatggtgattgcccctgctgcacacagtgacgctgttctcagcgaatctaagtgcaaccttcttctgagttctgtttctattgccttgggaaacactggctgtcaggtgccactctttgtgcaaattcaccacaaatggcgaagaatgtatgtaggagaatgtcaaggtcctggtgtacgaactgatttcgaaatggttcatcttagaaaagtgccaaatcagtacactcacttatcaggtctgctggatatcttcaaatcaaagattggatgtcctttaactccattgcctccagttagtattgctattcgatttacctatgtacttcaagattggcagcagtatttttggcctcagcaacctccagacatagatgcccttgtaggaggagaagttggaggcttggagtttggcaagttaccatttggtgcctgcgaagatcctattagtgaactccatttagctactacatggcctcatctgaccgaagggatcattgtggataatgatgtttattctgatttggatcctattcaagctccacattggtctgttagagttcgaaaagctgagaatcctcagtgtttgctaggtgattttgtcactgaattttttaaaatttgccgtcgaaaggagtcaactgatgagattcttggacgatctgcatttgaggaagaaggcaaagaaactgctgatataactcatgctttgtcaaaattgacagagccggcatcagttccaattcataaattatcagtttcaaatatggtacacactgcaaagaagaaaatccgaaaacacagaggtgtagaggagtcaccgctaaataatgatgttcttaatactattctcctgttcttattccctgatgctgtttctgagaaaccattagatggaactacttcaacagataataataatcctccatcagagagtgaagactataatctctacaatcagttcaagtctgcaccatctgacagtttaacatacaaactggctttgtgtctctgtatgatcaatttttaccatggagggttgaaaggagtggcacacctctggcaggaatttgttcttgaaatgcgtttccgatgggaaaacaactttctgattccaggattagcaagtggacccccagatctgaggtgttgtttactgcatcagaaactacagatgttaaattgttgtattgaaagaaagaaggcacgtgatgaggggaaaaagacaagtgcttcagatgtcactaatatatatccaggggatgctggaaaagcaggagaccagttggtgccagataatctaaaagaaacagataaggaaaagggagaggtaggaaaatcttgggattcctggagtgacagcgaagaagaattttttgaatgcctaagtgatactgaagaacttaaaggaaatggacaagagagtggcaagaaaggaggacctaaggagatggcaaatttaaggccggaaggacggctctatcagcatgggaaacttacactgctgcataatggagaacctctctacattccagtaacccaggaaccagcacctatgacagaagatctgctagaagagcagtctgaagttttagctaaattaggtacatcggcagagggggctcaccttcgagcacgcatgcagagtgcctgtctgctctcagatatggagtcttttaaggcagctaatccaggttgctccctggaagattttgtgaggtggtattcaccccgggattatattgaagaggaggtgattgatgaaaagggcaatgtggtgctgaaaggagaactgagtgcccggatgaagattccaagcaatatgtgggtagaagcctgggaaacagctaagccaattcctgctagaaggcaaaggagactctttgatgatacacgggaagcagaaaaggtgctgcactatctggcaatccagaaacctgcagaccttgctcggcacctgttaccttgtgtgattcatgcagctgtactcaaggtaaaggaagaagaaagtctcgaaaacatttcttcagttaagaagatcataaagcagataatatcccattccagtaaagttttgcacttccccaatccagaagacaagaaattggaagaaatcattcaccagattactaatgtggaagctctcattgccagagctcggtcactaaaagccaagtttggaactgagaaatgtgaacaggaggaggaaaaggaagatcttgaaaggtttgtgagttgcctgctggagcagcctgaagtgttagtcaccggtgcaggaagaggacatgctggcaggatcattcacaagctgtttgtgaatgcccagagggctgcagctatgactccaccagaggaggaattgaagagaatgggctccccagaggaaagaaggcagaactccgtgtcagacttcccaccccctgctggccgggaattcattttgcgcaccactgtgccgcgccctgctccctactccaaagctctgcctcagcggatgtacagtgttctcaccaaagaggactttagacttgcaggtgccttttcatcagatacttccttcttctgattcttctagcattactcgttggtggcttcagagacagtgctgcctcctcctgagggagggaaggtaccagggagaacctgggaggtcctggagagggccctgtccagttgggtgatcaggaatcaaaccagcatcggaaagacttcccagcaccaagcttgagctgtgtcgtttcgtggagggggcagcgaggatgggcttgagctgttgagagatttctgccctagagatggcctttgtatatgggggggtggtggggggacacaaacacatcagacactccgtcctcacactggcaggacggtgttcatcgcattctcttctgtgaccagcctctaggctagcggctgcattcgtggtctgtgcaaacacttcgtggttctatatatcagcagcaagtgtgcaaaataaaggacctgttaactcagatttctggatattttggtggtagcttctagtcccagaatctgtgtttttaaaatactacatgacattctgtctattcaatcacctggtggtcatctttcttgtactaattaactgttgatgagcattttggatattctaggagaaagcctataatttcacatagtttctctttttcatgtaactgtaacctaaatgtattacttctgataaaactatatatcaaatgtcactgcaaattagttttatatctgtcatgtgagatttgtcttacttatttttcttttggttgccatggaagttatggccctgaaaatcgtctccctccccttctcttgctgtacagcatgcgttctctttttgtggttgctggctgggtactgtatttaatgaagtagagaatagcacttgcaaaaatacagtcttggtacctagagactgtcatgcagatagtataatttggtatatgtgctaatgcattgagtagaggattattttaacacactattttgcttttgtattttagttaaaataatcgatggggatgtgtagcccccccgtgtgaggatgacatcaccacatttctagtttcatggagctcaagatgtcttgtgtctgtgtggctagatggcctctgcttggtaatcttatttttaggcctaaaattcccacttaaatccaaagtaaaaatggttatactgaagcataaaccttgcctgtgtaattttaaaaaattaatagagctgtgcaaaccctgttatttttgtaaaaaaaaaaaaaaatacatatctatatataatatgtgtgtgtgtgtgacatatgcacacgtctctgtgtatgtgaagtaggggaggccctgggggatgacctcccagcctttatgatgcttttctctatgctgctggacttcattcttactggtccacgcagatgcaggcggcctgaggccagtgctgtaccaagtagaagacggttcctaaggacagagtttgtctgttttctaacaaagaaaaattctacaaaggagaggttgggcgttacaaaggcattgtgaatctaataaaaggaaagtgtcgctttctggggcgttttctttcattttctcccgctgaggcatttcagtctaatttcatgtggtttagtgctgtctcagctctaatgtttgcagcctgttgagcctaacaaggcaggggtctccagaacatt

SEQ ID NO: 2805 - protein, 875 aa, Homo sapien
MNNDFPPRAHCLVRWYGLREFMVIAPAAHSDAVLSESKCNLLLSSVSIALGNTGCQVPLFVQIHHKWRRMYVGECQGPGVRTDFEMVHLRKVPNQYTHLSGLLDIFKSKIGCPLTPLPPVSIAIRFTYVLQDWQQYFWPQQPPDIDALVGGEVGGLEFGKLPFGACEDPISELHLATTWPHLTEGIIVDNDVYSDLDPIQAPHWSVRVRKAENPQCLLGDFVTEFFKICRRKESTDEILGRSAFEEEGKETADITHALSKLTEPASVPIHKLSVSNMVHTAKKKIRKHRGVEESPLNNDVLNTILLFLFPDAVSEKPLDGTTSTDNNNPPSESEDYNLYNQFKSAPSDSLTYKLALCLCMINFYHGGLKGVAHLWQEFVLEMRFRWENNFLIPGLASGPPDLRCCLLHQKLQMLNCCIERKKARDEGKKTSASDVTNIYPGDAGKAGDQLVPDNLKETDKEKGEVGKSWDSWSDSEEEFFECLSDTEELKGNGQESGKKGGPKEMANLRPEGRLYQHGKLTLLHNGEPLYIPVTQEPAPMTEDLLEEQSEVLAKLGTSAEGAHLRARMQSACLLSDMESFKAANPGCSLEDFVRWYSPRDYIEEEVIDEKGNVVLKGELSARMKIPSNMWVEAWETAKPIPARRQRRLFDDTREAEKVLHYLAIQKPADLARHLLPCVIHAAVLKVKEEESLENISSVKKIIKQIISHSSKVLHFPNPEDKKLEEIIHQITNVEALIARARSLKAKFGTEKCEQEEEKEDLERFVSCLLEQPEVLVTGAGRGHAGRIIHKLFVNAQRAAAMTPPEEELKRMGSPEERRQNSVSDFPPPAGREFILRTTVPRPAPYSKALPQRMYSVLTKEDFRLAGAFSSDTSFF

SEQ ID NO: 2806 - DNA, 2760 bp, Homo sapien
ttcatattaaaaaaatagctggtaaatctttctaggtagtaacttatccaaacaatactttgagtatcatattttgtgaatgacttgcttaaactgggaaactgaatattctttttaaatcatataattcctgtattaaatgtgaaacacacagtctccaaagtcacctgattctctgtggaaaatgaaaggcattgaaggaaaccagatacattaatacttagttttggttgaaagtgcaacattactgtacttagaaggggcttggtttatttttagatatttaagctatcattaattttagaccaatggctaataataagagagatttttggttgctcatttatggagagacaaagaacagcatggcataaacaaacatcccagaaataaatgaaaagttttaagtgataaaattgtgttttctatgaaccagtgttgtacatgaaccaacattgtgtttcttagctctgacctgtacagtgaggtacctgtcaggacccctagtcttggcactggaaatgacaaagttctcctattactaaattctcatgccttccttttctgacttagtagattgaaattggtaggtactaatgatttatgtttgataaacttaagttctgctgatatcctgttactggtaattctggtaccaaaatttcaaacggtttgattattagtagcattttgagtacctaggtgcatataatacagttagcagacccttacagagtcaaaagagattttggaatctggtgatactgttgtttattacactagcctattacattttctttctttataataactgtttatgtgagtttcattgaaaatcgtggctctattgctttattcatggtttccacaactctttttgtaacaccttaattttctctcttaggtattttcctgttaaataagatatcaaaagcatcaatcacaagacagagaaaacgtattaggaaaaacttgtattagtatattctaaactgaaatggaaaaactcattattcatattttaataaataaaactcccaaatgatcttgctaaattatcccactatttagaagtagaaaataagagaagagtgctttcaaggaaatttgtcatattctcccttctatctagaagttgacaatgaattgcaataaaactaagaaataactgaatgctgaaaaataccatgaattaatgttatggcttctttatttttgtatatccattcccacaaaattgaatttaagattattaatgaaaattctatattaagtaataatgcttgtattagtaatgggcaaagaagtctttctttgttacattaaccgttagtaaaagatgtactttgacatttctgatgtaaaacctatatgtaaatattgtaatttaaatatgattggacagctgttaagttttggggagggaagcagatgccagcgttctctgctgaaaagacaagatggcgcttgacggaccacagcagatggagctggaggaggaaaaggcaggcagtggactctgccagtattatctgtccaagattgaagaactccagggtcaactgcaatataaattggatgggggaaagccacaaggaacagttctgaactccaggtgcatttgcagctgattttgaatgataagacccaaaacctctggaggcggcaggtgcacgggaatgaactaaatgttaaagtgtgcctattacaggaggagctacagctgctgcaggaataggactcctgtgtcagggaagtagtccaggccatgggtaagaagaaagtgttggtcaaggtgcatctcaaggacaagtttgtcatagatgtggacaaaaatatcagcatcagtgatgtgacacccagttccttggtggttctaagaaatgacagctacactttgcacaagatcctacccaacaaggtggactcattggtgtcactgatgatggtgaagaaagtaccagattcagcttatgaaatgattggtagactggataggcagatcaagaagatcaaagaagtgatcgacctgcctgctaagcatcccgagctcttcaaagcactgggcattgcacagcccaagggaatgctgcttggaagagactgttggcctgggctctggctcatcatagggactgtgtacctttattcatgtctctggctctgaattggtacagaaattcattggggaatttctgtgatggcagagaaaatgctcatctgtcatcttcatggatgaaattgactcttttggctcctcagagctggagggggatgctggagggaacagtgaagtgcagcagatgatgcttcgagggtggctttgaggccaccaagagtatcacggtttatcacggctgctaatacgattgatatcctggactcggcactgctttgcccagggcacattgacagaaaaattgaattcccaacctgcaatgagtaggcctggctggtcactttgaagattcattctcagaaatgaacctgacccaggggatcaacctgagaaaaattgctgagcttatgccaggagcatcaggctgaagtgaagggcatgtgcacagaaaccggcatgtatgccctgagtagcgagtccatgtcactcagaaggactttgaggtagtccaaagtcctatctcatgccaaaggacagtgaggaaaaacatgtccatcaagaaactatggaattgagggcacatcctttgtgtgtatccctacaataaaactcagtgggacaagcaaaaaaaaaaaaaaaaa

SEQ ID NO: 2807 - protein, 132 aa, Homo sapien
MGKKKVLVKVHLKDKFVIDVDKNISISDVTPSSLVVLRNDSYTLHKILPNKVDSLVSLMMVKKVPDSAYEMIGRLDRQIKKIKEVIDLPAKHPELFKALGIAQPKGMLLGRDCWPGLWLIIGTVYLYSCLWL

SEQ ID NO: 2808 - DNA, 2066 bp, Homo sapien
tcttgccttccggcccggcgcccgatttccgccttccgacccagctgtgggctgcgccccacgccagcccgcgccccgcatggctgccgccggggccaggcctgtggagctgggcttcgccgagtcggcgccggcgtggcgactgcgcagcgagcagttccccagcaaggtgggcgggcggccggcatggctgggcgcggccgggctgccggggccccaggccctggcctgcgagctgtgcggccgcccgctctccttcctgctgcaggtgtatgcgccgctgcctggccgcccggacgccttccaccgctgcatcttcctcttctgctgccgcgagcagccgtgctgtgccggcctgcgagtttttaggaatcaactacccaggaaaaacgatttttactcatatgagccaccttctgagaatcctcccccagaaacaggagaatcagtgtgtctccagcttaagtctggtgctcatctctgcagggtttgtggctgtttaggccccaaaacgtgctccagatgccacaaagcatattactgcagcaaggagcatcagaccctagactggagattgggacataagcaggcttgtgcacaaccagatcatctggaccatataattccagaccacaacttcctttttccagaatttgaaattgtaatagaaacagaagatgagattatgcctgaggttgtggaaaaggaagattactcagagattatagggagcatgggtaagcagtttcaggacttcattcattaagtggttaaacataatacttggaagaaagggctccatgtgcctagaagagaggtactgagaggaagactcactttggaggctgtagcatacaattttcagatattgcctcaggtaaaaatatacttcctggactttgttttctgacacataagaggtgtgttctgctccctgtaaagacaagggtgggtatccagatggtcccatgagtagggctgcacaagatgctggaggcttggtaagttcctctgggtcgcagatcggtttctcgggtcgggatagtgtgagtgcctagcacagtgtcgggcacgcagaagggccccttaaaagtttctctttcatctggccagttttagatacacaattttgtcagtttacttacagtgcatactcttgggtagtacttgtgctgaccaagtatcttagaggcttattttattatagtagccaacatttatccagcacttaccttatataaagggctgtttgtgcatgagctcattaaaatcgtgacagcagaccaatgagtgagaaactgccccattttgaaggtgaggaaattgaggttctgggtataactttctttggtcacataatattaaattttacaatttgagccttgagccatacacaaaaccaccacaaaattagatttatagactcaaaatgaaaacatcagcttactggtttgtagttcataccagtcatacattccaaaacatgttttgagtcttactctgtgcctgaccttgtgcttgataacagggatataatgggaagcaacactccagtggtcagatgctcacagtcttatggaggagcccaaataatatctggggaagttaaagtccatataatgactgataagagtacaatacaggtgccatgggaacacgtgacatcactgaagactgcctggaaggggccgcgcgtgtgttcatgcctatacgataaacatgatacataatgaaaatgcttatctttaggagaaaggagagcctagagtagcaggatcaaggatgaaagctggacttcaaatatgccttgttagtgtaaatgtgactgtggaactgtatgagtattttaagattatggagtaaagtaagttttaaaaagcagtccctaatcatcaaaagtaaaaaactcttgatgtagtcatataaccacactaagaactcttccaggtgacttcaaaacataggacagtacatctctagtagaatatgccctgagaatgaaaagaatgtaacagtgttagtattttgaataaacatgttattactaaaaaaaaaaaaaaaaaaaa

SEQ ID NO: 2809 - protein, 228 aa, Homo sapien
MAAAGARPVELGFAESAPAWRLRSEQFPSKVGGRPAWLGAAGLPGPQALACELCGRPLSFLLQVYAPLPGRPDAFHRCIFLFCCREQPCCAGLRVFRNQLPRKNDFYSYEPPSENPPPETGESVCLQLKSGAHLCRVCGCLGPKTCSRCHKAYYCSKEHQTLDWRLGHKQACAQPDHLDHIIPDHNFLFPEFEIVIETEDEIMPEVVEKEDYSEIIGSMGKQFQDFIH

SEQ ID NO: 2810 - DNA, 1442 bp, Homo sapien
ggccccagctgaagaatgagaccatctggtacgtgcgcttcctgtgggagtgacccgccgcccccgacccaggtgcccagctctcggaatgactgtggctccactgtccctgacaaccccttcgtccggaccctcccccacacaactatgtctggtcaccagctccctcctgctggcacccagagacccggacccgcagggcctgcctggttcctggaagtcttcccagtcttcccagccagcccgggccctggggagccctgggcacagcagcggccgaggggatgtcctgctccaatacccgcactgctctggagtttgccctctttcccaaggagatgctgctggggagctggtatgggtggggtctttccctttacagacggggcagatgccaggactcagcccatcctgaggaggacacgtgtcctcatggagagggtgctccggcccaggcgggggagtcggtgcccagtcagcagctctgccaccatcctgctgggaactgggggggcctctattgggttataggcaaggccttttctctggcatggaattgttaattttctgacacgtctagatgtgaaatttctgaaaatgttgaagcagagaaacattcacacacaaaaagcaacatagtcatgtgggtccagatggcctcagtcctagatgttggcaccctttgctgtgtctcctcagagtatcctgttccgcctcctgccacctggacctccctcagtggatgtcttccctcccccgaccccagcctgtcagtccgagcacagtgcaggtttggctctgacttgggcctttggctgcagtgggggtggatttcagagcctctcatggcagcatctaagtgaccagagctgggatgagagaggggaaggggcaatgtgagtggcgctatgggacgggccagccctgctcctgagccagccccgccctctgccccctggccctgggctctgtgctagggatggtgaagaatgggggcgtgccagcctggcaggagtgggaagcaacacgcaggggtcccggacctctccagccttgccctcacgcttatccgagctcccagtgtggttagcacagagctcacccaccttgcctggctcccagctggggcctgtcctcactggtgctccaggggaagaaacgacagcctcacttctgtatggactgctgatgtggcctgccatcctgttcagcgggcattgtctttggagcagcaggagactaggatgcctctcactcacatgccagttcctggctggccagctgctcagggctcaggctggggcctcccattgacatcctccccctacactccctctttgagcctccgtcgcccctcctgttgggtaagggtgttgagtgtgacttgtgctgaaaacctggttcatatataataaataatggtgatgaaaaaaaaaaaaaaa

SEQ ID NO: 2811 - protein, 92 aa, Homo sapien [sequence omitted]

SEQ ID NO: 2812 - DNA, 1921 bp, Homo sapien
ggcacgagggggcggccgacgacgttcgtcatttagtgcgggagggatcctgaaccgcgcggccgaaccctccggtgtcccgacccaggctaagcttgagcatggctgagcaggagcccacagccgagcagctggcccagattgcagcggagaacgaggaggatgagcactcggtcaactacaagcccccggcccagaagagcatccaggagatccaggagctggacaaggacgacgagagcctgcgaaagtacaaggaggccctgctgggccgcgtggccgtttccgcagaccccaacgtccccaacgtcgtggtgactggcctgaccctggtgtgcagctcggccccgggccccctggagctggacctgacgggcgacctggagagcttcaagaagcagtcgtttgtgctgaaggagggtgtggagtaccggataaaaatctctttccgggttaaccgagagatagtgtccggcatgaagtacatccagcatacgtacaggaaaggcgtcaagattgacaagactgactacatggtaggcagctatgggccccgggccgaggagtacgagttcctgacccccgtggaggaggcacccaagggtatgctggcccggggcagctacagcatcaagtcccgcttcacagacgacgacaagaccgaccacctgtcctgggagtggaatctcaccatcaagaaggactggaaggactgagcccagccagaggcgggcagggcagactgacggacggacgacggacaggcggatgtgtcccccccagcccctcccctccccataccaaagtgctgacaggccctccgtgcccctcccaccctggtccgcctccctggcctggctcaaccgagtgcctccgacccccctcctcagccctcccccacccacaggcccagcctcctcggtctcctgtctcgttgctgcttctgcctgtgctgtgggggagagaggccgcagccaggcctctgctgccctttctgtgccccccaggttctatctccccgtcacacccgaggcctggcttcaggagggagcggagcagccattctccaggccccgtggttgcccctggacgtgtgcgtctgctgctccggggtggagctggggtgtgggatgcacggcctcgtgggggccgggccgtcctccagccccgctgctccctggccagcccccttgtcgctgtcggtcccgtctaaccatgatgccttaacatgtggagtgtaccgtggggcctcactagcctctaactccctgtgtctgcatgagcatgtggcctccccgtcccttccccggtggcgaacccagtgacccagggacacgtggggtgtgctgctgctgctccccagcccaccagtgcctggccagcctgcccccttccctggacagggctgtggagatggctccggcggcttggggaaagccaaattgccaaaactcaagtcacctcagtaccatccaggaggctgggtattgtcctgcctctgccttttctgtctcagcgggcagtgcccagagcccacacccccccaagagccctcgatggacagcctcacccaccccacctgggcccagccaggagccccgcctggccatcagtatttattgcctccgtccgtgccgtccctgggccactggcctggcgcctgttcccccaggctctcagtgccaccacccccggcaggccttccctgacccagccaggaacaaacaagggaccaagtgcacacattgctgagagccgtctcctgtgcctcccccgccccatccccggtcttcgtgttgtgtctgccaggctcaggcagaggcgcctgtccctgcttcttttctgaccgggaaataaatgcccctgaaggaaaaaaaaaaaaaaaaaaaaaaaaaaaaaaaaaaaaaaaaaaaaaaaaaaa

SEQ ID NO: 2813 - protein, 204 aa, Homo sapien
MAEQEPTAEQLAQIAAENEEDEHSVNYKPPAQKSIQEIQELDKDDESLRKYKEALLGRVAVSADPNVPNVVVTGLTLVCSSAPGPLELDLTGDLESFKKQSFVLKEGVEYRIKISFRVNREIVSGMKYIQHTYRKGVKIDKTDYMVGSYGPRAEEYEFLTPVEEAPKGMLARGSYSIKSRFTDDDKTDHLSWEWNLTIKKDWKD

SEQ ID NO: 2814 - DNA, 7360 bp, Homo sapien
gcggccgccgccaggcagcagaggcgactgcggacagccggcggggaccgggaaagaggaggcctggcgcctccggcagaggggcgaggaccgagcgcccaaggctgggagagacgccggcgctgagcttcccagcgccgcctcacctcgcttttcgaactccgcgacccgagcgcaaggcttaagcaggtaaagcagtcactgtgaagaaaataacattttaagaaacttttctgtcacaattgatagaggaaaagccagtagagaagtacatcttcttgtgtgtgtgtctcatcgtgccactttttgtaactcagcttagtaatgaagccaccattatgtcctcagtcagtgaagtaaatgtggatataaaagatttcctaatgagcattaatttggagcagtatctcttacatttccatgagtctggttttactactgtgaaggactgtgcagcaataaatgacagcctgctgcagaaaattggaatatcacctacaggtcaccgtaggaggatacttaaacagttacagataatcttgtcaaaaatgcaagatattccaatatatgcaaatgttcataaaactaagaagaatgatgacccttcaaaggattaccatgttccatcttctgatcagaatatctgcatagaactttccaattctggtagtgttcagacatctagcccaccgcagttggagactgttagaaaaaatcttgaagacagtgatgcaagtgtggaaagaagccagtatcctcaatcagatgataagctgtctcctcctaaacgcgacttccccactgcagaggaaccacacctgaatttgggttctttgaatgattctttatttggtagtgacaatattaaaatagaatcattgattacaaagaagactgtggatcacacagttgaagaacaacaaacagaaaaagttaaattgatcacagaaaatctcagtaagctccctaatgcagactctgaatgcctttcttttgttggctgttcaacatcaggaacaaattctggaaatggaacaaatggtttattagaaggatcaccaccatccccattctttaagtttcaaggagaaatgattgtaaatgacttgtatgttccatcatcaccaatcctagcacctgtgagaagtcgtagcaagttggtttcaagaccatctcgatcttttctgctaagacatcgacctgtaccagagattccagggtcaacaaaaggagtttctgggagctatttccgtgaaagaagaaatgttgctacctcaactgaaaaatctgtggcatggcaaaattcaaatgaggagaattcatcttccatctttccttatggagagacctttctcttccagagactagaaaattccaagaagcgatctataaagaatgaatttttgacccagggagaagcactcaaaggggaagcagctactgcaacaaactcttttatcatcaaatcaagcatatacgataacagaaaggagaaaataagcgaggacaaggtggaagatatttggatacctcgagaggacaaaaacaattttttgatagacactgcttctgaatcagaatactcaacagtagaagaatgctttcagagtttaagaagaaaaaattcaaaggcatctaaatctaggactcaaaaagccttgattttggactccgttaataggcacagttatccgttaagctcaacaagtggaaatgctgattcatcagccgtttcttcacaggcaatatctccctatgcctgcttttatggagcatctgcaaagaaggttaaatcaggatggctggataaactctctcctcaaggaaaacgcatgtttcaaaagagatgggtgaaatttgatggccttagcatttcttactacaataatgagaaggagatgtattcgaaaggaataattcccctttctgctatatcaacagtacgagttcaaggagacaacaaatttgaagttgttacaacacaaagaacttttgtttttagagtagaaaaagaagaggagagaaatgactggatcagcatactattaaatgcactgaaatcacaatcccttacctcgcagtctcaagctgttgttacacctgagaaatgtggatatcttgaattgagaggctataaggcaaaaatttttactgtgttaagtggaaacagtgtgtggctttgcaaaaacgaacaggattttaagagtggacttggtattaccataattcctatgaatgtagcaaatgtaaagcaagtggaccgaactgtgaaacaatcttttgaaataatcactccctacaggagtttcagctttacagccgagactgaaaaggagaaacaagactggattgaagctgtgcagcaatcaatagcagaaactctctctgattatgaagtagctgagaagatttggttcaatgaatccaacaggagctgtgcagattgtaaagccccagatcctgactgggcatccatcaatctctgtgttgtcatctgtaagaagtgtgcaggacagcatagatctttaggaccaaaagattccaaggttagaagtctaaaaatggatgctagcatttggagcaatgaactcatcgagctttttattgtcattggaaacaaaagagcaaatgacttttgggctggtaatcttcaaaaggatgaagaattacatatggactcaccagtagaaaagagaaaaaactttattactcagaaatataaagaaggaaaattcagaaaaactcttttggcatctctcaccaaagaagaattaaataaggctctatgtgctgctgtagtgaaaccggatgttctagaaacaatggctttgctgttcagtggagcagatgtcatgtgtgccaccggagaccccgtgcatagcaccccctatctgctagccaagaaagctgggcaaagtctgcaaatggaatttctctaccataacaaattctcagatttccctcaacatgatattcattccgagggtgtattaagtcaagagtcttcccagtccacattcctctgtgactttttatatcaagctccttctgctgcttctaaactctcttcagagaaaaaactgcttgaagagacaaataaaaaatggtgtgttttggaaggaggcttcttgagttactatgaaaatgataagtctaccacacctaatggcaccattaatatcaatgaagttatctgcctggctatacacaaagaggacttctatttaaatactgggcccatctttatctttgagatctacttaccctccgaacgtgtgtttttatttggagctgaaacatctcaagctcaaagaaaatggacagaggcaatagccaagcattttgttcccttatttgctgaaaacttaacagaagctgactatgatttgattggtcaactcttctacaaagactgccatgccctggatcagtggagaaaaggctggtttgctatggacaaatccagcttgcatttttgccttcaaatgcaagaagttcagggagatagaatgcacttaagaagactgcaagagctaacaatcagcacaatggttcaaaatggggaaaaactggatgttttactcttggtagaaaaagggagaacattatacatccatgggcataccaagttggatttcacagtctggcatactgcaattgaaaaagcagcaggtacagatggtaatgctttacaagatcagcagctcagcaaaaatgacgttcccattatagtgaacagctgtatagcatttgttacacagtatggtttaggatgcaaatatatctatcaaaagaatggtgatcctttgcatataagtgaactcctggagagtttcaaaaaggatgcaagaagctttaaattgagggctggaaaacatcagcttgaagatgtgacggctgtgttgaaaagttttctctctgacattgatgatgcactgcttactaaggagctctacccatattggatctctgctttagatacgcaagatgacaaggaaagaattaaaaaatatggagcatttatacgttctcttccaggggtcaaccgagcaacactagcagctatcattgaacacctgtatagggttcagaaatgctcagaaatcaatcacatgaatgcccataatttggccttggtcttttcatcctgtttgtttcaaacgaagggacaaactagtgaagaagtgaatgtaattgaggacctaattaataattatgtagaaatatttgaggttaaagaagatcaagtcaaacaaatggacatagaaaatagctttattaccaagtggaaagacacccaagtttcccaggctggagatttgttaattgaagtatatgtagaaaggaaggaacccgactgtagtattataattcggatatctcctgtgatggaagcagaagaattaactaatgatatattagcgataaaaaatattattcctacaaaaggtgatatttgggccacatttgaagtcattgaaaatgaagagctagagcgtcctcttcactacaaggaaaatgtactggagcaggtgcttcggtggagttcattagctgaacctggctctgcttacctggtggtgaagagattcttaaccgctgacacaattaaacactgcagtgaccggagtacactgggaagcatcaaagaaggaatcttgaaaatcaaagaagaaccatccaaaatactatctggaaataagtttcaagaccggtattttgttttacgagatgggtttctctttctttacaaggatgtgaagagtagtaaacatgacaagatgttttctctcagttccatgaagttttatcgtggagtgaaaaagaaaatgaagcctccaacaagctggggattgaccgcatattctgagaaacatcactggcacctgtgttgtgatagttcacgaactcagacggagtggatgaccagtatctttattgcccagcatgaatatgatatatggccaccagctggaaaggaacgaaaacgttcaataaccaaaaatcccaaaattggaggtttgcctctgattcctatacagcatgaggggaatgcaaccttggcccggaaaaatattgagagtgcaagagcagaacttgaaaggctgcggctcagtgaaaagtgtgataaagagtccgtggactctagcttaaaggagagagcttccatggtggcccactgcctggagcacaaggacgataaacttcgaaatcgaccccgaaaacatcggagtttcaactgcctggaggacacagagcctgaagccccacttgggcaaccaaaaggccataaaggcctaaagacattgaggaagactgaggacaggaatagcaaagctactttggactctgatcataagttaccatcaagggtaattgaagaacttaatgtggttctacaacggtcaagaacccttccaaaagaattacaggatgagcagattttgaagtaggaaataaaatgaattgctccccagattatttttttaatattgtatgcaatctttatgtgtaactccaaaactgaactataagataattcataagaatttgcctattgataggcaaatttgtctatgcttaggcatttaaggagcatttaaaaatatgtatatatgtgactgaatgtaagattaactttattttggtctgaacaaaccttgtaaagttccattgtattaacgtgtgtaagaagacattgggttacttaggtggtcagtccttttaaagtagttgtctgttaagtggtataatttatgagcagaaatctcaaactgtactgtattgtataaaatgctgtgtttaaatgaagcctaagaaactatctgtaacatattttgcactttgagaaaccttgtatattaaattaccatatgtttttaggtttacagaagttctaccttagggaaaagaaagggaagtaaattgaaaaaggggggagaatttattgtagtggctgcctaaaaaccactggagtttttaaaagaagcaaggagttaaatgtcctgcaaaacaaggaagtgagctaagattcattctagttcactaatgaccagaacttgtcaatgagaaaccacttgttaagaaaaagtccagtgtttatttctcaagagtaatattcggccaacagatgtaaataatagcactagccactcttattaatatttatagtgttagaaaaccagccacattacagattcactacgtttgagctcattgttggtggctgctaagaggaaacttacactgcattggagaggttgtgtacacaggacctggcctggatgctgattgcactgtcattgtatgcaagcattttgtcttttttcagaatttctgactatacttttggtacgaacaaaattcatcaccacagggtcctgttgttttgtttgatttttagatttttttaaattattattaaggttgtaatgtttttctccgagttgtcagaaataactggaagaatacaatatatggccattatggagccaggggctagttggtggtttactatacatttgggggctacctggtcacatttaatctaggtttttttttctttttttaagtaaaggtgtggtctcttccctgtacttatgaataaggacaaagccctatttttgtttccacataaagatcagctactgaattggtgaatttcctgacagacaatgctatctaaccatagttcatgttaggggaagcatttttccatcagtttctttaaaattggattgtctggtgagttttgatattaaacattatgtagctaagttttttttttttagcatttcttttttatttttcaatctatattcacaggcccatacttcagtcagtccaatcatagtacagtgatgtggtggtagatgctatgaatttcttcattgtaaaatacggatcatttgtattttggggtgataaaatagttcaccatgggtatgagatatttattctttaaatcaaagtaaattagaatttttaaaaagcacaaaactgcaggacagtttatgaaataggtggcactattagggaatcttcctttaaagcaagaaatcatgttatttagaaagaaaaactaatcttaaacatactatttctaataaatatttatatttttatgaaataaagaggtatgtggaaattaatatttggtgatgttggacagtggaaaagtatctagagtttttacctgccttatctgaattcttcttgaaacttgagcttaaactctaatagctgtttccctttctattctgaacaactgtctccatttttcaagtgtgagagataagggctaatgatgacatctcatttattttgagtaaacattaaaattgttttacaagtctacttg

SEQ ID NO: 2815 - protein, 1704 aa, Homo sapien
MSSVSEVNVDIKDFLMSINLEQYLLHFHESGFTTVKDCAAINDSLLQKIGISPTGHRRRILKQLQIILSKMQDIPIYANVHKTKKNDDPSKDYHVPSSDQNICIELSNSGSVQTSSPPQLETVRKNLEDSDASVERSQYPQSDDKLSPPKRDFPTAEEPHLNLGSLNDSLFGSDNIKIESLITKKTVDHTVEEQQTEKVKLITENLSKLPNADSECLSFVGCSTSGTNSGNGTNGLLEGSPPSPFFKFQGEMIVNDLYVPSSPILAPVRSRSKLVSRPSRSFLLRHRPVPEIPGSTKGVSGSYFRERRNVATSTEKSVAWQNSNEENSSSIFPYGETFLFQRLENSKKRSIKNEFLTQGEALKGEAATATNSFIIKSSIYDNRKEKISEDKVEDIWIPREDKNNFLIDTASESEYSTVEECFQSLRRKNSKASKSRTQKALILDSVNRHSYPLSSTSGNADSSAVSSQAISPYACFYGASAKKVKSGWLDKLSPQGKRMFQKRWVKFDGLSISYYNNEKEMYSKGIIPLSAISTVRVQGDNKFEVVTTQRTFVFRVEKEEERNDWISILLNALKSQSLTSQSQAVVTPEKCGYLELRGYKAKIFTVLSGNSVWLCKNEQDFKSGLGITIIPMNVANVKQVDRTVKQSFEIITPYRSFSFTAETEKEKQDWIEAVQQSIAETLSDYEVAEKIWFNESNRSCADCKAPDPDWASINLCVVICKKCAGQHRSLGPKDSKVRSLKMDASIWSNELIELFIVIGNKRANDFWAGNLQKDEELHMDSPVEKRKNFITQKYKEGKFRKTLLASLTKEELNKALCAAVVKPDVLETMALLFSGADVMCATGDPVHSTPYLLAKKAGQSLQMEFLYHNKFSDFPQHDIHSEGVLSQESSQSTFLCDFLYQAPSAASKLSSEKKLLEETNKKWCVLEGGFLSYYENDKSTTPNGTININEVICLAIHKEDFYLNTGPIFIFEIYLPSERVFLFGAETSQAQRKWTEAIAKHFVPLFAENLTEADYDLIGQLFYKDCHALDQWRKGWFAMDKSSLHFCLQMQEVQGDRMHLRRLQELTISTMVQNGEKLDVLLLVEKGRTLYIHGHTKLDFTVWHTAIEKAAGTDGNALQDQQLSKNDVPIIVNSCIAFVTQYGLGCKYIYQKNGDPLHISELLESFKKDARSFKLRAGKHQLEDVTAVLKSFLSDIDDALLTKELYPYWISALDTQDDKERIKKYGAFIRSLPGVNRATLAAIIEHLYRVQKCSEINHMNAHNLALVFSSCLFQTKGQTSEEVNVIEDLINNYVEIFEVKEDQVKQMDIENSFITKWKDTQVSQAGDLLIEVYVERKEPDCSIIIRISPVMEAEELTNDILAIKNIIPTKGDIWATFEVIENEELERPLHYKENVLEQVLRWSSLAEPGSAYLVVKRFLTADTIKHCSDRSTLGSIKEGILKIKEEPSKILSGNKFQDRYFVLRDGFLFLYKDVKSSKHDKMFSLSSMKFYRGVKKKMKPPTSWGLTAYSEKHHWHLCCDSSRTQTEWMTSIFIAQHEYDIWPPAGKERKRSITKNPKIGGLPLIPIQHEGNATLARKNIESARAELERLRLSEKCDKESVDSSLKERASMVAHCLEHKDDKLRNRPRKHRSFNCLEDTEPEAPLGQPKGHKGLKTLRKTEDRNSKATLDSDHKLPSRVIEELNVVLQRSRTLPKELQDEQILK

SEQ ID NO: 2816 - DNA, 3292 bp, Homo sapien
cggctgcgcactgggcgctctcgcccgagaagccgcagtctcgagagcgtcaacgaggtgtttcggtagtctctggccatcctttctgcgcacccggtgtcgctgggctgcaccccgggcggggacgtccgccgggcacgggagggggccaagatgccgatcaataaatcagagaagccagaaagctgcgataatgtgaaggttgttgttaggtgccggcccctcaatgagagagagaaatcaatgtgctacaaacaggctgtcagtgtggatgagatgaggggaactatcactgtacataagactgattcttccaatgaacctccaaagacatttacttttgatactgtttttggaccagagagtaaacaacttgatgtttataacttaactgcaagacctattattgattctgtacttgaaggctacaatgggactatttttgcatatggacaaaccggaacaggcaaaacttttaccatggaaggtgttcgagctattcctgaacttagaggaataattcccaattcatttgctcacatatttggtcatattgcaaaagcggagggtgatacaagatttttggttcgagtgtcttatttgggaatatataatgaagaagttcgtgaccttttgggcaaggatcagacacaaaggttagaggttatagaaagacctgatgtgggagtttatatcaaagatttatcagcttatgtggtaaataatgctgatgatatggatagaattatgacgctaggccacaaaaatcgttctgttggtgcaactaatatgaacgaacatagttcccgttcccatgccatctttacaattactatagaatgcagtgaaaaaggcattgatggtaacatgcatgtcaggatggggaagctccatcttgtagatcttgctggttcagaaagacaggcaaaaactggagctactggacagcgcctaaaggaagctacaaaaatcaatctttcactttccacccttggtaatgtaatttctgccttggttgatggaaaaagcactcatgtgccttatcgtaactctaaactgactcgtcttcttcaggattccttaggaggaaattcaaaaaccatgatgtgtgcaaatattgggccagcagattacaattatgatgaaactatcagtacattacggtatgccaatcgtgctaagaatattaaaaataaagctagaattaatgaagatccaaaggatgctttgctgcgtcagttccagaaagaaatagaagaactgaaaaagaagcttgaagaaggagaagaaatatcaggctctgatatcagtgggtcagaggaagatgatgatgaagagggtgaggttggagaagatggagagaaaaggaaaaaaagaagggatcaaacaggaaaaaagaaagtctccccagacaagatgattgaaatgcaagcaaaaattgatgaggagagaaaagcacttgaaacaaagctcgacatggaagaagaagaaagaaacaaggctagagctgaattagagaaacgggaaaaagatcttcttaaagcccaacaagagcatcagtctttgctggaaaaattatctgccctggaaaagaaggtaattgttggtggggttgacttgttggccaaagctgaggaacaagagaaacttcttgaagaatctaacatggaactggaagaaaggaggaaaagagcagagcaacttcgcagagaacttgaggaaaaagagcaagaacgcttggatattgaagaaaaatataccagtttgcaagaggaagcacagggaaagaccaagaagttaaagaaagtttggactatgctgatggctgcaaagtcagagatggctgatctccaacaagaacatcagagggaaattgaaggcctactggagaacattcggcaacttagccgggagcttcgacttcagatgcttattattgataactttatacctcgggattatcaggaaatgattgaaaactatgtccattggaatgaagacataggagaatggcagctaaaatgtgttgcttatacaggaaataacatgaggaagcaaaccccagtacctgataaaaaggagaaagatccctttgaggtggacctttctcacgtgtatcttgcctatactgaggagagtctgcgtcagtctttgatgaaactagaaagaccacgaacttcaaaggggaaagcaaggccaaagacagggagaagaaagcgttctgcaaagcctgaaactgtaattgactctttactgcagtaaatgttacagacttaaagtcacaataaaaattagtgatattctcatgcctggacaaaatctttaattaaaacagtgaagacttctctataatttcaattaatggaagttgtagatcaatgaataagactggaaataataatttgcttaagaacttttagtctacatatattaatataacattaaaattgtacaactggtgattgttcaaattgttgtactactactcttcaattgtactgtgcagggaagttgggggaacagttcatactatagagagttacagtttagatgtatgtgtaaatcgattagctatttatccaactactgtatatttaggtaactagaatttcaaagtagaaaaaaaaaaaactgtgtcctgttttgcacatagaaagaagcagatcagattgtcctatgttgcgctgttatatatgaatgtttggactgtacatctaaagaatgattccgtcctaacacccacccagcctgtttgaacacattctaattgtctaacatttgttgcattttaagtatgagatgactgatcttatgaatgttttgtagaaaatgttataatttaacagtctttgcgagtatacatgttttttaacaagttggaaatgtttcatctgaacctttcctaacttttttttgccagtttgagttcaaatcaaatacaccttaagttctggtttcatgttctcttgaaacattgaattgtacgtaaatataaaggatctactgttgcggaaaattaagaagctaaatactgctcagttatctttgcctgcgtgtatatttttaaaaattcactctgaagtgttatggatgcttttctttgagttctaaattttggtgggaattactttatgtctcccagttaagaagagtctccattttccagaaaatacagctaagcaagaaaaatatcttttaaatactttgcctttaaaacactttttattttgtttttctattttaaaaataaaatattattttctgaaaaaaaaaaagaaaaaaaaaaaaaaaa

SEQ ID NO: 2817 - protein, 702 aa, Homo sapien
MPINKSEKPESCDNVKVVVRCRPLNEREKSMCYKQAVSVDEMRGTITVHKTDSSNEPPKTFTFDTVFGPESKQLDVYNLTARPIIDSVLEGYNGTIFAYGQTGTGKTFTMEGVRAIPELRGIIPNSFAHIFGHIAKAEGDTRFLVRVSYLGIYNEEVRDLLGKDQTQRLEVIERPDVGVYIKDLSAYVVNNADDMDRIMTLGHKNRSVGATNMNEHSSRSHAIFTITIECSEKGIDGNMHVRMGKLHLVDLAGSERQAKTGATGQRLKEATKINLSLSTLGNVISALVDGKSTHVPYRNSKLTRLLQDSLGGNSKTMMCANIGPADYNYDETISTLRYANRAKNIKNKARINEDPKDALLRQFQKEIEELKKKLEEGEEISGSDISGSEEDDDEEGEVGEDGEKRKKRRDQTGKKKVSPDKMIEMQAKIDEERKALETKLDMEEEERNKARAELEKREKDLLKAQQEHQSLLEKLSALEKKVIVGGVDLLAKAEEQEKLLEESNMELEERRKRAEQLRRELEEKEQERLDIEEKYTSLQEEAQGKTKKLKKVWTMLMAAKSEMADLQQEHQREIEGLLENIRQLSRELRLQMLIIDNFIPRDYQEMIENYVHWNEDIGEWQLKCVAYTGNNMRKQTPVPDKKEKDPFEVDLSHVYLAYTEESLRQSLMKLERPRTSKGKARPKTGRRKRSAKPETVIDSLLQ

SEQ ID NO: 2818 - DNA, 468 bp, Homo sapien
gccccctcccctgactatcaaagcagcggccggctgttggggtccaccacgccttccacctgccccactgcttcttcgcttctctcttggaaagtccagtctctcctcggcttgcaatggaccccaactgctcctgcgccgctggtgtctcctgcacctgcgctggttcctgcaagtgcaaagagtgcaaatgcacctcctgcaagaagagctgctgctcctgctgccccgtgggctgtagcaagtgtgcccagggctgtgtttgcaaaggggcgtcagagaagtgcagctgctgcgactgatgccaggacaacctttctcccagatgtaaacagagagacatgtacaaacctggatttttttttataccaccttgacccatttgctacattccttttcctgtgaaatatgtgagtgataattaaacactttagacccaaaaaaaaaaaaaaaaaaaaaaaaaaaaaa

SEQ ID NO: 2819 - protein, 61 aa, Homo sapien
MDPNCSCAAGVSCTCAGSCKCKECKCTSCKKSCCSCCPVGCSKCAQGCVCKGASEKCSCCD

SEQ ID NO: 2820 - DNA, 1776 bp, Mus musculus
gcggagcgagaggctgagagagtcggagacactatccgcttccatccgtcgcgcagaccctgccggagccgctgccgctatggatgatcgagaggatctggtgtaccaggcgaagctggccgagcaggctgagcgatacgacgaaatggtggagtcaatgaagaaagtagcagggatggatgtggagctgacagttgaagaaagaaacctcctatctgttgcatataagaatgtgattggagctagaagagcctcctggagaataatcagcagcattgaacagaaagaagaaaacaagggaggagaagacaagctaaaaatgattcgggaatatcggcaaatggttgagactgagctaaagttaatctgttgtgacattctggatgtactggacaaacacctcattccagcagctaacactggcgagtccaaggttttctattataaaatgaaaggggactaccacaggtatctggcagaatttgccacaggaaacgacaggaaggaggctgcggagaacagcctagtggcttataaagctgctagtgatattgcaatgacagaacttccaccaacgcatcctattcgcttaggtcttgctctcaatttttccgtattctactacgaaattcttaattcccctgaccgtgcctgcaggttggcaaaagcagcttttgatgatgcaattgcagaactggatacgctgagtgaagaaagctataaggactctacacttatcatgcagttgttacgtgataatctgacactatggacttcagacatgcagggtgacggtgaagagcagaataaagaagcgctgcaggacgtggaagacgaaaatcagtgagacataagccaacaagagaaaccatctctgaccaccccctcctccccatcccaccctttggaaactccccattgtcactgagaaccaccaaatctgacttttacatttggtctcagaatttaggttcctgccctgttggttttttttttttttttttttaaacagttttcaaaagttcttaaaggcaagagtgaatttctgtggattttactggtcccagcttttaggttctttaagacactaacaggactacatagaggctttttcagcattactgtgtcgtctccgtgccagatgtggcaagatcaccattagcaaatggaaattacatttgaaagccattagacttataggtgatgcaagcatctaagagagaggttaatcacactatagaggcataagtggtatcagttttcatttttctaattgtttaaactgtgttttataccagtgtttgcaagtaattgggtgttagcttgagatggttaaaggtggtttggggagggacttcgttgtaatggttttgctgtaaaaaatgtttccaactccgctgaaatgttgctgaaaagcatggtgctggtaacagttcaacaatccgtggctgctcattcttgcctactttactctcccactgaagcaggttagcgttgaaggtggtatggaaaagcctgcatgcctgttcaattcttttgtttcttctccttccccctccccctacctccttcccctcactcctcccctccttcgctcgctcaacctcttttgttcagtatgtgtaacttgaagctaatttgtactactggatatctgactggagccacagatacagaatctgtattgttcttactgaaacacagcatggaattaacattaaacttaaataaaacaaacctaaattaaaaaaaaaaaaaaaaaaaaaaaaaaaaaaa

SEQ ID NO: 2821 - protein, 255 aa, Mus musculus
MDDREDLVYQAKLAEQAERYDEMVESMKKVAGMDVELTVEERNLLSVAYKNVIGARRASWRIISSIEQKEENKGGEDKLKMIREYRQMVETELKLICCDILDVLDKHLIPAANTGESKVFYYKMKGDYHRYLAEFATGNDRKEAAENSLVAYKAASDIAMTELPPTHPIRLGLALNFSVFYYEILNSPDRACRLAKAAFDDAIAELDTLSEESYKDSTLIMQLLRDNLTLWTSDMQGDGEEQNKEALQDVEDENQ

SEQ ID NO: 2822 - DNA, 2795 bp, Homo sapien; identical to SEQ ID NO: 339

SEQ ID NO: 2823 - protein, 900 aa, Homo sapien; identical to SEQ ID NO: 340

SEQ ID NO: 2824 - DNA, 2952 bp, Homo sapien
catgaagaaaaaaaaaattcaaaagatctacgaattcagggtaggtttcttgaaaatattaataagaaagtctgctagcagactaatacagaggatgattgaaataaacacaattagaaatgacaaagggaatgtaattaccactgaccccacagaaatagaaacaaccatcagaaactactgcaaacacttctgtgcatacaaactagaaaacttcaaagagatggataaattcctggacaaatacaccctcccacaactgagccaggaagaaattgatttgctgaacagaccaataacaagctccgaaattgaatcagtaataaataacctaccaatcaaaaaaagcccagaacatgatggattcccagccatattctactagaagtacaaagaagagctggtaccatttttacaggaactatttgaaaatattgaggaggaggaactcctccccaactcattctatgaggccaacatcatcttgataccaaaatctggcacacacacacacacacacacacacacacacacacacacacacacaaacttcaggccaatacccttgatgaacatcaatgcaaaaatcctcaacaaaatacgggcaaaccaaatccagcagcacatcaaaaagttaatccatcatgatcaagtatgcttcatccccaggatgcaaggttgcctcaacatacacgtcaattaatctgactcatcccataaacaaaactaaagataaaaaccatgtgattatctcaatatatgcagaaaaggctttcaataaaattcaaggcctctccatattaaaaactctaaaaaatctgggtattgaggaaacatagctcaaagtgatgagctgtttttgtaccagtatcatgctgttttggttgctgtagccctgtagtatagtttgaagttgggtaacatgatgcctccagctttgttctttttgctgaggattgcttggctattagggctctttttttttttggttccatatgaattttgaaatagtttgctctagttctgtgaggaatgccattggtaatttaatagggatgacttgcatctgtaaattactttgggcagtatggccattttaatgatgttgattcttcctatccatgagcatgaaatgtttttccatttgtttgtgtcttctctgatttctttgagcagtgttttgtaattctcctagagatctcttagagatctttcacctccctggttagctgtattcctaggtattttattttttctgtgtgtagcaattatgaatgggattatgttcttcatttgactctctgctttactgctaggaatttttgcacattgattttgtatgctaagactttgctaaagtttatcagcagaaggagctttggggctgagactatggggttttctagatatagaatcatgtcatctgtaaacagagacagtttgatttcctgtctattcctctcttccctcctctatttggatgcccttccagttttgcacattcagtgtaatgttggctgtgggtttgccatggctagctctcatcattttggcacttccgactagaagtgcgagaggggccagtgttgttgttacctgaaaggtaagtgcagcccacaaaaatgcagtgaagaagaagatatatgcatatgtttaagttaatacaattgagatacatttagcagacagaatcaatagagttgatgagtgactgactggatgtgtggggagtttatatcactcccaggtttttgacttgggcaaccgggcactcaagaaggaaaaagaggatccagggagaggaacttttctgaggactggggtagggctgaacagctgcattcgagactggtggagggtgggctgggcatgggatgcacaaatggaaattccactgggtctgcagctcacacataggcatgaccagcatagagatagagaggccccagtgctgctgagtaactgtgattccccaggtgatggcatcagctgagaagggaaggaagcccatgtgaggacactgaagaaggagtgagcagacaataagaagcccacagaagacagagaaggaacaactagagggagaagccaaggcaggcatgtgtgataacatataggaactgagggagaggacatttcaagatggaggggatgccatacaacaggactatgtgatggtttttggctgtgtccataggaagtcacaacaggcaagggaaagaaaccagaacccagtcatggagttaagaagtgagtcagagaggagatgggtagggacagtgaggtaaggcctctttctaaggaagtttggctgaaggatagactagctggacatatgctggctgtgtggggtagagggaggaatgatggagggtgggagagccttgagcctgcgagaagagtctcctagaatagagaagctgaggttaaagttgtggaagacagtggggataactgagtgacagataatcaggagaagaaaaggagatccagaatcatgacagagagatgacctttgccaagagcacagccatctttcactgtcacagagaggtaggacaaaacgattggtgttcaagaattggtttgtagcacaatattttaactatgtcctttaaaaagtttctccacagacactacccaaagcagtccttcactacagtggcagacagacctgaaaattttcatctgaagcagcagagtgaactgcagagtcagagatagaatctcactatgttgaccaggctggtcttgaactcttggcacccaagcgatccttttgcctggaatcccaaagtgtcagatttactgaagaatatttcattgtaattactttttatactttataggtcaagagctctgttttaaagacaaaatttattgaatatactttttcaaacaaagtttcatgttctaatcattgtctgatttcagcattaaatgaaacacagt

SEQ ID NO: 2825 - protein, 127 aa, Homo sapien
MKKKKIQKIYEFRVGFLKILIRKSASRLIQRMIEINTIRNDKGNVITTDPTEIETTIRNYCKHFCAYKLENFKEMDKFLDKYTLPQLSQEEIDLLNRPITSSEIESVINNLPIKKSPEHDGFPAIFY

SEQ ID NO: 2826 - DNA, 1577 bp, Homo sapien; identical to SEQ ID NO: 1883

SEQ ID NO: 2827 - protein, 445 aa, Homo sapien; identical to SEQ ID NO: 1884

SEQ ID NO: 2828 - DNA, 2385 bp, Homo sapien
  Unsure 149: Unknown base
ccctaacgacagctcgcccgtgcttcgccctcgcagctctcctgtgtccccaaaatgcccttcccgcgtcccccgcccttcagcggtgactgcccaggggactctgtaacgcgacactcagactgccgagcctgccaggcacttcgcgnagggcgctaggggccgggacgcggccgccgagcgtaggttccggcctttactccgagttgcgcacggagccccagctgcggttgtccgctctggggatcacaggccgcggagacccgggagccacccgccgggccccttcagacgacccgcttccgcaaaccggccgtgggactccggcgccgggcggacgaagcggcgccgggcggacgaagcggctccgggaagactcggtcttccccgcccgcctgaggtcgccggggcggggcttcagtgacaggcccgcgcgctaccgcggaaacaggaagttggctgggtgcgcgccggctccggctgcagttcccgggtccctcggccaccgaagccaccctgccctggtgaaagggctcccgcaccgcccggtgctccccatctgcctggcgttgtgcgcagagctggaaagcatggctgttataaatgaattctgattttggggagcagatgccaacttagagcctcgtaccaatctctctgtctttaaaagatgaggtgacttggtgattttcctggaaaattataggtgcccagctaagacctgaatgccatcaccctccccagggctctgcagttttctcgtggtgaacccttgatggatttgttgttgcttgagaaatggcgatgatcgaattggggtttggaagacagaattttcatccattaaagaggaagagttcattgctgttgaaactcatagctgttgtctttgctgtgcttctattttgtgaatttttaatctattacttagcgatctttcagtgtaattggcctgaagtgaaaaccacagcctctgatggtgaacagaccacacgtgagcctgtgctcaaagccatgtttttggctgacacccatttgcttggggaattcctaggccactggctggacaaattacgaagggaatggcagatggagagagcgttccagacagctctgtggttgctgcagccggaagtcgtcttcatcctgggggatatctttgatgaagggaagtggagcacccctgaggcctgggcggatgatgtggagcggtttcagaaaatgttcagacacccaagtcatgtacagctgaaggtagttgctggaaaccatgacattggcttccattatgagatgaacacatacaaagtagaacgctttgagaaagtgttcagctctgaaagactgttttcttggaaaggcattaactttgtgatggtcaacagcgtggcgctgaacggggatggctgtggcatctgctctgaaacagaagcagagctcattgaagtttctcacagactgaactgctcccgagaggcacgtggctccagccggtgtggacctgggcctctgctgcccacgtctgcccctgtcctcctgcagcattatcctctgtatcggagaagtgatgctaactgttctggggaagacgctgctcctgcagaggaaagggacatcccatttaaggagaactatgacgtgctttcacgggaggcatcacaaaagctgctgtggtggctccagccgcgcctggttctcagtggccacacgcacagcgcctgcgaggtgcaccacgggggccgagtccccgagctcagcgtcccatctttcagttggaggaacagaaacaaccccagtttcatcatgggtagcatcacgcccacagactacaccctctccaagtgctacctcccacgtgaggatgtggttttgatcatctactgtggagaggtgggcttccttgtggtcctcacactcactcactttgggcttctagcctcaccttttctttctggtttgaacttgctcggaaagcgtaagacaagatgaagagcaggcgccattataaatatcaaagcccaagaaatggaactttgggcagagatcatgttagaatcaagtggatgatgagaccaattacaggccgtctctctgcacagcacagaaattctcaatcactgaaatgagtaactgcaaaataaatagttgattgtactgttctcatgctataaaagtggacaggtactctacaacaaatctgttttctcatttttatcaaatatatgtatcatcaaaggttgcatctgtacagtatgtaaatgctattaatgtcgtcactcacatgcacgagagtccttgttcccccaggaagggcctggtggccccagcacacacttgggattatgtgtatacataaataaatattgggctgtttccctcttcctg

SEQ ID NO: 2829 - protein, 396 aa, Homo sapien
  Unsure 149: Unknown amino acid
MAMIELGFGRQNFHPLKRKSSLLLKLIAVVFAVLLFCEFLIYYLAIFQCNWPEVKTTASDGEQTTREPVLKAMFLADTHLLGEFLGHWLDKLRREWQMERAFQTALWLLQPEVVFILGDIFDEGKWSTPEAWADDVERFQKMFRHPSHVQLKVVAGNHDIGFHYEMNTYKVERFEKVFSSERLFSWKGINFVMVNSVALNGDGCGICSETEAELIEVSHRLNCSREARGSSRCGPGPLLPTSAPVLLQHYPLYRRSDANCSGEDAAPAEERDIPFKENYDVLSREASQKLLWWLQPRLVLSGHTHSACEVHHGGRVPELSVPSFSWRNRNNPSFIMGSITPTDYTLSKCYLPREDVVLIIYCGEVGFLVVLTLTHFGLLASPFLSGLNLLGKRKTR

SEQ ID NO: 2830 - DNA, 3860 bp, Homo sapien
gtgaacgggcagaagcagggccatgcccaagccacccccaagatccccctgaacctgcacctccatcacgacccattcaggagcctccaggagcccagacaccagccccccaccatgggcagcaaggagcgcttccactggcagagccacaacgtgaagcagagcggcgtggatgacatggtgcttcttccccagatcaccgaagacgccattgccgccaacctccggaagcgcttcatggacgactacatcttcacctacatcggctctgtgctcatctctgtaaaccccttcaagcagatgccctacttcaccgaccgtgagatcgacctctatcagggcgcggcccagtatgagaatcccccgcacatctacgccctcacggacaacatgtaccggaacatgcttatcgactgtgagaaccagtgtgtcatcattagtggagagagtggagctgggaagacagtggcagccaaatatatcatgggctacatctccaaggtgtctggcggaggcgagaaggtccagcacgtcaaagatatcatcctgcagtccaacccgctgctcgaggccttcggcaacgccaagactgtgcgcaacaacaattccagccgctttggcaagtactttgagatccagttcagccgaggtggggagccagatgggggcaagatctccaacttcttgctggagaagtcccgcgtggtcatgcaaaatgaaaatgagaggaacttccacatctactaccagctgctggaaggggcctcccaggagcaaaggcagaacctgggcctcatgacaccggactactattactacctcaaccaatcggacacctaccaggtggacggcacggacgacagaagcgactttggtgagactctgagtgctatgcaggttattgggatcccgcccagcatccagcagctggtcctgcagctcgtggcggggatcttgcacctggggaacatcagtttctgtgaagacgggaattacgcccgagtggagagtgtggacctcctggcctttcccgcctacctgctgggcattgacagcgggcgactgcaggagaagctgaccagccgcaagatggacagccgctggggcgggcgcagcgagtccatcaatgtgaccctcaacgtggagcaggcagcctacacccgtgatgccctggccaaggggctctatgcccgcctcttcgacttcctcgtggaggccatcaaccgtgctatgcagaaaccccaggaagagtacagcatcggtgtgctggacatttacggcttcgagatcttccagaaaaatggcttcgagcagttttgcatcaacttcgtcaatgagaagctgcagcaaatctttatcgaacttaccctgaaggccgagcaggaggagtatgtgcaggaaggcatccgctggactccaatccagtacttcaacaacaaggtcgtctgtgacctcatcgaaaacaagctgagccccccaggcatcatgagcgtcttggacgacgtgtgcgccaccatgcacgccacgggcgggggagcagaccagacactgctgcagaagctgcaggcggctgtggggacccacgagcatttcaacagctggagcgccggcttcgtcatccaccactacgctggcaaggtctcctacgacgtcagcggcttctgcgagaggaaccgagacgttctcttctccgacctcatagagctgatgcagaccagtgagcaggccttcctccggatgctcttccccgagaagctggatggagacaagaaggggcgccccagcaccgccggctccaagatcaagaaacaagccaacgacctggtggccacactgatgaggtgcacaccccactacatccgctgcatcaaacccaacgagaccaagaggccccgagactgggaggagaacagagtcaagcaccaggtggaatacctgggcctgaaggagaacatcagggtgcgcagagccggcttcgcctaccgccgccagttcgccaaattcctgcagaggtatgccattctgacccccgagacgtggccgcggtggcgtggggacgaacgccagggcgtccagcacctgcttcgggcggtcaacatggagcccgaccagtaccagatggggagcaccaaggtctttgtcaagaacccagagtcgcttttcctcctggaggaggtgcgagagcgaaagttcgatggctttgcccgaaccatccagaaggcctggcggcgccacgtggctgtccggaagtacgaggagatgcgggaggaagcttccaacatcctgctgaacaagaaggagcggaggcgcaacagcatcaatcggaacttcgtcggggactacctggggctggaggagcggcccgagctgcgtcagttcctgggcaagagggagcgggtggacttcgccgattcggtcaccaagtacgaccgccgcttcaagcccatcaagcgggacttgatcctgacgcccaagtgtgtgtatgtgattgggcgagagaaagtgaagaagggacctgagaagggccaggtgtgtgaagtcttgaagaagaaagtggacatccaggctctgcggggagtctccctcagcacgcgacaggacgacttcttcatcctccaagaggatgccgccgacagcttcctggagagcgtcttcaagaccgagtttgtcagccttctgtgcaagcgcttcgaggaggcgacgcggaggcccctgcccctcaccttcagcgacacactacagtttcgggtgaagaaggagggctggggcggtggcggcacccgcagcgtcaccttctcccgcggcttcggcgacttggcagtgctcaaggttggcggtcggaccctcacggtcagcgtgggcgatgggctgcccaagagctccaagcctacgcggaagggaatggccaagggaaaacctcggaggtcgtcccaagcccctacccgggcggcccctgcgccccccagaggcatggatcgcaatggggtgcccccctctgccagagggggccccctgcccctggagatcatgtctggagggggcacccacaggcctccccggggccctccgtccacatccctgggagccagcagacgaccccgggcacgtccgccctcagagcacaacacagaattcctcaacgtgcctgaccagggcatggccggcatgcagaggaagcgcagcgtggggcaacggccagtgcctggtgtgggccgacccaagccccagcctcggacacatggtcccaggtgccgggccctataccagtacgtgggccaagatgtggacgagctgagcttcaacgtgaacgaggtcattgagatcctcatggaagatccctcgggctggtggaagggccggcttcacggccaggagggccttttcccaggaaactacgtggagaagatctgagctgggccctgggatactgccttctctttcgcccgcctatctgcctgccggcctggtggggagccaggccctgccaatgagagcctcgtttacctgggctgcaatagcctaaaagtccagtcctttggcctccagtcctgcccaggccctgggtcaccaggtcactgctgcagcccccgcccctgggccctggtcttcctccaacatcacacctgctgcccattctccatttctgtgtgtgtcaaaggggactaacagcagaatctacctcccaactgccatgtgattaagaaatgggtcttgagtcctgtgctgttggcaaagtgccaggcacagttggggaggggggggtccttaacaagcgtgactttgctcattctgtcatcactaaggcaataaacctttgccaggtgaaaaaaaaaaaaaaaaaaaaaaaaaaaaaaaaaaaa

SEQ ID NO: 2831 - protein, 1098 aa, Homo sapien
MGSKERFHWQSHNVKQSGVDDMVLLPQITEDAIAANLRKRFMDDYIFTYIGSVLISVNPFKQMPYFTDREIDLYQGAAQYENPPHIYALTDNMYRNMLIDCENQCVIISGESGAGKTVAAKYIMGYISKVSGGGEKVQHVKDIILQSNPLLEAFGNAKTVRNNNSSRFGKYFEIQFSRGGEPDGGKISNFLLEKSRVVMQNENERNFHIYYQLLEGASQEQRQNLGLMTPDYYYYLNQSDTYQVDGTDDRSDFGETLSAMQVIGIPPSIQQLVLQLVAGILHLGNISFCEDGNYARVESVDLLAFPAYLLGIDSGRLQEKLTSRKMDSRWGGRSESINVTLNVEQAAYTRDALAKGLYARLFDFLVEAINRAMQKPQEEYSIGVLDIYGFEIFQKNGFEQFCINFVNEKLQQIFIELTLKAEQEEYVQEGIRWTPIQYFNNKVVCDLIENKLSPPGIMSVLDDVCATMHATGGGADQTLLQKLQAAVGTHEHFNSWSAGFVIHHYAGKVSYDVSGFCERNRDVLFSDLIELMQTSEQAFLRMLFPEKLDGDKKGRPSTAGSKIKKQANDLVATLMRCTPHYIRCIKPNETKRPRDWEENRVKHQVEYLGLKENIRVRRAGFAYRRQFAKFLQRYAILTPETWPRWRGDERQGVQHLLRAVNMEPDQYQMGSTKVFVKNPESLFLLEEVRERKFDGFARTIQKAWRRHVAVRKYEEMREEASNILLNKKERRRNSINRNFVGDYLGLEERPELRQFLGKRERVDFADSVTKYDRRFKPIKRDLILTPKCVYVIGREKVKKGPEKGQVCEVLKKKVDIQALRGVSLSTRQDDFFILQEDAADSFLESVFKTEFVSLLCKRFEEATRRPLPLTFSDTLQFRVKKEGWGGGGTRSVTFSRGFGDLAVLKVGGRTLTVSVGDGLPKSSKPTRKGMAKGKPRRSSQAPTRAAPAPPRGMDRNGVPPSARGGPLPLEIMSGGGTHRPPRGPPSTSLGASRRPRARPPSEHNTEFLNVPDQGMAGMQRKRSVGQRPVPGVGRPKPQPRTHGPRCRALYQYVGQDVDELSFNVNEVIEILMEDPSGWWKGRLHGQEGLFPGNYVEKI

SEQ ID NO: 2832 - DNA, 1299 bp, Homo sapien; identical to SEQ ID NO: 209

SEQ ID NO: 2833 - protein, 154 aa, Homo sapien; identical to SEQ ID NO: 210

SEQ ID NO: 2834 - DNA, 2853 bp, Homo sapien
gctctgctccaggcatctgccacaatgtgggtgcttacacctgctgcttttgctgggaagctcttgagtgtgttcaggcaacctctgagctctctgtggaggagcctggtcccgctgttctgctggctgagggcaaccttctggctgctagctaccaagaggagaaagcagcagctggtcctgagagggccagatgagaccaaagaggaggaagaggaccctcctctgcccaccaccccaaccagcgtcaactatcacttcactcgccagtgcaactacaaatgcggcttctgtttccacacagccaaaacatcctttgtgctgccccttgaggaagcaaagagaggattgcttttgcttaaggaagctggtatggagaagatcaacttttcaggtggagagccatttcttcaagaccggggagaatacctgggcaagttggtgaggttctgcaaagtagagttgcggctgcccagcgtgagcatcgtgagcaatggaagcctgatccgggagaggtggttccagaattatggtgagtatttggacattctcgctatctcctgtgacagctttgacgaggaagtcaatgtccttattggccgtggccaaggaaagaagaaccatgtggaaaaccttcaaaagctgaggaggtggtgtagggattatagagtcgctttcaagataaattctgtcattaatcgtttcaacgtggaagaggacatgacggaacagatcaaagcactaaaccctgtccgctggaaagtgttccagtgcctcttaattgagggtgagaattgtggagaagatgctctaagagaagcagaaagatttgttattggtgatgaagaatttgaaagattcttggagcgccacaaagaagtgtcctgcttggtgcctgaatctaaccagaagatgaaagactcctaccttattctggatgaatatatgcgctttctgaactgtagaaagggacggaaggacccttccaagtccatcctggatgttggtgtagaagaagctataaaattcagtggatttgatgaaaagatgtttctgaagcgaggaggaaaatacatatggagtaaggctgatctgaagctggattggtagagcggaaagtggaacgagacttcaacacaccagtgggaaaactcctagagtaactgccattgtctgcaatactatcccgttggtatttcccagtggctgaaaacctgattttctgctgcacgtggcatctgattacctgtggtcactgaacacacgaataacttggatagcaaatcctgagacaatggaaaaccattaactttacttcattggcttataaccttgttgttattgaaacagcacttctgtttttgagtttgttttagctaaaaagaaggaatacacacaggaataatgaccccaaaaatgcttagataaggcccctatacacaggacctgacatttagctcaatgatgcgtttgtaagaaataagctctagtgatatctgtgggggcaaaatttaatttggatttgattttttaaaacaatgtttactgcgatttctatatttccattttgaaactatttcttgttccaggtttgttcatttgacagagtcagtattttttgccaaatatccagataaccagttttcacatctgagacattacaaagtatctgcctcaattatttctgctggttataatgcttttttttttttgcctttatgccattgcagtcttgtactttttactgtgatgtacagaaatagtcaacagatgtttccaagaacatatgatatgataatcctaccaattttcaagaagtctctagaaagagataacacatggaaagacggcgtggtgcagcccagcccacggtgcctgttccatgaatgctggctacctatgtgtgtggtacctgttgtgtccctttctcttcaaagatccctgagcaaaacaaagatacgctttccatttgatgatggagttgacatggaggcagtgcttgcattgctttgttcgcctatcatctggccacatgaggctgtcaagcaaaagaataggagtgtagttgagtagctggttggccctacatttctgagaagtgacgttacactgggttggcataagatatcctaaaatcacgctggaaccttgggcaaggaagaatgtgagcaagagtagagagagtgcctggatttcatgtcagtgaagccatgtcaccatatcatatttttgaatgaactctgagtcagttgaaatagggtaccatctaggtcagtttaagaagagtcagctcagagaaagcaagcataagggaaaatgtcacgtaaactagatcagggaacaaaatcctctccttgtggaaatatcccatgcagtttgttgatacaacttagtatcttattgcctaaaaaaaaatttcttatcattgtttcaaaaaagcaaaatcatggaaaatttttgttgtccaggcaaataaaaggtcattttaatttaaaaaaaaaaaaaaaaaaaaaaaaaaaaaaaaggccaaggaaaaaaaatattcctacttaaattttaagtctataattcaatttaaatatgtgtgtgtctcatccaggataggataggttgtcttctattttccattttacctatttactttttttgtaagaaaagagaagaatgaattctaaagatgttccccatgggttttgattgtgtctaagctatgatgaccttcatataatcagcataaacataaaacaaattttttacttaacatgagtgcactttactaatcctcatggcacagtggctcacgcctgtaatcccagcacttggggaggacaatgtggggtggatcacgaggtc

SEQ ID NO: 2835 - protein, 361 aa, Homo sapien
MWVLTPAAFAGKLLSVFRQPLSSLWRSLVPLFCWLRATFWLLATKRRKQQLVLRGPDETKEEEEDPPLPTTPTSVNYHFTRQCNYKCGFCFHTAKTSFVLPLEEAKRGLLLLKEAGMEKINFSGGEPFLQDRGEYLGKLVRFCKVELRLPSVSIVSNGSLIRERWFQNYGEYLDILAISCDSFDEEVNVLIGRGQGKKNHVENLQKLRRWCRDYRVAFKINSVINRFNVEEDMTEQIKALNPVRWKVFQCLLIEGENCGEDALREAERFVIGDEEFERFLERHKEVSCLVPESNQKMKDSYLILDEYMRFLNCRKGRKDPSKSILDVGVEEAIKFSGFDEKMFLKRGGKYIWSKADLKLDW

SEQ ID NO: 2836 - DNA, 6161 bp, Homo sapien
  Unsure 3745-3779: Unknown base
cggcgcctccgcggagaggtccggtccgaatatccctccgccttcctccctccctcgctccctccctgcgcgccgcctctcactcacagcctcccttccttctttctccctccgcctcccgagcaccagcgcgctctgagctgcccccagggtccctcccccgccgccagcagcccatttggagggaggaagtaagggaagaggagaggaaggggagccggaccgactacccagacagagccggtgaatgggtttgtggtgacccccgccccccaccccaccctcccttcccacccgacccccaacccccatccccagttcgagccgccgcccgaaaggccgggccgtcgtcttaggaggagtcgccgccgccgcacctccgccatggagctgatcaccattctcgagaagaccgtgtctcccgatcggctggagctggaagcggcgcagaagttcctggagcgtgcggccgtggagaacctgcccactttccttgtggaactgtccagagtgctggcaaatccaggaaacagtcaggttgccagagttgcagctggtctacaaatcaagaactctttgacatctaaagatccagatatcaaggcacaatatcagcagaggtggcttgctattgatgctaatgctcgacgagaagtcaagaactatgttttgcagacattgggtacagaaacttaccggcctagttctgcctcacagtgtgtggctggtattgcttgtgcagagatcccagtaaaccagtggccagaactcattcctcagctggtggccaatgtcacaaaccccaacagcacagagcacatgaaggagtcgacattggaagccatcggttatatttgccaagatatagacccagagcagctacaagataaatccaatgagattctgactgccataatccaggggatgaggaaagaagagcctagtaataatgtgaagctagctgctacgaatgcactcctgaactcattggagttcaccaaagcaaactttgataaagagtctgaaaggcactttattatgcaggtggtctgtgaagccacacagtgtccagatacgagggtacgagtggctgctttacagaatctggtgaagataatgtccttatattatcagtacatggagacatatatgggtcctgctctttttgcaatcacaatcgaagcaatgaaaagtgacattgatgaggtggctttacaagggatagaattctggtccaatgtctgtgatgaggaaatggatttggccattgaagcttcagaggcagcagaacaaggacggccccctgagcacaccagcaagttttatgcgaagggagcactacagtatctggttccaatcctcacacagacactaactaaacaggacgaaaatgatgatgacgatgactggaacccctgcaaagcagcaggggtgtgcctcatgcttctggccacctgctgtgaagatgacattgtcccacatgtcctccccttcattaaagaacacatcaagaacccagattggcggtaccgggatgcagcagtgatggcttttggttgtatcttggaaggaccagagcccagtcagctcaaaccactagttatacaggctatgcccaccctaatagaattaatgaaagaccccagtgtagttgttcgagatacagctgcatggactgtaggcagaatttgtgagctgcttcctgaagctgccatcaatgatgtctacttggctcccctgctacagtgtctgattgagggtctcagtgctgaacccagagtggcttcaaatgtgtgctgggctttctccagtctggctgaagctgcttatgaagctgcagacgttgctgatgatcaggaagaaccagctacttactgcttatcttcttcatttgaactcatagttcagaagctcctagagactacagacagacctgatggacaccagaacaacctgaggagttctgcatatgaatctctgatggaaattgtgaaaaacagtgccaaggattgttatcctgctgtccagaaaacgactttggtcatcatggaacgactgcaacaggttcttcagatggagtcacatatccagagcacatccgatagaatccagttcaatgaccttcagtctttactctgtgcaactcttcagaatgttcttcggaaagtgcaacatcaagatgctttgcagatctctgatgtggttatggcctccctgttaaggatgttccaaagcacagctgggtctgggggagtacaagaggatgccctgatggcagttagcacactggtggaagtgttgggtggtgaattcctcaagtacatggaggcctttaaacccttcctgggcattggattaaaaaattatgctgaataccaggtttgtttggcagctgtgggcttagtgggagacttgtgccgtgccctgcaatccaacatcatacctttctgtgacgaggtgatgcagctgcttctggaaaatttggggaatgagaacgtccacaggtctgtgaagccgcagattctgtcagtgtttggtgatattgcccttgctattggaggagagtttaaaaaatacttagaggttgtattgaatactcttcagcaggcctcccaagcccaggtggacaagtcagactatgacatggtggattatctgaatgagctaagggaaagctgcttggaagcctatactggaatcgtccagggattaaagggggatcaggagaacgtacacccggatgtgatgctggtacaacccagagtagaatttattctgtctttcattgaccacattgctggagatgaggatcacacagatggagtagtagcttgtgctgctggactaataggggacttatgtacagcatttgggaaggatgtactgaaattagtagaagctaggccaatgatccatgaattgttaactgaagggcggagatcgaagactaacaaagcaaaaacccttgctacatgggcaacaaaagaactgaggaaactgaagaaccaagcttgatctgttaccattgggatgataacctgaggacccccactggaaatctcccatcttttgaaaaacctggaagtgaggagtgtgcacggatgctgaatgtttgggaatgagaggatgagtgagtgaggcttgaaaacacaccacattgaaaatcctgccacagcagcagccgcagccgccaacagcagcgctgttagtgagctaagtaagcactgacttcgtagaaaaccataacatcggccatcttggaaaagagaaaaacaatggagttacttatttaaaaaaaaagaaagaaagttatctcttcccaggagaggctagaagtagcttttctgtcttttggccagtgccgagtggaatgcctggtttgggggaggaggagggactgggttcagctgtggtgctttgttgtaaaaggcagcctggcctttgctactgaggagaaagatggagcctgggtctcaagcccaccttcgctgtacctttgccacatggtactgtatgcttgccagctagaaggagggtcagggattttttacagtctgagaatgagtgtgtgtgagtgaggcggtatccacattctcaacttcaagtcattgcagtttctttttcccagaaaacaaggggttagatgttgcatttcataaaactaaccgaagttctgtctactgatgcagcacaagagatgtaaaaaaaaaaaaacacacacacagaggaaagacgctctttaggnnnnnnnnnnnnnnnnnnnnnnnnnnnnnnnnnnngttttttttactctagggaaaacactgacgaatggtcagagctcctatcctgatcttttcatcaaggcgcctttcctaataatatggttcaactgtgaatgtagaagtgggggggaggggggagaaaaagaaaactctggcgttagaggatatagaaaaatataagtacaattgttacaaataacgcagacttcaaaaacaaaaaaatcacaacccaaacaaaccaaaatttaaatgatcagaattggcagcacaaagaaaacgccctctcctgacttgtattgtggcagtctgaacgcccccagaaaattgtgccaaagagtttagaaaaataaatatacaataaaagtaaacacatacacacaaaacagcaaacttcaggtaactattttggattgcaaacaggataaattaaatgttcaaacaatctgataaaataaccatttggaaactgcttggccttctgttcttttatttgattgactacaatgcggtattggtctcttgctgcacttcaaaagcaaccaacaaaacaaaaacaaaaaaaagtgtgtgtgtgtgaatacacacacacactaactagaagtcttgtgatgaaaatggcacttggaaaaggttttatttttccactgaagttgaaggttaataaaatggtgtcaaacgtcccctggtcacacacttgaatatttttttagaagtgtgatgtggtatgattaccataaatcagacttaattattttcccttttacaagggaacagggcatcctgaattttagagcctttcagcaataagaagggatgttggtgagctttgatcctcttttggttttgcagttgttaggagtttttgctggcattttgaatatgctgctttcagaaaaaccaaggaagttttaaaattgcttcctggtccttagaggactaaaaacaagaccctcattcccactttcatttccactctagcaaaaactgggcttgcgtttttctccaactcctcgtttatatcctcccttccatgtccaagccttccattcctaagtgggattggctcagttttgcccatccatatggcagcatctctaatagctcttgtacagggtatcagatattgtgccttttggtgccaggttcaaagtcaagtgccgatctatgaaccagtgtacaaaaaaaaaaaaaatccaggtatttgaaggagagacgctccattgtgaataaagagctcataccagctcctaagccctattaagaagaggcctggtcctctaatgccttgtttccatttcagttgttctttgagagacagaatgatgtactaaccattcgtgattattaagatagggttgggtcagggcttagggagggggcagaaatattggggatagaaaaaaaatctgatcattcctcagtgctacccatttctgtcctgtgtgggctgcttagctagacagcaggagaataaagtacaccgagaaccataatgaaaaaaccttccgtgtgttttgtcatgttttgttccagggaagcagttgatgagtgctgttactaatgctttctcccagatccattcagtggtggagaggaggaaaatgggctggttggatgtggtcttggtgccttgcagttactctgcactggttatgcatttaattctcctcttttctagttaaccttttgccagtgggttttccatagtctgggtatttgtccttatatcagttataccacctaaggcaactgggtgcaaaatgcattctgttcactcactgtctgggccttccccaccctagtcttggcacattccttcaagaatgtagttaccgtctgcttgggaagatgtcagtgcaaatgtgaagataatgggcatcggactaggctttggtttgccacaagtggcagctgcctgtatcaattacatttattaattttgcttttcatttttcccagttctcctcaccccccctttgttgaaatgttggacttgctgtcagaggcaactgtaatattgccttagggacttgtggagaaggggaattgctcagtgtagtgttttaactttcagaaccaagcaatctatttactcttacaaatatttaagaagtgtgttagtccaactttaagaaaaatccaaactcatcagcttttgatagcatcttggtttttgaaacaacttcaatctgtaattggcattcagaatgcccttggcatgccagtctgtgatggcatttaagacctgtaaaacacttgagcccaactcgattaaccaaaaccgataaccaccacctttatcttctaaataaagtccgctttatttttaaaaaaaatctatgtcgggtgcggagaaagaggtaatgaaatggcaggaattcgatatgcaagcttatc

SEQ ID NO: 2837 - protein, 1004 aa, Homo sapien
  Unsure 3745-3779: Unknown amino acid
APPRRGPVRISLRLPPSLAPSLRAASHSQPPFLLSPSASRAPARSELPPGSLPRRQQPIWREEVREEERKGSRTDYPDRAGEWVCGDTPAPHPTLPSHPTPNPHPQFEPPPERPGRRLRRSRRRRTSAMELITILEKTVSPDRLELEAAQKFLERAAVENLPTFLVELSRVLANPGNSQVARVAAGLQIKNSLTSKDPDIKAQYQQRWLAIDANARREVKNYVLQTLGTETYRPSSASQCVAGIACAEIPVNQWPELIPQLVANVTNPNSTEHMKESTLEAIGYICQDIDPEQLQDKSNEILTAIIQGMRKEEPSNNVKLAATNALLNSLEFTKANFDKESERHFIMQVVCEATQCPDTRVRVAALQNLVKIMSLYYQYMETYMGPALFAITIEAMKSDIDEVALQGIEFWSNVCDEEMDLAIEASEAAEQGRPPEHTSKFYAKGALQYLVPILTQTLTKQDENDDDDDWNPCKAAGVCLMLLATCCEDDIVPHVLPFIKEHIKNPDWRYRDAAVMAFGCILEGPEPSQLKPLVIQAMPTLIELMKDPSVVVRDTAAWTVGRICELLPEAAINDVYLAPLLQCLIEGLSAEPRVASNVCWAFSSLAEAAYEAADVADDQEEPATYCLSSSFELIVQKLLETTDRPDGHQNNLRSSAYESLMEIVKNSAKDCYPAVQKTTLVIMERLQQVLQMESHIQSTSDRIQFNDLQSLLCATLQNVLRKVQHQDALQISDVVMASLLRMFQSTAGSGGVQEDALMAVSTLVEVLGGEFLKYMEAFKPFLGIGLKNYAEYQVCLAAVGLVGDLCRALQSNIIPFCDEVMQLLLENLGNENVHRSVKPQILSVFGDIALAIGGEFKKYLEVVLNTLQQASQAQVDKSDYDMVDYLNELRESCLEAYTGIVQGLKGDQENVHPDVMLVQPRVEFILSFIDHIAGDEDHTDGVVACAAGLIGDLCTAFGKDVLKLVEARPMIHELLTEGRRSKTNKAKTLATWATKELRKLKNQA

SEQ ID NO: 2838 - DNA, 2688 bp, Homo sapien
ggtcttgctgtgttacctgggctagttatgtgagtttctatattagacatagtctcaagtttcaggtagggtttaaagtagagacactggtcagtatttcttttttggggggaactaggagagcaggagtagaagtgagatgttaagatcttatggcactaaagacttactattctgttcctacatactctgttaggatcagatagatgttatagaaatgccttttgtttctcctgcccttcttgatgtcacagttttttgtacttccagctgtctaaaggcatgaatctcctcttggagcattctcccagacccttctttagaagagtctatactaagttcttggtgccctcttcggcagccaagggtgaaggccccatagaggagaggatccaaaggagcattgaggaggcccaagaggaaaaggatgtggctcaggctgggagggacttcagttagcatggtgggggagaaccagtaccacatacccagtaggtaataaggtgtccagcagaggatgaaggtcagcaagataagcagggccagtctcagggcccggagacgaacacggggacaattgtcaaaggagcgggggagggcaaattcaccagcaggggctaggaatttagaaaatatactgtaattcagacactcagcttctgatctgagtatagggtgaattgatggaggggcatagctagtgagacagagctcgcctcctacaaggaggagaatgttgcaaaccgttttccccttcccaacctgggactatatgatttcttacccccagggattatgatagaaatatgaagccaccaagtctagacttgatggtgttcaagaataaataatactgattgcctccctagtccttgtccagctaactcagctgtttataattgaagggattcaacaaaattatctctagcatcaggtgctagacatggttagaatctcaccatggtttagtgactggtagatagctattaggtaggtagataaataaatgatgctagaggcaacaggtctagggttaaggattaaggcctgggaattggagtctcaccatggctccccttccttgtctggggcctggacacactgaggacaatgcggctatagcagatggccatggcagtcagtggcagcagaaagaggcagcagaaggtgaagaggttataggtggtctcttgccattgagccttgaagctgcctttggtgacacactgagtgaaagggactgggccagctcagtggaccgtgtggaacaggaacagctggagtggagttgaggactattagaactggttcccctcaccacccaacctacccacctatgtcatactgtctcctcccaattcatccttaattccaagtgaagcagcacagtgctgagaaacagttcatccatggtgccatgttaaagaagttggaaatatatcttgaaaatcctatcttccttttaggcttgaatatgatgctgaacagtaagtttgttaaatcttggaacttaaaacaatcctgctttctcaagtactattctaacattgcgctttataagggatgatatttctaccacctcactcatatttttagctgaaatgattttcctggtatgtctgttattttgtggaaaaagaaatattgtgtaaaatgggtgctgccaaaattccaggccattttgcagggactctgaagtgacctttagtagtaatagtcttatgtgcagtaactataatggtaaagaatgttaaataataaaatttaacattttccaaatgctattgggctgcccctccccctttttgttaaattgctgggttttccaactgaatcagtaaaaactatttctgtttagagctacaaggttaaagtgcctgctttccagtaatggagattgagtcactattaatttgataaaaggtaagctcagtaggcatcagattcctagatacaaggcatttgggaaagtgattttagcagacatgagggacatttaggaaagatgaatagtttcagcctaagagaattttgtgaactgtttggagttacgatcaggctactctgagctagttgggaaatggtctttcctcttcccatctcttgcattcatatatttctaagttttttttatttgtttttgtttttgtgctctgcctaagaagtgcttgagaattgtgaggagtataaaaatagtcaaagcaggcttgagccaccaggcctttctttgttcttaggagtatagtcagactaacttctagtagttatatttctaataattgaggatgtaagtaaggatcaaatcttaaatcagtataatgcattgtcattccagagataaatcctagacccttcttggcctccttctgacataattctaatcctacagtctcagagatgctgttgtatcctgccccccaaccccatgatagtgatagtggtttttgccttgaaggaattgctttgtatttagcttttccccctctagatttctagttccttttcagtattggattggatttgagatttgattaacctagtactcaggttcagatgctcgcctctttgcaattttaacactcattcgacaataaagtcagtaaaaaacacaaaaaaaatctatgtcgggtgcggagaaagaggtaatgaaatggcaggaaactcgatatgcaagcttatcgataccgt

SEQ ID NO: 2839 - protein, 47 aa, Homo sapien
SCCVTWASYVSFYIRHSLKFQVGFKVETLVSISFLGGTRRAGVEVRC

SEQ ID NO: 2840 - DNA, 1700 bp, Homo sapien
acaaagcaaagggaagaaataggaaaaaagaaagacttctctattttctcatctccctaacattccttctatctctaaaattccagacttttctacattttcctcttccatggtacccgccccccaacctccaccccaacactgacctccttctatattggcccctcctcctccttacagggagcagatagcagggacttacagatgaaccaggccctgcgatttttggaaaatgagcaccaggaactgcaggccaagattgaatgcctgcaaggggacagagacctgtgcagcttggatacccaggacctacaagatcaactaaaaaggtcagaggcagagaaactcaccctggtgaccagagtacagcagttgcagggtttgcttcaaaatcaatccttacagcttcaagaacaggagaaactcttaacaaagaaaggtcagcaaatttattaccacaaattctaagatattgctcttctcttacctgcctagaggcagcgggatggactacatgacctcctggagtcccagccagttctgggagtctgttaagtccgggatgtgtgggagctttttaaggactgatcattggctctgaggacacttcaactagttagccttctatcttgaggtatataaactgtgaaaaagggtttctattctctctgaaagcacatgtctgtgttgaacatttcaataaatttattttgaactcaggatttcatgtcaatttttacacacttgattttccaaatcacatccaactccccagccccaaaccacatagcagtccagagtcaactcactgttagccctagagagtctactgtccatgtttcctgagaattcactgtgtatacagaggggcaatagctcctcacctgtccactacacacgaccttttgttttctcttcacaatcattgggcataatataatagataaggcagaaatttttatgctcacagagtatggataagaacatgaaagtctatggtgacacaaactaacaacacagctataacaacaatccaaaacttctgactcctagtccatgctcttttcaccaagactaagactgcagggtggctaaaaaaccatctttaaccatatgaagataaattttaggatatgactgccatcttcacaactttcaaatgaggacatcagggaaaagggattgtattaaagcatttaccaaacttatttgacaaactaggaagaatgtgacatacaaccaatgaaattcaattaagaagtattcactaaaactatctagcactagataggactggggatacaaagaaaagatcccaatcttgccctcaaggagctcagattccagctgtctgtccaagcttagcaggggcctactggaagttaacctttatgtcagagaatgccatcagtctagccaagagcacgccctcccaagttccctcccctctccccactcctagtggtttcaccctcagggcccttcctcagaggtgtgggcctcactgtcaccaagaatctggctgcttttttagatcaggctttgcccgtgtggagtccaaagtccttccctaacgaagtgtagcctgagggtacagggaaggagaaagactgggatctcagagaccagctgcaaaagaagactttgcagctccaggccaaggaaaaggagtgcagagaactgcattcagaattagacaa

SEQ ID NO: 2841 - protein, 87 aa, Homo sapien [sequence omitted]

SEQ ID NO: 2842 - DNA, 570 bp, Homo sapien
ttttccggttgcggcgccgcgcggtgaggttgtctagtccacgctcggagccatgccgtccaagggcccgctgcagtctgtgcaggtcttcggacgcaagaagacagcgacagctgtggcgcactgcaaacgcggcaatggtctcatcaaggtgaacgggcggcccctggagatgattgagccgcgcacgctacagtacaagctgctggagccagttctgcttctcggcaaggagcgatttgctggtgtagacatccgtgtccgtgtaaagggtggtggtcacgtggcccagatttatgctatccgtcagtccatctccaaagccctggtggcctattaccagaaatatgtggatgaggcttccaagaaggagatcaaagacatcctcatccagtatgaccggaccctgctggtagctgaccctcgtcgctgcgagtccaaaaagtttggaggccctggtgcccgcgctcgctaccagaaatcctaccgataagcccatcgtgactcaaaactcacttgtataataaacagtttttgagggattttaaagtttcaaaaaaaaaaaaaaaa

SEQ ID NO: 2843 - protein, 146 aa, Homo sapien [sequence omitted]

SEQ ID NO: 2844 - DNA, 3587 bp, Homo sapien
gaattcagcacaatgaaggagccatggaatgccaatttaacgtcagtcttgtacttgaagggaaaaaaaacacttgtaatggtggcaacagtgaagctgttcctttaacatccccaaatatagccaagtttagcactccaccagccatcctcagaaagaagagaaaaatgcgagtgggtcattccccaggcagcgaacttagggatggctcattgaacgatggtggtaatatggcgctaaaacatacaccactgaaaacactaccattttctccttcacagtttttcaacacatgtcctggtaatgaacaacttaatatagaaaatccttcatttacatcaacccctatttgtgggcagaaagctctcattacaactcctcttcataaggaaacaactcccaaagatcaaaaggaaaatgtagggtttagaacacctactattagaagatctatactgggtaccacaccaagaactcctactccttttaagaatgcgcttgctgctcaggagaaaaaatatggacctcttaaaattgtgtcccagccacttgctttcttggaagaagatattcgggaagttttaaaagaagaaactggaacagacctattcctcaaagaggaagatgaacctgcttacaaaagctgcaaacaagagaataccgcttctgggaagaaagtcagaaaatcactagtcttagataattgggaaaaagaagaatcaggcactcaactgttgactgaagacatttcagacatgcagtcagaaaatagatttactacatccttattaatgataccattattggaaatacatgacaataggtgcaacttgattcctgaaaaacaagatataaattcaaccaacaaaacatatacacttactaaaaagaaaccaaaccctaacacttccaaagttgtcaaattggaaaagaatcttcagtcaaattgtgaatgggaaacagtggtttatgggaagacagaagaccaacttattatgactgaacaagcaagaagatatctgagtacttacacagctaccagtagtacttcaagagctctcatactgtaattgttattaaaattgatgaaatgccccactcccttactgcagtctctactaaattaggttgcagtgaaatttttctcaattagttgtttttaaagttgtaagatacccttttaatacagcatcttttttctattctatatagtaggcagaaagctagtaagtcacttaaggggtagatagtttcatagtttattttttaagagatgagatttttaaaaattgtttttaaagaacaagatgggaaaataatagaatgttcatggatttctaaaagtaaattctcatatattttcttcacaagatatatgttgctactctcttgatgctgcagttttgttatagataggtgtatgagtatatatgatttctgaaattagtctatgtatggaaagcacacatgattttatgaaggtacttttgcccatgtgctgatttacttaggctaccatttacaaagaaacacattgaaaaggaatttaaaggaaggatagaaagttgcactactaattttttgttttttttttcagaagcagtaaaattaactacagtgttaaatgtatttatttgagcatagtactgaaaacaaaaagcattcaaaaaagagttttttctttattagtaaatagtattttcttaatctcagaggagctgagagttttgttgaatgtattgtacagtatgtaggagcaggagaactttgtaaattggaaagaagtctgtttttataatttatttttatttttaaagcttaaatgtagatatttatagtatacagggagcctagaagccaatgttgtttcctgttattacagctaacacagtaaagaataattttgactttaagtatgaaacagtagtaagttatagctgcaaagaatacaatatctatactgtatgtcacatctacctaaatgttgcactatgccctttaaatcatgctggttataaagtagttctaaaaatgtactaaataataatttaatattttctttttaaattatatcgggggtggtcatatacattaatctggtgatttgtatatgtgtttgaaattttttgcttttgtttaaaaaaaaataatatggtaccttggtccctaaaaacagtctgcacttagaagttatatttactcagtgtttcagaagtggagaacttatcttttatttataaaaatattttgtccttttttaaatgttttgtgtttctctacaggttacaacagttgcttcagttgcctgttttaggtgtttgcacttattttatttcttcttgaaagaatttttatttgcttttgtggtagagattatatgtaattttttttcagtcatataatggtgtgctgtcaacttaaacactgacaggtaaatagaattgtacactgtagtttgaattatttataattgacacactctctccctctccactcctgaagtatgctgctatagaaaatagcagaatcggcttgctgctacgagagaaggaaagagcgaccaccacttgcactgtgtgaaaagataaaaaacaaatgatggcaagttctcaagttaactaaatggaatcaaccattaccaggcaaattcttgcaaataccaaaatactactatgccttataaaacaaaatgaaagcaggttaagattttctgctctgtttgtatgttaatagaaatggaaatactaagtattttaatgcttagctattgaacagtagacctaaaagggttttaagctatttaaatctacttgctagtttttgcatattttatatatatatatatttatatatatatatagtgagaagtgaagaaaatgtatggtactaagattatgccttattgataaatagataaaccaatttgaatcctcttagcatgtttaagtatgttgattgctttctaattaatgaacttctcacagaaatttcacttagtgaaaccaatgattgtagcaaactcatactggatcatttcagttaccttgaactaatagcacataatggttttttgttgttgttgtttttaatgtagcccttacctggatatacatagtctgcaatcaccaaagtataatatcttgtaaggctatattttttaaagcatattttttcttgagcattaaattatcctaaatggtaatatattgtggataagtctgggcttattggacataatacatatttgggttggtactggttgaatccttcagttaactgctttgttgctttttgcaagattttttatcttaaacatgtcaggcatcttaagtcacctttatactgttttgttcctctgagtttctttcagtatgttatacaaatgccagacataacatgtagcagccatacttgcatggaaactgactacacatacataatactgcattttattgtaaggttttcacattaatacagcaattaccctgactaaattgagttttgtgatatatggaaaacttcattgtaagagaatcttgcatacaatgttgactattaacatccaaaataaagcatctgtgtacaag

SEQ ID NO: 2845 - DNA, 783 bp, Homo sapien
cccaggagtctgggtgcacagcctccttctctctgagattcaagagtctgatcagcagcctcttcctcctccaggacccagaagccctgagcttatccccatggagctctgccggtccctggccctgctggggggctccctgggcctgatgttctgcctgattgctttgagcaccgatttctggtttgaggctgtgggtcccacccactcagctcactcgggcctctggccaacagggcatggggacatcatatcaggctacatccacgtgacgcagaccttcagcattatggctgttctgtgggccctggtgtccgtgagcttcctggtcctgtcctgcttcccctcactgttccccccaggccacggcccgcttgtctcaaccaccgcagcctttgctgcagccatctccatggtggtggccatggcggtgtacaccagcgagcggtgggaccagcctccacacccccagatccagaccttcttctcctggtccttctacctgggctgggtctcagctatcctcttgctctgtacaggtgccctgagcctgggtgctcactgtggcggtccccgtcctggctatgaaaccttgtgagcagaaggcaagagcggcaagatgagttttgagcgttgtattccaaaggcctcatctggagcctcgggaaagtctggtcctacatttgcccgcccttccagcccttccccagcccctcctcttgtttcttcattcattcaacaaaatttggctggaaaaaaaaaaaaaaaaaaaaaaaaaaaaaa

SEQ ID NO: 2846 - protein, 165 aa, Homo sapien
MELCRSLALLGGSLGLMFCLIALSTDFWFEAVGPTHSAHSGLWPTGHGDIISGYIHVTQTFSIMAVLWALVSVSFLVLSCFPSLFPPGHGPLVSTTAAFAAAISMVVAMAVYTSERWDQPPHPQIQTFFSWSFYLGWVSAILLLCTGALSLGAHCGGPRPGYETL

SEQ ID NO: 2847 - DNA, 1315 bp, Homo sapien
agccctatttatctgattatttaagtaaaactttaataaaccatgacctacattttctatgcaattttaagatactcagagttaatattttaatattgaggttcttgatttttttaatgatcagctttcaaattatatttcagtatatactctgagtctacgtgtatgctacaaaaggtgaaatgaagttagcttatttttcagtgagtttaggctatattaagagttaggtaagttaggtaagggtgaaactgctttggggcccagactgcgctggaatgtactgtttaaattcaaaggtaattgatggccagtgttcagttgctctatttgtaacgtttgcatgttggtctggctgaagtatcaggaaaacacaaaattcatgaaaatagcaccttttataattttatacttttataaagcacttgttaaagaagtatagcaaatttctatgtattttaacatacaagtcgctgcattttaatgttcatttttggtatagctatggtaacttataatagtcatttttatattcataacttgttttctgaaagatatagtcattattaaaataaacattcatgtaaatggagtaaatcataggggaatcaatcgtaataaataccttataaattataaacttgtttagatactagatttctataaccataaattttatactgtaaagtctgtttaaaatagggtttaatgaagttattttaatttttagagactcccctctaaataatttactcctacattgtaaatacattgatgccaacaaaattccaactgctactaacaaaggtttggttggtgataagctaataacagctactttgtgtaggaggtaaatatgtgtactggagggggtaaaaatccatttaggttatggcaaagatgggaatcaaactgtaaaactcatagccccataaaattaatattctttgttaagtgccagagggtttaagagaacttcttgcttagagtttattgataataataatgcttcagaatatcccatttaaatgtacagtgtaaatatgtaaaatattttacttcccaggcaagtttgtggctgtattgccacttagtggctctttgtgactggcagttctgtatatctgaaacaaataagctgtaagcacttttgttaaaactttgtcaaataatccttttatgtacttgttctcagacctgttctctggttatgaaatgtgttaaagacaaggtgcaaatttaaaacaatgcctgtattgaaataaatgacttaaacagaaaaaaaaaaacctagtagtcggggggaaccactagt

SEQ ID NO: 2848 - protein, 50 aa, Homo sapien
PYLSDYLSKTLINHDLHFLCNFKILRVNILILRFLIFLMISFQIIFQYIL

SEQ ID NO: 2849 - DNA, 2229 bp, Homo sapien
tggaagcgcccgctcgtcttgatagacgtgccaccttccgccaatggggacgaagggaagctccagcgtgtggccccggcgagtgcggataaaagccgccccgccgggctcgggcttcattctgagccgagcccggtgccaagcgcagctagctcagcaggcggcagcggcggcctgagcttcagggcagccagctccctcccggtctcgccttccctcgcggtcagcatgaaagccttcagtcccgtgaggtccgttaggaaaaacagcctgtcggaccacagcctgggcatctcccggagcaaaacccctgtggacgacccgatgagcctgctatacaacatgaacgactgctactccaagctcaaggagctggtgcccagcatcccccagaacaagaaggtgagcaagatggaaatcctgcagcacgtcatcgactacatcttggacctgcagatcgccctggactcgcatcccactattgtcagcctgcatcaccagagacccgggcagaaccaggcgtccaggacgccgctgaccaccctcaacacggatatcagcatcctgtccttgcaggtaagacctgctccggggtccccgccccgccgccgcacactcccgcggtcgtctgggctgtcactaggagatccgtagcccagacggtgactttcgtatgagctatttaactttattttcttcagaatctgctgtagattgagctgtgcgtgaaattgctagtaagttctgacatgttaatgcgtctgtctttaaatctgaattgttaccataaacgtgtttaatggaacttgctggtctgtggactacaaaaaaaaagaaaaaaaaacaaaaaccctttctacttaacattgtcttaacctcgtactctttatcctctttctttccaggcttctgaattcccttctgagttaatgtcaaatgacagcaaagcactgtgtggctgaataagcggtgagtgtttgcttgtgccacccgtgggtaaactgcccctcggtgtgtgtgcgcgcgcgcgcatgtgtttttgcttgtgtatctataaaatgtctgatttggtaaatgcatgcttacttcgcggtgttacccgtactacattgtctcactagacatgaaggagcttgtagctttgggtgctcgagatcacagaacattttcctttaaaaggaaatgatgccaataacttactacgaaggcggccgaggaacgtgtgtattggctttgtagcaaatgtaatgccctggatcttcctacgagtcctctggtactatgaggtactaacctccactgtaattaatcttaccgccacaaattccatagtgatcctccttccctaaaactatagtcctctgggattctctgggctagttgaggattgctaccctgtgccttcaaccctgtgatgtgggatcccagacttccctatctgttaactaaagggctgttttcaatcaaataattgttacgagaagcagactggcgcctgtagcactgctgttggagatccaaataggagattgggttgggaagtttttcccttgagtctctgctattttaatgtttaatttgcgctgtcgaggcgagtgtgtgtgttgcatctggacgccagggtttgcccaatctttgagtgtttggttaaatgttcaaactgtggcttcctcccggcgccagtcgcccgcctctgcccttaggttacattctcttaaacatgcctttctcccccactctttcgcaggtgttcatgatttcttttattctttgcacaacaacaacaacaacaaattcacggaatcttttaagtgctgaacttatttttcaaccatttcacaaggaggacaagttgaatggacctttttaaaaagaaaaaaaaaatggaaggaaaactaagaatgatcatcttcccagggtgttctcttacttggactgtgatattcgttatttatgaaaaagacttttaaatgccctttctgcagttggaaggttttctttatatactattcccaccatggggagcgaaaacgttaaaatcacaaggaattgcccaatctaagcagacttggccttttttcaaaggtggagcgtgaataccagaaggatccagtattcagtcacttaaatgaagtctttcggtcagaaattacctttttgacacaagcctactgaatgctgtgtatatatcatatataaatatatctattcgagtgaaaccttgtgaac

SEQ ID NO: 2850 - protein, 217 aa, Homo sapien
WKRPLVLIDVPPSANGDEGKLQRVAPASADKSRPAGLGLHSEPSPVPSAASSAGGSGGLSFRAASSLPVSPSLAVSMKAFSPVRSVRKNSLSDHSLGISRSKTPVDDPMSLLYNMNDCYSKLKELVPSIPQNKKVSKMEILQHVIDYILDLQIALDSHPTIVSLHHQRPGQNQASRTPLTTLNTDISILSLQVRPAPGSPPRRRTLPRSSGLSLGDP

SEQ ID NO: 2851 - DNA, 11740 bp, Homo sapien; identical to SEQ ID NO: 1119

SEQ ID NO: 2852 - protein, 3117 aa, Homo sapien
MRSSKSKEVPLPNPRNSQSKDTVQADITTSWDALSQTKAALRHIENKLEVAPTSTAVCDSVMDTKKSSTSATRKISRKDGRYLDDSWVNAPISKSTKSRKEKSRSPLRATTLEGNVKKNNRVEFREPLVSYREIHGAPSNFSSSHLESKHVYCVDVNEEKTESGNWMIGSREERNIRSCDFESSQSSVINDTVVRFLNDRPAIDALQNSECLIRMGASMRTEEEMPNRTKGSENNLKLSVNNMAHDTDPKALRLTDSSPSSTSTSNSQRLDILKRRQHDVKLEKLKERIRKQWEHSEETNGRGQKLGHIDHPVMVVNVDNSVTAKVRKVATAPPAPAYKGFNPSETKIRTPDGKVWQEAEFQNMSRELYRDLALHFADDISIKEKPAEKSKEKKVVKPVRKVQKVAQLSSTECRTGSSHLISTSSWRDGQKLVKKILGPAPRMEPKEQRTASSDRGGRRRTAKSGGHIGRAESDPRLDVLHRHLQRNSERSRSKSRSENNIKKLASSLPDNKQEENTALNKDFLPIEIRGILDDLQLDSTAHTAKQDTVELQNQKSSAPVHAPRSHSPVKRKPDKITANEDPPVISKRRHYDTDEVRQYIVRQQEERKRKQNEEKKAQKEATEQKNKRLQELYRKQKEAFTKVKNVPPSEPSATRRLQETYSKLLLEKTLLEEPSHQHVTQETQAKPGYQPSGESDKENKVQERPPSASSSSDMSLSEPPQPLARKDLMESTWMQPERLSPQVHHSQPQPFAGTAGSLLSHLLSLEHVGILHKDFESILPTRKNHNMASRPLTFTPQPYVTSPAAYTDALLKPSASQYKSKLDRIEALKATAASLSSRIESEAKKLAGASINYGSAWNTEYDVQQAPQEDGPWTKAVTPPVKDDNEDVFSARIQKMLGSCVSHATFDDDLPGVGNLSEFKKLPEMIRPQSAISSFRVRSPGPKPQGLLAQLCKRQTDSSSSDMQACSQDKAKISLGSSIDSVSEGPLLSEGSLSEEEGDQDGQPLLKVAEILKEKEFCPGERNSYEPIKEFQKEAEKFLPLFGHIGGTQSKGPWEELAKGSPHSVINIFTKSYQLYGKGFEDKLDRGTSTSRPLNATATPLSGVSYEDDFVSSPGTGTSTEKKSTLEPHSTLSPQEDHSNRKSAYDPSSVDVTSQHSSGAQSAASSRSSTSSKGKKGKKEKTEWLDSFTGNVQNSLLDEEKAERGSHQGKKSGTSSKLSVKDFEQTLDTDSTLEDLSGHSVSVSSDKGRSQKTPTSPLSPSSQKSLQFDVAGTSSERSKSSVMPPTITGFKPNAPLTDLNPAASRTTTENMAPIPGSKRFSPAGLHHRMAAELSYLNAIEESVRQLSDVERVRGISLAQQESVSLAQIIKAQQQRHERDLALLKLKAEQEALESQRQLEETRNKAAQVHAESLQQVVQSQREVTEVLQEATCKIAAQQSETARLTTDAARQICEMAELTRTHISDAVVASGAPLAILYDHQRQHLPDFVKQLRTRTETDRKSPSVSLSQSKEGTLDSKHQKYSASYDSYSESSGYKNHDRRSSSGSSRQESPSVPSCKENEKKLNGEKIESSIDEQVQTAADDSLRSDSVPSLPDEKDSTSIATEYSLKFDESMTEDEIEEQSFRSLLPSESHRRFNMEKRRGHHDDSDEEASPEKTTLSTAKELNMPFSGGQDSFSKFTMEMVRQYMKEEEMRAAHQSSLLRLREKALKEKTKAELAWLEHQKKHLRDKGEDDKMPPLRKKQRGLLLRLQQEKAEIKRLQEANKAARKERQLILKQQEEIEKIRQTTIKLQEKLKSAGESKLDSHSDDDTKDNKATSPGPTDLETRSPSPISISSSETSSIMQKLKKMRSRMDEKFLTKREQKLMQRRQHAEELLEWKRRLDAEEAEIRQMEKQALAAWDKELIKPKTPKKELEDQRTEQKEIASEEESPVPLYSHLNSESSIPEELGSPAVEYVPSESIGQEQPGSPDHSILTEEMICSQELESSTSPSKHSLPKSCTSVSKQESSKGSHRTGGQCHLPIKSHQHCYSWSDESLSMTQSETTSDQSDIEGRIRALKDELRKRKSVVNQLKKEQKKRQKERLKAQEASLIKQLESYDEFIKKTEAELSQDLETSPTAKPQIKTLSSASEKPKIKPLTPLHRSETAKNWKSLTESERSRGSLEPIAEHVDASLSGSERSVSERSLSAYAKRVNEWDSRTEDFQTPSPVLRSSRKIREESGDSLENVPALHLLKELNATSRILDMSDGKVGESSKKSEIKEIEYTKLKKSKIEDAFSKEGKSDVLLKLVLEQGDSSEILSKKDLPLDSENVQKDLVGLAIENLHKSEEMLKERQSDQDMNHSPNIQSGKDIHEQKNTKEKDLSWSEHLFAPKEIPYSEDFEVSSFKKEISAELYKDDFEVSSLLSLRKDSQSCRDKPQPMRSSTSGATSFGSNEEISECLSEKSLSIHSNVHSDRLLELKSPTELMKSKERSDVEHEQQVTESPSLASVPTADELFDFHIGDRVLIGNVQPGILRFKGETSFAKGFWAGVELDKPEGNNNGTYDGIAYFECKEKHGIFAPPQKISHIPENFDDYVDINEDEDCYSDERYQCYNQEQNDTEGPKDREKDVSEYFYEKSLPSVNDIEASVNRSRSLKIETDNVQDISGVLEAHVHQQSSVDSQISSKENKDLISDATEKVSIAAEDDTLDNTFSEELEKQQQFTEEEDNLYAEASEKLCTPLLDLLTREKNQLEAQLKSSLNEEKKSKQQLEKISLLTDSLLKVFVKDTVNQLQQIKKTRDEKIQLSNQELLGDDQKKVTPQDLSQNVEEQSPSISGCFLSSELEDEKEEISSPDMCPRPESPVFGASGQEELAKRLAELELSREFLSALGDDQDWFDEDFGLSSSHKIQKNKAEETIVPLMAEPKRVTQQPCETLLAVPHTAEEVEILVHNAAEELWKWKELGHDLHSISIPTKLLGCASKGLDIESTSKRVYKQAVFDLTKEIFEEIFAEDPNLNQPVWMKPCRINSSYFRRVKNPNNLDEIKSFIASEVLKLFSLKKEPNHKTDWQKMMKFGRKKRDRVDHILVQELHEEEAQWVNYDEDELCVKMQLADGIFETLIKDTIDVLNQISEKQGRMLLV

SEQ ID NO: 2853 - DNA, 3139 bp, Homo sapien
cagagagagacacaggaacaagaacagcaaagggtagagcagacctgcgccaggggcgcacaacggccgtgtccacctcccggccccaagatggtgcttcccacaggcagccacgcgtagcagccagagacagctccagacatgtggctcttcttcgggatcactggattgctgacggcagccctctcaggtcatccatctccagccccacctgaccagctcaacaccagcagtgcagagagtgagctctgggagccaggggagcggcttccggtccgtctgacaaacgggagcagcagctgcagcgggacggtggaggtgcggctcgaggcgtcctgggagcccgcgtgcggggcgctctgggacagccgcgccgccgaggccgtgtgccgagcactgggctgcggcggggcggaggccgcctctcagctcgccccgccgacccctgagctgccgcccccgcctgcagccgggaacaccagcgtagcagctaatgccactctggccggggcgcccgccctcctgtgcagcggcgccgagtggcggctctgcgaggtggtggagcacgcgtgccgcagcgacgggaggcgggcccgtgtcacctgtgcagagaaccgcgcgctgcgcctggtggacggtggcggcgcctgcgccggccgcgtggagatgctggagcatggcgagtggggatcagtgtgcgatgacacttgggacctggaggacgcccacgtggtgtgcaggcaactgggctgcggctgggcagtccaggccctgcccggcttgcacttcacgcccggccgcgggcctatccaccgggaccaggtgaactgctcgggggccgaagcttacctgtgggactgcccggggctgccaggacagcactactgcggccacaaagaggacgcgggcgcggtgtgctcagagcaccagtcctggcgcctgacagggggcgctgaccgctgcgaggggcaggtggaggtacacttccgaggggtctggaacacagtgtgtgacagtgagtggtacccatcggaggccaaggtgctctgccagtccttgggctgtggaactgcggttgagaggcccaaggggctgccccactccttgtccggcaggatgtactactcatgcaatggggaggagctcaccctctccaactgctcctggcggttcaacaactccaacctctgcagccagtcgctggcagccagggtcctctgctcagcttcccggagtttgcacaatctgtccactcccgaagtccctgcaagtgttcagacagtcactatagaatcttctgtgacagtgaaaatagagaacaaggaatctcgggagctaatgctcctcatcccctccatcgttctgggaattctcctccttggctccctcatcttcatagccttcatcctcttgagaattaaaggaaaatatgccctccccgtaatggtgaaccaccagcacctacccaccaccatcccggcagggagcaatagctatcaaccggtccccatcaccatccccaaagaagttttcatgctgcccatccaggtccaggccccgccccctgaggactcagactctggctcggactcagactatgagcactatgacttcagcgcccagcctcctgtggccctgaccaccttctacaattcccagcggcatcgggtcacagatgaggaggtccagcaaagcaggttccagatgccacccttggaggaaggacttgaagagttgcatgcctcccacatcccaactgccaaccctggacactgcattacagacccgccatccctgggccctcagtatcacccgaggagcaacagtgagtcgagcacctcttcaggggaggattactgcaatagtcccaaaagcaagctgcctccatggaacccccaggtgttttcttcagagaggagttccttcctggagcagcccccaaacttggagctggccggcacccagccagccttttcagggcccccggctgatgacagctccagcacctcatccggggagtggtaccagaacttccagccgaggctcctggggtggctctgaccctctggcctcctgctctacctactccctttcccctttcccaccctcccagctcacctccccatggagctgagaggcctcccttggagagatggaaggaaacgttataccttgtacccctcggtctccatccatcaagccaaacctgctgccacagccctcccccggccccagatagcagccccagggaggatgctgcctccaagaggtgtgagccctctgtctcggggatgaacaagcagagtctgggctacctcttgacagctggtggaggggagttggggagctggactggatgactctggaggccccttccaaacctcaagtgtccggcgctttgattgcctgagtttctgacacttcagggcccagaggtcctgcgaggggcagaactggacccccatgccagtgctgctgcaggagggcccatatactagggtctgctgagctgttgtcactgatcggtgggcgctgggggggtagggtagcacaccagctgtcccaggctttgctccgggcggtaactgcacttgggcagggaatatagccttcctgggcacaactagctgacaatgacaggttgactgtgtacccccaaccaaggagctggggcccaaggccagtcctgccccagagacactccaagtccgccaggggcacagaccagttctgcagtgactgtccctggacaatgggtctttattctgagtttcctatggtttacaaagagggccccagcccagccccaccacagatcccagagataggggcccagtctccatgggggcaaggagcatagagatgttttccaggaaggggctcagaagctgcactaggccccgagtccccatgtgtctccttgaattgatgaggatgctcctgggagggatgcgtgactatgtggtgttgcacccggggctgcaaacgtctccgtgcagcccccagagagaggcccatgggctcagaccaggctttgttgtcctgctctgagtatcctgagattaaactgaattgctgaatgaaaaaaaaaaaaaaaaaaaaaaaaaaaaaaaaaaaaaaaaaaaaaaaaaaaaaaaaa

SEQ ID NO: 2854 - protein, 639 aa, Homo sapien [sequence omitted]

SEQ ID NO: 2855 - DNA, 1487 bp, Homo sapien
ctagcactctgacctagcagtcaacatgaaggctctcattgttctggggcttgtcctcctttctgttacggtccagggcaaggtctttgaaaggtgtgagttggccagaactctgaaaagattgggaatggatggctacaggggaatcagcctagcaaactggatgtgtttggccaaatgggagagtggttacaacacacgagctacaaactacaatgctggagacagaagcactgattatgggatatttcagatcaatagccgctactggtgtaatgatggcaaaaccccaggagcagttaatgcctgtcatttatcctgcagtgctttgctgcaagataacatcgctgatgctgtagcttgtgcaaagagggttgtccgtgatccacaaggcattagagcatgggtggcatggagaaatcgttgtcaaaacagagatgtccgtcagtatgttcaaggttgtggagtgtaactccagaattttccttcttcagctcattttgtctctctcacattaagggagtaggaattaagtgaaaggtcacactaccattatttccccttcaaacaaataatatttttacagaagcaggagcaaaatatggcctttcttctaagagatataatgttcactaatgtggttattttacattaagcctacaacatttttcagtttgcaaatagaactaatactggtgaaaatttacctaaaaccttggttatcaaatacatctccagtacattccgttcttttttttttttgagacagtctcgctctgtcgcccaggctggagtgcagtggcgcaatctcggctcactgcaacctccacctcccgggttcacgccattctcctgcctcagcctcccgagtagctgggattacgggcgcccgccaccacgcccggctaattttttgtatttttagtagagacagggtttcaccgtgttagccaggatggtctcgatctcctgaccttgtgatccacccacctcggcctcccaaagtgctgggattacaggcgtgagccactgcgcccggccacattcagttcttatcaaagaaataacccagacttaatcttgaatgatacgattatgcccaatattaagtaaaaaatataagaaaaggttatcttaaatagatcttaggcaaaataccagctgatgaaggcatctgatgccttcatctgttcagtcatctccaaaaacagtaaaaataaccactttttgttgggcaatatgaaatttttaaaggagtagaataccaaatgatagaaacagactgcctgaattgagaattttgatttcttaaagtgtgtttctttctaaattgctgttccttaatttgattaatttaattcatgtattatgattaaatctgaggcagatgagcttacaagtattgaaataattactaattaatcacaaatgtgaagttatgcatgatgtaaaaaatacaaacattctaattaaaggctttgcaacac

SEQ ID NO: 2856 - protein, 148 aa, Homo sapien
MKALIVLGLVLLSVTVQGKVFERCELARTLKRLGMDGYRGISLANWMCLAKWESGYNTRATNYNAGDRSTDYGIFQINSRYWCNDGKTPGAVNACHLSCSALLQDNIADAVACAKRVVRDPQGIRAWVAWRNRCQNRDVRQYVQGCGV

SEQ ID NO: 2857 - DNA, 1157 bp, Homo sapien
ctggtgtttatccgtcactcgccgaggttccttgggtcatggtgccagcctgactgagaagaggacgctcccgggagacgaatgaggaaccacctcctcctactgttcaagtacaggggcctggtccgcaaagggaagaaaagcaaaagacgaaaatggctaaattcgtgatccgcccagccactgccgccgactgcagtgacatactgcggctgatcaaggagctggctaaatatgaatacatggaagaacaagtaatcttaactgaaaaagatctgctagaagatggttttggagagcaccccttttaccactgcctggttgcagaagtgccgaaagagcactggactccggaaggttacagtctctagcttcgccatgtacatggcccttccgtgtacatggatgggcggggaggtaactaaaagatcctttacacaataaagtagatgatcatgataaatgaggacacagcattgttggttttgccatgtactattttacctatgacccgtggattggcaagttattgtatcttgaggacttcttcgtgatgagtgattatagaggctttggcataggatcagaaattctgaagaatctaagccaggttgcaatgaggtgtcgctgcagcagcatgcacttcttggtagcagaatggaatgaaccatccatcaacttctataaaagaagaggtgcttctgatctgtccagtgaagagggttggagactgttcaagatcgacaaggagtacttgctaaaaatggcaacagaggagtgaggagtgctgctgtagatgacaacctccattctattttagaataaattcccaacttctcttgctttctatgctgtttgtagtgaaataatagaatgagcacccattccaaagctttattaccagtggcgttgttgcatgtttgaaatgaggtctgtttaaagtggcaatctcagatgcagtttggagagtcagatctttctccttgaatatctttcgataaacaacaaggtggtgtgatcttaatatatttgaaaaaaacttcattctcgtgagtcatttaaatgtgtacaatgtacacactggtacttagagtttctgtttgattcttttttaataaactactctttgatttaaaaaaaaaaaaaaaaaaaaaaaa

SEQ ID NO: 2858 - protein, 75 aa, Homo sapien
MSDYRGFGIGSEILKNLSQVAMRCRCSSMHFLVAEWNEPSINFYKRRGASDLSSEEGWRLFKIDKEYLLKMATEE

SEQ ID NO: 2859 - DNA, 774 bp, Homo sapien
cagctgtgtggacagtgccacacgccctcctggacaacgacggctcttgcgtgcattttccagtgttgcttttgtcagagaggccagcagagccacggttcttccagaaccagccctgagctgagtgaggagtgcccaggagagatggtgaaaatgacaaagtccaaaactttccaagcgtatctgccgaactgtcaccgaacgtacagctgtatccactgcagagcacacctggccaatcatgacgagctcatctccaagtcctttcaggggagccagggacgcgcctacctcttcaattccgtggtgaacgtgggctgcggccctgcagaggagagggtccttctcaccgggctgcatgcggttgccgacatctactgcgagaactgcaagaccacgctcgggtggaaatacgagcatgcctttgagagcagtcagaaatataaggaaggaaaattcatcattgagcttgctcatatgatcaaagacaatggctgggagtaatgtgcgaactttcccttctccttcgaatgctgttttgtgaaagaaactgtgaatgtaatggaaacgtaggagcatctggtgacagcctttcttgccctctgacctcaaaggctagctgcgcatagctcttgacactcccggccatctctgtgggtaaggtgtccctcggatctgtcctcttcgtgtacacagttgtttctgaaaattttcaatgagctttttctaacttctcaagttctagagaaagaattaaccaactgatgacttaaa

SEQ ID NO: 2860 - protein, 119 aa, Homo sapien
MVKMTKSKTFQAYLPNCHRTYSCIHCRAHLANHDELISKSFQGSQGRAYLFNSVVNVGCGPAEERVLLTGLHAVADIYCENCKTTLGWKYEHAFESSQKYKEGKFIIELAHMIKDNGWE

SEQ ID NO: 2861 - DNA, 1280 bp, Homo sapien; identical to SEQ ID NO: 771

SEQ ID NO: 2862 - protein, 178 aa, Homo sapien; identical to SEQ ID NO: 772

SEQ ID NO: 2863 - DNA, 647 bp, Homo sapien; identical to SEQ ID NO: 396

SEQ ID NO: 2864 - protein, 125 aa, Homo sapien; identical to SEQ ID NO: 397

SEQ ID NO: 2865 - DNA, 1274 bp, Homo sapien
ggcacgaggcccagagaggctcagctgcactcgcccggctgggagagctgggtgtggggaacatggccgggcctccgaggctcctgctgctgcccctgcttctggcgctggctcgcggcctgcctggggccctggctgcccaagaggtgcagcagtctccccactgcacgactgtccccgtgggagcctccgtcaacatcacctgctccaccagcgggggcctgcgtgggatctacctgaggcagctcgggccacagccccaagacatcatttactacgaggacggggtggtgcccactacggacagacggttccggggccgcatcgacttctcagggtcccaggacaacctgactatcaccatgcaccgcctgcagctgtcggacactggcacctacacctgccaggccatcacggaggtcaatgtctacggctccggcaccctggtcctggtgacagaggaacagtcccaaggatggcacagatgctcggacgccccaccaagggcctctgccctccctgccccaccgacaggctccgccctccctgacccgcagacagcctctgccctccctgacccgccagcagcctctgccctccctgcggccctggcggtgatctccttcctcctcgggctgggcctgggggtggcgtgtgtgctggcgaggacacagataaagaaactgtgctcgtggcgggataagaattcggcggcatgtgtggtgtacgaggacatgtcgcacagccgctgcaacacgctgtcctcccccaaccagtaccagtgacccagtgggcccctgcacgtcccgcctgtggtccccccagcaccttccctgccccaccatgccccccaccctgccacacccctcaccctgctgtcctcccacggctgcagcagagtttgaagggcccagccgtgcccagctccaagcagacacacaggcagtggccaggccccacggtgcttctcagtggacaatgatgcctcctccgggaagccttccctgcccagcccacgccgccaccgggaggaagcctgactgtcctttggctgcatctcccgaccatggccaaggagggcttttctgtgggatgggcctgggcacgcggccctctcctgtcagtgccggcccacccaccagcaggcccccaacccccaggcagcccggcagaggacgggaggagaccagtcccccacccagccgtaccagaaataaaggcttctgtgcttcctttaaaaaaaaaaaaaaaaaaaaataaaaaaaaaaaaaaaa

SEQ ID NO: 2866 - protein, 240 aa, Homo sapien
MAGPPRLLLLPLLLALARGLPGALAAQEVQQSPHCTTVPVGASVNITCSTSGGLRGIYLRQLGPQPQDIIYYEDGVVPTTDRRFRGRIDFSGSQDNLTITMHRLQLSDTGTYTCQAITEVNVYGSGTLVLVTEEQSQGWHRCSDAPPRASALPAPPTGSALPDPQTASALPDPPAASALPAALAVISFLLGLGLGVACVLARTQIKKLCSWRDKNSAACVVYEDMSHSRCNTLSSPNQYQ

SEQ ID NO: 2867 - DNA, 2122 bp, Homo sapien
ggcacgaggccgagttgcgatgctgtacttctctttgttttgggcggctcggcctctgcagagatgtgggcagctggtcaggatggccattcgggctcagcacagcaacgcagcccagactcagactggggaagcaaacaggggctggacaggccaggagagcctgtcggacagtgatcctgagatgtgggagttgctgcagagggagaaggacaggcagtgtcgtggcctggagctcattgcctcagagaacttctgcagccgagctgcgctggaggccctggggtcctgtctgaacaacaagtactcggagggttatcctggcaagagatactatgggggagcagaggtggtggatgaaattgagctgctgtgccagcgccgggccttggaagcctttgacctggatcctgcacagtggggagtcaatgtccagccctactccgggtccccagccaacctggccgtctacacagcccttctgcaacctcacgaccggatcatggggctggacctgcccgatgggggccatctcacccacggctacatgtctgacgtcaagcggatatcagccacgtccatcttcttcgagtctatgccctataagctcaaccccaaaactggcctcattgactacaaccagctggcactgactgctcgacttttccggccacggctcatcatagctggcaccagcgcctatgctcgcctcattgactacgcccgcatgagagaggtgtgtgatgaagtcaaagcacacctgctggcagacatggcccacatcagtggcctggtggctgccaaggtgattccctcgcctttcaagcacgcggacatcgtcaccaccactactcacaagactcttcgaggggccaggtcagggctcatcttctaccggaaaggggtgaaggctgtggaccccaagactggccgggagatcccttacacatttgaggaccgaatcaactttgccgtgttcccatccctgcaggggggcccccacaatcatgccattgctgcagtagctgtggccctaaagcaggcctgcacccccatgttccgggagtactccctgcaggttctgaagaatgctcgggccatggcagatgccctgctagagcgaggctactcactggtatcaggtggtactgacaaccacctggtgctggtggacctgcggcccaagggcctggatggagctcgggctgagcgggtgctagagcttgtatccatcactgccaacaagaacacctgtcctggagaccgaagtgccatcacaccgggcggcctgcggcttggggccccagccttaacttctcgacagttccgtgaggatgacttccggagagttgtggactttatagatgaaggggtcaacattggcttagaggtgaagagcaagactgccaagctccaggatttcaaatccttcctgcttaaggactcagaaacaagtcagcgtctggccaacctcaggcaacgggtggagcagtttgccagggccttccccatgcctggttttgatgagcattgaaggcacctgggaaatgaggcccacagactcaaagttactctccttccccctacctgggccagtgaaatagaaagcctttctattttttggtgcgggagggaagacctctcacttagggcaagagccaggtatagtctcccttcccagaatttgtaactgagaagatcttttctttttcctttttttggtaacaagacttagaaggagggcccaggcactttctgtttgaacccctgtcatgatcacagtgtcagagacgcgtcctctttcttggggaagttgaggagtgcccttcagagccagtagcaggcaggggtgggtaggcaccctccttcctgtttttatctaataaaatgctaacctgccctgagtttccattactgtgggtggggttcccctgggccaaacagtgatttgtctccctcaatgtgtacaccgctccgctcccaccaccgctaccacaaggacccccggggctgcagcctcctctttctgtctctgatcagagccgacaccagacgtgattagcaggcgcagcaaattcaatttgttaaatgaaattgtattttgaaaaaaaaaaaaaaaaaa

SEQ ID NO: 2868 - protein, 504 aa, Homo sapien
MLYFSLFWAARPLQRCGQLVRMAIRAQHSNAAQTQTGEANRGWTGQESLSDSDPEMWELLQREKDRQCRGLELIASENFCSRAALEALGSCLNNKYSEGYPGKRYYGGAEVVDEIELLCQRRALEAFDLDPAQWGVNVQPYSGSPANLAVYTALLQPHDRIMGLDLPDGGHLTHGYMSDVKRISATSIFFESMPYKLNPKTGLIDYNQLALTARLFRPRLIIAGTSAYARLIDYARMREVCDEVKAHLLADMAHISGLVAAKVIPSPFKHADIVTTTTHKTLRGARSGLIFYRKGVKAVDPKTGREIPYTFEDRINFAVFPSLQGGPHNHAIAAVAVALKQACTPMFREYSLQVLKNARAMADALLERGYSLVSGGTDNHLVLVDLRPKGLDGARAERVLELVSITANKNTCPGDRSAITPGGLRLGAPALTSRQFREDDFRRVVDFIDEGVNIGLEVKSKTAKLQDFKSFLLKDSETSQRLANLRQRVEQFARAFPMPGFDEH

SEQ ID NO: 2869 - DNA, 2122 bp, Homo sapien; identical to SEQ ID NO: 2867

SEQ ID NO: 2870 - protein, 504 aa, Homo sapien; identical to SEQ ID NO: 2868

SEQ ID NO: 2871 - DNA, 1067 bp, Homo sapien
atgacctttcctctttatcttccttgttgtgcaggtaaagaaaccaagtggaagagtgtttcctcctctggccgtaaagcagctgtccccgccctactccggaccgccccaaagactccatgggatggacctgagtcagccgaatcctagccccttcccttgggcctgctgtggtgctcgacatcagtgacagacggaagcagcagaccatcaaggctacgggaggcccggggcgcttgcgaagatgaagtttggctgcctctccttccggcagccttatgctggctttgtcttaaatggaatcaagactgtggagacgcgctggcgtcctctgctgagcagccagcggaactgtaccatcgccgtccacattgctcacagggactgggaaggcgatgcctgtcgggagctgctggtggagagactcgggatgactcctgctcagattcaggccttgctcaggaaaggggaaaagtttggtcgaggagtgatagcgggactcgttgacattggggaaactttgcaatgccccgaagacttaactcccgatgaggttgtggaactagaaaatcaagctgcactgaccaacctgaagcagaagtacctgactgtgatttcaaaccccaggtggttactggagcccatacctaggaaaggaggcaaggatgtattccaggtagacatcccagagcacctgatccctttggggcatgaagtgtgacaagtgtgggctcctgaaaggaatgttccagagaaaccagctaaatcatggcaccttcaatttgccatcgtgacgcagacctgtataaattaggttaaagatgaatttccactgctttggagagtcccacccactaagcactgtgcatgtaaacaggttcctttgctcagatgaaggaagtagggggtggggctttccttgtgtgatgcctccttaggcacacaggcaatgtctcaagtactttgaccttagggtagaaggcaaagctgccagtaaatgtctcagcattgctgctaattttggtcctgctagtttctggattgtacaaataaatgtgttgtagatg

SEQ ID NO: 2872 - DNA, 2787 bp, Homo sapien
gcacagacgagatctcgatcgaaggcgagatggcggacgtgctagatcttcacgaggctgggggcgaagatttcgccatggatgaggatggggacgagagcattcacaaactgaaagaaaaagcgaagaaacggaagggtcgcggctttggctccgaagaggggtcccgagcgcggatgcgtgaggattatgacagcgtggagcaggatggcgatgaacccggaccacaacgctctgttgaaggctggattctctttgtaactggagtccatgaggaagccaccgaagaagacatacacgacaaattcgcagaatatggggaaattaaaaacattcatctcaacctcgacaggcgaacaggatatctgaaggggtatactctagttgaatatgaaacatacaaggaagcccaggctgctatggagggactcaatggccaggatttgatgggacagcccatcagcgttgactggtgttttgttcggggtccaccaaaaggcaagaggagaggtggccgaagacgcagcagaagtccagaccggagacgtcgctgacaggtcctctgttgtccaggtgttctcttcaagattccatttgaccatgcagccttggacaaataggactggggtggaacttgctgtgtttatatttaatctcttaccgtatatgcgtagtatttgagttgcgaataaatgttccatttttgttttctacatttaatgttactttcctgtcctaaaattgaaagttctaaagcatagcaaggctgtatggatcattgtgaagatacttctagggactgaactctatgtatttcttttttttcttttttttgagatagagtcttgctgtgttacccagggtggattgcagctgatcatagctcactgcagcttcaaactcttgggctcaagccatccttctgcctcactgtccctagtagttgggattacaggcacatgccaccatgcccagctaaatttttaatatttttgtagagatggggtcttgctgtgttacctgggctagttatgtgagtttctatattagacatagtctcaagtttcaggtagggtttaaagtagagacactggtcagtatttcttttttggggggaactaggagagcaggagtagaagtgagatgttaagatcttatggcactaaagacttactattctgttcctacatactctgttaggatcagatagatgttatagaaatgccttttgtttctcctgcccttcttgatgtcacagttttttgtacttccagctgtctaaaggcatgaatctcctcttggagcattctcccagacccttctttagaagagtctatactaagttcttggtgccctcttcggcagccaagggtgaaggccccatagaggagaggatccaaaggagcattgaggaggcccaagaggaaaaggatgtggctcaggctgggagggacttcagttagcatggtgggggagaaccagtaccacatacccagtaggtaataaggtgtccagcagaggatgaaggtcagcaagataagcagggccagtctcagggcccggagacgaacacggggacaattgtcaaaggagcgggggagggcaaattcaccagcaggggctaggaatttagaaaatatactgtaattcagacactcagcttctgatctgagtatagggtgaattgatggaggggcatagctagtgagacagagctcgcctcctacaaggaggagaatgttgcaaaccgttttccccttcccaacctgggactatatgatttcttacccccagggattatgatagaaatatgaagccaccaagtctagacttgatggtgttcaagaataaataatactgattgcctccctagtccttgtccagctaactcagctgtttataattgaagggattcaacaaaattatctctagcatcaggtgctagacatggttagaatctcaccatggtttagtgactggtagatagctattaggtaggtagataaataaatgatgctagaggcaacaggtctagggttaaggattaaggcctgggaattggagtctcaccatggctccccttccttgtctggggcctggacacactgaggacaatgcggctatagcagatggccatggcagtcagtggcagcagaaagaggcagcagaaggtgaagaggttataggtggtctcttgccattgagccttgaagctgcctttggtgacacactgagtgaaagggactgggccagctcagtggaccgtgtggaacaggaacagctggagtggagttgaggactattagaactggttcccctcaccacccaacctacccacctatgtcatactgtctcctcccaattcatccttaattccaagtgaagcagcacagtgctgagaaacagttcatccatggtgccatgttaaagaagttggaaatatatcttgaaaatcctatcttccttttaggcttgaatatgatgctgaacagtaagtttgttaaatcttggaacttaaaacaatcctgctttctcaagtactattctaacattgcgctttataagggatgatatttctaccacctcactcatatttttagctgaaatgattttcctggtatgtctgttattttgtggaaaaagaaatattgtgtaaaatgggtgctgccaaaattccaggccattttgcagggactctgaagtgacctttagtagtaatagtcttatgtgcagtaactataatggtaaagaatgttaaataataaaatttaacattttccaaatgct

SEQ ID NO: 2873 - protein, 174 aa, Homo sapien
MADVLDLHEAGGEDFAMDEDGDESIHKLKEKAKKRKGRGFGSEEGSRARMREDYDSVEQDGDEPGPQRSVEGWILFVTGVHEEATEEDIHDKFAEYGEIKNIHLNLDRRTGYLKGYTLVEYETYKEAQAAMEGLNGQDLMGQPISVDWCFVRGPPKGKRRGGRRRSRSPDRRRR

SEQ ID NO: 2874 - DNA, 1016 bp, Homo sapien
tcattgactgccaaagaggatgtcagcatacccagatccacattaggagatttggacacagttgcagggctggaaaaagaactgagtaatgccaaagaggaacttgaactcatggctaaaaaagaaagagaaagtcagatggaactttctgctctacagtccatgatggctgtgcaggaagaagagctgcaggtgcaggctgctgatatggagtctctgaccaggaacatacagattaaagaagatctcataaaggacctgcaaatgcaactggttgatcctgaagacataccagctatggaacgcctgacccaggaagtcttacttcttcgggaaaaagttgcttcagtagaatcccagggtcaagaaatttcaggaaaccgaagacaacagttgctgctgatgctagaaggactagtagatgaacggagtcggctcaatgaggccttacaagcagagagacagctctatagcagtctggtgaagttccatgcccatccagagagctctgagagagaccgaactctgcaggtggaactggaaggggctcaggtgttacgcagtcggctagaagaagttcttggaagaagcttggagcgcttaaacaggctggagaccctggccgccattggaggtggggaactggaaagtgtgcgaattcatcacaagcatgcctactgagcactggcgggtcagactgcagcccaggatggaaaaccttgtttgcactaaccagaaagatccttgtctgattttggcagaattaaacggtgacttactaatgatagaactggtacaagtagcatcaactacaaagtgaaactcactttagcctacatggatctcactgtacatacatatcaatccctaaattgaatggtggaggttgcaaagtgtatttgcacattttaaatcattctgttttagtttttccacttttattcattcttatccctagccccttctcgttccctcatcccttctgtgggccaataaagtttattcttccccaaaaa

SEQ ID NO: 2875 - protein, 226 aa, Homo sapien
SLTAKEDVSIPRSTLGDLDTVAGLEKELSNAKEELELMAKKERESQMELSALQSMMAVQEEELQVQAADMESLTRNIQIKEDLIKDLQMQLVDPEDIPAMERLTQEVLLLREKVASVESQGQEISGNRRQQLLLMLEGLVDERSRLNEALQAERQLYSSLVKFHAHPESSERDRTLQVELEGAQVLRSRLEEVLGRSLERLNRLETLAAIGGGELESVRIHHKHAY

SEQ ID NO: 2876 - DNA, 467 bp, Homo sapien
ccagcctgggcaacacggtgagaccctgtccctacaaaaaatgagagttgcagtttttagctccagttgctatttttcatcaaatcaaggctggtatttagctgatatgtaccacaactattatatgtagctggccttatgtgttgttatatatttagaatattactcttgcatcaagctgtttcttttgctaactgcttgttaacagttaactagcactgctaaaagcatttatattgatttttttcccatacaggcacatgatggctccgctacttacttgagattcattattgtatcagcctttgatcattttgcatctgtgcatagcgtttctgcagaaggaacagtagtctcaaatctttcctcataatgataacaaaatgctcttgcatgattttttaacaatatatttaaacaggaagttgtcactgatatactttattaaaaggatttttatcaaaaaa

SEQ ID NO: 2877 - protein, 42 aa, Homo sapien
QPGQHGETLSLQKMRVAVFSSSCYFSSNQGWYLADMYHNYYM

SEQ ID NO: 2878 - DNA, 590 bp, Homo sapien
cctgaggcggcggcgcgaggcagtttcttttctgattctgagatgcttgtgagagcttcagccatctaggaacgcatacgctgctgcttgaccacgctgtagcagtatggtttgaagtggtgaacatggatttttctcggcttcacatgtacagtcctccccagtgtgtgccggagaacacgggctacacgtatgcgctcagttccagctattcttcagatgctctggattttgagacggagcacaaattggaccctgtatttgattctccacggatgtcccgccgtagtttgcgcctggccacgacagcatgcaccctgggggatggtgaggctgtgggtgccgacagcggcaccagcagcgctgtctccctgaagaaccgagcggccaggtgagcaccgctgcacttcctctccatctgatctctaacaccagttaaaaccaagcttccatactttttggtctgtaaagccgcaccctgtctcgagcttaaggatatgtgtgtgtatgtgcgtgtacagacacacaaacctgtcatataaagtggtagtttgctgcaaataaagactgaaaggaactctggaaaaaaa

SEQ ID NO: 2879 - protein, 89 aa, Homo sapien
MDFSRLHMYSPPQCVPENTGYTYALSSSYSSDALDFETEHKLDPVFDSPRMSRRSLRLATTACTLGDGEAVGADSGTSSAVSLKNRAAR

SEQ ID NO: 2880 - DNA, 3213 bp, Homo sapien; identical to SEQ ID NO: 1683

SEQ ID NO: 2881 - protein, 731 aa, Homo sapien; identical to SEQ ID NO: 1684

SEQ ID NO: 2882 - DNA, 4760 bp, Homo sapien
ggccggcggtggcggcggcgagggctggactcgggcttagggcctgctgtggaggcagcggcggacgccgagctaagcagtttctctggaaacccccctggtaagtgtggaggaggcgggacactctgacccaagacgaaaggcctgtagctccagccaaagaaaataaaccttaggagggagaaggaaaaaaaaaaatccatcagctgttcctgagaacagcctgcattggaatctacagagaggacaactaatgtgagtgaggaagtgactgtatgtggactgtggagaaagtaagtcacgtgggcccttgaggacctggactgggttaggaacagttgtactttcagaggtgaggtgtcgagaagggaaagtgaatgtggtctggagtgtgtccttggccttggctccacagggtgtgctttcctctggggccgtcagggagctcatcccttgtgttctgccagggtggggtacggggtttgacactgaggagggtaacctgctggctggagcggcagagcagtggccttgatttgtcttttggaagattttaaaaaccaaaaagcataaacattctggtccttcagcaatgctttctctgaagaaatacttaacggaaggacttctccagttcaccattctgctgagtttgattggggtacgggtggacgtggatacttacctgacctcacagcttcccccactccgggagatcatcctggggcccagttctgcctatactcagacccagttccacaacctgaggaataccttggatggctatggtatccaccccaagagcatagacctggacaattacttcactgcccggcggctcctcagtcaggtgagggccctggacaggttccaggtgccaaccactgaggtaaatgcctggctggttcaccgagacccagaggggtctgtctctggcagtcagcccaactcaggcctcgccctcgagagttccagtggcctccaagatgtgacaggcccagacaacggggtgcgagaaagcgaaacggagcagggattcggtgaagatttggaggatttgggggctgtagcccccccagtcagtggagacttaaccaaagaggacatagatctgattgacatcctttggcgacaggatattgatctgggggctgggcgtgaggtttttgactatagtcaccgccagaaggagcaggatgtggagaaggagctgcgagatggaggcgagcaggacacctgggcaggcgagggcgcggaagctctggcacggaacctgctagtggatggagagactggggagagcttccctgcacaggtgcctagtggggaggaccagacggccctgtccctggaagagtgccttaggctgctggaagccacctgcccctttggggagaatgctgagtttccagcagacatttccagcataacagaagcagtgcctagtgagagtgagccccctgctcttcaaaacaacctcttgtctcctcttctgaccgggacagagtcaccatttgatttggaacagcagtggcaagatctcatgtccatcatggaaatgcaggccatggaagtgaacacatcagcaagtgaaatcctgtacagtgcccctcctggagacccactgagcaccaactacagccttgcccccaacactcccatcaatcagaatgtcagcctgcatcaggcgtccctggggggctgcagccaggacttcttactcttcagccccgaggtggaaagcctgcctgtggccagtagctccacgctgctcccgttggcccccagcaattctaccagcctcaactccaccttcggctccaccaacctgacagggctcttctttccaccccagctcaatggcacagccaatgacacagcaggcccagagctgcctgaccctttggggggtctgttagatgaagctatgttggatgagatcagccttatggacctggccattgaagaaggctttaaccctgtgcaggcctcccagctggaggaggaatttgactctgactcaggcctttccttagactcgagccatagcccttcttccctaagcagctctgaaggcagttcttcctcttcttcctcctcctcttcctcttcttcctctgcttcttcctctgcctcttcctccttttctgaggaaggtgcggttggctacagctctgactctgagaccctggatctggaagaggccgagggtgctgtgggctaccagcctgagtattccaagttctgccgcatgagctaccaggatccagctcagctctcatgcctgccctacctggagcacgtgggccacaaccacacatacaacatggcacccagtgccctggactcagccgacctgccaccacccagtgccctcaagaaaggcagcaaggagaagcaggctgacttcctggacaagcagatgagccgggatgagcaccgagcccgagccatgaagatccctttcaccaatgacaaaatcatcaacctgcctgtggaggagttcaatgaactgctgtccaaataccagttgagtgaagcccagctgagcctcatccgagacatccggcgccggggcaagaacaagatggcggcgcagaactgccgcaagcgcaagctggacaccatcctgaatctggagcgtgatgtggaggacctgcagcgtgacaaagcccggctgctgcgggagaaagtggagttcctgcgctccctgcgacagatgaagcagaaggtccagagcctgtaccaggaggtgtttgggcggctgcgagatgagaacggacgaccctactcgcccagtcagtatgcgctccagtacgccggggacggcagtgtcctcctcatcccccgcacgatggccgaccagcaggcccggcggcaggagaggaagccaaaggaccggagaaagtgagcctggggaagaagggggtttgaagcccaccaagaccgaaactggagaagggctggacctggacctggacctggacctacagcggggacttaaatgccttcttatccaatatatcttctcagatgggatgactgcgggtcagtgtacaggaagaggcaggcactggctggctcagctccactcgggtggagtggaagtggccagaccatttagacggacagggtcctcaccctacccctttcctgtgaggcaggggtggtggtggagttgctggaggtagaggagctatgtggagcaaaggccgacagaggggaaggaatggacctgtgagaggaagggaaggtggcagaaagtctcatttcaggaaggagggatagaaggaaggaaggaaggaacccccccccccccccgaaaaaaaaatcaaagcgggaagaaaatcagagggaaggttaaggttggctctggccaggattccaggcagcaggttggagtgactggtgggcctagatcactggtgtgataaaccccatttcaccccggggggggtggggtacacagacacagggtgggggtggggaggggcggtgttaactctttctgctccttgcattttgacatccctgaaggggagctcttggatatcattggccatgtttcaatcgaatggagccactgggccccaacactggctttgagatttagagtcaaagggtagagtgaacaggaaagggtcacgtggtcccatgttgcaacagccccaacatcacgcatgtcattcactgccttgccactccatctccctccgtgctccagccacccctgagctgaggctcccattgtctccatcagagcctgcatgtgtatgccgtcctcccctggtccggtgtttgtgttccccacccctcacagactgcctgagctcttctgtaagctggggtagggtgatggcagtgctccgggaactgggcctgcagccttcctcttctgggactgctgtgaggcagaggaatgatggagaatctagtgtagcagcctccaggcaggattcagcacaacactggggagtcacccttccctcgggcctctgcctaccaacaactgggcttatcactgggaaaacacaaaaaattacacaacccagcaacaacaaaagaactagtcctcttagaatttcttgcgctttgatttttttagggcttgtgccctgtttcacttatagggtctagaatgcttgtgttgagtaaaaaggagattcccaatattcaaagctgctaaatgttctctttgccataaagactccgtgtaactgtgtgaacacttgggatttttctcctctgtcccgaggtcgtcgtctgctttcttttttgggtttctttctagaagattgagaagtgcatatgacaggctgagagcacctccccaaacacacaagctctcagccacaggcagcttctccacagccccagcttcgcacaggctcctggagggctgcctgggggaggcagacatgggagtgccaaggtggccagatggttccaggactacaatgtctttatttttaactgtttgccactgctgccctcacccctgcccggctctggagtaccgtctgccccagacaagtgggagtgaaatgggggtggggggaagcactgattcccagttagggggtgcctaactgagcagtagggatagaaggtgtgaacctgggagtgcttttataaattattttccttgtagattttatttttaatttatctctgtgacctgccagggagaggggagagagagagagatgctgttgagcacatgacaaaataaaataaaatggatgattcaaaaaaaaaaa

SEQ ID NO: 2883 - protein, 772 aa, Homo sapien
MLSLKKYLTEGLLQFTILLSLIGVRVDVDTYLTSQLPPLREIILGPSSAYTQTQFHNLRNTLDGYGIHPKSIDLDNYFTARRLLSQVRALDRFQVPTTEVNAWLVHRDPEGSVSGSQPNSGLALESSSGLQDVTGPDNGVRESETEQGFGEDLEDLGAVAPPVSGDLTKEDIDLIDILWRQDIDLGAGREVFDYSHRQKEQDVEKELRDGGEQDTWAGEGAEALARNLLVDGETGESFPAQVPSGEDQTALSLEECLRLLEATCPFGENAEFPADISSITEAVPSESEPPALQNNLLSPLLTGTESPFDLEQQWQDLMSIMEMQAMEVNTSASEILYSAPPGDPLSTNYSLAPNTPINQNVSLHQASLGGCSQDFLLFSPEVESLPVASSSTLLPLAPSNSTSLNSTFGSTNLTGLFFPPQLNGTANDTAGPELPDPLGGLLDEAMLDEISLMDLAIEEGFNPVQASQLEEEFDSDSGLSLDSSHSPSSLSSSEGSSSSSSSSSSSSSSASSSASSSFSEEGAVGYSSDSETLDLEEAEGAVGYQPEYSKFCRMSYQDPAQLSCLPYLEHVGHNHTYNMAPSALDSADLPPPSALKKGSKEKQADFLDKQMSRDEHRARAMKIPFTNDKIINLPVEEFNELLSKYQLSEAQLSLIRDIRRRGKNKMAAQNCRKRKLDTILNLERDVEDLQRDKARLLREKVEFLRSLRQMKQKVQSLYQEVFGRLRDENGRPYSPSQYALQYAGDGSVLLIPRTMADQQARRQERKPKDRRK

SEQ ID NO: 2884 - DNA, 3502 bp, Homo sapien; identical to SEQ ID NO: 69

SEQ ID NO: 2885 - protein, 563 aa, Homo sapien; identical to SEQ ID NO: 70

SEQ ID NO: 2886 - DNA, 1084 bp, Homo sapien
cgaggatgtgcgtgggggctcggcggctgggccgcgggccgtgtgcggctctgctcctcctgggcctggggctgagcaccgtgacggggctccactgtgtcggggacacctaccccagcaacgaccggtgctgccacgagtgcaggccaggcaacgggatggtgagccgctgcagccgctcccagaacacggtgtgccgtccgtgcgggccgggcttctacaacgacgtggtcagctccaagccgtgcaagccctgcacgtggtgtaacctcagaagtgggagtgagcggaagcagctgtgcacggccacacaggacacagtctgccgctgccgggcgggcacccagcccctggacagctacaagcctggagttgactgtgccccctgccctccagggcacttctccccaggcgacaaccaggcctgcaagccctggaccaactgcaccttggctgggaagcacaccctgcagccggccagcaatagctcggacgcaatctgtgaggacagggaccccccagccacgcagccccaggagacccagggccccccggccaggcccatcactgtccagcccactgaagcctggcccagaacctcacagggaccctccacccggcccgtggaggtccccgggggccgtgcggttgccgccatcctgggcctgggcctggtgctggggctgctgggccccctggccatcctgctggccctgtacctgctccggagggaccagaggctgccccccgatgcccacaagccccctgggggaggcagtttccggacccccatccaagaggagcaggccgacgcccactccaccctggccaagatctgacctgggcccaccaaggtggacgctgggccccgccaggctggagcccggagggtctgctgggcgagcagggcaggtgcaggccgcctgccccgccacgctcctgggccaactctgcaccgttctaggtgccgatggctgcctccggctctctgcttacgtatgccatgcatacctcctgccccgcgggaccacaataaaaaccttggcagacgggagtctccgaccggcaaaaaaaaaaaaaaaaa

SEQ ID NO: 2887 - protein, 277 aa, Homo sapien
MCVGARRLGRGPCAALLLLGLGLSTVTGLHCVGDTYPSNDRCCHECRPGNGMVSRCSRSQNTVCRPCGPGFYNDVVSSKPCKPCTWCNLRSGSERKQLCTATQDTVCRCRAGTQPLDSYKPGVDCAPCPPGHFSPGDNQACKPWTNCTLAGKHTLQPASNSSDAICEDRDPPATQPQETQGPPARPITVQPTEAWPRTSQGPSTRPVEVPGGRAVAAILGLGLVLGLLGPLAILLALYLLRRDQRLPPDAHKPPGGGSFRTPIQEEQADAHSTLAKI

SEQ ID NO: 2888 - DNA, 1541 bp, Homo sapien
aaaaaaaaagaaaacaatgaaggaaaaggagggtgagttagctggagtagaatagaggtatagaatcgttcctaaataaccggctgcattggtttcctggagacttgctaaaaacccagattcccaggccccacttcttggtgctcctaattcagtagcatcacagtagggttccagaagcggtatttttaacaagctcccaggtaattctgatgtgcacctagatttggaaatcactgtgttaaaaaatattgtgaggtaagttggtcagttaggttgggcagcttttatttcattgctaagggatttggacttgatggtgtaataaagcattaattgaacaaatatttatggagcctgtactatgtaccagatgcagactgtgctagcggttggggatacagtgatgacttggtctgcctctaggtggcagggagccattttgggttttcgaacagaaaagtgacataatgaatgctgagttcttaggaagattaatccaggagtagtctccaggatgtactggaaggagagaagctgaaagcagggaggctgctgtgtttgcagttggctgcccagtgctacctctgcagagacaatcaatgtcctgaaggtagctggtatgtctgtgtgcactgacacgagccttcctaccaagccccaggggctccatgctggagaatgcacgtagggctagggtgagcactaacttcacttcaggagagcaaggaacagtgtggctcttccatttttcagttctgtaagcacatcacccttttctcctccccttgagctgtgttctctgacagctgtttgttggtaaagccagcagcccctaaagcacgtcccagccttgtctcctctgtgctttcccccaccactgctgctgcacgcctcatttgctgggccactttagtggtggaaccattagaggctgagtgacttaaaggagattgagtctgtctcgaccccgagagagagtgggatggatggatgcatcgtctcatttagaaagtgttgcctctgactctaacacactcttctctctttctttacctccctccctgtcttcctcccttcccctcctttccctaacccccttccctccccctttctccttctctctcacagtgtaggcaccacttctcttacaatttaggctttctctctgccttgggctgagtgaggaagaggagtgctgttcctgccttcctagcccagctgggtctgaccagaggctactgtgtacccatttaccatgcgtgattgttaactcagagtggggtgtagccaggtattgactgaatgtatgttcttgctgacctgtgtttttttctgtagggaccaaagcagtatccttacaataatctgtacctggaacgaggcggtgatccctccaaagaaccagagcgggtggttcactatgagatctgaggaggcttcgtgggcttttgggtcctctaactaggactccctcattcctagaaatttaaccttaatgaaatccctaataaaactcagtgctgtgttatttgtgcctc

SEQ ID NO: 2889 - protein, 13 aa, Homo sapien
MKSLIKLSAVLFV

SEQ ID NO: 2890 - DNA, 1952 bp, Homo sapien
  Unsure 1502, 1505: Unknown base
cagaacccagaaaaacaactcattcgctttcatttcctcactgactataaaagaatagagaaggaagggcttcagtgaccggctgcctggctgacttacagcagtcagactctgacaggatcatggctatgatggaggtccaggggggacccagcctgggacagacctgcgtgctgatcgtgatcttcacagtgctcctgcagtctctctgtgtggctgtaacttacgtgtactttaccaacgagctgaagcagatgcaggacaagtactccaaaagtggcattgcttgtttcttaaaagaagatgacagttattgggaccccaatgacgaagagagtatgaacagcccctgctggcaagtcaagtggcaactccgtcagctcgttagaaagatgattttgagaacctctgaggaaaccatttctacagttcaagaaaagcaacaaaatatttctcccctagtgagagaaagaggtcctcagagagtagcagctcacataactgggaccagaggaagaagcaacacattgtcttctccaaactccaagaatgaaaaggctctgggccgcaaaataaactcctgggaatcatcaaggagtgggcattcattcctgagcaacttgcacttgaggaatggtgaactggtcatccatgaaaaagggttttactacatctattcccaaacatactttcgatttcaggaggaaataaaagaaaacacaaagaacgacaaacaaatggtccaatatatttacaaatacacaagttatcctgaccctatattgttgatgaaaagtgctagaaatagttgttggtctaaagatgcagaatatggactctattccatctatcaagggggaatatttgagcttaaggaaaatgacagaatttttgtttctgtaacaaatgagcacttgatagacatggaccatgaagccagttttttcggggcctttttagttggctaactgacctggaaagaaaaagcaataacctcaaagtgactattcagttttcaggatgatacactatgaagatgtttcaaaaaatctgaccaaaacaaacaaacagaaaacagaaaacaaaaaaacctctatgcaatctgagtagagcagccacaaccaaaaaattctacaacacacactgttctgaaagtgactcacttatcccaagagaatgaaattgctgaaagatctttcaggactctacctcatatcagtttgctagcagaaatctagaagactgtcagcttccaaacattaatgcaatggttaacatcttctgtctttataatctactccttgtaaagactgtagaagaaagcgcaacaatccatctctcaagtagtgtatcacagtagtagcctccaggtttccttaagggacaacatccttaagtcaaaagagagaagaggcaccactaaaagatcgcagtttgcctggtgcagtggctcacacctgtaatcccaacattttgggaacccaaggtgggtagatccaccnagntcaagagatcaaagaccatagtgaccaacatagtgaaaccccatctctactgaaagtacaaaaattagctgggtgtgttggcacatgcctgtagtcccagctacttgagaggctgaggcaagagaattgtttgaacccgggaggcagaggttgcagtgtggtgagatcatgccactacactccagcctggcgacagagcgagacttggtttcaaaaaaaaaaaaaaaaacttcagtaagtacgtgttatttttttcaataaaattctattacagtatgtcatgtttgctgtagtgctcatatttattgttgtttttgttttagtactcacttgtttcataatatcaagattactaaaaatgggggaaaggacttctaatctttttttcataatatctttgacacatattacagaagaaataaatttcttacttttaatttaatatga

SEQ ID NO: 2891 - protein, 321 aa, Homo sapien
  Unsure 1502, 1505: Unknown amino acid
QNPEKQLIRFHFLTDYKRIEKEGLQTGCLADLQQSDSDRIMAMMEVQGGPSLGQTCVLIVIFTVLLQSLCVAVTYVYFTNELKQMQDKYSKSGIACFLKEDDSYWDPNDEESMNSPCWQVKWQLRQLVRKMILRTSEETISTVQEKQQNISPLVRERGPQRVAAHITGTRGRSNTLSSPNSKNEKALGRKINSWESSRSGHSFLSNLHLRNGELVIHEKGFYYIYSQTYFRFQEEIKENTKNDKQMVQYIYKYTSYPDPILLMKSARNSCWSKDAEYGLYSIYQGGIFELKENDRIFVSVTNEHLIDMDHEASFFGAFLVG

SEQ ID NO: 2892 - DNA, 1486 bp, Homo sapien
ggccgcggcggcggaggcagcagcggcggcggcagtggcggcggcgaaggtggcggcggctcggccagtactcccggcccccgccatttcggactgggagcgagcgcggcgcaggcactgaaggcggcggcggggccagaggctcagcggctcccaggtgcgggagagaggcctgctgaaaatgactgaatataaacttgtggtagttggagctggtggcgtaggcaagagtgccttgacgatacagctaattcagaatcattttgtggacgaatatgatccaacaatagaggattcctacaggaagcaagtagtaattgatggagaaacctgtctcttggatattctcgacacagcaggtcaagaggagtacagtgcaatgagggaccagtacatgaggactggggagggctttctttgtgtatttgccataaataatactaaatcatttgaagatattcaccattatagagaacaaattaaaagagttaaggactctgaagatgtacctatggtcctagtaggaaataaatgtgatttgccttctagaacagtagacacaaaacaggctcaggacttagcaagaagttatggaattccttttattgaaacatcagcaaagacaagacagagagtggaggatgctttttatacattggtgagagagatccgacaatacagattgaaaaaaatcagcaaagaagaaaagactcctggctgtgtgaaaattaaaaaatgcattataatgtaatctgggtgttgatgatgccttctatacattagttcgagaaattcgaaaacataaagaaaagatgagcaaagatggtaaaaagaagaaaaagaagtcaaagacaaagtgtgtaattatgtaaatacaatttgtacttttttcttaaggcatactagtacaagtggtaatttttgtacattacactaaattattagcatttgttttagcattacctaatttttttcctgctccatgcagactgttagcttttaccttaaatgcttattttaaaatgacagtggaagtttttttttcctcgaagtgccagtattcccagagttttggtttttgaactagcaatgcctgtgaaaaagaaactgaatacctaagatttctgtcttggggtttttggtgcatgcagttgattacttcttatttttcttaccaagtgtgaatgttggtgtgaaacaaattaatgaagcttttgaatcatccctattctgtgttttatctagtcacataaatggattaattactaatttcagttgagaccttctaattggtttttactgaaacattgagggaacacaaatttatgggcttcctgatgatgattcttctaggcatcatgtcctatagtttgtcatccctgatgaatgtaaagttacactgttcacaaaggttttgtctcctttccactgctattagtcatggtcactctccccaaaatattatattttttctataaaaaaaaaa

SEQ ID NO: 2893 - protein, 189 aa, Homo sapien [sequence omitted]

SEQ ID NO: 2894 - DNA, 2567 bp, Homo sapien; identical to SEQ ID NO: 9

SEQ ID NO: 2895 - protein, 724 aa, Homo sapien; identical to SEQ ID NO: 10

SEQ ID NO: 2896 - DNA, 1155 bp, Homo sapien
atggattgcagtaacggatcggcagagtgtaccggagaaggaggatcaaaagaggtggtggggacttttaaggctaaagacctaatagtcacaccagctaccattttaaaggaaaaaccagaccccaataatctggtttttggaactgtgttcacggatcatatgctgacggtggagtggtcctcagagtttggatgggagaaacctcatatcaagcctcttcagaacctgtcattgcaccctggctcatcagctttgcactatgcagtggaattatttgaaggattgaaggcatttcgaggagtagataataaaattcgactgtttcagccaaacctcaacatggatagaatgtatcgctctgctgtgagggcaactctgccggtatttgacaaagaagagctcttagagtgtattcaacagcttgtgaaattggatcaagaatgggtcccatattcaacatctgctagtctgtatattcgtcctgcattcattggaactgagccttctcttggagtcaagaagcctaccaaagccctgctctttgtactcttgagcccagtgggaccttatttttcaagtggaacctttaatccagtgtccctgtgggccaatcccaagtatgtaagagcctggaaaggtggaactggggactgcaagatgggagggaattacggctcatctctttttgcccaatgtgaagacgtagataatgggtgtcagcaggtcctgtggctctatggcagagaccatcagatcactgaagtgggaactatgaatctttttctttactggataaatgaagatggagaagaagaactggcaactcctccactagatggcatcattcttccaggagtgacaaggcggtgcattctggacctggcacatcagtggggtgaatttaaggtgtcagagagatacctcaccatggatgacttgacaacagccctggaggggaacagagtgagagagatgtttagctctggtacagcctgtgttgtttgcccagtttctgatatactgtacaaaggcgagacaatacacattccaactatggagaatggtcctaagctggcaagccgcatcttgagcaaattaactgatatccagtatggaagagaagagagcgactggacaattgtgctatcctga

SEQ ID NO: 2897 - protein, 384 aa, Homo sapien
MDCSNGSAECTGEGGSKEVVGTFKAKDLIVTPATILKEKPDPNNLVFGTVFTDHMLTVEWSSEFGWEKPHIKPLQNLSLHPGSSALHYAVELFEGLKAFRGVDNKIRLFQPNLNMDRMYRSAVRATLPVFDKEELLECIQQLVKLDQEWVPYSTSASLYIRPAFIGTEPSLGVKKPTKALLFVLLSPVGPYFSSGTFNPVSLWANPKYVRAWKGGTGDCKMGGNYGSSLFAQCEDVDNGCQQVLWLYGRDHQITEVGTMNLFLYWINEDGEEELATPPLDGIILPGVTRRCILDLAHQWGEFKVSERYLTMDDLTTALEGNRVREMFSSGTACVVCPVSDILYKGETIHIPTMENGPKLASRILSKLTDIQYGREESDWTIVLS

SEQ ID NO: 2898 - DNA, 3019 bp, Homo sapien
gcaaccagtactacccgagagccttgggcctcgggggagatgtcaggtgggtgcatggggcctgggtcccggtccctgctgtgctcctcactgtttgactgaccttgatgggatcctgaacgtctcagaggctgctcccctgtgacatggaccctggcgacctgtacaccagcgtcaccagggttgttctgcaggtcaaaagagacaatgtgggtgaagcagtcccctggcgtcaggtaccttttgtcggaactgctgggagctctatggcccaggcccaccccagcttacttgctgaccttggcctcgcctttcctgactttcagtctccctataaaattggagatcccacagagatctcagacccccctgcagcccctggtcagcccaggggaacagaccccatgtttctttccagcaacactgcccactcagcgaggaagcagccgcgacgcccacacttcctgttggagcctgcgcagagccagaggtccctggggtgcagcaccgtgggcaggcagggggagatggtcaggggtccccagaggcagcgggcacctccatgtggggcctgtgttttggcagccctggggtgggtggccccctttccttcttgttctttggtcccagaggagggtcctgtggcctgaccaggctcttgccttccctgtgctcaggcctcagaagccacaggaacatggcctaggcatggctcagccagcagccccctccctgacgcggcccttcctggcagaggccccgacagcactggtcccacacagccccctgcctggggccctgtcaagcgcccctggcccgaagcagcccccgacggcaagcacaggcccggagctgctgctgctgcctctttcctccttcatgccctgcggggcggctgcaccagccagggtacgtcctccaccaccaggcctgggcactggggctctcactctggtctgacttctggtgctttctcatgccacagctgtactagtttctggaaaaccttggcacagggaggccactcatccatttgacaagcataggtagccactgcacaccaggtccaagggccacagcagtgaacagccagccaagggccctgccatcctgaagcttatattctagtcagagacaagcaaagaaaaacccctgcctgcaggccagtaaagtggctgcagatcacgtagggtcctgcaggccacagtgagaagtagcctgggatttgagaagagtaggaagtcggggaagggttttggcagggagcaccatgtcaggtttctgtgcaggctgtggtcaccatgaccacgtggtccaggcaagtagtactggtggcctgggctcagcggttgccacagaggggacaggtactctcttggaggcagatgaggcaggatatgctgctctgagggagttgctgaatgaggggaaagaaggaatccaggctgatgtgggctgctggcttgaataacttgggaaacagagttctttgactggaagaaggaactgggggtggggactggtttggggtgaagtgtcaagagtgttttgaaccaggctcttgatgtcaaacttgagagaaagcaaacgttgagtctgaccttcaaggaagaggtcagggccagagattgagaagaatcttcagcacaggccgaaggtaaccccagagccactgcggcctctaggaggagagtacaggggaaggagagaggggaggaggctccaagcagggagcctgggtggggatggccagggggtgtgagagctcagtaatggaagtgacagctgctctaaggccaccaaagcagctggttcctgaaaggggatgaggggacaggaaggaaccagttcctgtggtgagttaggccatgtggggccacttaccctggctggaatggtttgaatgtgggtttgaaagggttttgacccctgtccggtgatggaaggggcaagtccactctcaccaggagaggagggcatggaaaaggctgtagagcagtggcctctcactgaccacttctcactgatgtcaaagctcagcaaggtcatgagcttagagcaggtgggggtggagggttgggtaaggcaaggctaggaacagctgctcaggcagtggaggcgtgaggcggactgtggtgacacggggtgctccctggttgcttgcgggactttcccctacagtaccaggccctgtgtgcaggggcaggctagacactgagctggcacggccagtgcctgggaagcccagctcctgcagctgggagcctggtcttcccccacccctacagggcaggcagtgacaaggacttggtgtccccctccctggcttcctcctagcttccttgctcagcatctacccttctttcctttgcaggtgtcagcacagcgggctactcctagggataagcccccggtcccctcatccctggccagtgtccctgacccccatctactccttcctggggacttctcagccaccagggctgggcctggactttcaactgcaggcagcctggaccttgaggctgaacttgagaagatccagcagcaactactgcactaccagaccaccaagcagaacctctggtcctgtcggcggcaagcgagcagcctgcgcaggtggctggagctgaacagagaggagccggggcctgaggaccaggaagtagagcagcaggtgcagaaagagctggaacaggtgaggccccaggccatccccaggtgtccctggggacgccccgggctgtgctccctctcagccctgcctgtccctccatggccccaggtggaaatgcagatccagctgctggcagaggagctccaggctcagcgccagcccattggcgcctgcgttgcccgcatccaggccctgcggcaggccctgtgctagcgtgttcgcaccaggaacgcaggtgctgggctgtcggggaggcctcaggccacctccaggaacagaacacagttttaagtttgattttttttatttcaaaatgctttgcaattaaatgaattactgttc

SEQ ID NO: 2899 - protein, 250 aa, Homo sapien
MWVKQSPGVRYLLSELLGALWPRPTPAYLLTLASPFLTFSLPIKLEIPQRSQTPLQPLVSPGEQTPCFFPATLPTQRGSSRDAHTSCWSLRRARGPWGAAPWAGRGRWSGVPRGSGHLHVGPVFWQPWGGWPPFLLVLWSQRRVLWPDQALAFPVLRPQKPQEHGLGMAQPAAPSLTRPFLAEAPTALVPHSPLPGALSSAPGPKQPPTASTGPELLLLPLSSFMPCGAAAPARVRPPPPGLGTGALTLV

SEQ ID NO: 2900 - DNA, 1350 bp, Homo sapien
aggttaatcttaaaagcccaggttacccgcggaaatttatgctgtccggtcaccgtgacaatgcagctgaggaacccagaactacatctgggctgcgcgcttgcgcttcgcttcctggccctcgtttcctgggacatccctggggctagagcactggacaatggattggcaaggacgcctaccatgggctggctgcactgggagcgcttcatgtgcaaccttgactgccaggaagagccagattcctgcatcagtgagaagctcttcatggagatggcagagctcatggtctcagaaggctggaaggatgcaggttatgagtacctctgcattgatgactgttggatggctccccaaagagattcagaaggcagacttcaggcagaccctcagcgctttcctcatgggattcgccagctagctaattatgttcacagcaaaggactgaagctagggatttatgcagatgttggaaataaaacctgcgcaggcttccctgggagttttggatactacgacattgatgcccagacctttgctgactggggagtagatctgctaaaatttgatggttgttactgtgacagtttggaaaatttggcagatggttataagcacatgtccttggccctgaataggactggcagaagcattgtgtactcctgtgagtggcctctttatatgtggccctttcaaaagcccaattatacagaaatccgacagtactgcaatcactggcgaaattttgctgacattgatgattcctggaaaagtataaagagtatcttggactggacatcttttaaccaggagagaattgttgatgttgctggaccagggggttggaatgacccagatatgttagtgattggcaactttggcctcagctggaatcagcaagtaactcagatggccctctgggctatcatggctgctcctttattcatgtctaatgacctccgacacatcagccctcaagccaaagctctccttcaggataaggacgtaattgccatcaatcaggaccccttgggcaagcaagggtaccagcttagacagggagacaactttgaagtgtgggaacgacctctctcaggcttagcctgggctgtagctatgataaaccggcaggagattggtggacctcgctcttataccatcgcagttgcttccctgggtaaaggagtggcctgtaatcctgcctgcttcatcacacagctcctccctgtgaaaaggaagctagggttctatgaatggacttcaaggttaagaagtcacataaatcccacaggcactgttttgcttcagctagaaaatacaatgcagatgtcattaaaagacttactttaa

SEQ ID NO: 2901 - protein, 429 aa, Homo sapien
MQLRNPELHLGCALALRFLALVSWDIPGARALDNGLARTPTMGWLHWERFMCNLDCQEEPDSCISEKLFMEMAELMVSEGWKDAGYEYLCIDDCWMAPQRDSEGRLQADPQRFPHGIRQLANYVHSKGLKLGIYADVGNKTCAGFPGSFGYYDIDAQTFADWGVDLLKFDGCYCDSLENLADGYKHMSLALNRTGRSIVYSCEWPLYMWPFQKPNYTEIRQYCNHWRNFADIDDSWKSIKSILDWTSFNQERIVDVAGPGGWNDPDMLVIGNFGLSWNQQVTQMALWAIMAAPLFMSNDLRHISPQAKALLQDKDVIAINQDPLGKQGYQLRQGDNFEVWERPLSGLAWAVAMINRQEIGGPRSYTIAVASLGKGVACNPACFITQLLPVKRKLGFYEWTSRLRSHINPTGTVLLQLENTMQMSLKDLL

SEQ ID NO: 2902 - DNA, 2774 bp, Homo sapien
ccgctccccagagcaaagcgtcggagtcctcctcctccttctcctcctcctcctcctcctcctccagccgcccaggctcccccgccacccgtcagactcctccttcgaccgctcccggcgcggggccttccaggcgacaaggaccgagtaccctccggccggagccacgcagccgcggcttccggagccctcggggcggcggactggctcgcggtgcagattcttcttaatcctttggtgaaaactgagacacaaaatggctgcaaataagcccaagggtcagaattctttggctttacacaaagtcatcatggtgggcagtggtggcgtgggcaagtcagctctgactctacagttcatgtacgatgagtttgtggaggactatgagcctaccaaagcagacagctatcggaagaaggtagtgctagatggggaggaagtccagatcgatatcttagatacagctgggcaggaggactacgctgcaattagagacaactacttccgaagtggggaggggttcctctgtgttttctctattacagaaatggaatcctttgcagctacagctgacttcagggagcagattttaagagtaaaagaagatgagaatgttccatttctactggttggtaacaaatcagatttagaagataaaagacaggtttctgtagaagaggcaaaaaacagagctgagcagtggaatgttaactacgtggaaacatctgctaaaacacgagctaatgttgacaaggtattttttgatttaatgagagaaattcgagcgagaaagatggaagacagcaaagaaaagaatggaaaaaagaagaggaaaagtttagccaagagaatcagagaaagatgctgcattttataatcaaagcccaaactcctttcttatcttgaccatactaataaatataatttataagcattgccattgaaggcttaattgactgaaattactttaacattttggaaattgttgtatatcactaaaagcatgaattggaactgcaatgaaagtcaaatttactttaaaaagaaattaatatggcttcaccaagaagcaaagttcaacttatttcataattgcctacatttatcatggtcctgaatgtagcgtgtaagcttgtgtttcttgggcagtctttcttgaaattgaagaggtgaaatgggggtggggagtgggaggaaaggtgacttcctctggtgtttattataaagcttaaattttatatcattttaaaatgtcttggtcttctactgccttgaaaaatgacaattgtgaacatgatagttaaactaccactttttttaaccattattatgcaaaatttagaagaaaagttattggcatggttgttgcatatagttaaactgagagtaattcatctgtgaatctgctttaattacctggtgagtaacttagaaaagtggtgtaaacttgtacatggaattttttgaatatgccttaatttagaaactgaaaaatatctggttatatcattctgggtgtgttcttactgacaccaggggtccgctgccccatgtgtcctggtgagaaaatatatgcctggcacagcttttgtatagaaaattcttgagaagtaactgtccgctagaagtctgtccaaatttaaaatgtgtgccatattctggttcttgaaaataagattccagagctctttgatcgcttttaataaactgcaagttcattttaaatgaagggccagcatatatacttgcaagataattttcagctgcaaggattcagcaccagttatgtttgaatgaaccctccttttctctgagattctggtccctggaaatccctttctgctagtggtgagcatgtaagtgttaagtttttaatctgggagcagggcataggaagaaaatgtcagtagtgctaatgcattttgcactagaacgcttcgggaaaatattcatgcttgccatctgttcatttctaaatttatattcataaagttacagtttgatacaggaattattaggagtaattcttttctgtttctgtttataatgaagaacactgtagctacattttcagaagttaacatcaagccatcaaacctgggtatagtgcagaaaacgtggcacacactgaccacacattaggctgtgtcaccattgtgtggtgtacctgctggaagaattctagcatgctacttggggacataatttcagtgggaaatatgccactgaccgattttttttttttcctctttgcagtggggctaggacagttgattcaacaaagtatttttttcttttttctcagtcctaatttgaacaggtcaaagatgtgttcaggcattccaggtaacaggtgtgtatgtaaagttaaaaataggctttttaggaactcactctttagatatttacatccagcttctcatgttaaatatttgtccttaaagggtttgagatgtacatctttcatttcgtatttctcataggctatgccatgtgcggaattcaagttaccaatgtaacactggccagcgggcccagcaatctccatgtgtacttattacagtcttatttaaccaggggtcctaaccactaacattgtgactttgctttgagacctttcctctcctgggtactgaggtgctatgaagccaactgacaaagatgcatcacgtgtcttaggctgatgccactacccgatttgtttatttgcaatttgagccatttaaagaccaataaacttccttttttaaaaaaaaaaaaaaaaaaaaaaaaaa

SEQ ID NO: 2903 - protein, 206 aa, Homo sapien
MAANKPKGQNSLALHKVIMVGSGGVGKSALTLQFMYDEFVEDYEPTKADSYRKKVVLDGEEVQIDILDTAGQEDYAAIRDNYFRSGEGFLCVFSITEMESFAATADFREQILRVKEDENVPFLLVGNKSDLEDKRQVSVEEAKNRAEQWNVNYVETSAKTRANVDKVFFDLMREIRARKMEDSKEKNGKKKRKSLAKRIRERCCIL

SEQ ID NO: 2904 - DNA, 3772 bp, Homo sapien
agcgggataagttggcgcgtcacctagacgtcagcctcttacctctcggacgtcccgtcccaggagcaaaactctagtgactttgggcccgcccccgtgagagtggagggcggccgatgagggcggttctgaagggaacaagaccaatgagacgagcccggggcggggcgcggggccggagggtggggcgggtggcggcggtggcagtccgaggtctggctccgcgcagtatatgacagtacgtcagcagcgggatggccctagcagtggcggcggctgcagaagcccaagcagccgcggccgcagtggaggctagagccggagcggcggcggcggcggcaccccggggagtttaagatggcggcgggggggacagggggcctgcgggaggagcagcgctatgggctgtcgtgcggacggctggggcaggacaacatcaccgtactgcatgtgaagctcaccgagacggcgatccgggcgctcgagacttaccagagccacaagaatttaattccttttcgaccttcaatccagttccaaggactccacgggcttgtcaaaattcccaaaaatgatcccctcaatgaagttcataactttaacttttatttgtcaaatgtgggcaaagacaaccctcagggcagctttgactgcatccagcaaacattctccagctctggagcctcccagctcaattgcctgggatttatacaagataaaattacagtgtgtgcaacaaacgactcgtatcagatgacacgagaaagaatgacccaggcagaggaggaatcccgcaaccgaagcacaaaagttatcaaacccggtggaccatatgtagggaaaagagtgcaaattcggaaagcacctcaagctgtttcagatacagttcctgagaggaaaaggtcaacccccatgaaccctgcaaatacaattcgaaagacacatagcagcagcaccatctctcagaggccatacagggacagggtgattcacttactggccctgaaggcctacaagaaaccggagctacttgctagactccagaaagatggtgtcaatcaaaaagacaagaactccctgggagcaattctgcaacaggtagccaatctgaattctaaggacctctcatataccttaaaggattatgtttttaaagagcttcaaagagactggcctggatacagtgaaatagacagacggtcattggagtcagtgctctctagaaaactaaatccgtctcagaatgctacaggcaccagccgttcagaatctcctgtatgttctagtagagatgctgtatcttctcctcagaaacggcttttggattcagagtttattgatcctttaatgaataaaaaagcccgaatatctcacctgacgaacagagtaccaccaacactaaatggtcatttgaatcccaccagtgaaaaatcggctgcaggcctcccactgccccctgcggctgctgccatccccacccctccaccgctgccttcaacctatctgcccatctcacatcctcctcagattgtaaattctaactccaactcccctagcactccagaaggccgggggactcaagacctacctgttgacagttttagtcaaaacgatagtatctatgaggaccagcaagacaaatatacctctaggacttctctggaaaccttaccccctggttccgttctactaaagtgtccaaagcctatggaagaaaaccattcaatgtctcacaaaaagtccaaaaagaagtctaaaaaacataaggaaaaggaccaaataaaaaagcacgacattgagactattgaggaaaaggaggaagatcttaagagagaagaggaaattgccaagctaaataactccagtccaaattccagtggaggagttaaagaggattgcactgcctccatggaaccttcagcaattgaactcccagattatttgataaaatatatcgctatcgtctcctatgagcaacgccagaattataaggatgacttcaatgcagagtatgatgagtacagagctttgcatgccaggatggagactgtagctagaagatttatcaaactagatgcacaaagaaagcgcctttctccaggctcaaaagagtatcagaatgttcatgaagaagtcttacaagaatatcagaagataaagcagtctagtcccaattaccatgaagaaaaatacagatgtgaatatcttcataacaagctggctcacatcaaaaggctaataggtgaatttgaccaacagcaagcagagtcatggtcctagaactctgcttggaccagaagatgtgaataaacttaagcttatttatttaaaattccaaatgagttgctctagattctaaaaaggtgaaactttggctgttgaaagtttcagtattagtaaacttgagttactttttcttttccattttactttgcttccctgcatttcgaagctgctctttctggtcctccccaccaccccacccccaagacttgtgtttgttaatagaaataatttttttaggtattggggatccattgtctatatttcaaatcagttttttttcctcaaaaacttgtgtttgttattagaaatgattttttagatattggggatccagtgtccacacttaaaagttgtatgtgtttaaaaaacaacaacagtaatgtgcaaggtgaaatgcttttggataaacgtaagcctattttctgacgtttcttaatgcaaactctttgccttaaatggtagaatatttagaaatttgcacaaaattaaaaaaataaacattgtcttggagggttaaaaaatagaaaggtgtatgtgtatagattcacatacacatatgtatatacaggctgacttgatctagaacattaaatccgccctgcaagttaaccccccattgcaatggttgccttaaggtgtttgctagttgtgtacatagtgtggttaatcattagctacactgcttcccacttgattagagcaatgggaagcatactgtggcctaccagcatctggaagtgtgtgctcgatctgtatgtgtgcagaggtggtgtggatgtgagcgtgcatgaaggaaaaaaagctgctactcctagtaggccaaacgctcaggttaaacaactgacgagtgttactgtagggtgtttttttgtttttttgttttttttcttctatcaaattgctacttttgttgtggaagacaaaagcatttccatttcaacgagtttgtcagctttattaatgttgggcaaaaattgatatgtcatgaaaatgaaacagatctatagttttgggacaaaattataaaatgaaatgtgtaggtaacctatttatatactgctataaagtattttttgaagagagatatgcaaagaagctattacctacataagaggtatatttaaagattttttttttttcatcctggtgccaggaatataaaaaagagtggatatatttaaccataacatactgtgattcatcaaacagcacaaactttcatttcatggagtttatctgttgacattgatttaaactgtcacttgttttatcatgtgggaacataagttatgtggtcaaaaatataaggattttgaattaatgttgattcaagttgtattgtcttattgtattgtcttttcaaagtgctgccagttgaaaagggaagcattatgtttacaaatctgttttgaaatgtttgccaaaattttggtagtgtctttaataaagatgtttgtctccagcatccagaaaaaaaaaaaaaaaa

SEQ ID NO: 2905 - protein, 640 aa, Homo sapien
MAAGGTGGLREEQRYGLSCGRLGQDNITVLHVKLTETAIRALETYQSHKNLIPFRPSIQFQGLHGLVKIPKNDPLNEVHNFNFYLSNVGKDNPQGSFDCIQQTFSSSGASQLNCLGFIQDKITVCATNDSYQMTRERMTQAEEESRNRSTKVIKPGGPYVGKRVQIRKAPQAVSDTVPERKRSTPMNPANTIRKTHSSSTISQRPYRDRVIHLLALKAYKKPELLARLQKDGVNQKDKNSLGAILQQVANLNSKDLSYTLKDYVFKELQRDWPGYSEIDRRSLESVLSRKLNPSQNATGTSRSESPVCSSRDAVSSPQKRLLDSEFIDPLMNKKARISHLTNRVPPTLNGHLNPTSEKSAAGLPLPPAAAAIPTPPPLPSTYLPISHPPQIVNSNSNSPSTPEGRGTQDLPVDSFSQNDSIYEDQQDKYTSRTSLETLPPGSVLLKCPKPMEENHSMSHKKSKKKSKKHKEKDQIKKHDIETIEEKEEDLKREEEIAKLNNSSPNSSGGVKEDCTASMEPSAIELPDYLIKYIAIVSYEQRQNYKDDFNAEYDEYRALHARMETVARRFIKLDAQRKRLSPGSKEYQNVHEEVLQEYQKIKQSSPNYHEEKYRCEYLHNKLAHIKRLIGEFDQQQAESWS

SEQ ID NO: 2906 - DNA, 1292 bp, Homo sapien
tgcgcggcttcctgcctccatgccactccagactgcaccggcatggcactgactgcccacccctcctgcctcctggccctgttggtggcaggcctagcccaaggcatcagaggcccccttagggcccaggacctaggtccccagccgctagagctgaaagaggccttcaagttgttccagatccagttcaaccggagttacctgagcccagaagagcatgctcaccgcctggacatctttgcccacaacctggcccaggctcagaggctgcaggaggaggacttgggcacagctgagtttggggtgactccattcagtgacctcacagaggaggagtttggccagctctatggctatcggagggcagctggaggggtccccagcatgggcagagaaataaggtctgaagagccagaggagtcagtacctttcagctgtgactggcggaaggtggccggcgccatctcacccatcaaggaccagaaaaactgcaactgctgctgggccatggcagcggcaggcaacatagagaccctgtggcgcatcagtttctgggattttgtggacgtctccgtgcaggaactgctggactgtggccgctgtggggatggctgccacggtggcttcgtctgggacgcgttcataactgtcctcaacaacagcggcctggccagtgaaaaggactacccgttccagggcaaagtcagagcccacaggtgccaccccaagaagtaccagaaggtggcctggatccaggacttcatcatgctgcagaacaacgagcacagaattgcgcagtacctggccacttatggccccatcaccgtgaccatcaacatgaagccccttcagctataccggaaaggtgtgatcaaggccacacccaccacctgtgacccccagcttgtggaccactctgtcctgctggtgggttttggcagcgtcaagtcagaggaggggatatgggcagagacagtctcatcgcagtctcagcctcagcctccacaccccaccccatactggatcctgaagaactcctggggggcccaatggggagagaagggctatttccggctgcaccgagggagcaatacctgtggcatcaccaagttcccgctcactgcccgtgtgcagaaaccggatatgaagccccgagtctcctgccctccctgaccacctggccccctcagctctgtcctgttaggccaactgcctccttgccagccccacccccaggtttttgcccatcctcccaatctcaatacagcctgaataaaccaagacaagacctc

SEQ ID NO: 2907 - protein, 376 aa, Homo sapien
MALTAHPSCLLALLVAGLAQGIRGPLRAQDLGPQPLELKEAFKLFQIQFNRSYLSPEEHAHRLDIFAHNLAQAQRLQEEDLGTAEFGVTPFSDLTEEEFGQLYGYRRAAGGVPSMGREIRSEEPEESVPFSCDWRKVAGAISPIKDQKNCNCCWAMAAAGNIETLWRISFWDFVDVSVQELLDCGRCGDGCHGGFVWDAFITVLNNSGLASEKDYPFQGKVRAHRCHPKKYQKVAWIQDFIMLQNNEHRIAQYLATYGPITVTINMKPLQLYRKGVIKATPTTCDPQLVDHSVLLVGFGSVKSEEGIWAETVSSQSQPQPPHPTPYWILKNSWGAQWGEKGYFRLHRGSNTCGITKFPLTARVQKPDMKPRVSCPP

SEQ ID NO: 2908 - DNA, 1714 bp, Homo sapien
ggggcattttgtgcctgcctagctatccagacagagcagctaccctcagctctagctgatactacagacagtacaacagatcaagaagtatggcagtgacaactcgtttgacacggttgcacgaaaagatcctgcaaaatcattttggagggaagcggcttagccttctctataagggtagtgtccatggattccgtaatggagttttgcttgacagatgttgtaatcaagggcctactctaacagtgatttatagtgaagatcatattattggagcatatgcggaagagagttaccaggaaggaaagtatgcttccatcatcctttttgcacttcaagatactaaaatttcagaatggaaactaggactatgtacaccagaaacactgttttgttgtgatgttacaaaatataactccccaactaatttccagatagatggaagaaatagaaaagtgattatggacttaaagacaatggaaaatcttggacttgctcaaaattgtactatctctattcaggattatgaagtttttcgatgcgaagattcactggatgaaagaaagataaaaggggtcattgagctcaggaagagcttactgtctgccttgagaacttatgaaccatatggatccctggttcaacaaatacgaattctgctgctgggtccaattggagctgggaagtccagctttttcaactcagtgaggtctgttttccaagggcatgtaacgcatcaggctttggtgggcactaatacaactgggatatctgagaagtataggacatactctattagagacgggaaagatggcaaatacctgccgtttattctgtgtgactcactggggctgagtgagaaagaaggcggcctgtgcagggatgacatattctatatcttgaacggtaacattcgtgatagataccagtttaatcccatggaatcaatcaaattaaatcatcatgactacattgattccccatcgctgaaggacagaattcattgtgtggcatttgtatttgatgccagctctattcaatacttctcctctcagatgatagtaaagatcaaaagaattcgaagggagttggtaaacgctggtgtggtacatgtggctttgctcactcatgtggatagcatggatttgattacaaaaggtgaccttatagaaatagagagatgtgagcctgtgaggtccaagctagaggaagtccaaagaaaacttggatttgctctttctgacatctcggtggttagcaattattcctctgagtgggagctggaccctgtaaaggatgttctaattctttctgctctgagacgaatgctatgggctgcagatgacttcttagaggatttgccttttgagcaaatagggaatctaagggaggaaattatcaactgtgcacaaggaaaaaaatagatatgtgaaaggttcacgtaaatttcctcacatcacagaagattaaaattcagaaaggagaaaacacagaccaaagagaagtatctaagaccaaagggatgtgttttattaatgtctaggatgaagaaatgcatagaacattgtagtacttgtaaataactagaaataacatgatttagtcataattgtgaaaaatagtaataatttttcttggatttatgttctgtatctgtgaaaaaataaatttcttataaaactcggaaaaaaaaaaaaaaaaaaaaaaaaaaaaa

SEQ ID NO: 2909 - protein, 444 aa, Homo sapien
MAVTTRLTRLHEKILQNHFGGKRLSLLYKGSVHGFRNGVLLDRCCNQGPTLTVIYSEDHIIGAYAEESYQEGKYASIILFALQDTKISEWKLGLCTPETLFCCDVTKYNSPTNFQIDGRNRKVIMDLKTMENLGLAQNCTISIQDYEVFRCEDSLDERKIKGVIELRKSLLSALRTYEPYGSLVQQIRILLLGPIGAGKSSFFNSVRSVFQGHVTHQALVGTNTTGISEKYRTYSIRDGKDGKYLPFILCDSLGLSEKEGGLCRDDIFYILNGNIRDRYQFNPMESIKLNHHDYIDSPSLKDRIHCVAFVFDASSIQYFSSQMIVKIKRIRRELVNAGVVHVALLTHVDSMDLITKGDLIEIERCEPVRSKLEEVQRKLGFALSDISVVSNYSSEWELDPVKDVLILSALRRMLWAADDFLEDLPFEQIGNLREEIINCAQGKK

SEQ ID NO: 2910 - DNA, 738 bp, Homo sapien
aaagcagaattgagagtttgttcttacacacaagtttaatgccaccttcctctgtctgccatggaccaacaagcaatatatgctgagttaaacttacccacagactcaggcccagaaagttcttcaccttcatctcttcctcgggatgtctgtcagggttcaccttggcatcaatttgccctgaaacttagctgtgctgggattattctccttgtcttggttgttactgggttgagtgtttcagtgacatccttaatacagaaatcatcaatagaaaaatgcagtgtggacattcaacagagcaggaataaaacaacagagagaccgggtctcttaaactgcccaatatattggcagcaactccgagagaaatgcttgttattttctcacactgtcaacccttggaataacagtctagctgattgttccaccaaagaatccagcctgctgcttattcgagataaggatgaattgatacacacacagaacctgatacgtgacaaagcaattctgttttggattggattaaatttttcattatcagaaaagaactggaagtggataaacggctcttttttaaattctaatgacttagaaattagaggtgatgctaaagaaaacagctgtatttccatctcacagacatctgtgtattctgagtactgtagtacagaaatcagatggatctgccaaaaagaactaacacctgtgagaaataaagtgtatcctgactcttga

SEQ ID NO: 2911 - protein, 225 aa, Homo sapien
MDQQAIYAELNLPTDSGPESSSPSSLPRDVCQGSPWHQFALKLSCAGIILLVLVVTGLSVSVTSLIQKSSIEKCSVDIQQSRNKTTERPGLLNCPIYWQQLREKCLLFSHTVNPWNNSLADCSTKESSLLLIRDKDELIHTQNLIRDKAILFWIGLNFSLSEKNWKWINGSFLNSNDLEIRGDAKENSCISISQTSVYSEYCSTEIRWICQKELTPVRNKVYPDS

SEQ ID NO: 2912 - DNA, 723 bp, Homo sapien
atggccgggcctccgaggctcctgctgctgcccctgcttctggcgctggctcgcggcctgcctggggccctggctgcccaagaggtgcagcagtctccccactgcacgactgtccccgtgggagcctccgtcaacatcacctgctccaccagcgggggcctgcgtgggatctacctgaggcagctcgggccacagccccaagacatcatttactacgaggacggggtggtgcccactacggacagacggttccggggccgcatcgacttctcagggtcccaggacaacctgactatcaccatgcaccgcctgcagctgtcggacactggcacctacacctgccaggccatcacggaggtcaatgtctacggctccggcaccctggtcctggtgacagaggaacagtcccaaggatggcacagatgctcggacgccccaccaagggcctctgccctccctgccccaccgacaggctccgccctccctgacccgcagacagcctctgccctccctgacccgccagcagcctctgccctccctgcggccctggcggtgatctccttcctcctcgggctgggcctgggggtggcgtgtgtgctggcgaggacacagataaagaaactgtgctcgtggcgggataagaattcggcggcatgtgtggtgtacgaggacatgtcgcacagccgctgcaacacgctgtcctcccccaaccagtaccagtga

SEQ ID NO: 2913 - protein, 240 aa, Homo sapien; identical to SEQ ID NO: 2866

SEQ ID NO: 2914 - DNA, 547 bp, Homo sapien
gcgggacctcagccatgagacttctcatcctggccctccttggcatctgctctctcactgcatacattgtggaaggtgtagggagtgaagtctcagataagaggacctgtgtgagcctcactacccagcgactgccggttagcagaatcaagacctacaccatcacggaaggctccttgagagcagtaatttttattaccaaacgtggcctaaaagtctgtgctgatccacaagccacgtgggtgagagacgtggtcaggagcatggacaggaaatccaacaccagaaataacatgatccagaccaagccaacaggaacccagcaatcgaccaatacagctgtgaccctgactggctagtagtctctggcaccctgtccgtctccagccagccagctcatttcactttacaccctcatggactgagtttatactcaccttttatgaaagcactgcatgaataaaattattcctttgtatttttacttttaaatgtcttctgtattcacttatatgttctaattaataaattatttattattaagaat

SEQ ID NO: 2915 - protein, 114 aa, Homo sapien; identical to SEQ ID NO: 1504

SEQ ID NO: 2916 - DNA, 1296 bp, Homo sapien
  Unsure 71-72, 75, 77: Unknown base
gcagggttcgactctagaggatccccctggggcccttactctagcgggtactcactctgtcgtgcgagaanncanancttattttccaggtggcagtgctccttttggacttttctctaggtttggcgctaaactcttcttgtgagctcactccaccccttcttcctccctttaacttatccattcacttaaaacattagctggtcatctggtaagcccgggacagtaagccgagtggctgttggagtcggtattgttggtaatggtggaggaagagaggccttcccgctgaggctggggtggggcggatcggtgttgcttgcctgcagagagggtggggagtgaatgtgcacccttgggtgggcctgcagccatccagctgaaagttacaaaaatgcttcatggaccgtggtttgttactatagtgttcctcatggcgagcagatggaaccgggagacatggagtccctggccagtgtgagtcctagcattgcaggaggggagaccctggaggagagagcccgcctcaattgatgcctgcagattgaatttccagaggcttaggaggaggaagttctccaatgttctgttttccaggccttgcttcaggaagccctgtattcaggaggctaccatttaaagtttgcagatgagcttatggggggcaaaccttaaaaagtcccacagcagatgcatccggcctcgaggggcccatcagctttgaaataaatgcttgttccagagccccatgaaatgccagcaggcacccctcctttcctcggggtaaaggttttcagatgctgcatcttcctaaaattgagcctccggtcatactagttttgtgcttgggaaccttgcttcaagaagatccctaagctgtagaacattttaacgttgatgccacaacgcagattgatgccttgtagatggagcttgcagatggagccccgtgacctctcacctacccacctgtttgcctgccttcttgtgcgtttctcggagaagttcttagcctgatgaaataacttggggcgttgaagagctgtttaattttaaatgccttagactggggatatattagaggaagcagattgtcaaattaagggtgtcattgtgttgtgctaaacgctgggagggtacaagttggtcattcctaaatctgtgtgtgagaaatggcaggtctagcttgggcattgtgattgcattgcagattactaggagaagggaatggtgggtacaccggtagtgctcttttgttcttgcttcgtttttttaaacttgaactttacaacgtta

SEQ ID NO: 2917 - protein, 22 aa, Homo sapien
  Unsure 71-72, 75, 77: Unknown amino acid
MVGTPVVLFCSCFVFLNLNFTT

SEQ ID NO: 2918 - DNA, 3500 bp, Homo sapien
cacgtggctgcagcggggccagagcagcaatggcggcgggcggcggcggtagctgcgaccccctggcccctgctggggtcccttgcgccttctccccgcacagccaggcctacttcgctttggcctctaccgacggtcacttacgagtatgggagacggccaacaaccggctgcaccaggagtacgtgccttccgcgcacctcagtggtacctgcacctgtctggcctgggcgccagcgcggctgcaggccaaggaaagtccccagaggaaaaaaaggaaatcagaagctgtaggaatgagtaaccagactgacttattggctcttggcacagcagttggtagcattttattatacagcacagtaaaaggagagttacacagtaaattaataagtggtggacatgacaacagagtcaactgcatacagtggcatcaagacagtggctgtttatatagttgttcagatgataaacatattgtggaatggaacgtacagacatgcaaagtaaagtgcaaatggaaaggggacaatagcagtgtcagttccctatgtatcagcccagatggaaagatgttgctttcagctggtcgaacaatcaaactatgggttttggagaccaaagaagtctacaggcatttcacaggacatgcaacgccagtttcgtcactgatgttcactaccatcagacctcctaatgagagccagccctttgatggaattacaggtctttatttcttatctggagcagtacatgaccggttacttaatgtctggcaggtccgatcagaaaacaaagaaaagagtgcagtgatgtcatttacagttaccgatgaacctgtctatattgacttaactttgtcagaaaacaaagaagagcctgtcaagttggctgttgtttgcagagatggtcaagtccatctttttgaacacatattaaatgggtactgcaaaaagcctttgacttcaaactgcacaattcagatagcaacacctgggaaaggcaagaagtcaacaccaaaacccatccctattctagctgctggtttttgctcagacaaaatgtcattgttgcttgtatatggcagttggtttcagcctactattgagcgagtggctttaaactccagagaacctcatatgtgtttagtaagagatatttcaaactgctgggcccccaaagtagaaacagctataacaaaggtgaggacaccagtgatgaattctgaagcaaaagttctggtgcctgggattcctggtcatcatgcagctatcaagcccgctcctccacaaaccgagcaagtagagagcaagaggaagtcagggggaaatgaggttagcattgaagaacgtctgggagcaatggatatagacacacacaaaaaaggaaaggaagacctccagacgaatagctttccagttcttcttacccagggcttagaaagtaacgattttgaaatgctaaataaagtacttcaaactaggaatgtaaaccttataaagaagactgtattaaggatgcccctgcatactattattccgttgttacaagagcttacaaagaggttacaaggacatcctaatagtgctgtgctaatggttcagtggctaaaatgtgtgttaacagttcatgcatcatacctgtccacgttgcctgacctggtaccccagctggggacactctaccagttaatggaaagcagagtcaaaacttttcagaaactttcacaccttcatggaaagcttattcttctaattacacaagtaacagcatcagagaagacaaagggagcaacttcccctggacagaaggcaaagttggtgtatgaagaagagtcttctgaagaggagtctgatgatgaaatagcagataaggattctgaagataattgggatgaagatgaggaggagagtgaaagtgaaaaagatgaggacgttgaagaggaagatgaggatgccgaaggaaaagatgaagaaaatggcgaggacagagatacagcaagtgaaaaagaattaaatggagattctgacttagatcctgaaaatgaaagtgaagaagaatgaagacagcaaagcaagccggtcaaactatataaactctggctcaccttgcccagtggtgagggctgcctctgtgccaggatgccaaggaccgctgcacatttccaaattcacagcagtggatcccatgccactttgctgtcctgagcaccccagacttgactgtgtaaataagagtgtttcattcaaatgttaataaactttacacagtatatagacacattttctgcaatgtactgacatcagtgtccaatatatggtatatttttataatataatatcctagtatgattggttatatcaagaattgacaagtgcagataaagacctttcccataggagttcaagaactggactgttgtgaagaagtcagctcttatctcaggttggtatctttcatcaaatccagatgcaaagcagcactagtgaaaatttttttaatttagtacatttaatttggtacattttcataaaatatgaagggataactacaaactggagtaaaaatgatggtaattaaaaaaaatcctcagtatccctagcttgtctattaactgtgataatctgacttgagtcagattgaatatttggagtgcttccccagaataaccacttatttttgaagctatcatgtgaagtatttttttaaaacaaaacaaaaattatggtcattaaaaaactagagaattagccatattaaggatttttcttgactgcaaattacttctaaagaatcatcagtgtatagattagaagtgctcattacctgcaacttttaaaaaaaattcagttatagctgcttttgaagaggtttccatttttatttaaattactaatggatcaaagaacaattgtttattttttctctttggttttagatattaatgataaccttgttggaattttttttccaaagaaaatatttttataattaaataatttaatgtttttcttccttttcattacctactcttggcagtgttagggtatctgtttacctttaaaatgataagtctcactcaagattttttatctatgtataaatattttggtgtgctacaaaagcctttacaaattatcagtagtagtttttttttttttttttttttttaaagaatgagccgatattggcttagtgctcactaggggacatgcacatggaagctcacctctaagaaagggctgggcagatggatttattttttcccacctgtgaatatgtaaaacaaaaccattatctttgagggagtttttaataccaatgacagaacagagatttgtgtgctcatcttaagagccagagccatataagcatcttgggaaagcaagtttgaaccagctgctggtgtaatgtacagttatatttgtctataaatggagctgtttatggcaatttaataccattctctttgtaaagtgaataaatattcatcttttccc

SEQ ID NO: 2919 - protein, 686 aa, Homo sapien
RGCSGARAAMAAGGGGSCDPLAPAGVPCAFSPHSQAYFALASTDGHLRVWETANNRLHQEYVPSAHLSGTCTCLAWAPARLQAKESPQRKKRKSEAVGMSNQTDLLALGTAVGSILLYSTVKGELHSKLISGGHDNRVNCIQWHQDSGCLYSCSDDKHIVEWNVQTCKVKCKWKGDNSSVSSLCISPDGKMLLSAGRTIKLWVLETKEVYRHFTGHATPVSSLMFTTIRPPNESQPFDGITGLYFLSGAVHDRLLNVWQVRSENKEKSAVMSFTVTDEPVYIDLTLSENKEEPVKLAVVCRDGQVHLFEHILNGYCKKPLTSNCTIQIATPGKGKKSTPKPIPILAAGFCSDKMSLLLVYGSWFQPTIERVALNSREPHMCLVRDISNCWAPKVETAITKVRTPVMNSEAKVLVPGIPGHHAAIKPAPPQTEQVESKRKSGGNEVSIEERLGAMDIDTHKKGKEDLQTNSFPVLLTQGLESNDFEMLNKVLQTRNVNLIKKTVLRMPLHTIIPLLQELTKRLQGHPNSAVLMVQWLKCVLTVHASYLSTLPDLVPQLGTLYQLMESRVKTFQKLSHLHGKLILLITQVTASEKTKGATSPGQKAKLVYEEESSEEESDDEIADKDSEDNWDEDEEESESEKDEDVEEEDEDAEGKDEENGEDRDTASEKELNGDSDLDPENESEEE

SEQ ID NO: 2920 - DNA, 1834 bp, Homo sapien
atttttagataatcattaaagaccacagaaaatgtaacagatcctactcttcaaaataattgctattcagtattaaaacgagcagtcagctgcgtgattcccgtgattgcgttacaagctttgtctccttcgacttggagtctttgtccaggacgatgagacactcaaagagaacttactgtcctgattgggatgacaaggattgggattatggaaaatggaggagcagcagcagtcataaaagaaggaagagatcacatagcagtgcccaggagaacaagcgctgcaaatacaatcactctaaaatgtgtgatagccattatttggaaagcaggtctataaatgagaaagattatcatagtcgacgctacattgatgagtacagaaatgactacactcaaggatgtgaacctggacatcgccaaagagaccatgaaagccggtatcagaaccatagtagcaagtcttctggtagaagtggaagaagtagttataaaagcaaacacaggattcaccacagtacttcacatcgtcgttcacatgggaagagtcaccgaaggaaaagaaccaggagtgtagaggatgatgaggagggtcacctgatctgtcagagtggagacgtactaagtgcaagatatgaaattgttgatactttaggtgaaggagcttttggaaaagttgtggagtgcatcgatcataaagcgggaggtagacatgtagcagtaaaaatagttaaaaatgtggatagatactgtgaagctgctcgctcagaaatacaagttctggaacatctgaatacaacagaccccaacagtactttccgctgtgtccagatgttggaatggtttgagcatcatggtcacatttgcattgtttttgaactattgggacttagtacttacgacttcattaaagaaaatggttttctaccatttcgactggatcatatcagaaagatggcatatcagatatgcaagtctgtgaattttttgcacagtaataagttgactcacacagacttaaagcctgaaaacatcttatttgtgcagtctgactacacagaggcgtataatcccaaaataaaacgtgatgaacgcaccttaataaatccagatattaaagttgtagactttggtagtgcaacatatgatgacgaacatcacagtacattggtatctacaagacattatagagcacctgaagttattttagccctagggtggtcccaaccatgtgatgtctggagcataggatgcattcttattgaatactatcttgggtttaccgtatttccaacacacgatagtaaggagcatttagcaatgatggaaaggattcttggacctctaccaaaacatatgatacagaaaaccaggaaacgtaaatattttcaccacgatcgattagactgggatgaacacagttctgccggcagatatgtttcaagagcctgtaaacctctgaaggaatttatgctttctcaagatgttgaacatgagcgtctctttgacctcattcagaaaatgttggagtatgatccagccaaaagaattactctcagagaagccttaaagcatcctttctttgaccttctgaagaaaagtatatagatctgtaattggacagctctctcgaagagatcttacagactgtatcagtctaatttttaaattttaagttattttgtacagctttgtaaattcttaacatttttatattgccatgtttattttgtttgggtaatttggttcattaagtacatagctaaggtaatgaacatctttttcagtaattgtaaagtgatttattcagaataaattttttgtgcttatga

SEQ ID NO: 2921 - protein, 484 aa, Homo sapien
MRHSKRTYCPDWDDKDWDYGKWRSSSSHKRRKRSHSSAQENKRCKYNHSKMCDSHYLESRSINEKDYHSRRYIDEYRNDYTQGCEPGHRQRDHESRYQNHSSKSSGRSGRSSYKSKHRIHHSTSHRRSHGKSHRRKRTRSVEDDEEGHLICQSGDVLSARYEIVDTLGEGAFGKVVECIDHKAGGRHVAVKIVKNVDRYCEAARSEIQVLEHLNTTDPNSTFRCVQMLEWFEHHGHICIVFELLGLSTYDFIKENGFLPFRLDHIRKMAYQICKSVNFLHSNKLTHTDLKPENILFVQSDYTEAYNPKIKRDERTLINPDIKVVDFGSATYDDEHHSTLVSTRHYRAPEVILALGWSQPCDVWSIGCILIEYYLGFTVFPTHDSKEHLAMMERILGPLPKHMIQKTRKRKYFHHDRLDWDEHSSAGRYVSRACKPLKEFMLSQDVEHERLFDLIQKMLEYDPAKRITLREALKHPFFDLLKKSI

SEQ ID NO: 2922 - DNA, 2024 bp, Homo sapien
gcagtgactctgggaaatccttcattaatcattcacaccttcagggacatttaagaactcacaatggagaaagtctccatgaatggaaggaatgtgggagaggctttattcactccacagaccttgctgtgcgtatacaaactcacaggtcagaaaaaccctacaaatgtaaggaatgtggaaaaggatttagatattctgcataccttaatattcacatgggaacccacactggagacaatccctatgagtgtaaggagtgtgggaaagccttcaccaggtcttgtcaacttactcagcacagaaaaactcacactggagagaaaccttataaatgtaaggattgtgggagagccttcactgtttcctcttgcttaagtcaacatatgaaaatccatgtgggtgagaagccttatgaatgcaaggaatgtgggatagccttcactagatcttctcaacttactgaacatttaaaaactcacactgcaaaggatccctttgaatgtaagatatgtggaaaatcctttagaaattcctcatgcctcagtgatcactttcgaattcacactggaataaaaccctataaatgtaaggattgtgggaaagccttcactcagaactcagaccttactaagcatgcacgaactcacagtggagagaggccctatgaatgtaaggaatgtggaaaggcctttgccagatcctctcgccttagtgaacatacaaggactcacactggagagaagccttttgaatgtgtcaaatgtgggaaagcctttgctatttcttcaaatcttagtggacatttgagaattcacactggagagaagccctttgagtgcctggaatgtggtaaagcatttacgcattcctccagtcttaataatcacatgcggacccacagcgccaaaaaaaccattcacgtgtatggaatgtggcaaagcctttaagtttcccacgtgtgttaaccttcacatgcggatccacactggagaaaaaccctacaaatgtaaacagtgtgggaaatccttcagttactccaattcgtttcagttacatgaacgaactcacactggagagaaaccctatgaatgtaaggagtgcgggaaagccttcagttcttccagttccttttgaaatcatgaaagaaggcatgcggatgagagactgtcagcataaggaatgtgggaaaacctaaaggtgtccctgttctctctgaagacatgaaaactcactggggagaaaccctatgaatgtaaaaatgtggaagcaactttgtatctcaggtcttaatgaacacatatgaattcacagtggagaagaccctgcatcaggtaatgtggaaatgactttgctgaattctcaagccttaccaaacacatcagaaatctcactggagagaaaccgtatgaatgtagagaatctgggaatacctttctgaatcccacaaaccttaatgtgtgtatgtgaactcacattggagagaaaccctgcaatttaaatggtatggtctggatgatgccccactccatatttgtaagccctaagtcctagttccttacactataactgtatttggacatagggttttcaaacaggtgagtaacttcaaatgaggttgttgggttcgatccctaatctgacatcactggtgtccctataagggaaactgaaggaaggatacacatggagaagactgtgtggatccaccagaagatggccatctacaagccaaggacagagacctggaacagatgctttcattatggcctccagaggaaaccaaccctgtctccaccttgatattgcacttccaggctccagaactgtgaggcaataaatttctcttggttaaatcattcagtctgttattttgtacagcaaccctaggaaactaatactgtgaggaacttgggaaaagctttagatcaagcttgtccaacccgcaggccaggatggctttgaatgcagaccaacacaaatttttaagctttcttcaaacataataaaatttttttgtgatt

SEQ ID NO: 2923 - protein, 243 aa, Homo sapien
MGTHTGDNPYECKECGKAFTRSCQLTQHRKTHTGEKPYKCKDCGRAFTVSSCLSQHMKIHVGEKPYECKECGIAFTRSSQLTEHLKTHTAKDPFECKICGKSFRNSSCLSDHFRIHTGIKPYKCKDCGKAFTQNSDLTKHARTHSGERPYECKECGKAFARSSRLSEHTRTHTGEKPFECVKCGKAFAISSNLSGHLRIHTGEKPFECLECGKAFTHSSSLNNHMRTHSAKKTIHVYGMWQSL

SEQ ID NO: 2924 - DNA, 6720 bp, Homo sapien
tcaaagtaaaggtattctaaagatttcagctgtccctgaactaactgatgtgaatactggaaaaccagtatctctctctagttcttattttcacagagagaaatcgaatattttcagtccacaggaattgccaggtagtcatgtaactgaagatgtgctgaaggtttcaacaattcctggaccagctggccagaaaacagtattaccaacagctcttcctagttccttttcacatcgagagaaaccagatattttctatcaaaaggatttgccagatagacatctaactgaagatgctctaaagatctcaagtgctcttgggcaagctgatcaaattaccggattacaaacagttccctctggtacttactcacatggtgagaatcacaagcttgtttcagaacatgtccaaaggctaatagataatttgaattcttctgactccagtgttagctcaaataatgtgcttttaaattctcaggctgatgacagagttgtaataaataaaccagaatctgcaggttttagagatgttggctctgaagaaatccaggatgcagaaaatagtgctaaaactcttaaggaaattcggacacttttgatggaggcagaaaatatggcactgaaacgatgcaattttcctgctccccttgcccgtttcagagatattagtgatatttcatttatacaatctaagaaggtggtttgcttcaaagaaccctcttccacgggtgtatctaatggtgatttgcttcacagacagccattcacagaggaaagcccaagcagcaggtgcatacagaaggatattggcacacagacgaatttgaaatgccggagaggcattgaaaattgggagtttattagttcaactacagttagaagtcctctacaggaagcagagagcaaagtcagtatggcattagaagaaactcttaggcaatatcaagcagccaaatctgtaatgaggtctgaacctgaagggtgtagtggaaccattgggaataaaattattatccctatgatgactgtcataaaaagtgattcaagtagtgatgccagtgatggaaatggttcctgctcgtgggacagtaatttaccagagtctttggaatcagtttctgatgttcttctaaacttctttccatatgtttcacccaagacaagtataacagatagcagggaggaagagggtgtgtcagagagtgaggatggtggtggtagcagtgtagattcactggctgcacatgtgaaaaaccttctgcaatgtgaatcctcactgaatcatgctaaagaaatactcagaaatgcagaggaagaggaaagccgggtacgagcacatgcctggaatatgaagttcaatttagcacatgattgtggatactccatttcagaattaaatgaagatgacaggaggaaagtagaagagatcaaggcagagttatttggtcatggaagaacaactgacttgtccaagggtttacagagtccacggggaatgggatgcaagccagaagctgtatgtagtcacattattattgagagccatgaaaagggatgtttccggactctaacttctgaacatccacaactagatagacacccttgtgctttcagatctgctggaccctcagaaatgaccagaggacggcagaacccatcatcatgcagagccaagcatgtcaacctttctgcatccttagaccagaacaactcccatttcaaagtttggaattccttgcagttaaaaagtcattccccatttcagaactttatacctgatgaattcaaaatcagcaaaggtcttcgaatgccattcgatgaaaagatggacccttggctgtcagaattagtagaacctgcttttgtgccacctaaagaagtggattttcattcttcatcacaaatgccgtccccagaacccatgaaaaagtttactacctccatcactttttcatctcaccgacattctaaatgcatttccaattcctctgttgttaaggttggtgttactgaaggtagccagtgtactggagcatctgtgggggtatttaattctcatttcactgaagaacaaaatcctcccagagatcttaaacagaaaacctcttccccttcatcatttaaaatgcatagtaattcacaagataaagaagtgactattttagcagaaggtagaaggcaaagccaaaaattacctgttgattttgagcgttcttttcaagaagaaaaacccttagaaagatcagattttacaggcagtcattctgagcccagtaccagggcaaattgtagcaatttcaaggaaattcagatttctgataaccatacccttattagcatgggcagaccaagttccaccctaggagtaaacagatcgagttccagactaggagtaaaagagaagaatgtaactataactccagatcttccttcttgcatttttcttgaacaacgagagctctttgaacaaagcaaagccccacgtgcagatgaccatgtgaggaaacaccattctccctctcctcaacatcaggattatgtagctccagaccttccttcttgcatttttcttgaacaacgagaactctttgaacagtgcaaagccccatatgtagatcatcaaatgagagaaaaccattctccccttcctcaaggtcaggattctatagcttcagaccttccgtctcccatttctcttgaacaatgccaaagcaaagcgccaggtgtagatgaccaaatgaataaacaccattttccccttcctcaaggtcaggattgtgtagtggaaaagaataatcaacataagcctaaatcacacatttctaatataaatgttgaagccaagttcaatactgtggtctcccagtcagccccaaatcactgtacattagcagcatctgcatctactcctccttcaaatagaaaagcactttcttgtgttcatataactctttgtcccaagacttcttccaagttggatagtggaactttagatgaaagattccattcattggatgctgcttctaaagcgaggatgaatagtgagtttaactttgacttacatactgtatcttcgagatcactggaaccaacctccaaattattgaccagtaaacctgtagcacaggatcaagaatctttaggttttctaggacctaaatcttcactggatttccaagtcgtacagccttctcttccagacagtaacactattactcaggacttgaaaaccataccttctcagaatagccagatagtaacctccaggcaaatacaagtgaacatttcagatttcgaaggacattccaatccagaggggaccccagtatttgcagatcgattaccagagaagatgaagaccccactttctgctttctctgaaaaattgtcatctgatgcagtcactcagataacaacagaaagtccagaaaagaccctattttcatctgagatttttattaatgctgaagatcgtggacatgaaattatagagcctggtaaccagaagctacgcaaagctcctgtcaagtttgcctcatcatcttcagtccaacaggttactttttctcgcggcacagatggccagcctttattattgccatataagccttctggtagtaccaagatgtattatgttccacaattaagacaaattcctccatctccggattccaaatcagataccaccgttgaaagctcccattcaggatccaatgatgccattgctccagacttcccagctcaggtgctaggcacaagagatgatgacctctcagccactgttaacattaaacataaagaaggaatctacagtaagagggtagtgactaaggcatccttgccagtgggagaaaaacccttgcagaatgaaaatgcagatgcctcagttcaagtgctaatcactggggatgagaacctctcagacaaaaaacagcaagagattcacagtacaagggcagtgactgaggctgcccaggctaaagaaaaagaatctttgcagaaagatactgcagattccagtgctgctgctgctgcagagcactcagctcaagtaggagacccagaaatgaagaacttgccagacactaaagccattacacagaaagaggagatccataggaagaagacagttcccgaggaagcctggccaaacaataaagaatccctacagatcaatattgaagagtccgaatgtcattcagaatttgaaaatactacccgttctgtcttcaggtcagcaaagttttacattcatcatcccgtacacctaccaagtgatcaagatatttgccatgaatctttgggaaagagtgttttcatgagacattcttggaaagatttctttcagcatcatccagacaaacatagagaacacatgtgtcttcctcttccttatcaaaacatggacaagactaagacagattataccagaataaagagcctcagcatcaatgtgaatttgggaaacaaagaagtgatggatactactaaaagtcaagttagagattatccaaaacataatggacaaattagtgatccacaaagggatcagaaggtcaccccagagcaaacaactcagcacactgtgagtttgaatgaactgtggaacaagtatcgggagcgacagaggcaacagagacagcctgagttgggtgacaggaaagaactgtccttggtggaccgacttgatcggttggctaaaattcttcagaatccaatcacacattctctccaggtctcagaaagtacacatgatgatagcagaggggaacgaagtgtgaaggaatggagtggtagacaacagcagagaaataagcttcagaaaaagaagcggtttaaaagcctagagaaaagccataaaaatacaggcgagcttaaaaaaagcaaggtgctttctcatcatcgagctgggaggtctaatcaaattaaaattgaacagattaaatttgataaatatattctgagtaaacagccaggttttaattatataagcaacacttcttcggattgtcggccctcagaggagagtgagctgctcacagatactaccaccaacatcctttccggcaccacttctactgtcgaatcagatatattgacccaaacagatagagaggtggctctgcacgaaaggagtagctctgtttccactattgacactgcccggctgattcaagcttttggccatgaaagagtatgcttgtcacccagacgaattaaattatatagcagcatcaccaaccaacagaggagataccttgagaagcggagcaaacacagcaagaaagtgctgaatacaggtcatcccctagtgacttctgagcacaccagaaggagacacatccaggtagcaaaccatgtgatttcttctgactctatttcctcttctgccagtagtttcctgagctcaaactctactttttgcaacaagcagaatgtacacatgttaaacaagggcatacaagcaggtaacttggagattgtgaacggtgccaaaaaacacactcgagatgttgggataactttcccaactccaagttccagcgaggctaaattggaagagaacagtgatgtgacttcttggtcagaagaaaaacgtgaagagaaaatgctctttaccggttatcctgaggacagaaagttaaaaaagaacaagaagaattcccatgaaggagtttcctggtttgttcctgtggaaaatgtggagtctagatcaaagaaggaaaacgtgcctaacacttgtggccctggcatctcctggtttgaaccaataaccaagaccagaccctggagggagccactgcgggagcagaactgtcaggggcagcacctggacggtcggggctacctggcaggcccaggcagagaggctggcagagacctactgaagccatttgtgagagcaacccttcaggaatcgcttcagtttcacagacctgacttcatctcccgctctggggagcggataaagcgcctgaagttaatagtccaggagaggaagctgcagagcatgttacagaccgagcgggatgcactattcaacattgacagggaacggcagggccaccagaatcgcatgtgcccgctgcccaagagagtcttcctggctatccagaagaacaagcctatcagcaagaaggaaatgattcagaggtccaaacggtaagaccaagaaaacaagagtacgtatacaagtgtaaaccaggccaccaagtggtcgggagctctggcttgcacccagaataaatgtattatactcaagtttaaacattatgagaaagttgtgagagtcatttctcacttatggcactgaaaaaaaaaaaagcacatcatggtatgaatgactcatatgcaaaagatgaaaaacttctcactaatttgcatgtcttaggctcctctttattagaaacctaaatgtaaataaagaatattttaggccaggtacggtggctcatgcctgtaatcccagcacttagggaggccgaggtgtgcagatcacatgaggttaggagttcgagaccagcctggccaacatggtgaaactccatctctactcaaaatacaaaaattagctgggtgtggaggcacacgcctgtaatcccagctactcagtaggctgagccgggaggatctcttgaacctgggaggcagaggttgcagtgagcttagatggtgccactgtactccagtctgggcgacagaacgagactccatctc

SEQ ID NO: 2925 - DNA, 2924 bp, Homo sapien
tatttttattgaggctaatatattatcctttggtgccatgagtggatgaagaaactttcagaaggctaaacgagtggatacaagaaacttaggcaaattattacaccacaggggtgtgagaaataatgaatattctctactaggtttcagcaaacataatccaagctgatcaatttaggacacttccactgaagagacgtgaagtgtacgttcaactgaagtgtcattgtaattgtgtgccttctcagttattgggcaagttaaagagcatgatgaatgtttgtactataatggtgtaaatccttctgatttcttgcatggaagacatgtggcatcatgtagaacctgctttgacattgattctcaattgtatgagttgctcctctgattttagatcacatttgtcaatatcaatgtggatatgccaagtgatgaggacacggttttattttagttttagacatatgacaaatcatgccatgtttgaaattgtaagtatattttgtgaagcctgtattcacctttttcagtgtatttctgtcatattccagtcccgagtcacaaagtagaaaacatcaaagcctatactaatacaggcaggaagatacatcttgatgccaacagtgcaggaatgtatggataactttatcatatttacatatgagtgattatgtatcccttttgcttttcagtgtcttctcagaaacaaccagccttgaaggctacaagtgacaagaaagattctgtttcgaatatacccacagaaataaaggatggacaacaatctggaacagtgtcttctcagaaacaaccggcctggaaggctacaagtgtcaagaaagattctgtttcgaatatagccacagaaataaaggatggacaaatacgtgggacagtgtctcctcagaaacaatcggcccagaaggttatatttaaaaagaaagtttctcttttgaatattgccacaagaataacaggcggttggaaatctggaacagagtatcctgagaatctgcccaccttgaaggctacaattgaaaataaaaattctgttctgaatacagccaccaaaatgaaggatgtacaaacatccacaccagaacaagacttagaaatggcatcagagggagagcaaaagaggcttgaagaatatgaaaataaccagccacaggtgaaaaaccaaatacattctagggatgaccttgatgacataattcagtcatctcaaacagtctcagaggacggtgactcgctttgctgtaattgtaagaatgtcatattactcattgatcaacatgaaatgaagtgtaaagattgtgttcacctattgaaaattaaaaatacattttgtttatggaaaagattaataaaacttaaagataaccactgtgagcaacttagagtaaaaattcgaaaactgaaaaataaggctagtgtactacaaaagagaatatctgaaaaagaagaaataaaatcgcagttaaagcatgaaatacttgaattggaaaaagaactctgtagtttgagatttgccatacagcaagaaaaaaagaaaagaagaaatgttgaagagttgcaccaaaaagttagggaaaagttaagaataacagaagagcaatataggatagaagctgatgtgacaaaaccaattaaaccggctctcaaatcagcagaggtggaattgaagacaggaggaaataattcaaatcaggtttctgaaactgatgaaaaagaagacctgctgcatgaaaaccgcttgatgcaagatgaaattgccaggctcaggctggaaaaagacacaataaaaaaccaaaacctggaaaagaaatacttaaaagactttgaaattgtgaaaagaaagcatgaagaccttcaaaaggctctaaaacggaatggggaaacattagcaaaaacgatagcctgttatagtggacagcttgctgctctgacagatgaaaacacaacgctccgttccaaactggagaagcaaagagagagcaggcaaagactggaaacagaaatgcaatcataccattgtagactgaatgctgctcgatgtgatcatgatcaaagtcactcatcaaaaagagaccaagagcttgctttccagggcacagtagataaatgtcgtcacttacaggaaaatttgaattctcatgttctgattctttctctgcaactttctaaagctgagagtaagtccagagtcctcaaaactgagctccattacacaggagaggctctgaaagaaaaggctttggtttttgaacacgtgcaaagtgagctaaagcaaaaacagagtcaaatgaaggacattgaaaaaatgtacaaaagtggatacaatacaatggaaaaatgcatagaaaaacaggaaagattttgtcaactaaaaaaacaaaatatgttgcttcaacagcaactggatgatgctcgcaacaaagctgacaatcaagaaaaagcaatacttaatattcaagccagatgtgatgctagagtacaaaaccttcaagctgagtgcagaaagcaccgtcttttactagaagaagacaataaaatgttggtcaatgaactgactcattcgaaagaaaaagaatgccaatatgaaaaagagaaagcagaaagagaagtagctgtgagacagcttcaacaaaaacgagatgatgtcttaaacaaaggatcagcaacaaaagctctgctggatgcttcatcgcgtcactgcacctatttagaaaatgggatgcaggattcaaggaagaaattagaccagatgagaagtcaagtatgtatgcaactttgcacaccaacaactgttaatctgtagctagttaactaatataaagtgttttggggtactaattttagtggatggctttcttttgtatttttatgataattaatgttattaaaattttatagtggatggc

SEQ ID NO: 2926 - DNA, 4732 bp, Homo sapien
gatgcccccgccaggggggatgcccggcaccgtgcgtccgcggaggccaagatgcagcggccaggggccggcagcctgcgaggggaggcagcttccgccggggccgggctgctgcacagtctgagcggccgggactgcgcgcttcagagcctggagcatcccagtcgctggggccgagacgccgccgccgccgccgttcccgctttctcccgcgagccgggccagtagctttgctagctggccttcccgtggaggcgttttccagccccagcgcggggagacatgcctgaatttgggagcgatgtgactctcagcctcccacttcacccggggacgcaggcttgctgaagcccgagacaggagggggaccatgggagggacgcaagtcaaatgcctgacttcacccagtccaatccacagtgcaaagagcgagtccattataacccagtcagaagagaaggcagattttgtgattattcccgctgaaggaatagagaacagaacagaagggacagattctccattatctcgagactggcggccagggagccctggaacctatctggagacctcatgggaagaacagctgttggaacaacaagaatatttagaaaaagaaatggaggaagcaaagaaaatgatatcaggactacaggccttactgctcaatggatccttacctgaagatgaacaggagaggcccttggccctctgtgaaccaggtgtcaatcccgaggaacaactgattataatccaaagtcgtctggatcagagtatggaggagaatcaggacttaaagaaggaactgctgaaatgtaaacaagaagccagaaacttacaggggataaaggatgccttgcagcagagattgactcagcaggacacatctgttcttcagctcaaacaagagctactgagggcaaatatggacaaagatgagctgcacaaccagaatgtggatctgcagaggaagctagatgagaggaaccggctcttgggagaatataaaaaagagctggggcagaaggatcgccttcttcagcagcaccaggccaagttagaagaagcactccggaaactctctgatgtcagttaccaccaggtggatctagagcgagagctagaacacaaagatgtcctcttggctcactgtatgaaaagagaggcagatgaggcgaccaactacaacagtcacaactctcaaagcaatggttttctccttccaacggcaggaaaaggagctacttcagtcagcaacagagggaccagcgacctgcagcttgttcgagatgctctccgcagcctgcgcaacagcttcagtggccacgatcctcagcaccacactattgacagcttggagcagggcatttctagcctcatggagcgcctgcatgttatggagacgcagaagaaacaagaaagaaaggttcgggtcaagtcacccagaactcaagtaggtagtgaataccgggagtcctggccccctaactcaaagttgcctcactcacagagctctccaactgtcagcagcacctgtactaaagtgctctatttcactgaccggtcacttacgcccttcatggtcaatataccaaagaggttggaggaggtgacgttaaaggattttaaagcagctattgatcgggaaggaaatcaccggtatcacttcaaagcactggatcctgagtttggcactgtcaaagaggagattttccatgatgatgatgccatccctggatgggaagggaaaattgtagcttgggtggaagaagaccatggagagaattaatgccaagtatcagattgagggcttatggaacctggtcactccctggctgcttcactcaggaaagggaactaaaaccagaatacactaagaagtttctagtttgtgtgccaaaacagaagcttctccaagcatgatggccacaggtcagtcctctttctgtgcctggcatatctggtacttaaaattctgtccaaatgtagaccatgggttcatctggagttccttgtccgtgggaacacagtgttctattctactctgaggacaacaaaccgaaggccttaaacgatggggatggatgatcccgcctctgtaggggcatggctgctattatctggaaattaggaattggatgcatcattcctgtgtgttacagtattattttaattggcctcaatggttgcagcaatcagagtcccagcgtttgtactcacagacaaggcaaaggtaccagcttttctgtttctttgaacctactgcaaaccaagaataactcatgaggtggtaccaaagatgaaagcccagacttcagtaatcttttgaaccagacgtggatggtgctgaattgttgcttggatggaaaaagggctgcccatgttgtgctacactatgctaaaactgtaatttagtaagaccttgggctgcctcttctgtcttaactggttctgcagcttgtccttttgcccacatagggcctatttcatgtactgttagttttctctggggactctttaactttagagccatttctttttcttcaaactgatgaacttttgtttgaaaggcataaggagtgaaaagctccttgaaaatccaggcgggtatggaaaggtgctgctacccatatctttttgactttctttgtttcatgactttaactcatggcatctcctttgtagtaaaaggagacagaccattaatttcagcatttctttgtgatttataagtactgagcatgaagtacttgtctgcccctcatttcaaggccagagttattttctatttatgtattagtctaggctgatcttttagggcacaatagaaaccatggggcgtggagcatgagttgtgaatggcagggatcattctgggtaaaaaaaacctagaatcatttctgatgtgcaacattgtcaagtgaagaagctaacagttcaactaccgagattatttgataacctgggttttctcattcatccatcaagcaccatcaaccagtcagccattattatttatatatgtattaccaaaagcagtctatctgcctgtgacctccaatgtacactgccaaacacaagagtaggacacatctgttctgggttcttgacctatctgtctccaattcatctccccttttcagccatttcaacaaactactctttggagctctgagatgacatcttgttgttttatatagatgtatcttttaaaaatagttcacgtttggagaattcttttgtactcatttgctttttgtctgagaaccatgtctatttttataactggagtgtgagttctgtatcttctcacattctgtatactgtatccattttctagagaacccagtagcttttatacagtctcttcttaccaccccttgtggtttcagaacaagctttattttattacgagtatattaatgacaactaattcctgttccaattctacctgttttagttgtgaaggtagttttgtgtaatccagttgattgctcctctggcagagagaaggagctcaaaagatacttgatgtctttcatgtaagtttacctggtcttttcctattgaagaatttttcatcagaaacgactgggaaagtttgggaaagtcagcaaaagaaagaatgcatttcgaaagcaaacagaagaaaaaagtatattctcacagtttttccccaggaagtctggagaaaaagtcctcatgtcaccaatttctctgttgcatgaattttagtgttttgctataagacagcatgagggctatcaggccaaaattcattattgtatttccaatacagtttgtcttgaatgtctgtctcttaaaccagtttttacttgtcagttttctctcagcaaacagtcttactattatgtggaatttaacttttcagagaaaatttccaaagtcctctaccttatttggcttttatctgtgtcttttggaaaaggagctgcatggcctcagtgcctccataaaaagcttaagttgagttcatgggagaacattaagatcgttttttttcccttttagctcggtaatctcatgtaccacaggtaatgaccaagcatctctgctagaggatgtaactctcataactcctgtgtaaaatgaggatcctgttggtgatcctcattccagtttccaaagcgagaggagccttctgagcagaagtatgcaagactgattctgtttggaacagtttcctatttggctgcattctaggaggcctcctgacttattcatagtattgtcgcctggtggcattggtgtggggtagcttgtcctgctacttgctaaagttctctttctttgagaaaactgaggaaccagaatgcttagagttcataaaataatctctaaaccatgttaggttaaaacaaaatgaccatctcacaaaaacgagtttagttgaatgctcaattccttacaaaatcttcatttaaggctgagtgtggtggctcatgcctgtaattccagcactttgggaggccgaggcaggaagactgcttgagcccaggagttcaagaccagcctgggcaacgtaggaagactccgtctctacatagaaattttattataaaagtagctggggatggtggcacacacctgtagtcccagctactcaggaggttgaggtgggaagattgcttgagcccaggagtttgaggttgcagtgagctgatcatgccactgcactctagcctaggctacagagcaggaccccatctcc

SEQ ID NO: 2927 - protein, 493 aa, Homo sapien
LSASHFTRGRRLAEARDRRGTMGGTQVKCLTSPSPIHSAKSESIITQSEEKADFVIIPAEGIENRTEGTDSPLSRDWRPGSPGTYLETSWEEQLLEQQEYLEKEMEEAKKMISGLQALLLNGSLPEDEQERPLALCEPGVNPEEQLIIIQSRLDQSMEENQDLKKELLKCKQEARNLQGIKDALQQRLTQQDTSVLQLKQELLRANMDKDELHNQNVDLQRKLDERNRLLGEYKKELGQKDRLLQQHQAKLEEALRKLSDVSYHQVDLERELEHKDVLLAHCMKREADEATNYNSHNSQSNGFLLPTAGKGATSVSNRGTSDLQLVRDALRSLRNSFSGHDPQHHTIDSLEQGISSLMERLHVMETQKKQERKVRVKSPRTQVGSEYRESWPPNSKLPHSQSSPTVSSTCTKVLYFTDRSLTPFMVNIPKRLEEVTLKDFKAAIDREGNHRYHFKALDPEFGTVKEEIFHDDDAIPGWEGKIVAWVEEDHGEN

SEQ ID NO: 2928 - DNA, 5938 bp, Homo sapien
  Unsure 1687-1710: Unknown base
cgacttatagaactggatgaatctttcaaaagtgaacacactgtttttgtaacaccacctgagatcccccacctaccccatggtgaagaaccccctttacagtacaggtattcaagaggcagaatgtttgagattgaaagagagaagcaatccatcatctgtgacgtagctttctaaggactgtggtattttcaaaaatccaaactttacagatccctaatttttaggtgctataatggatttccagttcttaggaacaatttatttgaaagacctgaaggatttctacaagcaaagaagaacaaattgccttcaaaatcaagtagtcctaatagccctttgcccatgttcagaagaacaaaacaggaaattaaatcagcccataaaattgcaaagaggtactcttccatccctcagatgtggtctaggtgtctactgcgccactgttatggactgtggtttatttgtctcccagcttatgtaaaagtctgtcattcaaaagtcagggctctgaaaacagcatatgatgtgcttaaaaaaaatgcagtcaaagaagatggatccacctgatgaggtatgctaccgcattcttatgcaactctgtggacaatatgatcagccagtgcttgcagttcgagtgctttttgaaatgcagaaagctggtattgaccccaatgccattacttatggttattataataaggctgttttggaaagtacctggccttcaagaagtcgtagtggctattttctttggacaaaagtaagaaatgtgttttaggagtaacacagttcaaaagagctttaaagaagcatgcacacttatcacaaacaactctctcaggtggccagtctgatcttggatataattcattatctaaagatgaagttagaagaggggatacatctactgaagacattcaagaagaaaaagataaaaaagggagtgattgtagttccttgtcagagagtgagagtacaaaaggaagtgctgatgccttcctaagctcagttatcaaaattcttccagtatcgttcgcctcactggtacaagtaacaacagtgctggtaaaatatcaggagaaagcatggaaagcacacctgagctgctcttaatatcatctcttgaagatacaaatgaaacacgaaacattcaaagtagatgcttcaggaaaagacataaaagtgacaatgaaactaatttgcagcagcaagtggtctggggaaatagaaaccgtaatcttagtggaggggtactgatgggatttatgctcaatagaattaaccaggaagcaacccctggagatatagttgaaaaattgggagctgatgcaaaaattctttcaaatgttatctcaaaaagcacgagaccaaatactcttgatattgggaagccacctttaagatcaaaaagagacagtctagaaaaggaatctagtgatgatgatacaccttttgatggttctaactatttggcagataaagtggattctcctgttatttttgacttagaagacttagacagtgaaacagatgtatcaaaagcaggatgtgttgctacacaaaatcccaagaggattcaacgtatgaacagcagcttttcagtaaaaccttttgaaaaaactgatgtcgcaacaggatttgatcccctctctcttttggttgctgagactgaacagcagcaaannnnnnnnnnnnnnnnnnnnnnnnatgatagcaaaagcatttcaacaccatctgctaggcgtgatttagctgaagaaattgtgatgtatatgaataacatgagcagtcctttgacaagtcgtacaccaagcattgatttacaacgggcatgtgatgataaattaaataagaaaagtccaccattggtcaaggcatgcagaagatctagtctgcctcctaattctcctaagccagtgagacttaccaaatctaaaagttacacaaaaagtgaggagaaaccaagggatagactttggtcttctccagccttctcacctacttgcccatttagggaagaatctcaggatacattaacccactcatcaccttcatttaacttagatacactactagtacctaaactagatgttctaagaaacagtatgttcactgctggaaaaggagttgcagagaaagcaagcaaatggtattcaagattcaccatgtacaccacatcatctaaggatcaaagttctgatcgtaccagtctttcttcagtgggagcccaggattctgaatctacctctttaacagatgaagatgtctgccatgagttggaaggacctatctcctctcaagagaccagtgctacttcagggactaagagaattgatctcagccgaataagcctggaaagttctgcatccttggaaggatctctgtcgaagtttgccttacctgggaaatcagaagtgacatcttccttcaacgcgagtaatacaaatatcttccagaactatgcaatggaggttctcatctcaagttgctctcggtgtagaacttgtgattgtcttgtccatgatgaggaaatcatggctggctggacagcagatgattcaaatctcaatactacatgcccattctgtggcaatatcttcttaccctttctgaatatagaaataagagatttaagacgacctggaagatactttctaaagtcaagcccatcaacagaaaatatgcactttccatcctccatttcaagtcagacgaggcagtcttgcatttcaacatcagcctctggtcttgacacatctgctctctctgttcaagggaattttgatctaaatagcaaatctaaactgcaggaaaatttttgcacccgaagtattcagatccctgctaatagatcaaaaacagctatgtctaaatgtccaatatttccaatggccaggagtattagtacttctggccccttggataaggaagatactggaagacagaagctcatttctacaggcagcctgccagctactttacaaggagctacagattctttaggtttagaatggcaccttccaagtcccgatcctgtcactgttccgtatcttagtcctttagtggtatggaaagaacttgaaagcttattggaaaatgaaggtgatcatgcaataacagtagcagactttgtggaccatcatccaattgttttttggaacctggtatggtatttcagacgtcttgacttgcccagtaacttacctggattgattctttcttctgagcactgtaacaagtattcaaagattccccgccactgtatgtctgaagatagcaaatatgttttaatacaaatgttatgggacaatatgaagttacatcaggatccgggacagcccttgtacattctctggaatgcacacacccaaaaatatccaatggtccatttattgcaaaaaagtgataactcatttaaccaggaactgttgaaaagtatggtaaaaagcattaaaatgaatgatgtctatggaccaatgagtcagattttagagacactgaataagtgtccacattttaaaagacagaggagtttatacagagaaatactatttctctcacttgtggcactgggaagagaaaacattgatatagatgcttttgataaagagtacaagatggcatacgatcgtctcacacctagtcaagtcaagagtacacacaactgtgatagaccaccaagtacaggggtgatggaatgtcgaaaaacctttggagaaccttatctttaagatgtatttgtatgtgtaaacattcaatgtatattgtatagtcagtgtataaaataacacttttagactctaaatattttttcttcaatttttgaaaatacaatttgtaaatggttcaaaagactcagacagcttatgtacagaatgtttgaagaagagaatagtgacaagtggggagaaagccactttgtttctcatttcttttttcttcttctttaactcccctgtaataggaaataaagtatttttgtgatgaggaaatccctaaacaaaattagttgccataaaatatgacaactgctttatggtttcttttggaagagacagattgaaaaatcatgaatggaatctaaacagaaatgtcagatgaacgtatttcctgttttcatagactattcaaatgttttgaccatgaagttgtattatacatattttaaattgtttatagtaagttgatatttttttaatttttaaatttaatatagcaaacttaaaatgaatttaaacttaagcaagcaagcgtgtattttccttgtctgctgctatttgaagtaattagtacagctgcagatctctctgtgtatatctatctatatatattttttattacttgggagaatgaattttaaaatgtcagtgctagtgtcaagtgttgtcctaggattgcatgttagtacccctaagcctgagtgtggggagtgagttatgcaagggtagcgtgcactgcccagactgactcatggagccttgtgcaaggagagccagagaggttcactataccatgactccaaaattgtctctattgctaatagatacgtatagtatacagggaaaacagcttataaatccaaatatcaatttaaattttaatattctacatgaaaacttacattgggaaatatgcagacaagtgattatattccaaattttacccttattttaatatctaaaatattgggtatgatgcaaattatactatagaatatttatctgaaatatgacttactggggtattctgttaatactatatataaatattcagaatttttttcaaaagtagaaaaattcccctctaaaagtacagccagatagattttcatccatattgaggaacttagctttttcaacaagcttcagaatctgaagtctgtagaatctaaaatacagaaatatccagaaatcagacaataaattgaaagtttagacatcatgagtattaaatagctttaaaaatatatttttagtcatattatttctaatgtaactttctttgggtaatttctggtaaggaaaaacatcttttggctgctagaattagttatagattttcaatatgtgtgtgtgtttgcacacattatcattagtgaaggaattccctagccagctttaaagaaggaaaaaatggatagtcccaaattaggtgtataaagccagtagagtccacgacacttggactggaggtatcttggagtcctgagacttagaatcagttcagctgcagaaaacccaccttttgagttcacaccattagtgaatagcaccatgctgaaacatttcacagcttccaactctgggaaataatggagagagtttaaaaatgtaaaacttcagttagtttggggctgaacttgcttacttgaaaaatctggtgctaggcacatatatctgcctctcctttgtaaataccactccaatattattctttactattcagatccaagcttcatgttctacttgttcttcatgttctttaaatcatttgaaagttgtcaactgagagaaacatttcagaggggggaggcttttggcactggtgataaacatccctccaagagaaccgtctggggttctcttctatttgtggttggtggtttttattcttttaaaaacagctttcattgttgtttactttttgtgtaatacaaacaaaatgtaggaatcatagtttattgatttcaaatggctgacaaagaatgagtaaaaccattctttatggttttacgattcagactcatttggaaaagcgaatgtaatttttacctcctctttccaccccaagttttgtttctgcttttggagagggttgtatttcccctacttttaatccctagggaatattattgcacagatttagtcttaaaacctaaaacacaaatacaaagtggtaaacctgttcaaaagaaaattaaaatgtgaatcattct

SEQ ID NO: 2929 - protein, 881 aa, Homo sapien
  unsure 200-208: unknown amino acid
  Unsure 1687-1710: Unknown amino acid
MESTPELLLISSLEDTNETRNIQSRCFRKRHKSDNETNLQQQVVWGNRNRNLSGGVLMGFMLNRINQEATPGDIVEKLGADAKILSNVISKSTRPNTLDIGKPPLRSKRDSLEKESSDDDTPFDGSNYLADKVDSPVIFDLEDLDSETDVSKAGCVATQNPKRIQRMNSSFSVKPFEKTDVATGFDPLSLLVAETEQQQXXXXXXXXXDSKSISTPSARRDLAEEIVMYMNNMSSPLTSRTPSIDLQRACDDKLNKKSPPLVKACRRSSLPPNSPKPVRLTKSKSYTKSEEKPRDRLWSSPAFSPTCPFREESQDTLTHSSPSFNLDTLLVPKLDVLRNSMFTAGKGVAEKASKWYSRFTMYTTSSKDQSSDRTSLSSVGAQDSESTSLTDEDVCHELEGPISSQETSATSGTKRIDLSRISLESSASLEGSLSKFALPGKSEVTSSFNASNTNIFQNYAMEVLISSCSRCRTCDCLVHDEEIMAGWTADDSNLNTTCPFCGNIFLPFLNIEIRDLRRPGRYFLKSSPSTENMHFPSSISSQTRQSCISTSASGLDTSALSVQGNFDLNSKSKLQENFCTRSIQIPANRSKTAMSKCPIFPMARSISTSGPLDKEDTGRQKLISTGSLPATLQGATDSLGLEWHLPSPDPVTVPYLSPLVVWKELESLLENEGDHAITVADFVDHHPIVFWNLVWYFRRLDLPSNLPGLILSSEHCNKYSKIPRHCMSEDSKYVLIQMLWDNMKLHQDPGQPLYILWNAHTQKYPMVHLLQKSDNSFNQELLKSMVKSIKMNDVYGPMSQILETLNKCPHFKRQRSLYREILFLSLVALGRENIDIDAFDKEYKMAYDRLTPSQVKSTHNCDRPPSTGVMECRKTFGEPYL

SEQ ID NO: 2930 - DNA, 3079 bp, Homo sapien
tcttaaacaaggagaagtgccagaaagcccggaagcaaggaaggaaagtgaccaagcatgtggcaaaatggatactgtggatattgcaaacaactctactttgggaaaacccaagaggaaaagaagaaaaaagaaggggcatggctggagcagaacgggaacgagaacgcagaaaaacaaccaacaaaatgataacagcaaagccgatggccagctggtctcgagtgaaaagaaggcgaacatgaatctgaaagacctttccaagattagggggagaaagagaggcaaacctggaacccactttactcagagtgacagagctccacagaaaagagtccgatcaagagcttcaagaaagcacaaagatgaaactgtggattttcaggctcctttacttccagtgacctgtggtggggtgaagggaattttacataaggagaaattggaacaaggaaccttggcaaagtgtatacagactgaggatggaaaatggttcacccccatggaatttgaaatcaaaggaggctacgcaagatcaaagaactggaggctgagtgtgcgctgtggcgggtggcccctacgacggctgatggaggaaggatctctacctaatcctccaagaatatattacaggaacaaaaagagaatactgaagtctcaaaacaatagctcagttgacccttgtatgagaaacttggatgagtgtgaggtgtgccgggacggaggggagctgttctgttgcgacacttgttcaagagtcttccatgaggactgccacatcccacctgtggaaagtgagaagtaagtgacatgcaggcacctctctttcatcctttaagggaccttccacctgccatgcgcactctccagcagaatgtctgcttgtgtctagatggggaaggagcaggttcatcgggtactgggacccagcagtgtgatccagagagcagtgggagacgctggcagcaggaggtaaatgctctctgtgctctcagggacacctcctctgatatgctgaggccagtgttggggacctttgcctacatactggtattgtcctttccttgaagttttgcagtagggtctcctgccccagggggttgaggaaaaaaaacaccagttgtttatattttgtgcttattcatacaagacaggaagcacggtcttaggcggatggaggcctgacgtccctggagttgaaagcccagtttctgacacacaggcctggcaggcaggactccttgtgctcccagcagctcagacagggaaaggatagtccccactcacggtgacaccaccttcctgaggcttccctcctgctgctaccactgatgcgagggaaaggccagtggctggagaccccatgtgcagttcttggatactctgggaggtgttcccctccctcccatgactgagcccatcagccattcctgaaggaagacagtggtagccacaggaacggtggccatttccaagctccctgccctctgctcacccatgtccaatctctcaggaccccgtggaattgcatcttctgcaggatgaaggagtctccgggaagccaacagtgttgtcaggaatctgaggtcctggagaggcagatgtgtcctgaggaacagttggtaaatcagatgcaaaccccaagccttctcctttcccctcacacgtgagaaccatgaacaagcgcaagggcaggggaatgtactgaaaggagcctgctctaccgcgccacacttcaatggcactgatagaacaccacaccttgtttgcacaaaaaataactcagccatgacatgtctgtttccaagagccacacatgttagagaaacttgaggaagaagggtgtgagtcgtgtgctgtgtctcatgcatgtgggctcattctctccaagctgcttttcatttacggcctctttcttttgcagaaatgtgagttcctcctcttgaaagtctattgctgttctgagagctccttttttgccaagattccatactattattatattagagaggcgtgtcaaggcctgaaggagcccatgtggttggataaaatcaagaaaaggctgaatgagcacggttacccccaagtggaggggtttgtacaagacatgcgcctcatcttccagaaccacagggcctcttacaagtataaggattttggccaaatgggacttagactggaggctgaatttgagaaggatttcaaggaagtgtttgctattcaggaaacaaatgggaacagttgactggtttagtggatgctgaaggccttcaggaaatatgctactggttgccactgacttcaaactgagagcacttgggaaatagcacatgcagggagaggcttttctctgagcctccctcatccgcccaaaaacaaatcctcaaaagaaatttgatcatcatgaatcccatccccaagaatctcatcaaccagggaagaggaactgagatcacagggaaggagattggaggtgataccagcacagacagactctcacctcttctcctgaggtctgctccagacaacatttattactcacaagacctttttcctccgttttttttttgagatggagtctcacacagtcacccgggattggaatgcaatggcgcgatctcagctcactgcaacctctgcctcccggattcaagtgattcccctgtctcagcctcccaagtagctgggattacagtgcctgccaccatgcccagctaattttttgcatttttagtagagacggggtttcactatgttggccaggctggtctcgaactcctgacctcatgagccgcccgccttggcctcccaaagtgctgggacgtgacaggagtgagccaccacacctggccactcgcaagaccttttatctgaaaaccagccaagctttattcacgacacacttcttcccttcactctcccacttctgtggtcaactccctgcagaactcccaaactgccgttcttttcgatagctcacgatggtgtatgagtgtcaatcatctgacccttcttggagtctcatatttcgtggaactcctgtgcaaacatatattattaaattttttttcctcctgtc

SEQ ID NO: 2931 - protein, 245 aa, Homo sapien
MDTVDIANNSTLGKPKRKRRKKKGHGWSRTGTRTQKNNQQNDNSKADGQLVSSEKKANMNLKDLSKIRGRKRGKPGTHFTQSDRAPQKRVRSRASRKHKDETVDFQAPLLPVTCGGVKGILHKEKLEQGTLAKCIQTEDGKWFTPMEFEIKGGYARSKNWRLSVRCGGWPLRRLMEEGSLPNPPRIYYRNKKRILKSQNNSSVDPCMRNLDECEVCRDGGELFCCDTCSRVFHEDCHIPPVESEK

SEQ ID NO: 2932 - DNA, 3717 bp, Homo sapien
catgcatataaacttatttgtaatacaatgaaaagaagacaagatgtttctccaaatagagattttctaacacatttctacaatataatgcattgtggattacttcatattgaccaggatattgtcaatacaatcatcaaacactgctcacctcaatttttttcacttggtttgcctggtgccacaatgcttattatggattttattgtagcagctggtagagtggcttcttcagcttttctcaatgcaccaagagtagaagcacaagttcttctgggatctttggtttgctttcccaacttatattgtgaactgccttctcttcatcccaacattcctgatgttgctgtgtctcagtttacagatgttaaggaacttataatcaaaactgtattaagctcggcaagagatgagccctctggtcctgcacgatgtgtagcactttgtagtttaggtatttggatttgtgaagaactagtccatgagtctcatcatcctcaaattaaggaagctctgaatgtgatttgtgtttccttaaagtttactaataaaacagtagcccacgtagcttgtaacatgcttcacatgctggttcattatgtacctagacttcagatttaccagcctgattctcccttgaaaattattcaaatcctaatagctaccatcacccatcttttaccaagtacagaggcttcatcttatgaaatggacaagaggttggtagtatctttacttctctgccttctggactggatcatggccttacctctaaagacactgctccaaccatttcatgctacgggagcagaaagcgataaaacagaaaaatctgttctcaattgcatttataaggttttacatgggtgtgtttatggagctcagtgttttagcaatccaaggtattttcccatgagcctctctgatttggcatctgtagattatgatccttttatgcatttggaaagtctgaaagagcctgagcctctgcactctcctgactcagaacgatcttctaaactccagccagtaacagaagtgaaaactcaaatgcagcatggattaatctctatagcagcccgcactgttattacacatctggtaaatcacctgggccattatccaatgagcggtggtcctgctatgctaacaagtcaggtgtgtgaaaatcacgacaatcattacagtgaaagtactgaactttctcctgaactctttgagagtccaaatatccagttctttgtgttaaataatacaaccttagtgtcctgtatccagatcagatcagaagagaatatgcctggaggaggtttatctgctggccttgcatcagccaattcaaatgtcagaatcatagtacgtgatctctctggaaaatattcatgggattctgctatactgtatggcccacctcctgtaagtggcttgtcagaacctacatctttcatgctttcattgtctcaccaagagaagccagaagagcctccgacatctaatgaatgcttagaagatataaccgtaaaagatggactttctctccagtttaaaagatttagagaaactgtaccaacttgggatacaataagagatgaagaagatgttcttgatgagctcttgcagtatttgggtgttactagtcctgaatgcttacagagaactggaatctcacttaatattcctgctccacaacctgtgtgcatttctgaaaaacaagaaaatgatgttattaatgctatccttaagcaacatacagaagaaaaagaatttgttgagaagcactttaatgacttaaacatgaaagctgtggaacaagatgaaccaatacctcaaaaacctcagtcagcattttattattgcagattgcttcttagtatattgggaatgaattcctgggacaaacggaggagctttcatctcctgaagaaaaatgaaaagctacttagagaacttaggaacttggattcaaggcagtgccgagagacacacaagattgcagtattttatgttgctgaaggacaagaagacaaacactccattctcaccaatacaggaggaagtcaagcatatgaagattttgtagctggtcttggttgggaggtaaatcttacaaaccattgtggttttatgggaggactacaaaaaaacaaaagcactggattgaccactccatattttgctacctctacagtagaggtaatatttcacgtgtcaacaagaatgccttctgattctgatgattctttgaccaaaaaattgagacatttgggaaatgatgaagtgcacattgtttggtcagagcatactagagactacaggagaggaattattcccacagaatttggtgatgtccttattgtaatatatccaatgaaaaatcacatgttcagtattcagataatgaaaaaaccagaggttcccttctttggtcccctttttgatggtgctattgtgaatggaaaggttctacccattatggttagagcaacagctataaatgcaagccgtgctctgaaatctctgattccattgtatcaaaacttctatgaggagagagcacgatacctgcaaacaattgtccagcaccacttagaaccaacaacatttgaagattttgcagcacaggttttttctccagctccctaccaccatttaccatctgatgccgatcattaaatatcagttctgtttatctgaaggctcctacccagagattctacccagtgaaactcccacagcaacgcaggtagatggggctgacctggcctctccaatgtctcctcgaactagcaaaagccgcatgtccatgaagctgcgtcgttcctctggctcagccaataaatcctaaggagacaagcagcccagcagtgatcagcagtagccaccttagcacgaacatagggttaaccctttcaggccttcatgtctgccataacatgcatgtttcttcctgtacatttatttgagaaaacactggatttaaataattttaaataatttgtagcttaatattaaagatttaagttatttattgtttcattttttttcccacaatccaagctgccatattttgagggcagggggagttttattctacaccctttaccttcctagataattatgtctaagtagttttatctttaatttcatggttaactgtgagccaaaatacaattggacaattagtctcattatttattgtgccccattgcaactttatggttcaataaatatataattttttacaaatgtaaaattttacatttaagcatttgtaaagttacagcaaaagatgtacctgttaatacacagaatgtgtacagattatttgttatgacaataaaacactcaaaataaatggtctttagcatctcaaattccaactgaaatcattttagtattaactcttcttcccaaagcaatgtctcatttcttggctgtgcaggtgatgccatgttatatccaataactagaaaaatcactgtgctgaacttttatgtttagcttccaagtatttttctaatgttttgcatttcaagtggtatcactgttaaatgccatttgttttcagattgtggccttttattattggctgctagatcctggtgtttctatgttcttttttaagcaccaaaaagaagatggggaagaaaagaaggaaaattttctgatataaatatgttgttcaaattatgagtattatttaaaaaaaaaaaaaaa

SEQ ID NO: 2933 - protein, 890 aa, Homo sapien
HAYKLICNTMKRRQDVSPNRDFLTHFYNIMHCGLLHIDQDIVNTIIKHCSPQFFSLGLPGATMLIMDFIVAAGRVASSAFLNAPRVEAQVLLGSLVCFPNLYCELPSLHPNIPDVAVSQFTDVKELIIKTVLSSARDEPSGPARCVALCSLGIWICEELVHESHHPQIKEALNVICVSLKFTNKTVAHVACNMLHMLVHYVPRLQIYQPDSPLKIIQILIATITHLLPSTEASSYEMDKRLVVSLLLCLLDWIMALPLKTLLQPFHATGAESDKTEKSVLNCIYKVLHGCVYGAQCFSNPRYFPMSLSDLASVDYDPFMHLESLKEPEPLHSPDSERSSKLQPVTEVKTQMQHGLISIAARTVITHLVNHLGHYPMSGGPAMLTSQVCENHDNHYSESTELSPELFESPNIQFFVLNNTTLVSCIQIRSEENMPGGGLSAGLASANSNVRIIVRDLSGKYSWDSAILYGPPPVSGLSEPTSFMLSLSHQEKPEEPPTSNECLEDITVKDGLSLQFKRFRETVPTWDTIRDEEDVLDELLQYLGVTSPECLQRTGISLNIPAPQPVCISEKQENDVINAILKQHTEEKEFVEKHFNDLNMKAVEQDEPIPQKPQSAFYYCRLLLSILGMNSWDKRRSFHLLKKNEKLLRELRNLDSRQCRETHKIAVFYVAEGQEDKHSILTNTGGSQAYEDFVAGLGWEVNLTNHCGFMGGLQKNKSTGLTTPYFATSTVEVIFHVSTRMPSDSDDSLTKKLRHLGNDEVHIVWSEHTRDYRRGIIPTEFGDVLIVIYPMKNHMFSIQIMKKPEVPFFGPLFDGAIVNGKVLPIMVRATAINASRALKSLIPLYQNFYEERARYLQTIVQHHLEPTTFEDFAAQVFSPAPYHHLPSDADH

SEQ ID NO: 2934 - DNA, 17073 bp, Homo sapien
ggatccatgcccagaattattcacgaaattcacttaaaatagcatatatgcttgaacccaggagtctgaggctgcagcgagctatgatcatgtcactgcactccagcccagcctgggcgacagagcaagactctgtgtctaaagaaatgaaaataaaaataaataaaatagcatatacaggcaacaatccaaatgttcattgcagaaattatgattattattgtttttcttttagaggcagggtgtcactctgttgcccagactaatcttgacctcctgtgatcctcaagagatcctccggtctctgcttcccaaagttcttggattacaggtgtgaggcactgggcctagacattgcagggattattaaaccatggtgcatactaccattaaaggtatgaggtaggttttatatgctgacctagaaagatggtgcaacaccataggggaacaagaaggctgcaaagtggcagcacagcaggagtctttaagaaataggtatttgtttcagcttaagaagtgtctggctgggcgtggtggctcacacctgtaatcccagcacttagggaggcttaggtgggcggatcacttgaggttaggagttcaagaccagcccagtcaacaccggtgaaaccccatctctactaaaaatacaaagaaattagctgggcttggtggcaggtggctgtaatcccagctactcaggagctgaggcaggagaatcatctgaacccgggaggccgaggttgcagtgagcctagatcgcaccactgcactccagcctgggtgacagagtaagactcggtcaaaaaaaaaaaaaaaaaagaccgggtgcgaggtctctcgcctgtaatcccagcactttgggaggcctaggcaggaggatcacaaggtcaggagatcgagaccatcctggccaacatggtgaaaccccatctctactaaaatacaaaaattagccgggtgtgatggcacacgcctgtagtcccagctactcaggaggctgaggcaggggaatcgcttgaaaccaggaggtggaggctgcagtgagccgagatcacgccactgcactccagcctggcgacagagcaagactccatctcaaaaaagaaaagaaaacaaacaaacaaacaaaatccccaaaaagcaaaagtgtctgcatggacttgtgcctaactactcacagtggctacttcttgggggaggtgaaaggggaccctgttaaagaatttttcttctgtattgtttttcttcaactgagtctgcattaattttatatttaatactctccccacccctgatgctcacaggttgctttagctggtggaaggagaacctgcacctctggttttggcaaagtgtagaaggggacaagggcactgctctgcacctgcacaggttcttgcctcctggggtcagtttaatgaatctcagtggtgtttcttgggaagaacacagtggacactcacttgccagtcagtagacaaatcactgaagtccatgtctggcagttctcaatgtcatggggactgtaaggttgtcatgtctcacagttccctgacttagaagattagtggtgacagacacttctcagctctgctcgggagagcagctctgtaatgcgcttgtggtttcagatgtgggcggcctgtgtgaacctgtcgtgcaaagctcacgtcaccaactgctgcagttatctcctgaatcaggctgagggtctttgctgtgcacccagagatagttgggtgacaaatcacctccaggttggggatgcctcagacttgtgatgggactgggcagatgcatctgggaaggtgagtctgtgctttgggcttcccaacctctcaagtcagcatgaaattcagaaggcagagagggacatgtggccctccaactcggggcccagggagccactgtggcatttgagagcgccaccctagctttacctcctctggtgtcctggccttgtgtatctcttagagatggcaaaatttgcagccctgacctcaaggattacaaactaatttccagtcctgtaggggtcatgggttctgctgtggccagtgtggcactgagtttgtcaggcagaatttctaattatggaaggaactctgcttcctcagtgattgaactgacctttgtgggggtgcctttgtggggtgagaatgggcatacttgggcctcagttgtgatggccatggggtggagctgaggtctaggcccagggctgggaaagcttctaccaaccccgaggcatttgggtgttttagggcagaagaggagccaggaggatgggtatgccccactggagctgtgtgtggggcagcaggtgagggtgggattccagagggagggtcaacccagccaagcagaggaaggggaggagagggtttgttttggaaagaacatcaccctctcagtttcctggggtctggatagcctgttcttgtgatgagctggaggatgtgggccctgcttggatcctcctctcccctccctgcccccattttctcttcctgtgatttatgctgttctgggctcaccctcttcccagagctctcacgctacagctgacaggcagggcaggcgttttaattattattaatttttttttgagacagagtttgagacagtatcaagagtgggtatcctctcagcgtgtcttcaagtagcatcccagagccccgctcctgggtacccacaacatgaacaccgtccagaagcaagggcagcctctgcaggtggggcgggggttggaaaacatttatcaaacggttgagttgggtgcaggggatgcaacatgatcaaacagggtcttgcctccaggagcctcatgtagggacaacgcacagtgatgaccttcaactgcagtggggcagcaaggctgtgggaggggtgttttgggcagagcaggcgacgtgggtacctcttcaccaagacagcaggaagagcacggacatcattttcccgtctcacctccagactcccaggggactgtgccaatatcctcactggagccctgcccatggccactgctcaacccttgggccctgtcagttcagggctgtgcagaaggagagttgcctgtgctcaggctcaggggttccgtccagctaaggaggcctactaggggactggggaaaggcctcatgaaggaccaggcctgtgatggggagggaagatggcagaggggacagtgggaagcagagcagcaggggtctcctccacgcctctctgtacttctcccacccacccttgcctgctcccctctgccctgggtatgtgcccttgtccacccaacacctctgcagtgccaagtccagccctgacttcttcctgagctgtggcccagcgttcccacaggcatttacctcacggatgcagcactgcccctcatcctcttctctgaaagtgtgtgggaaatgcttcttggtgccatctctctcccaccctgccttccctgcaccttctctatgaggtgtctgttgtctctgtacttgcctccagctggcctttcagaccccatccctccctgcctcctgcccatccctacccctgtcagcaccttacatactctgtgcccaacagcattggggattcccactgtgctgaaggaagtcctcatgtggtccagagagggagctggcccctgctcccatttccagcaccattttctggcacaggctccatgtccccaggctccagctgcttctggggtaccaaggtctgcatttcttcctcttcccccagcagacagaagaccttgctggacaggtgtccacttcaatagtaacttctgaggctgccagcctcctgaatggtccagaagaaccagacccttccccgcccccattaaaaaagacaaaatatggccaggcatgttggctcatgcctgacatcccagcactttgggaggccaaagcaggtgaatcacttgaggccaggagtacgagaccagcctgacaaacatggtgaaaccctgtgtctactaaaaatacaaaaattagccaggcgtggtgactcatgcttgtaaatgcttgtaatcccagctacttgggaggctgaagcaggaggatcacttgaactcgggaggcagaggttgcagtgagccgagatcacgccactgtgttccagcctgagcgacagagcgacactccgtctaaaaaaaaaaaatatatatatatatacacacatatatatatgcataatagtctctgtgtaacagtaagtggatgcagtaactggtgtgagggcaacttggagagtgtgcttggaggcacagagatgctcagggctgcctggactgcctccatgatggtggcctgctctgtattaggtgagtgttcaggaaaggtgagggcagggcagcccacagcttcacagtggcccagggaagcagggcaggcaggctatgaggcctagtaggcatctgggccagactttgacactgaggccatggaatgggtggggctctgagaacagaccaaagtgatcatgggctgaaggctatgtccacagatccaaggcgggataggctgtgctgggcagtgatgtcagccaggctccccagcgggactgggggtgtcaggggcagctctgtcccaggtggcagacactggtttcccctcctgctctcacaaccggcctgttaccaggtgttgtctgagctgtggtgaggcttccctggtgacattcaggagcagggagcctgtgagtaagggtgtatgcatctgccctgactgcctggccctgtggtcaaggatgggggaaggcagctctgcctgcagctccaccccatttataaagcactgtggtgccttctgctggggcatgtgctgagtggtgcctcgcaggcactgccctcgggaagttcacaggcttatgtggaagctggtgggaatgggccaagaagagaggtgtcaggagccaggtattgggcaggtcccaggtctctgagcctcagtttcttcatctgtaggagggtggtgaccctgccctgctcagcttaccaggtacagatgtaagttttcagtgcagaggaaaagcagagaagttcccctcagatggccatacccccttgtcgctgtacccaactctccggtcctactttgtagctctcaggtgtcacatgtggatcctgccctaccatcccccttccctgtctagaaacgaggcctgctgagcttggagccatcccactccctgctctcaagccgtctgctcctgggttagcctgtggctggcctggcctgattctacatagatgtgggtgtttctccactgctggggcagcagttgtccattctggggcctgggtcagctctcagctgtggccgttgtgcctgtgcttccccaggtcctggtggtgactccaaccctgccctcacatatcccaagagcaggctgactgccttccccattcccacctttccagtaactgctgcaagaacggacagacactgctgcagagaacttgccacggtgtttcatgctgtggctggtggttccaggctgcacgctccattctaggaaagggtgaggcttcctgatcatcagtcttaacaggggactgtcctatgggtacctgtatacgctgccgggagtggggcagagtggggttagagtagtgcctgctgcccattggggttgtgcgggttccttaagggctgtagtctgtgtgcgtgtctggttttttcctcctccttatcagtaatcagtcttgtataaccaggctggccctgcttcctgcctaggggctatcggtgtaccatctggagttgcaaatggggtgatagggcgtcagcggccttcccacacccaagcacttcctgacacccagcccctcatctctagccaacctctggctcccctagggatcctggggctcaggcctcacgctccagcatccgggggctttgccttctggtgttgctcttctttgcaggtgccttggaacaggggtgcaacagagttcagaaagtgccatctgttgcatggataccctgctgccaccctcgtccacctttctggggcagaacagttggatgggtctttatttaagaggacaaaagggagagagaatgcatagaggctgggtctggtgtcacgcctgtaatcccaacactttgggaggccaaggcaggtggatcccttgaggtcaggaggtcaagactagcctggccaacatggtgaaaccccgtctctactaaaaatacaaaaaaaaaaaaattagctgggcatggcgggagatgcctgtaatcccagctactcgggaggctgaggcaggataatcacttgaacccaggaggcggaggttgcagtgagccaagatcacaccactgcactctagcctgggtgacagagggagactgtctcaaaaaaaaaaatttgcttagaatttgtctgtgtgaccctgggcaagtcatttcccctccttgggactcagttccttgcctgtgaacggggacagtgcttctcccttacagagctgttgtgagaattaaagtagaaaatgtacctatggtggttgttggtagtgaccagttcccccaaccctgactcccctgcaggatggggcctgggcccgggaatgggggatgggctggcagaggatgactgtcccagagaggagtcttctcggcagatgtggagacctagctgagtcagaggccaggatctaagtttgagggtgttccttacaccctgcagccatgagtctttggctgagtcaaatggcctttctgagctcagttccttatcagtaaagcctggacagtggtccaggacgctggacactgtgtgagtgttaggacacaggacactgtgtgagtgcaggtggggacccatggagcactctgctggggagcaattcatggggagcacccctccagagagggatgatttgcacagggccctcagcccagtcccttgcaggctggaccttggagagtgaggccctgaggcgagacatgggcacctggctcctggcctgcatctgcatctgcacctgtgtctgcttgggagtctctgtcacaggggaaggacaaggtgagggctgggcactaatgtctgtatgaggtgggtggagaactagggcatgtttgggggactgggttgtccgatgtcaagcctctagggaaaggtttggcccaaactgtgctggggcatgtcctctaggggtcagcctggacctcagtctctagtctccctacttttacctccctaccttcattccctggaccgactgtagtctcccttccttcactctcttgacgcctctccagatctgacttgcccgtgtaccacaggtcagagcccatcacttcccaggcctcccagtgcttccctggacagattctgggatcatttactggtgactgccctgctagggtgtcagctgtcagatcctccccaacccccgagctcagctctggcctgaagtacttaccgtgggctcctgatggtcactgtctccagggccaaggtctagaaccttcacctgcctcaccaacaacattctcaggatcgattgccactggtctgccccagagctgggacagggctccagcccctggctcctcttcaccaggtgagcatggagggccatgcccacctggacagggatgagggtgagttccccaggattgaagcagctatgccaggacagtgtagcagccccgtggtgctgacaaatgccctttccagcaaccaggctcctggcggcacacataagtgcatcttgcggggcagtgagtgcaccgtcgtgctgccacctgaggcagtgctcgtgccatctgacaatttcaccatcactttccaccactgcatgtctgggagggagcaggtcagcctggtggacccggagtacctgccccggagacacggtgagcagcagctataggtctggggcggggccgcttggcaagaacatcctggctgcttgggggtttggagcagggccttgcagcctgtgagtggcccagtgagtgttctcagtcccagccgagtgagatccagggctgggggcaggcttggcccttgggaggggagggcccatatggttactgcaggggcagggttttggcaggaaataaacatgcacggctgctagttggggcaggggctggcacttgagtcatgtgaaatgcacttcagtcataccaggaaggactccaataagatgctgggaaaagcttccagcagcagactgtgaaggaaagggaaagcaagatttagaaaccacctagtctaggtgcagaggccagaggaagtcattgctgtcctgtcccgcctggggcttttgtggaccagtctcccagtgaggtgcctggtctgagagggccttgaccattccccttgggagtctttcagaccccagtcttgtgtgttctgactgacacacccagacccatggggcttcagcctcacatggattcactctgttccagttaagctggacccgccctctgacttgcagagcaacatcagttctggccactgcatcctgacctggagcatcagtcctgccttggagccaatgaccacacttctcagctatgagctggccttcaagaagcaggaagaggcctgggaggtaacactttggctggctttccctgggggcctctctcctgggaacagcagtccagggtagactccccactctacatagggagatgtcaacttgtagtgatgagaagggaggaactagagcggggtgtgtgtgcacacacacatgctggcatgcagatgtgtatgctttatgtgtgtgtatgggagtagggtgagtgcgcctgtgtctctgtgtgtgcacataagtgtggtgagtgtgcatgtatgtgtttatgtgtacacatatgtaactgtgcacactcatgtttgtgtgcccatgtttgtgtgtttatatgtaagtgtacatatgtgtgtgcctgtgccttgcatttgtgtgagtgtgcacatgggcatgcctatgtgtatgagtgtgtatgtgagtgtggtgagttgcttctgtgcacacacttttgtttatgagtgtgcatgcaagtgtgatgagtgtgaaagtgttcctgtagacatgtttgcctgtgtgtgcatatgtgtatttgtgggcaaacgcagctgtgtctgtgagtgtgagtgtgccttctgtgtgtgtgtgtgcacgtgaatgtggtgagtgtgtctgtgtgttaacacaagtgtgttcaagagtgtgttatatgagcatataatgcatgtgtgtattctcgagggctgagggacccagccccaccttcaccacctgctaactgtccccacccccacagcaggcccagcacagggatcacattgtcggggtgacctggcttatacttgaagcctttgagctggaccctggctttatccatgaggccaggctgcgtgtccagatggccacactggaggatgatgtggtagaggaggagcgttatacaggccagtggagtgagtggagccagcctgtgtgcttccaggctccccagagacaaggtgggcactgctgtggctgctgcacttccagcggagtctgggctgggcgtcttctcccctgttcacctcagccctgcaccctttcaccctcctgtaagcccctccccgaggcagccatgcctcagttgacccccttcctctgaaggtctgaggtctgtagggaggacagaaacacctgccaactctggggcttcctgggaacctgtagttagtggctgctgttaggagtgagggtggcagggctgcacaccagggctgggctcctgcctggaggctggacatgacctcagtgtccttaatgggggctggactgacccttgcgcactgcagtgctgagatggcccagggactttatgacccaccttgtggcagatgggaagagtgaggcccaggagtgtggttcacacaaggtccttcagcaggtgacacaaacctccaaggcccatcacaaggtccttcagcaggtgacacaaaggtggaaggcccatcacaaaccttccactttggcccagggcactaaagggcgcacctttgccaggtgggtttggggggagcctcctggcactgaggctgctcacagccctgggcccttcctgtccacaggccctctgatcccaccctgggggtggccaggcaacacccttgttgctgtgtccatctttctcctgctgactggcccgacctacctcctgttcaagctgtcgcccaggtaggtggctgatgtgtgcgtgtgtgtacatgtgtgagcgggcaagagtgtgcatgttagtgtatgtgtgcagatgtgtgactgtgtgcatgtgtgagtgtgtggtgggtgggccatcaagggccgcccttgtctggttcctcccctcccctctccactgcctggtcctggacggggtgggcttttcgagtctccaccctggtccagaagagggttctcaagttgccaggggagagcagggaaggggggtctgaggcagaggctgaagataagggcagcttggtcccgaccagacccagagtcaccgagatcaagagccggaggtcctagtctcctgcctctggaggagcttggtttgttcatttgttcacatgttctacgaaaggacagttggggcatctggtgtgctcaggaccctgttctcagaacaagatggacaagggccctccttaaataaaccgtcacgcctcatgcaccacatgtcaggttacaagacagggtgcaggggccatgtcaggccgcagatgtgaggaagagggtgtggggagaggggtgttgggtggggctaagtgggagggtgcttcgcttctccttggagcaaaggaaagtgtaaaactgtgtgacacaacctagtttatgttttgaggaatagattgctgggacaaggggacatgggggacctgctggaggccaatgggggccagtgaggtgcccacagggagacgatttgcatgagccagtgaaagaagtggagatagagaaaagtggagagaattgcagggtctcatgaggggaaatagaagggacatgtgggtggatgagatatgagtggtgacccctgaggtggggaaatgggggacagccttgcagggaggttggtgaagtctatttggacctgttgggttggagccccaggtgacatccttgtgggagggtcagtggatccttggcagcaagtctggtgctcagggagacactgggtggggtgggagccacagaccttctgctgatggcaaagacagggttcctggaggtgctggctccctctgtgatctgaggacccagctagtaactccccgttctgaacccgccatcgcagctcacgctgtaaaggacgcgcgcctcagtataaatcagttctatgcggccgttaggcaaggaggcccagttgggtcctgccctgagagtgggttggaatgtgatgagatgggagagaggcagtggcagggacgaggtgggcggacctcctgctgatggaaggaagctcagcctctgcagtgacctcaggccacctgggtcgccataggcctctgactggcctctcttggcctcagggtgaagagaatcttctaccagaacgtgccctctccagcgatgttcttccagcccctctacagtgtacacaatgggaacttccaggtgtgtgcagagaccacagaaggacatggggggcaggggttgcccagagctctggcctgcccaagatgttggctttcatgagggttggcggccagtatgggaggcttgtcagtgcttggagccttttttgtatattcagtgaatttcaatttatacgcgtatctcaaatggggaaaaattagctttattttccattgctgatttctttttgttctcaggtctctagttccattgttgattgaaaaaatgtaaatttctcataacttatctctgtcccctctggtttgcagctttctgcacccaccatgtgcctcacctcctccttctgcgaaggtgtctgtcctgtggccatggggaagggtctgtggtgtgtgtgctgcccttggggctctcactgcctctgggctcctgctctgcctggtcccctggtctccccggatcacatgatggcaccacagctgaggagtgggctctgcacttcccccccttccacccatgttgggctcctacagcccaggcaccagtgagcaacttgggggttgcatcagcccctcccctccctgctgggctgttggttcatgccccctgggtgggaggagggggagagggagagctccagtgagtggtctctggtttttcccctcagactcctcactttgggcaaaggacaagaggcagtgagggcccctccctggggtctgggccaagctgaccactcttctccagaatcttccctccctgtccccttcacactgtggctccagcttactatgcagaaaaatccttttctctctcaatgaggagcgtagttttcaagatttttgtccaaaaatataatttgaaccatgaaccgggcatctggctcttggcagagtctccctctttccccaaggtggtagatgtgactgtcaggagcctgggcagctgacgacaaggctgagcaggtcagattgtgactgtcccctggactgtcatcctgttgcgggcaccagctgttccctagagaactaggacacctgccacgggttatttagactgcgggtgaggatctggtgccataggttggtctccagggagcactgcagtgatggagggtgttgtgtgtgtgatgcatgggatggaggctcctggtcccaccaagggaacagcttccttttggaggcgggggcctcctgtggccccacagaaggatccaggtctgctggccatagccgagtgctttgaaagtcaccagtcctgacagcgattcgtgtgtgtgtctgtgtgtgtgtgtgtgtgtttatgtgtctgtgtgtgttcgtgtgtgtgtctgtgtgtgtgtttgtgtgtgtatgtctgtgtgtgtgtgtttatgtgtgtgtgtctgtatgtgtttaagtctgtgtgtgtttgtgtgtgtgtgtctctgtgtgtgtgtctgtatctgtgtgtgtttgtgtctgtgtgtgtttgtgtgtgtgtctgtgtgtgtctgtgtgtgtgtctgtgtgtgtgtttatgtgtctgtgtatgtttgtgtgtgtgtttgtgtgtgtgtgtttgtgtttatgtgtgtatgtctgtgtgtgtctgtgtgtctgtgtgtgtatgtgtctgtgtgtgtttatgtgtctgtgtgtgttcgtgtgtgtgtctgtgtgtgtgtgtttgtgtgtgtatgtctgtgtgtgtgtgtgtttatgtgtgtgtgtctgtgtgtgtttatgtctgtgtgtgtttgtgtgtgtgtgtctcgtgtgtgtgtgtctgtgtgtatctgtgtgtgtttgtgtgtgtgtgtgtctctgtgtgtgtgtgtgtttgtgtatgtttgtgtgtgtgtgtgtgtgtgttgggaatgcccagtctctgcagctgctgaaaggccctgaggcacatgctgtcaggagctggctctgtcctgggcagatatcaccatctgtacctcggttcaggctgccgtgggcaccaggccctgtgctgggggagtgctgaggagcctgaagggactcagggtcccgtgatgaggctgggctggcacatggaggaaagacagaatgtccaagacacaggcgctgcttggcctctgggtgtggacctcaggagggcttcctggaggaggagggatgctgggcttgccagaaaggaggcagctgctcccaggatgagttctgaacatgctacctgagcccttccctcctcccgtgctctgttccagacttggatgggggcccacggggccggtgtgctgttgagccaggactgtgctggcaccccacagggagccttggagccctgcgtccaggaggccactgcactgctcacttgtggcccagcgcgtccttggaaatctgtggccctggaggaggaacaggagggccctgggaccaggctcccggggaacctgagctcagaggatgtgctgccagcagggtgtacggagtggagggtacagacgcttgcctatctgccacaggaggactgggcccccacgtccctgactaggccggctcccccagactcagagggcagcaggagcagcagcagcagcagcagcagcaacaacaacaactactgtgccttgggctgctatgggggatggcacctctcagccctcccaggaaacacacagagctctgggcccatcccagccctggcctgtggcctttcttgtgaccatcagggcctggagacccagcaaggagttgcctgggtgctggctggtcactgccagaggcctgggctgcatgaggacctccagggcatgttgctcccttctgtcctcagcaaggctcggtcctggacattctaggtccctgactcgccagatgcatcatgtccattttgggaaaatggactgaagtttctggagcccttgtctgagactgaacctcctgagaaggggcccctagcagcggtcagaggtcctgtctggatggaggctggaggctcccccctcaacccctctgctcagtgcctgtggggagcagcctctaccctcagcatcctggccacaagttcttccttccattgtcccttttctttatccctgacctctctgagaagtggggtgtggtctctcagctgttctgccctcatacccttaaagggccagcctgggcccagtggacacaggtaaggcaccatgaccacctggtgtgacctctctgtgccttactgaggcacctttctagagattaaaaggggcttgatggctgttcccaaagtgttgatggctgggagaaggggccagaggaggagtgaggggtggggtttgtccagccctgggctttccgggctctagagatagcatggtgtaggctcaatgacagttctggggacagcaagttggaggttcaggggcagcttcaggacagcaggatggaggctcagggacaattcctgggaggccagtgccctcgttcctccttgtcctcatcctcccccttgctccaggaaactgagagctgagcctggagcttccagacagtcagtgctgggggtgaccatccagcagtgatggtggcctgtgaagggtcctgcttctgtcctcagcctctcatggggtgggcttgtggaggagctgtggtctggagagagtggcagttggagcagaacgtgcctgcgtttgtttcctagggctgtcgtaacaaagtgccacaaaatggttagcttagaaccacagagatttgttgtctcacaattctgaagtccagaagttggaaataaagatgttggcagtgttcccaaccacatgttcttgggctcccatgaaacagaagttgatattaggccaaggaagcttcccagacaagactttattaagtcttatgccccgaaagtttgggcagaagagagacggtgcaggaggaagaattcttggctgactccccaaggggaatgcattgtggtgtcttaaggagggtgacatacataatttatgagctacatgagtgtcattgcacatatggggtggagcgaagggtgctcagacgcatgctaacacatacgttgcatgatcagaaaatggcagataagcccctccctgggtgaggactttagtattatcataagaccagggtcattctcctggccttgtgcacaagcaggtgatggagtcaactcccgtcagtaagacttatggcgggatgctgcttatcttagtttatttcagacagttggcaaggtctggccagcgagtatggcacctggagggtggtgctgcaaggtctagtggtcagcgggcacgtatggaacaatacgttagtgggggtgggccgagtcccatttatactctctcagcagggccatgctccctctgaaggcactagggaaggattagtttcaggcctctcttcagcttctgttagtttcttggcttgtgacaccaaagctgtaatctttcttttgttttgtttttgtgacggagttttgctcttgttgcccaggctggagtgcaatggcacaatctcggctcactgcaacctcctcctcccaggtttaagcaattcttctgcctcagcctttggagtagctgtgattacaaggcacctgctaccacgcctggctagtttttgtatttttagtagagacggtgtttcgctatgttggccaggctggtctcaaactcctgatatcaagtgatccgtctgtctctgcctcccaaagtgttgggattacaggcatgagccaccgtgcctggccaaagttccagtctttacagggatttttccttgtgtgcatttctgtgtccaaatttcccctttttaaaatcacaataatagtgaattaaggctggccctaacgatttaatcttaacttgatcatctgcaaagacactatttccatataaggtcacattcacagctactggggttaggacttcaacctagagggcctgacttctggcccaacacatcatggcccatcccagcatgccccatccccttcctgggtgccccaggcagatcacaggagggcctgactgctgggctttgggctgacattgggatcatctgcctagttagggctgtgaccagactgagataggaggtgggacctgactcctgaggcagggcttgaactctggaccagattacagactagctgaaacaggcaaaagcacccctccataagacacacccactggtgccaagtgagtttgccgttctcatggtaacagctggaaattactgcccctttccatggcaatgacctgaaagttaccaccccttttctagaaatttctaaataacctcctccttaatttgtatatagttacaagtgggtataaatatgtgtgcagaactgcctctgagctgctactctgggctgactgcctatggggcatccctgctccataaggagcagtacctctgctgccactgtgcacagctgcttaaataaaagttgctctctaataccaccgactcgcccttgaattctttcctgggtgaagc

SEQ ID NO: 2935 - DNA, 2824 bp, Homo sapien
ggcacgaggaggaagcggaggaaggtgaagtaggaccgaattcctgtgccgaagaggcctgcagtgggagagcaggatgggggctccggaggtggcgcccaggctctgagctaccctaggtctgcagactagcgggcattggccagagacatggcccagccactggccttcatcctcgatgtccctgagaccccaggggaccagggccagggccccagcccctatgatgaaagcgaagtgcacgactccttccagcagctcatccaggagcagagccagtgcacggcccaggaggggctggagctgcagcagagagagcgggaggtgacaggaagtagccagcagacactctggcggcccgagggcacccagagcacggccacactccgcatcctggccagcatgcccagccgcaccattggccgcagccgaggtgccatcatctcccagtactacaaccgcacggtgcagcttcggtgcaggagcagccggcccctgctcgggaactttgtccgctccgcctggcccagcctccgcctgtacgacctggagctggaccccacggccctggaggaggaggagaagcagagcctcctggtgaaggagttccagagcctggcagtggcacagcgggaccacatgcttcgcgggatgcccttaagcctggctgagaaacgcagcctgcgagagaagagcaggaccccgagggggaagtggaggggccagccgggcagcggcggggtctgctcctgctgtggccggctcagatatgcctgcgtgctggccttgcacagcctgggcctggcgctgctctccgccctgcaggccctgatgccgtggcgctacgccctgaagcgcatcgggggccagttcggctccagcgtgctctcctacttcctctttctcaagaccctgctggctttcaatgccctcctgctgctgctgctggtggccttcatcatgggccctcaggtcgccttcccacccgccctgccgggccctgcccccgtctgcacaggcctggagctcctcacaggcgcgggttgcttcacccacaccgtcatgtactacggccactacagtaacgccacgctgaaccagccgtgtggcagccccctggatggcagccagtgcacacccagggtgggtggcctgccctacaacatgcccctggcctacctctccactgtgggcgtgagcttctttatcacctgcatcaccctggtgtacagcatggctcactctttcggggagagctaccgggtgggcagcacctctggcatccacgccatcaccgtcttctgctcctgggactacaaggtgacgcagaagcgggcctcccgcctccagcaggacaatattcgcacccggctgaaggagctgctggccgagtggcagctgcggcacagccccaggagcgtgtgcgggaggctgcggcaggcggctgtgctggggcttgtgtggctgctgtgtctggggaccgcgctgggctgcgccgtggccgtccacgtcttctcggagttcatgatccagagtccagaggctgctggccaggaggctgtgctgctggtcctgcccctggtggttggcctcctcaacctgggggccccctacctgtgccgtgtcctggccgccctggagccgcatgactccccggtactggaggtgtacgtggccatctgcaggaacctcatcctcaagctggccatcctggggacactgtgctaccactggctgggccgcagggtgggcgtcctgcagggccagtgctgggaggattttgtgggccaggagctgtaccggttcctggtgatggacttcgtcctcatgttgctggacacgctttttggggaactggtgtggaggattatctccgagaagaagctgaagaggaggcggaagccggagtttgacattgcccggaatgtcctggagctgatttatgggcagactctgacctggctgggggtgctcttctcgcccctcctccccgccgtgcagatcatcaagctgctgctcgtcttctatgtcaagaagaccagccttctggccaactgccaggcgccgcgccggccctggctggcctcacacatgagcaccgtcttcctcacgctgctctgcttccccgccttcctgggcgccgctgtcttcctctgctacgccgtctggcaggtgaagccctcgagcacctgcggccccttccggaccctggacaccatgtacgaggccggcagggtgtgggtgcgccacctggaggcggcaggccccagggtctcctggctgccctgggtgcaccggtacctgatggaaaacaccttctttgtcttcctggtgtcagccctgctgctggccgtgatctacctcaacatccaggtggtgcggggccagcgcaaggtcatctgcctgctcaaggagcagatcagcaatgagggtgaggacaaaatcttcttaatcaacaagcttcactccatctacgagaggaaggagagggaggagaggagcagggttgggacaaccgaggaggctgcggcaccccctgccctgctcacagatgaacaggatgcctagggggacggcgatgggcctcacgggcccgcccagcaccctgagaccacactgttgcctcccagtgaccctgctgggacaccaggacaaggaagacagtttcgcctctcgaaagccgcagctgcgcctaggctggagctggaagggtgggtgaatccggcttgggcatccccaatgaactctgccctgcctgggactctatttattctgattaaaggggttttgcaaatgggaaaaaaaaaaaaaaaaaaaaaaaaaa

SEQ ID NO: 2936 - protein, 805 aa, Homo sapien
MAQPLAFILDVPETPGDQGQGPSPYDESEVHDSFQQLIQEQSQCTAQEGLELQQREREVTGSSQQTLWRPEGTQSTATLRILASMPSRTIGRSRGAIISQYYNRTVQLRCRSSRPLLGNFVRSAWPSLRLYDLELDPTALEEEEKQSLLVKEFQSLAVAQRDHMLRGMPLSLAEKRSLREKSRTPRGKWRGQPGSGGVCSCCGRLRYACVLALHSLGLALLSALQALMPWRYALKRIGGQFGSSVLSYFLFLKTLLAFNALLLLLLVAFIMGPQVAFPPALPGPAPVCTGLELLTGAGCFTHTVMYYGHYSNATLNQPCGSPLDGSQCTPRVGGLPYNMPLAYLSTVGVSFFITCITLVYSMAHSFGESYRVGSTSGIHAITVFCSWDYKVTQKRASRLQQDNIRTRLKELLAEWQLRHSPRSVCGRLRQAAVLGLVWLLCLGTALGCAVAVHVFSEFMIQSPEAAGQEAVLLVLPLVVGLLNLGAPYLCRVLAALEPHDSPVLEVYVAICRNLILKLAILGTLCYHWLGRRVGVLQGQCWEDFVGQELYRFLVMDFVLMLLDTLFGELVWRIISEKKLKRRRKPEFDIARNVLELIYGQTLTWLGVLFSPLLPAVQIIKLLLVFYVKKTSLLANCQAPRRPWLASHMSTVFLTLLCFPAFLGAAVFLCYAVWQVKPSSTCGPFRTLDTMYEAGRVWVRHLEAAGPRVSWLPWVHRYLMENTFFVFLVSALLLAVIYLNIQVVRGQRKVICLLKEQISNEGEDKIFLINKLHSIYERKEREERSRVGTTEEAAAPPALLTDEQDA

SEQ ID NO: 2937 - DNA, 4295 bp, Homo sapien
gaggaggttcctgtagggcggcacaaccagggagggcgtggaagctctgcatcccttctcccataccttgctctacacatctcttcatctgtatcctctgcagcatccttgatgataaaccagtaaatatgagttttgatcatcctgagaaaaatgggccttggcctgcagacccaataaaccttccctcccatggataatagtgctaattcctgaggacctgaagggcctgccgcccctgggggattagccagaagcaggcttgttttcctgctcagaacaaagtgacttccctgaacacatcttcattatgattcacaccaacctgaagaaaaagttcagctgctgcgtcctggtctttcttctgtttgcagtcatctgtgtgtggaaggaaaagaagaaagggagttactatgattcctttaaattgcaaaccaaggaattccaggtgttaaagagtctggggaaattggccatggggtctgattcccagtctgtatcctcaagcagcacccaggacccccacaggggccgccagaccctcggcagtctcagaggcctagccaaggccaaaccagaggcctccttccaggtgtggaacaaggacagctcttccaaaaaccttatccctaggctgcaaaagatctggaagaattacctaagcatgaacaagtacaaagtgtcctacaaggggccaggaccaggcatcaagttcagtgcagaggccctgcgctgccacctccgggaccatgtgaatgtatccatggtagaggtcacagattttcccttcaatacctctgaatgggagggttatctgcccaaggagagcattaggaccaaggctgggccttggggcaggtgtgctgttgtgtcgtcagcgggatctctgaagtcctcccaactaggcagagaaatcgatgatcatgacgcagtcctgaggtttaatggggcacccacagccaacttccaacaagatgtgggcacaaaaactaccattcgcctgatgaactctcagttggttaccacagagaagcgcttcctcaaagacagtttgtacaatgaaggaatcctaattgtatgggacccatctgtataccactcagatatcccaaagtggtaccagaatccggattataatttctttaacaactacaagacttatcgtaagctgcaccccaatcagcccttttacatcctcaagccccagatgccttgggagctatgggacattcttcaagaaatctccccagaagagattcagccaaaccccccatcctctgggatgcttggtatcatcatcatgatgacgctgtgtgaccaggtggatatttatgagttcctcccatccaagcgcaagactgacgtgtgctactactaccagaagttcttcgatagtgcctgcacgatgggtgcctaccacccgctgctctatgagaagaatttggtgaagcatctcaaccagggcacagatgaggacatctacctgcttggaaaagccacactgcctggcttccggaccattcactgctaagcacaggctcctcactcttctccatcaggcattaaatgaatggtctcttggccaccccagcctgggaagaacattttcctgaacaattccagcctgctccttttactctaggggcctctgtcagcaagaccatggggacttcaagagcctgtggtcaggaaatcaggtccagccttccctgtagccagacagtttatgagcccagagcctcctgccacacacatgcacacatatctagcattctttccagacagcatcctccccgccttccaccttggtagatgcaaggtctatctctcccatcagggctgccaaagctgggctttgtttttcccagcagaatgatgccattctcacaaaccaatgctctatattgcttgaagtctgcatctaaatattgatttcacgttttaaagaaattctcttaaattacaattgtgcccaatgcagggtggctctggggggcaagtaggtggtacaggggattggaaacatgctccgcgcctccagagaaaagttgctcccgaggtccatgcccctggaacgtgttcctatcactctggctggttgggctggtccttagactgggtgcttatgattaaagggtcttggttagcccactttccctctccatgtggagatggaaggtagagaaggatacagtgtctatcctcaagttgctacggttcagtgagagaggcagacatctgaacaggcaggtaggattcagtgtgctcagtgcactggggatttggagagagatgggcttgctctctctgtgcacccaggagggccacgcacttaaaactgtgtttgtggatcagagaaggctttatagcacagggggcattcagatgagtcttagaggaagagaagaaacatggcaagcagattacatctgagccgtttgaattgtgtttttctttcttcccatgtttattttctaagatctacctgaacttagagactcaagatatttttttaggaaacctcctacccatgtctgaggtagcaagtgcagcctcacgacagataccaggcaatccagagccacaaaacgtgattcctccaggctctgcctggcctgaccctgtcctgtcagctgggtttacataccagtcccattcttccttttcaatacctacccccaaatcttctcctaaccaccatctgttttttttttttaaagcattttttgctttaaaagcatcctgaccccaatttctttgagctcacgggccttttgctgaaggtctctcagggtgtagtggtgtggctctctggacttaacgtcactctcagaggtcagaaccttggagatcagaactgattctcaccaggtgtgagaggtgtggtagcagattgcaatgctctgcacctcttccttgcaagtgagcaacttcaggctctctgggcagaggctggcccactgtagtttgcagacatgctctccagatggttttactaagtcccctctccctgatagggaatcctgctggaccagcgcagccctggtgtggagaggttaaaagacttgcacaggatcaccaagtcatgctgtagagccaggattcctagacccagggctctgcactctcaaggctggccccatgtgctcaaggggatctaatgtttgggctccaaactaaccatctcggagctgggctcctcatttactgccaaaccctcagcttatgtagctagaaagggccctggagtgagaaagcctggattttcaaattgatgctcccctactgactagctgtgccactctgggcaaatgctcttccttgagcctgtttccacacctgtaaagtggggatgatgatcctatctcactgcttttgtgaggattacaggaaagcacctgtcctggctctgtacctggcacgtagtaggtgctcagttcatgctggtttccttcctgcctttagtagggacctgctctgtgctcacacctcggctgcatgcaccctgctgtgacggaggctagtgtggaagaggtcctgtcctcagggaattaactgtcttattgggagacaacaactgtcctccttggaacacccaagaaaccatgcaaagcagtggacaacacagaacacgccctcctcctcgctgcctgcagctccaatctgattctgcttgggaatgggcggagcacgtgggctgcttaactgctgtataggacaagccccttacccctctctgggcccatgaattcctggcttggtttatgttctgatttgacacactgattttaatcttcgaatcatgacactgagtgcagaggaggtggcattccgacagcaggacatacatgttggtgtgaagactgggacgacactgggtagaatctagtttttaattattattaatataaaggatcaaattaatttaaatatgattctgaagtctacagaacttttagttctgtgctgtctatgtggacactttggtaaaatgcaaattatgatatggacgttatcattggtctggtgagatgtttcatatttgtgacagttaatttaaaaattatgagttaatgctgcctgtgtctatggggttctgtcttctttgatagccatctattcatctggatcatgggaccctctctaatccttccaccaatcaaataagctattgctattggtttggagttgagatatcagtctcggaaacttctgaaaaatgctaataattacccaaggattatgtcaaattttaaaataaatgtgtgtgtgtttctttaaaaaaaaaaaaaaaa

SEQ ID NO: 2938 - protein, 406 aa, Homo sapien
MIHTNLKKKFSCCVLVFLLFAVICVWKEKKKGSYYDSFKLQTKEFQVLKSLGKLAMGSDSQSVSSSSTQDPHRGRQTLGSLRGLAKAKPEASFQVWNKDSSSKNLIPRLQKIWKNYLSMNKYKVSYKGPGPGIKFSAEALRCHLRDHVNVSMVEVTDFPFNTSEWEGYLPKESIRTKAGPWGRCAVVSSAGSLKSSQLGREIDDHDAVLRFNGAPTANFQQDVGTKTTIRLMNSQLVTTEKRFLKDSLYNEGILIVWDPSVYHSDIPKWYQNPDYNFFNNYKTYRKLHPNQPFYILKPQMPWELWDILQEISPEEIQPNPPSSGMLGIIIMMTLCDQVDIYEFLPSKRKTDVCYYYQKFFDSACTMGAYHPLLYEKNLVKHLNQGTDEDIYLLGKATLPGFRTIHC

SEQ ID NO: 2939 - DNA, 2754 bp, Homo sapien
agcgggggggtaacgcggggccgccaggtgacagctaatggcggcggccgcctgaggcgggcgggcggtatagagcgggcggcaggaggcaagcagcgaaaccttcccggccgccgctcccgtcccgacggcggcttccccaaggcggcaggactcggcgcgccatggacaggccggcggcggcggcggcggcgggctgcgagggcggcgggggcccgaacccggggccggcgggcggcaggaggcctcctcgggccgcggggggcgccaccgccggctcccggcagcccagcgtggagaccctggacagtcccacaggatcacatgttgaatggtgtaaacagcttatagctgctacaatttctagtcagatttcaggttcagtgacatcagaaaatgtgtccagagattacaaggctctaagggatggaaataagctggcacagatggaagaggctccacttttcccaggagaatcaattaaagccattgtgaaagatgtcatgtatatctgcccatttatgggagcagtgagtggaaccctgacagtgacggactttaagctgtacttcaaaaatgtcgagagggacccgcattttatccttgatgttccccttggagtgatcagcagagtggagaagattggagcacagagccatggagacaattcctgtggtatagagatagtgtgcaaggatatgaggaacttgcggcttgcttataaacaggaagaacagagtaaactagggatatttgaaaacctcaacaaacatgcatttcctctttctaacggacaggcactatttgcattcagctataaagaaaaatttccaattaatggctggaaagtttatgatccagtatctgaatataagagacagggcttgccaaatgagagttggaaaatatccaaaataaacagtaattatgagttctgtgacacctaccctgccatcattgttgtgccaactagtgtaaaagatgatgacctttcaaaagtggcagcttttcgagcaaaaggcagagtccctgtgttgtcatggattcatccggaaagtcaagcaacgattacccgttgcagccagccacttgtgggtcccaatgataagcgctgcaaagaggatgaaaaatacttgcaaacaataatggatgctaacgcacagtcacacaagcttatcatctttgatgctcgacaaaacagtgtcgctgataccaacaagacaaagggtggaggatatgaaagtgaaagtgcttacccaaatgcagaacttgtgttcttggagatccacaacattcatgtcatgcgagagtcactacgcaaattaaaagagattgtgtacccttcgatcgatgaggcgcggtggctctccaatgtggatgggacgcattggctggaatatataaggatgctgcttgctggggcagtaagaattgctgataaaatagaatctgggaaaacatctgtggtggtgcattgcagcgacggttgggaccgaacagcccagctcacatctctggctatgctaatgttggacagttactacaggaccattaaaggatttgaaactctcgtagaaaaggagtggataagctttggacacaggtttgcactgcgagtgggccatggtaatgacaaccatgcggatgctgaccgatctcccatatttctgcagtttgttgattgtgtttggcaaatgacaaggcagtttccttcagcattcgagtttaatgagctattcttgattacaattttggatcacctttatagctgtctttttgggacctttttgtgcaactgtgaacagcagcgattcaaagaggatgtatatacaaagacgatatctttatggtcgtatatcaatagccagctagacgagttttctaatcccttctttgtgaattatgaaaaccacgtgttatatcctgttgctagtctgagtcatttggaattgtgggtaaattattatgtacgatggaatccacggatgagacctcagatgcccattcaccagaatctcaaggagctgctggccgtcagggcggagctgcagaagcgtgtggagggcctacagcgggaggtggccacgcgcgccgtctcatcctcatctgagcggggctcctcgccctcccactccgccacctccgtccacacctcggtctgatgggcgagaaatatgtaatcccctggctgactaggactgttaaacatagtgtggactggatgatgccttcgacaaaccagagaagccaagttggggggagctggtgcctggagtgggccctgtgcacctcacctggcggaggctggggggggctctgtcagcaggaccctagaggagactctcattcgattttaaagaagcacaacgggtcattttcctttgtatgttcctagcgcagaactgtttctaaaacaacttgaagtatagttttgttatctaagcaatttttgttttaagtaagtaagtgtactagaatgcgaagccgttatggttcaggtttttaaaaactggtacagtattgtatttgtctcatctgttgcactgtatttcaatcatctgtaattaaaatgatcatatgtttgctccctggtcttttttaagtaagtaagtaagtatcttagtagatttttcctttgaggaaaatcggtaataaaataacatggattgaatgtttactgtgcgtcaagcacagttaatatatgatgatgtaaagtaactaactttatgtgatttaattcattcagtaaattgt

SEQ ID NO: 2940 - protein, 665 aa, Homo sapien
MDRPAAAAAAGCEGGGGPNPGPAGGRRPPRAAGGATAGSRQPSVETLDSPTGSHVEWCKQLIAATISSQISGSVTSENVSRDYKALRDGNKLAQMEEAPLFPGESIKAIVKDVMYICPFMGAVSGTLTVTDFKLYFKNVERDPHFILDVPLGVISRVEKIGAQSHGDNSCGIEIVCKDMRNLRLAYKQEEQSKLGIFENLNKHAFPLSNGQALFAFSYKEKFPINGWKVYDPVSEYKRQGLPNESWKISKINSNYEFCDTYPAIIVVPTSVKDDDLSKVAAFRAKGRVPVLSWIHPESQATITRCSQPLVGPNDKRCKEDEKYLQTIMDANAQSHKLIIFDARQNSVADTNKTKGGGYESESAYPNAELVFLEIHNIHVMRESLRKLKEIVYPSIDEARWLSNVDGTHWLEYIRMLLAGAVRIADKIESGKTSVVVHCSDGWDRTAQLTSLAMLMLDSYYRTIKGFETLVEKEWISFGHRFALRVGHGNDNHADADRSPIFLQFVDCVWQMTRQFPSAFEFNELFLITILDHLYSCLFGTFLCNCEQQRFKEDVYTKTISLWSYINSQLDEFSNPFFVNYENHVLYPVASLSHLELWVNYYVRWNPRMRPQMPIHQNLKELLAVRAELQKRVEGLQREVATRAVSSSSERGSSPSHSATSVHTSV

SEQ ID NO: 2941 - DNA, 3137 bp, Homo sapien; identical to SEQ ID NO: 45

SEQ ID NO: 2942 - protein, 373 aa, Homo sapien; identical to SEQ ID NO: 46

SEQ ID NO: 2943 - DNA, 1666 bp, Homo sapien
acgcgtccgaaagcggccatgttttacatatttcttgattttgtttgttttctcgtgagcttaggccgctggttttggtgatttttgtctgattgcaatgtctggacgtggtaagcaaggaggcaaagctcgcgccaaagcgaaatcccgctcttctcgcgctggtctccagttcccggtgggccgagtgcaccgcctgctccgtaaaggcaactacgcagagcgggttggggcaggcgcgccggtgtacctggcggcggtgttagagtacctgaccgccgagatcctggagctggccggcaacgcggctcgcgacaacaagaagactcgcatcatcccgcgccacttgcagctggccatccgcaacgacgaggagctcaacaaactgctaggccgggtgaccattgctcagggcggcgtccttcctaacatccaggccgtgcttctgcctaagaagaccgagagtcaccacaaggccaagggcaagtgatttgacaggtatctgagctcccggaaacgctatcaaacccaaaggctcttttcagagcccccctaccgtttcaaaggaagagctaacctcactgcttgtaggtagaaggaaaaaagcactaaggttgcaaaagcttctcatttcagagagatgccaggatcctaagtgcctgccaaacttaccaattctaaggaataagtggatggatggcattactgattcctacattactgattgattctgcatccacaaattgttttattaaaaacattctacatcatgtgtggggagataaggaggataaaatgaagagaaagaatattattgaggggaagttcttctgaatacaaaatgtgtttaattttttaaataagtattacattcacagggttcaaactatttgaagtaaagagattatataaagaatccatccctcaacttacccaggtggtcacttttctttttcttgtgtatctgcccagtattcattcctgctgatatcagtcaataatgaatgatacgtgttttcttcacttttttcattcttgtcaggtagcagactgtgtagacttttctgcacttgcccttttcataacaatctatcttggagaactttccctatgagaacatacagagcttcctgtacacagttgcatgtactgcattatgcaaatgcattatattttatgtaacctgtccactgttggtaggcacttgagttgttttagtcttttgctatcaaacagttctgggatgattaaccctgatttactgcaaaattgaaattgctctgctattctgctggaatggtggtaagtgaactgaaaattccagtcactcttgggctagactcaacgttcttaaaaactatgtggccatcaccaaattagttattttgaaccttaatttcttcacctctaaaatggaggtaatacttaccttaagtggctatgagaatgaagatcatgtgtatgaattgttggtgctctaaagaacagcacaaataaaattattttcaaatttaattttaattgaactatgtgtaatttcttaattttgaaataattttatttgtaatgtgcataatcttatttaatgtataatgtatacattgtaatagaaacagatttcccaaattccagcctggcatgaggtaataaaaggtaatgcaaaaaa

SEQ ID NO: 2944 - protein, 130 aa, Homo sapien
MSGRGKQGGKARAKAKSRSSRAGLQFPVGRVHRLLRKGNYAERVGAGAPVYLAAVLEYLTAEILELAGNAARDNKKTRIIPRHLQLAIRNDEELNKLLGRVTIAQGGVLPNIQAVLLPKKTESHHKAKGK

SEQ ID NO: 2945 - DNA, 1336 bp, Homo sapien
tgcattgctacctgcccttctcaaagcccacatgttgtattttatgcaaatctacagattatctatcattatctaaatgcaggcatctgaaaaccagcagtaatcctgcctctgaagtttatcaggaaaggagcttaaaagagaaccaaattcagcctgtgttggaactctcagtcccagaggggtgtggtttgtagctctccggcctgctgttggacttaggctgtgacccacagaaggacgccagaaagtactcaagacattcacggtgccccggtcagcactcgccatgacgaagacttctacatgcatataccacttccttgttctgagctggtatactttcctcaattattacatctcacaggaaggaaaagacgaggtgaaacccaaaatcttggcaaatggtgcaaggtggaaatatatgacgctgcttaatctgctcttgcagaccattttctacggggtcacctgcctggatgatgtgctgaaaagaaccaaagggggaaaagacattaagttcctaactgccttcagagacctgcttttcaccactctggcttttcctgtatccacgtttgtatttttggcattctggatcctctttctctacaatcgagatctcatttaccccaaggtcctagatactgtcatccccgtgtggctgaatcatgcaatgcacactttcatattccccatcacattggctgaagtcgtcctcaggcctcactcctatccatcaaagaagacaggactcaccttgctggctgctgccagcattgcttacatcagccgcatcctatggctctactttgagacgggtacctgggtgtatcctgtgtttgccaaactcagcctcttgggtctagcagctttcttctctctcagctacgtcttcatcgccagcatctacctacttggagagaagctcaaccactggaaatgggtttctgttcagatcttgcaaagatggaggctagaatctgttggaatctgcttccagtggcccgattggaagtcaccagccaagcaccaactggtcaagaatatcaggtgaaatatcagggctataaaaatatttctagcccttgctactatctgacagcagttaaaggaataaaacaagtcggggtgaatctaacttcctatctgccaactaggatactttctactgggaaaaatgcttctcaatcaagaaaatatttataataaacataattttccaattacaacttaaaatccattttgtgaatttggtttgggtaagatatatgatctattattaagtcaacagtttccttatttccagctatgcgttatagaaacatggtcagaa

SEQ ID NO: 2946 - protein, 255 aa, Homo sapien
MTKTSTCIYHFLVLSWYTFLNYYISQEGKDEVKPKILANGARWKYMTLLNLLLQTIFYGVTCLDDVLKRTKGGKDIKFLTAFRDLLFTTLAFPVSTFVFLAFWILFLYNRDLIYPKVLDTVIPVWLNHAMHTFIFPITLAEVVLRPHSYPSKKTGLTLLAAASIAYISRILWLYFETGTWVYPVFAKLSLLGLAAFFSLSYVFIASIYLLGEKLNHWKWVSVQILQRWRLESVGICFQWPDWKSPAKHQLVKNIR

SEQ ID NO: 2947 - DNA, 739 bp, Homo sapien
ctccagaaaaagtactttaagttacctacaggtgatcctagtcaggcaaatgaaaacagtagcctaaagtgtcagtttcaaccagaaaataacagctctgatttctcatggctcatactcgtctgaaacgactcaggtagaggctgaggaaggccgtgttgtttgtctacctgggactacacctactgaaagaagttctcaagttctgattgagttctaaaattttttgaagattgaaattcttcatatgtaaaaagagaagagaaagacattcttgattttggtgactagagttgtagatgctggaagctttgccactaacattgatgaaccagatgcatgtcaccagcccatcacggtgattcttaatgccggcaccatgggcccggcactgccacgttttccaaggaacctgccggagctcctgcggaagctgctcctcaggcgatggagtcccttcgctggtaggcccttcttcagtcaccacaggatgcctgccattcatgaacaagaaggagaggacgggctttgaataaaaaacaggatccaggaaatatttgtgaggccatttggacttcagtgtgaaatggtgttaaaagatgaagtcatttattcaagaagtaaacctctgccacctggactgtgcgcagacatttcattgatttggtttaataaacattttctggctttgggaggtgtctctcttggtagaacacagtgtcaaagatggacaagatgg

SEQ ID NO: 2948 - protein, 50 aa, Homo sapien [sequence omitted]

SEQ ID NO: 2949 - DNA, 986 bp, Homo sapien
gcaggcgcagacgcgcgggcgggaagatggcggctgggttcaaaaccgtggaacctctggagtattacaggagatttctgaaagagaactgccgtcctgatggaagagaacttggtgaattcagaaccacaactgtcaacatcggttcaattagtaccgcagatggttctgctttagtgaagttgggaaatactacagtaatctgtggagttaaagcagaatttgcagcaccatcaacagatgcccctgataaaggatacgttgttcctaatgtggatctaccacccctgtgttcatcgagattccggtctggacctcctggagaagaggcccaagtggctagccaattcattgcagatgtcattgaaaattcacagataattcagaaagaggacttatgcatttctccaggaaagcttgtctgggttctatactgtgatctcatttgcctcgactacgatggaaacattttggatgcctgcacatttgctttgctagcggctttaaaaaatgtacagttgcctgaagttactataaatgaagaaactgctttagcagaagttaatttaaagaagaaaagttatttgaatattagaactcatccagttgcaacttcctttgctgtgtttgatgacactttgcttatagttgaccctactggagaggaggaacatctggcaacaggaaccttaacaatagtaatggatgaggaaggcaaactctgttgtcttcacaaaccaggtggaagtgggctaactggagctaaacttcaggactgtatgagccgagcagttacaagacacaaagaagttaaaaaactgatggatgaagtaattaagagtatgaaacccaaataaacagccaccacattttcaaaacagatttgtaaaaattgtatttgttaacactgtgcacaaacgttttatactaaataaatatcaaactacattcttccgaaaaaaaaaaaaaaaaaaaaaaaaaaaaaa

SEQ ID NO: 2950 - protein, 276 aa, Homo sapien
MAAGFKTVEPLEYYRRFLKENCRPDGRELGEFRTTTVNIGSISTADGSALVKLGNTTVICGVKAEFAAPSTDAPDKGYVVPNVDLPPLCSSRFRSGPPGEEAQVASQFIADVIENSQIIQKEDLCISPGKLVWVLYCDLICLDYDGNILDACTFALLAALKNVQLPEVTINEETALAEVNLKKKSYLNIRTHPVATSFAVFDDTLLIVDPTGEEEHLATGTLTIVMDEEGKLCCLHKPGGSGLTGAKLQDCMSRAVTRHKEVKKLMDEVIKSMKPK

SEQ ID NO: 2951 - DNA, 2244 bp, Homo sapien
ctgcagacgaggcagggagaggcgggacttcgcgggcgagacgtcatcggggcgccggacgccggggcgcctgggagtttgaagcaaacaggcagcgcgcgacaatggcggtcgctcgtgcagctttggggccattggtgacgggtctgtacgacgtgcaggctttcaagtttggggacttcgtgctgaagagcgggctttcctcccccatctacatcgatctgcggggcatcgtgtctcgaccgcgtcttctgagtcaggttgcagatattttattccaaactgcccaaaatgcaggcatcagttttgacaccgtgtgtggagtgccttatacagctttgccattggctacagttatctgttcaaccaatcaaattccaatgcttattagaaggaaagaaacaaaggattatggaactaagcgtcttgtagaaggaactattaatccaggagaaacctgtttaatcattgaagatgttgtcaccagtggatctagtgttttggaaactgttgaggttcttcagaaggagggcttgaaggtcactgatgccatagtgctgttggacagagagcagggaggcaaggacaagttgcaggcgcacgggatccgcctccactcagtgtgtacattgtccaaaatgctggagattctcgagcagcagaaaaaagttgatgctgagacagttgggagagtgaagaggtttattcaggagaatgtctttgtggcagcgaatcataatggttctcccctttctataaaggaagcacccaaagaactcagcttcggtgcacgtgcagagctgcccaggatccacccagttgcatcgaagcttctcaggcttatgcaaaagaaggagaccaatctgtgtctatctgctgatgtttcactggccagagagctgttgcagctagcagatgctttaggacctagtatctgcatgctgaagactcatgtagatattttgaatgattttactctggatgtgatgaaggagttgataactctggcaaaatgccatgagttcttgatatttgaagaccggaagtttgcagatataggaaacacagtgaaaaagcagtatgaaggaggtatctttaaaatagcttcctgggcagatctagtaaatgctcacgtggtgccaggctcaggagttgtgaaaggcctgcaagaagtgggcctgcctttgcatcgggggtgcctccttattgcggaaatgagctccaccggctccctggccactggggactacactagagcagcggttagaatggctgaggagcactctgaatttgttgttggttttatttctggctcccgagtaagcatgaaaccagaatttcttcacttgactccaggagttcagttggaagcaggaggagataatcttggccaacagtacaatagcccacaagaagttattggcaaacgaggttccgatatcatcattgtaggtcgtggcataatctcagcagctgatcgtctggaagcagcagagatgtacagaaaagctgcttgggaagcgtatttgagtagacttggtgtttgagtgcttcagatacatttttcagatacaatgtgaagacattgaagatatgtggtcctcctgaaagtcactggctggaaataatccaattattcctgcttggattcttccacagggcctgtgtaagaatgggttctggagttctcatggtctttaggaaatattgagtaatttgtaatcaccgcattgatactataataagttcattcttaagcttgctttttttgagactggtgtttgttagacagccacagtcctgtctgggttagggtcttccacatttgaggatccttcctatctctccatgggactagactgctttgttattctatttattttttaatttttttcgagacaggatctcactctgttgcccaggatggagtgcagtggtgagatcacggctcattgcagcctcgacctcccaggtgatcctcccacctcagcttccagattagctggtgctataggcatgcaccaccacgtccatctaaatttctttattatttgtagagatgaggtcttgccatgttacccaggctggtctcaactcctgggctcaagcgatcctcctgcctcagtctctcaaagtgctgggattacaggtgtgagccactgtgcccagcctaattgcagtaagacaaaaattctagggcaccaagaggctaaagtcagcacagcttttcttgtgtcctgtatt

SEQ ID NO: 2952 - protein, 480 aa, Homo sapien
MAVARAALGPLVTGLYDVQAFKFGDFVLKSGLSSPIYIDLRGIVSRPRLLSQVADILFQTAQNAGISFDTVCGVPYTALPLATVICSTNQIPMLIRRKETKDYGTKRLVEGTINPGETCLIIEDVVTSGSSVLETVEVLQKEGLKVTDAIVLLDREQGGKDKLQAHGIRLHSVCTLSKMLEILEQQKKVDAETVGRVKRFIQENVFVAANHNGSPLSIKEAPKELSFGARAELPRIHPVASKLLRLMQKKETNLCLSADVSLARELLQLADALGPSICMLKTHVDILNDFTLDVMKELITLAKCHEFLIFEDRKFADIGNTVKKQYEGGIFKIASWADLVNAHVVPGSGVVKGLQEVGLPLHRGCLLIAEMSSTGSLATGDYTRAAVRMAEEHSEFVVGFISGSRVSMKPEFLHLTPGVQLEAGGDNLGQQYNSPQEVIGKRGSDIIIVGRGIISAADRLEAAEMYRKAAWEAYLSRLGV

SEQ ID NO: 2953 - DNA, 1645 bp, Homo sapien; identical to SEQ ID NO: 455

SEQ ID NO: 2954 - protein, 171 aa, Homo sapien; identical to SEQ ID NO: 456

SEQ ID NO: 2955 - DNA, 2499 bp, Homo sapien
agcggggtcccaactggcgaggctgctggggttgcagcgggacagttggggcggccccgcaggcccaggtgaacaaaaattgtttgctggcccccaggatactaactagacctttggcctgactcacaggacactaaggctccttttctgaagaagccttttaccagtctcatttaggggatgggaacaacatgtcttcacctagggactttagagcagagcctgtaaacgattatgagggaaatgactctgaagcagaagacttgaatttcagggagactttgccttcatcaagtcaggaaaacacacctagatcaaaggtttttgaaaataaagttaattcagagaaggtaaaactttctcttcggaatttcccacataatgattatgaggatgtttttgaagagccttcagaaagtggcagtgatcccagcatgtggacagccagaggccccttcagaagagacaggtggagcagtgaggatgaggaggctgcagggccatcacaggctctctcccctctactttctggtacgcgcaaaattgtttctgaaggagaactagatcagttggctcagattcggccattaatattcaattttcatgagcagacagccatcaaggattgtttgaaaatccttgaagaaaaaaacagcagcgtatgatatcatgcaggaatttatggctttagaacttaagaatctgcctggtgagttcaactctgggaatcaaccaagcaacagagaaaaaaacagataccgagatattcttccatttcaacatcatggatatagtggcccaaatgagagaacaacgttctggcatggttcaaacgaaggagcagtatcacttttgttacgatattgtgcttgaagttcttcggaaacttctgactttggattaagaaagacttctgttgcctctcacttgaaattaccaagtgggtttgcacctcctcataaagaacatgtttgcactgtgctgaagggctttgctatgcatacaatctgctttcttggtttatcagtttattttctttctaaaagctccctgaagggcaatatcatttggcttggggtgatcagtgtttacttattgatcttgctagacaatatcaaaataacttcccacattttccagtgaaacagatgttacataaaacgattgcagcttggctatttggttgaagggattacagagcccaataaaggatttaaaatatattcattaagattttatttggaaaggtggctggagagagctgaggatttccaggactttgtaagttcttattctgggagaacataaggccaataatcatgacctcttccaggcatttttaagacagatgtctattcatgttctttagctagagcctgtactttttgctggcatttgaataacccagtttaaaaagagtccagttagggtggactaactttggacacaaattggcttccatttcctacattttcatactgctgccttcctacagctgctagaccaagacctgttggtctgggaagcatttcatggatagggagagctcctctcggtgaacagtccaaaactaaaatagatgtttatatagaaagcccaagaggagacttttgccatgcctgagttctttcctatcccaccctaacacttaacatattacttagtctgctttgttaaaagcaagtattacctttaacttgcctcttactctttgccctttagctaactaataaagtttgatataggcattattatataattctgagtcattcatggtatctctcatgtttgatgtatttttcaaactaagatctatgatagttttttttccagagttccattaaatcatttatttcctttactttctcacctctgttgaaacatttagaaactggatttgggaacccaattttggaaaaccagattcatagtcatgaaaatggaaacttccatattctgtttttgaaaagatgtggccattattacagtaattttattataggactttgcctcgtacaattaatagtgatattttggacaaggagttctggtgacaagctatacctaattataagctataaaacaatagatatgagtgtttgtacagtttaactcaatggagatcagaatattctatgtattgagaaaatgtttaatatcaatctataaatcttgaatttctaagaggcttattttgttcttttggctgaatgagtatatttgaattggttgaataattaataattctcattgtaaaaataattatatgccaaaaatatatttgatgttaaatcaaatagatgattctgtttacattgttcatatgaataataatctgtgttaatttcattttgataattggcctttaatatttgtatctctaattttattttctctctgttactgtaaaataatagctataatgtataacaattttcttcagaagaattctatgctattattaaaataaaatatttactgtgaaaaaaaaaaaaaaaa

SEQ ID NO: 2956 - protein, 157 aa, Homo sapien
MSSPRDFRAEPVNDYEGNDSEAEDLNFRETLPSSSQENTPRSKVFENKVNSEKVKLSLRNFPHNDYEDVFEEPSESGSDPSMWTARGPFRRDRWSSEDEEAAGPSQALSPLLSGTRKIVSEGELDQLAQIRPLIFNFHEQTAIKDCLKILEEKNSSV

SEQ ID NO: 2957 - DNA, 4410 bp, Homo sapien
gaggaggagctggagggggcgcggcttcctctcggtcgctccctggcgccgggcctctttctctgcctggcccagggctggcggccggcgggggtcgcggcggcggcagtgggggcgctggcgggccgcgggtggcgggggccgggccgcggctccgggtgttaggagacaagatggcggcggctctcagaaggccggtctcctcctctccgccgtcctccgccccgccgctcgccgcctcctcctctcgggtctcctcctcctcgtttgctgcctcctcctcctcctgcagcagcaccagcgaccgccgaagcgccggctcgctcacccggagctccggaggtggatagacggggcagctgcaggctccggcgaccgaggccgagctggggccggggcggggacggcggcggcggcggcggcgacggcggcggcgccgggtggggatggggtcgcagacgctgcagatcctccgacagggggtgtgggccgcgctcagcgggggctggtactacgacccgcaccaggccaccttcgtgaacgcgctgcacctctacctgtggctcttctgctgggcctacccttcaccctctacatggcccttccttctaccatgattatagtagcagtttattgtcctgtgatagctgctgttttcattgttctgaagatggtcaactatcgactacacagagcacttgatgctggagaagttgtagataggactgcaaatgagttcacggatcagcgaaccaaagctgaacaaggcaactgttcaaccaggagaaaagacagcaatggaccgagtgatcctggtggagggattgaaatgtctgagttcatccgagaggccacacccccagttggttgcagttccagaaattcttatgccggtctagatccaagcaaccagattggatctggttcctcgcgtcttggaacagcagcaactattaaaggagatacagacactgctaagacttctgatgatatcagtttaagtctgggccaaagttctagtctttgtaaggaaggaagtgaagaacaagatttggcagctgatcggaagctctttcgtcttgtctccaatgactccttcatctctattcagccttccttatcctcttgtggacaggacttgccaagggacttcagtgacaaagtgaacctgccaagtcataaccaccaccaccatgttgatcagtctctgtccagcgcctgtgacacagaagtagcttctcttgtacctttacactcacactcttatagaaaagaccaccggccgcgaggtgtaccacggacttctagctctgctgtggcttttccagacacttcactgaatgattttcccctttatcagcaaagacgtggattagatccagttagtgagttagaatcttccaagcctctttctggatccaaagaatccttggtggaaaattctggtttatctggggaatttcagcttgctggtgacttgaaaatcaatacttctcagccacccacaaaaagtgggaagagcaaacctttgaaagcagagaaaagcatggacagcttgaggagcctgagcacacggagtagtgggtcaacagaaagctactgcagtggaacggaccgggacactaacagtactgtcagcagctataaaagtgagcagaccagctcaactcacatagagagcatcctgtcagagcatgaggagtctcctaaagcaggaacaaaaagtgggaggaagaaagagtgctgtgcaggcccagaggagaagaatagctgtgccagtgacaaaaggactagcagtgaaaagattgctatggaagcgagtaccaacagtggggttcacgaggccaaggaccccaccccctctgatgagatgcacaaccagagaggtctcagcacctctgcatctgaagaagccaataaaaatccccatgcaaatgaatttacttcccaaggggacagaccacctgggaacactgcagaaaacaaagaagagaagagtgataagtcagctgtttctgtggattccaaagtgcgtaaagatgttggtggaaagcaaaaggaaggggatgttcgacctaaatcttctagcgtaatccatcggacagcttctgcccacaagtcaggcaggagacgcacaggaaaaaaacgggctagcagttttgattcaagccggcatagggactatgtttgctttcgaggtgtttctggtaccaagccacacagtgctatattttgtcatgacgaagactctagtgatcagagtgacttgagtagagcatcaagtgttcagtctgctcaccagttcagcagtgatagctcttctagcaccacttctcattcctgtcagtctcctgagggcagatacagtgctctaaagaccaaacacactcataaagaaaggggcacagactctgaacacacacacaaagctcatttggttcctgaaggaaccagcaaaaagcgtgcaacacgacggacttctagcacaaatagtgccaagactcgtgcccgagtgttgagcctggacagtggcacagtagcatgtttgaatgactcaaacaggttaatggcacctgaaagtataaagcccttaaccacttcaaaatcagatcttgaggccaaagagggagaggtgctagatgagctatctttattaggacgggcttcccagttagagacagtcactcgatctaggaatagcttgccaaaccaggttgcatttcctgaaggggaagagcaagatgcagtcagtggagcagcacaagccagcgaggaggcagtgtcatttcgccgtgaacgcagcacatttaggcgccaggcagtacggcgccggcacaatgcagggagtaaccctacccctcctacattgctcatcggatcacccctaagccttcaagatggtcagcaaggccagcagtccacagcccaggtcaaagtccagtcccgccccccttcccaggctgcagtgctcagtgctagtgcctccttgctggtaagttctcttctacgctgtatgagactggtggctgtgatatgtcacttgtgaattttgaaccagcagcaagaagagcatccaatatctgtgacacagattctcatgtatccagttctacctcagttcgattttatccacatgatgtggtaggtttttctttatttttacaacatgataaattttcagattaaatctgaaatatgtatttacatagatagctataaaagccataaaaattgatgaagttacacaaaaattttttgaaaactatggcaaaatcactttgctgccctccagtggctctctttttctaagtcctttgataagaaacaaaagtacaaggttaagaaaccctggcatagagtattttaaaaagtgttttggaaagtatttgtcaatgcttagagatagaaatggctgtgttatatataggaagtaaattttctcaactatacccagatatgtgtttgaaaagtaaaaccctccctactttttggctatagtgtattcctggaaactgcataggaaagcaaacatgggaagatgattgttttattgttttctacttttaaatggtatgggaaccttgagatagcaaaatgctgcctagtactatgccaaatacagtcaacttttgatgctttctgaggaaaagaaaactggtaaactgatggatggatgagttgaagttaaatatagtatagtaatttgtatagcctcaggtgagcagcttgccaaaacaaacaaacaaacaaacaaacaggggtgagggatttggaaatatagtaacaacaatgataagagactgtgggaagaaatgagagttgctgccatcagatccaatgcagtggggctcagatttaacactgataatgaggttcaaagcttaaggagaaaagactataaatgtgagaagagaagccactaacgattcacagtaagtggttttagtagattcgctagctatacagttataaaatcttaaggttttttcttaagcattccctgagaaaaatcttaagattttagacacttttctagtcaattatttacaataggtttattgattaattaactttgttttagttcacttcctattgtcaccttctatagtttctggtaatcataacatattcataaagagtaggctgggcgcagtggctcctgcctgtaatcccagcactttgagaggccgaggcgggtggatcacgaggtcaagagttcaagaccagcctggccaagatggtaaaatcccgtctctacaaaaaatagaaaaagaattagccgggcatggtggcaggtgcctgtaatcccagctgcttgggaggctgaggcagagaattgcttgaaccggggaggcagaggttgcagtgagccgagattgcaccactgtacttcagacaagactctgtctc

SEQ ID NO: 2958 - DNA, 2245 bp, Homo sapien
gtacccccatcctttctctcgcccctcctacccgcagctcctggcgctcggcggggctaactgcagcgcggagatctcggccgccaagctccgcctcccgccccgggctgtgccccggggctcgcctgaggccgaccacccgcaccccacctctagcggctttgctcgaggcccaccttcttcccacccccggcaaactccagtaggctcgccctcgctgactccccgcccccgcgtcaactgcaaggggcccgcccatagccagttccggggcggttgctcacatcgaccggaactccccgccccctcccgcggcccctggggccgtaggaggccgcagcgaggaggtagagggggcgggggtcgcactagggtgtccctagagaacgaggactctgaaggcgggacatttgggcgacccccgggcggggccagccattaaacagtcccacttctgtgccagacactgaactgggctcttgacgggcatcatctcttaatcctcagaacatcccagggagctccacaggatccccatatcctgggccatgagtgagttgaaagactgccccttgcagttccacgacttcaagtctgtggatcacctgaaggtctgtccccgctacacggcagtgctggcacgctctgaggatgatggcatcggcatcgaggagctggacaccctgcagctggagctggagaccctgctgtcttctgccagccggcgcctgcgtgtgcttgaggccgaaacccagatcctcaccgactggcaggataagaaaggtgacagacgattcctgaagctgggtcgagaccatgaacttggagctccccccaaacatgggaagcccaagaagcagaaactggaagggaaggcaggacatgggccgggccctggcccaggacggcccaaatccaaaaaccttcagcccaagatccaggaatatgaattcactgatgaccctatcgacgtgccacggatccccaaaaatgatgcccccaacaggttctgggcttcagtggagccctactgtgctgacatcaccagcgaggaggtccgcacacttgaggagttactgaagcccccagaagatgaggctgagcattacaagatcccacccctggggaagcactactcccagcgctgggcccaggaggacctgctggaggagcagaaggatggggcccgggcagcggctgtggctgacaagaagaaaggcctcatggggccactgaccgaactggacactaaagatgtggatgccctgctgaagaagtctgaggcccagcatgaacagccggaagatggatgcccctttggtgccctgacgcagcgcctcctgcaggccctggtggaggaaaatattatttcccctatggaggattctcctattcctgacatgtctgggaaagaatcaggggctgacggggcaagcacctcccctcgcaatcagaacaagcccttcagtgtgccgcatactaagtccctggagagccgcatcaaggaggagctaattgcccagggccttttggagtctgaggaccgccccgcagaggactccgaggatgaggtccttgctgagcttcgcaaacggcaggctgagctgaaggcacttagtgcccacaaccgcaccaagaagcacgacctgctgaggctggcaaaggaggaggtgagccggcaggagctgaggcagcgggtgcgcatggctgacaacgaggtcatggacgcctttcgcaagatcatggctgcccggcagaagaagcggactcccaccaagaaagaaaaggaccaggcctggaagactctgaaggagcgtgagagcatcctgaagctgctggatgggtagccctcacccctgcctcaggctgattatctggcctaggggaggggaagggaggcccacttccttctttgggcacaggaaacattggcctgtggctgtccctcaaatggcggcagtctctagagggccgtggcccttcccctgaggtcttttggcctagctctgtacaaccaggacacaggaagccctgctgggctagcctgaggcctagtctctgcttggtccccgagatggggttggaggggacttcgtttctgggtcttcctcttcccctctttaccatcccccactccctaatcccctacccctgtctccccttcaaggacttctcccttgtggttttgtaaagtgcaaacttaagaataaagtgactgctgtggtttttcaaaaaaaaaaaaaaa

SEQ ID NO: 2959 - protein, 432 aa, Homo sapien
MSELKDCPLQFHDFKSVDHLKVCPRYTAVLARSEDDGIGIEELDTLQLELETLLSSASRRLRVLEAETQILTDWQDKKGDRRFLKLGRDHELGAPPKHGKPKKQKLEGKAGHGPGPGPGRPKSKNLQPKIQEYEFTDDPIDVPRIPKNDAPNRFWASVEPYCADITSEEVRTLEELLKPPEDEAEHYKIPPLGKHYSQRWAQEDLLEEQKDGARAAAVADKKKGLMGPLTELDTKDVDALLKKSEAQHEQPEDGCPFGALTQRLLQALVEENIISPMEDSPIPDMSGKESGADGASTSPRNQNKPFSVPHTKSLESRIKEELIAQGLLESEDRPAEDSEDEVLAELRKRQAELKALSAHNRTKKHDLLRLAKEEVSRQELRQRVRMADNEVMDAFRKIMAARQKKRTPTKKEKDQAWKTLKERESILKLLDG

SEQ ID NO: 2960 - DNA, 4572 bp, Homo sapien; identical to SEQ ID NO: 2092

SEQ ID NO: 2961 - protein, 695 aa, Homo sapien; identical to SEQ ID NO: 2093

SEQ ID NO: 2962 - DNA, 3515 bp, Homo sapien
tgcacacctgtaatcccagctattcggctgaggcacgagaatcatttgaacccaggacacggagattgcagtgagccaagatcacaccactgcactccagcctgggcaacagaacgagattctgtcttaaatgaatgagtgaatgaatgaagtgaattacaaaaaattttaaaatacaaaccaaatgttttgttaaattcaacagacataattatgtgtcagctgcatgcagtggctcatgcctgtaatcccaacactttgggaggaattacagggaccaggagtttgagactagcttggccaacatagtgaaaccccatctctaccaaaaaatataaaaattagccaagtatggtggcatatgcctatattctagctactcaggaggctgagatgggagagtcgcttaaacccaggaggtggaggttgaaatgagctgagatcatgccactgcactccagcccaggtgacagagggagactctctcaaagaaaaaggaaaaaaaattactgtgtctaatttctataaaatttttttttttacttattctcaatttctgtacttgtggatcagtagcaaacttcatggactggcatcagtatgaatgacatttgagtagcactgtttggtgtgcagcatactagagtagtgagagaaggaaacatctgtggacattgtatcaactgggaggccaccgaacattttgtcatgtttgttgaataacttatgcagcctaaggcagcctgtcagggcagtggtgtggcaaagccataatatttgtatggggctcattctactgagaggcatatctgctgttctgatagtgtagtctcctccatttttcctccagcactctgctctttgggaggcactgcagggtggctgtgactttggtcaggtgtagcttatgtttggccatctcttggttgatccagtttatttgtcttagtttcagtgatggccagagggttacaaaggatttggaatggagcatgtctcagggtgatgtgaactctgttgttgcctggatttccagatcatgtgacagagaatcagctggatcatttcagctgtccaggttatcagttagaataaagtttttaaaaactaaaatcttgggagcaaggaggcctctctgatgtaaagaaagatgagtagactggtttatcccttctatgcagttagtacatgagagtaccctggtcctttaagagccagagttctttggggtttttgtttgttttcccccattaaaaagcactagcatttattaggggaaaatgaggttctcctcaactcatgttttccctctctgtattgtggaaaatctgaacctcactctgaaagtgaatacatccatttgaaagggatggcaggttaccaagagtgtcatttaatgaaacccctctttttcttgaccaaaagagaccttgttttctttgagaagcaggagttcactttaatttttatgaacatctcacaccacttccacctaaccctacctactgtaatatgggctggcctgtcaagtcttgggcaagaatagtgataagatgctatcaggtcagaacccatattgttagagtagctgaaagattcaggagttcttattttgaactcttgcatgtagaatcattacaagatgtctcttaaatgcagttagagtgagaggaaagctggagctgtgggtggggaacatgtcagaggtggggctcagcaggaagtgggaccagtgcctgctggatgtggtagataagtaccggttttggattagggattgttttctcacttaccttctttaaaaaaagaatgtggccattagcctttggttctggcatggcattaggaatggcttattccagcagtcagcatgatttccaggttccatgtcttctacatggaaaacatgtcaaaggacaggagcagtgaccacctgacaacatcgcagtgggaggaaaagagaaatcatgtttattcctcaggaatgctgaagtaccctggagtaagctgtcattcttattataacaatgttattagtaatgctttaaactccagcacacttgttatgtatttgaaaccaagtctgtttcttgttttgtattttctctctggaaattgtaaggcggtggtcttaaatacattaaacaaaaataggaaaaaaagcagttaaaatttgatggcatatcagccagctgacccaattcttggcacagtcaacaagtatctttgatttgttttcagcagggctaagtcatcagatatgtcagaaggggtaaaaaaaaaaaacacctgtcttttagtcatttctttgctgtcccaaaaatctaagtattatagtgagtaacattagcttgcagtttttaatagttcatcaataagtctgaatccttgtcagttgccacactggctacccagaaaatttcaggcagttatatgcctcaggcagttatatgaaggtttatttccttcttatacattaaaaatagtgtgaaacatgattgaaaatacactgttttagtctcttgattttgtatccactttcaacattttaatatgaaaccttgacagagactttgctgtaattttggtcttgaggggcggggggactcatccaactcacagtacccagcagtctgagttcttcagataggcataaagaaacgagaagttacataatttttgttgaatgggtatggtgatgttggcaaatgattaagcctaagaaaaactgtttgtgtaccaggcacctgtaatcccagctactcgggagggtgaggcaggagaatcacttcaacccaggaggcagaggctacagtgagctgagatcgtaccacagcactgcatcctgggcgacagagtgagtgagactctgtctcaaaaaaaaaaaaaaaaaaaaacagaaaagctacaaaacattcacacattttgttgttttctatgtctctgtataaatgatgagctttaaagttaatcctcaattttaaatatacaaaatttttaatttgtacttttgataccatgcacttttggaaattttttattttttgagagcatgatacttatttcttacgctcatgtttgaaaaggtttagaaatgtggttgctaaattagttttaaaacaacaactgtgactgttttacctgtgtccaacatgttgagaactcaaaaagtagtaaatcgggctgtcttaatagtgcgcctgttactaatggaatttacttaaaaagtaagtttgccatatgaaagggtattaatatccttttcaagcataacatacaaatgaattttcatcttaaatatattaacttctgataagaaaacagatgctaggcctaaagatatttgctacataggaaaaatgatttttaaaaaatttgtctggggtgcctgtagtcccagctactcgggaggctgaggcaggggaatggcgtgaatccgggaggcgggtcttgcagtgagcagagatcgcgccaccgcactccagcctcgccgacaaagcgagactctgtgtcaa

SEQ ID NO: 2963 - DNA, 1380 bp, Homo sapien
cgttccgttagcggcgtggggttggctgcagtggcagtgctttctcttctgctcacggggacccgctcaggctggaggccagccagctcttgccgccacctcggtcgcgatgggggcgcaggaccggccgcagtgccacttcgacatcgagatcaaccgggagccggttggtcgcattatgtttcagctcttctcagacatatgtccaaaaacatgcaaaaacttcctttgcttgtgctcaggagagaaaggccttgggaaaacaactgggaagaagttatgttataaaggttctacgttccatcgtgtggttaaaaactttatgattcagggtggggacttcagtgaaggtaatggaaaaggtggagaatcaatttatggtggatattttaaagagaatgtggtcttttgcaaaatgaaaagatgaaaactttattctcaaacatgacagagcgttccttttatcaatggcaaatcgagggaaacataccaatggttcccagtttttcataaagagtgttacaccgtgcgctccaaagtaccacaaagcctgctccacacctggatggggtgcatgtagtctttggactggttatttctggttttgaagtaatcgaacaaattgaaaatctgaagaccgatgctgcaagcagaccatatgcagatgtgcgagttattgactgtggagtacttgccacaaaatcaataaacagatgtctttgagaaacacaccaggaagaaaacaatcattcagaaggctcggattcctcttccaattcctcctcttcttcagaatcatcttcagaaagtgaactttgaacatgagagaagcagaaggaggaaacataagaggaggccaaaaagttaaacgttctaaaaagaggcgaaaggaagcaagcagttcagaagagccaaggaataaacatgcaatgaacccaaaaggtcactctgagaggagtgataccaatgaaaaaaggtcagttgattccagtgctaaaagggaaaaacctgtggtccgcccagaagagattcctccagtgcctgagaaccgatttttactgagaagagatatgcctgttgttactgcagaacctgaaccattcctgatgttgcacccattgtaagtgatcagaaaccatctgtatcaaagtctggacggaagattaaaggaaggggcacaattcgctatcacacacctccaagatcaagatcctgttctgagtcagatgatgatgacagcagtgaaactcctcctcactggaaagaggaaatgcagagattaagagcatatagaccacctagtggagaaaaatggagtaaaggagataagttaagtgacccctgttcaagccgatgggatgaaagaagcttgtctcagag

SEQ ID NO: 2964 - protein, 141 aa, Homo sapien
VPLAAWGWLQWQCFLFCSRGPAQAGGQPALAATSVAMGAQDRPQCHFDIEINREPVGRIMFQLFSDICPKTCKNFLCLCSGEKGLGKTTGKKLCYKGSTFHRVVKNFMIQGGDFSEGNGKGGESIYGGYFKENVVFCKMKR

SEQ ID NO: 2965 - DNA, 2476 bp, Homo sapien
gctcctcctactgccttctgtgctagggaacacttcctgtttgagtgggacctgagttttgaaagcgtcttctgctcctcttcatctggtccctttccttccaagaccccagagaggaaggcatgcggtgggccccagccctgcttctagctttcctgcctcttgccagtcagaaatcttccaacttgcaagggagaaggaagtcagtcaccaggccagctgggtcatctgctgtaatcacttgtgatcttactgtaataaataccttctacatccactggtacctgcaccaggcggggaaggccccacagcatcttccatactatgacccctactactccagggttgtgttggaatcaagaatcagtagaggaaagtattttacttatgcaagcatgaggaggagctggaaattgatactgcaaaatctaattgaaaatgattctggatctattactgtgccacctgggacaggcacagtgattcacacctgccctacaccacactgaaaatctgccttgtgactgtttctggtacacaagatagaccagccccctctcatttgttgccaccgaatttactgtattctgtacaaagagaaacacagcataattcctgatctctcccctaatatcacactctcctggcagcagctgcaccttgttccccaccctcccccaggactttcctgaagacaagctgtcatcttcaggcctcagccaagcagcctggctgagagcaagactctctcagctctccgaggacatgggggaggcccactcactctgcttcctcggaccaacaggtacacctagggtccaactgcgaagcgagatattttggacagcaaatgggaaggatatttatactgaatcatatatctagagatcacagctgagagtgttgcttattctttatgtctataacaatataagcaatagtataattaccactaaaacactaagcctaggtatgcagttgaacattgtctccctctgctttcctttttgtctctctctctactttcttggttacttgctatttttctacacatccctttttctggcctcccctccctccctccctagctccctccctagcttgccttccttccttccttccttccttcctttcttcctccctctctccttcccttccttacttccttcctttctttcttcctccctctctccttcccttccttacttccttcctttctttcttcctccctctctccttcccttccttacttccttcctttcttcctccctccctctcttacttccttctttttttcctttcttccttttctctctctttctttcttttttgggcacacaatcagaatacagaatcattctctatatgttcatgccaactttgatacagctagtttattcgttcagttttcatttttatattttggaaatctgttgtattattttgatttgtatatgtaaaacctttacatggaactgaagtcaaaattataaaacaagatcaatttagagattttagcttccattctagaattctcttttctcttctgtgtctcaccctataggtaacaatatctttattagttcagttgaactttttcttatttattcagaagtctatcgctattacagaaatacctcttttgcttgtcatatatgtgcagtatgcattatttctatttgaatggcatatttatgtttttgttctgatattctgtttttatacatttcaatcaatcttttagtttctggtgtctggattttgtgtcctacttggaaaggtgaacatacttcagaagtatgcctaaagaaattcatatcatttcattaatattttattcatttattacttgatatgatctatctggaatttttatacaataattactatagcaataataataatactgatgataaatatgggtactgactttccggtagttactgtactaagcacattacatgtatattttatttaatcttcacagaaaccttatcaacgggtttaagtaacattgaatatagcagatgagaaagtgaggggttaactaacattccctaagtcatatagtttaatttgatagcaattgcaatccaagctctggggttcagaaaatgagatttgttcattcaatttgcattttcttatctttatgaatactagcattattttacaattttataggtcatttatacttcttcttttgtgaattgccttttcatactgtttgcctatccttctgttggggtattaattttttcttatttgtttgtaagaattaatatacaccattttcgagatattgatcctttatcaaacgtgttgaaaatatttctcatcatttgctattatttattttcagcaccttttggtgaactgaactttgtatattacttttaataaaatctatcaattttaaaaaaaaaaaaaaaaaaaaaaaaaaaaaaaaaaaaaaaaaaaaaaaaaaaaaaaaaaa

SEQ ID NO: 2966 - protein, 128 aa, Homo sapien [sequence omitted]

SEQ ID NO: 2967 - DNA, 1195 bp, Homo sapien
ggcacgaggcgccagtcccctaaccctgaggctgccgcgcggcggtcactgcgccggggtagtgggccccagtgttgcgctctctggccgttccttacactttgcttcaggctccagtgcaggggcgtagtgggatatggccaactcgggctgcaaggacgtcacgggtccagatgaggagagttttctgtactttgcctacggcagcaacctgctgacagagaggatccacctccgaaacccctcggcggcgttcttctgtgtggcccgcctgcaggattttaagcttgactttggcaattcccaaggcaaaacaagtcaaacttggcatggagggatagccaccatttttcagagtcctggcgatgaagtgtggggagtagtatggaaaatgaacaaaagcaatttaaattctctggatgagcaagaaggggttaaaagtggaatgtatgttgtaatagaagttaaagttgcaactcaagaaggaaaagaaataacctgtcgaagttatctgatgacaaattacgaaagtgctcccccatccccacagtataaaaagattatttgcatgggtgcaaaagaaaatggtttgccgctggagtatcaagagaagttaaaagcaatagaaccaaatgactatacaggaaaggtctcagaagaaattgaagacatcatcaaaaagggggaaacacaaactctttagaacataacagaatatatctaagggtattctatgtgctaatataaaatatttttaacacttgagaacagggatctgggggatctccacgtttgatccgttttcagcagtgctctgaaggagtatcttacttgggtgattccttgtttttagactataaaaagaaactgggataggagttagacaatttaaaaggggtgtatgagggcctgaaatatgtgacaaatgaatgtgagtaccccttctgtgaacactgaaagctattctcttgaattgatcttaagtgtctccttgctctggtaaaagatagatttgtagctcacttgatgatggtgctggtgaattgctctgctctgtctgagatttttaaaaatcagcttaatgagagtaatctgcagacaattgataataacattttgaaaattggaaagatggtatactgtttttagaggaataaacgtatttgtggtttaaaaaaaaaaaaaaaaaaaaaaa

SEQ ID NO: 2968 - protein, 188 aa, Homo sapien
MANSGCKDVTGPDEESFLYFAYGSNLLTERIHLRNPSAAFFCVARLQDFKLDFGNSQGKTSQTWHGGIATIFQSPGDEVWGVVWKMNKSNLNSLDEQEGVKSGMYVVIEVKVATQEGKEITCRSYLMTNYESAPPSPQYKKIICMGAKENGLPLEYQEKLKAIEPNDYTGKVSEEIEDIIKKGETQTL

SEQ ID NO: 2969 - DNA, 1263 bp, Homo sapien
cccacgcgtccgcccacgcgtccggctcgttccattctcggcggtggtacctgctcccggtggccctgaggacgtgtgggccaggggcggccccgaaattaggaagcggagggggagcagtctgcaggtctgcggggctaagtgtcgcggcggcgcacctcgcgtcaagaatccggaggaggagactgcaaggataggcccaggagtaatggagtccaaagaggaactagcggcaaacaatctcaacggggaaaatgcccaacaagaaaacgaaggaggggagcaggcccccacgcagaatgaagaagaatcccgccatttgggagggggtgaaggccagaagcctggaggaaatatcaggcgggggcgagttaggcgacttgtccctaattttcgatgggccatacctaataggcatattgagcacaatgaagcgagagatgatgtagaaaggtttgtagggcagatgatggaaatcaagagaaagactagggaacagcagatgaggcactatatgcgcttccaaactcctgaacctgacaaccattatgacttttgcctcataccttgaatcctaaaagttttcgctgaggttaatgtgaacactgctttacaagcttgtatttttgtgatttactttttctgtaagccttttggggtttacacttaccagtttctaatggaaattagaattctaattgaatattgttttgtctcagcctaaaagttacggtcagcatggcaattcacctattttaggaaaaatactcttttcataatatgaaatgcataaagcagttcaaaaagcagtctgtattccatcatcttcctttttcattccagtccttatttttgtaagtattacttttcctcctccggctacctggactcaaaatctcagttgtctttgacagtttttttcttgtccctgaccaaaaaagaatgatcatacccagaattcaatgtttgatattttaagaatgtatgttctagtgtttttcagagtgagtctaccatctgtataaaaacaccttgggggcaggcaggggcatttaaaaatgtaggacctatcgtccagactcacagagtggggctccagaatctccatttttaacaaactctcttaagtaattctgatgtgtaccaaaatcagtgccattggtgtgtgtgtacgtaactatatacatatgtgtgtgtgtgtatatatataatgtgtcataaccgtaaacaataaacaatatcaagataaaaaaaaaaaaaaaa

SEQ ID NO: 2970 - protein, 120 aa, Homo sapien
MESKEELAANNLNGENAQQENEGGEQAPTQNEEESRHLGGGEGQKPGGNIRRGRVRRLVPNFRWAIPNRHIEHNEARDDVERFVGQMMEIKRKTREQQMRHYMRFQTPEPDNHYDFCLIP

SEQ ID NO: 2971 - DNA, 2445 bp, Homo sapien
cctacccgcgcgcaggccaagttgctgaatcaatggagccctccccaacccgggcgttccccagcgaggcttccttcccatcctcctgaccaccggggcttttcgtgagctcgtctctgatctcgcgcaagagtgacacacaggtgttcaaagacgcttctggggagtgagggaagcggtttacgagtgacttggctggagcctcaggggcgggcactggcacggaacacaccctgaggccagccctggctgcccaggcggagctgcctcttctcccgcgggttggtggacccgctcagtacggagttggggaagctctttcacttcggaggattgctcaacaaccatgctgggcatctggaccctcctacctctggttcttacgtctgttgctagattatcgtccaaaagtgttaatgcccaagtgactgacatcaactccaagggattggaattgaggaagactgttactacagttgagactcagaacttggaaggcctgcatcatgatggccaattctgccataagccctgtcctccagatgtgaacatggaatcatcaaggaatgcacactcaccagcaacaccaagtgcaaagaggaagtgaagagaaaggaagtacagaaaacatgcagaaagcacagaaaggaaaaccaaggttctcatgaatctccaaccttaaatcctgaaacagtggcaataaatttatctgatgttgacttgagtaaatatatcaccactattgctggagtcatgacactaagtcaagttaaaggctttgttcgaaagaatggtgtcaatgaagccaaaatagatgagatcaagaatgacaatgtccaagacacagcagaacagaaagttcaactgcttcgtaattggcatcaacttcatggaaagaaagaagcgtatgacacattgattaaagatctcaaaaaagccaatctttgtactcttgcagagaaaattcagactatcatcctcaaggacattactagtgactcagaaaattcaaacttcagaaatgaaatccaaagcttggtctagagtgaaaaacaacaaattcagttctgagtatatgcaattagtgtttgaaaagattcttaatagctggctgtaaatactgcttggttttttactgggtacattttatcatttattagcgctgaagagccaacatatttgtagatttttaatatctcatgattctgcctccaaggatgtttaaaatctagttgggaaaacaaacttcatcaagagtaaatgcagtggcatgctaagtacccaaataggagtgtatgcagaggatgaaagattaagattatgctctggcatctaacatatgattctgtagtatgaatgtaatcagtgtatgttagtacaaatgtctatccacaggctaaccccactctatgaatcaatagaagaagctatgaccttttgctgaaatatcagttactgaacaggcaggccactttgcctctaaattacctctgataattctagagattttaccatatttctaaactttgtttataactctgagaagatcatatttatgtaaagtatatgtatttgagtgcagaatttaaataaggctctacctcaaagacctttgcacagtttattggtgtcatattatacaatatttcaattgtgaattcacatagaaaacattaaattataatgtttgactattatatatgtgtatgcattttactggctcaaaactacctacttctttctcaggcatcaaaagcattttgagcaggagagtattactagagctttgccacctctccatttttgccttggtgctcatcttaatggcctaatgcacccccaaacatggaaatatcaccaaaaaatacttaatagtccaccaaaaggcaagactgcccttagaaattctagcctggtttggagatactaactgctctcagagaaagtagctttgtgacatgtcatgaacccatgtttgcaatcaaagatgataaaatagattcttatttttcccccacccccgaaaatgttcaataatgtcccatgtaaaacctgctacaaatggcagcttatacatagcaatggtaaaatcatcatctggatttaggaattgctcttgtcatacccccaagtttctaagatttaagattctccttactactatcctacgtttaaatatctttgaaagtttgtattaaatgtgaattttaagaaataatatttatatttctgtaaatgtaaactgtgaagatagttataaactgaagcagatacctggaaccacctaaagaacttccatttatggaggatttttttgccccttgtgtttggaattataaaatataggtaaaagtacgtaattaaataatgtttttggtaaaaaaaaaaaaaaaaaaaaaaaaaaaaaaaaaaaaaaaaaaaaaaaaaaaaaaaaaaaaaaaaaaa

SEQ ID NO: 2972 - protein, 86 aa, Homo sapien
MLGIWTLLPLVLTSVARLSSKSVNAQVTDINSKGLELRKTVTTVETQNLEGLHHDGQFCHKPCPPDVNMESSRNAHSPATPSAKRK

SEQ ID NO: 2973 - DNA, 875 bp, Homo sapien
caagtactccaacaaaaagagagattatgctaacaccagtgactgtggcttatagtccaaagcgatcccctaaagaaaacttgtccccaggatttagtcatctgcttagcaaaaatgagagcagtccaattcgatttgatatacttttggatgatttagatactgttcctgtgtctacattacaacgtaccaatccaagaaagcaactccagtttcttcctctagatgactcggaagaaaaaacttattctgagaaagccaccgataaccatgttaatcatagctcttgccctgaaccggtgccaaatggagtgaagaaagtatctgtgagaacagcctgggagaagaataaatcagttagctacgaacagtgtaagccggtttcagtcactccacaggggaatgattttgaatatacagcaaaaattcggaccctagctgaaacagaacgattttttgatgaacttacaaaagaaaaggaccagattgaggcagcactaagcaggatgccttctcctggaggacgaatcactttacagacaagattaaatcagacccctcagatatgtgaggaatcaagccataaatgtgcatttgctggacattatgtaccatgtcatctctatgactacagatttcaaggataatttttacatctaacaatttcactgtaacagtgaccgataatgtgagaaatgtgctttttacagtgctgctggtgggtagacaagtgcttgctgcagttgtttctgaatctagccagatgctggagtcgtgaagctgtaagctccgcgggagcagggaccatctctctttcttgcactacaggcactcaataaatacttgtggctgtgaaaaaaaaaaaaaaaaaaaaa

SEQ ID NO: 2974 - DNA, 2970 bp, Homo sapien
cgcccgagccgcgcgcggagctgccgggggctccttagcacccgggcgccggggccctcgcccttccgcagccttcactccagccctctgctcccgcacgccatgaagtcgccgttctaccgctgccagaacaccacctctgtggaaaaaggcaactcggcggtgatgggcggggtgctcttcagcaccggcctcctgggcaacctgctggccctggggctgctggcgcgctcggggctggggtggtgctcgcggcgtccactgcgcccgctgccctcggtcttctacatgctggtgtgtggcctgacggtcaccgacttgctgggcaagtgcctcctaagcccggtggtgctggctgcctacgctcagaaccggagtctgcgggtgcttgcgcccgcattggacaactcgttgtgccaagccttcgccttcttcatgtccttctttgggctctcctcgacactgcaactcctggccatggcactggagtgctggctctccctagggcaccctttcttctaccgacggcacatcaccctgcgcctgggcgcactggtggccccggtggtgagcgccttctccctggctttctgcgcgctacctttcatgggcttcgggaagttcgtgcagtactgccccggcacctggtgctttatccagatggtccacgaggagggctcgctgtcggtgctggggtactctgtgctctactccagcctcatggcgctgctggtcctcgccaccgtgctgtgcaacctcggcgccatgcgcaacctctatgcgatgcaccggcggctgcagcggcacccgcgctcctgcaccagggactgtgccgagccgcgcgcggacgggagggaagcgtcccctcagcccctggaggagctggatcacctcctgctgctggcgctgatgaccgtgctcttcactatgtgttctctgcccgtaatttatcgcgcttactatggagcatttaaggatgtcaaggagaaaaacaggacctctgaagaagcagaagacctccgagccttgcgatttctatctgtgatttcaattgtggacccttggatttttatcattttcagatctccagtatttcggatattttttcacaagattttcattagacctcttaggtacaggagccggtgcagcaattccactaacatggaatccagtctgtgacagtgtttttcactctgtggtaagctgaggaatatgtcacattttcagtcaaagaaccatgattaaaaaaaaaaagacaacttacaatttaaatccttaaaagttacctcccataacaaaagcatgtatatgtattttcaaaagtatttgatatcttaacaatgtgttaccattctatagtcatgaaccccttcagtgcattttcatttttttattaacagcaactaaaattttatatattgtaacgagtgttaaaagtcttaaaaagcaatggtattaattgtccctacatttgtgcttggtggccctattttttttttttagagaggccttgagacatacaggtcttttaaaatacagtagaaacaccactgtttacgattatacgatggacattcataaaaagcataatttcttaccctattcattttttggtgaaacctgattcattgattttatatcattgccgatgtttagttcatttctttgccaattgatctaagcatagcctgaattatgatgttcctcagagaagtgaggtgggaaatatgaccaggtcaggcagttggaggggcttccccagccaccatcggggagtacttgctgcctcaggtggagacctgaagctgtaactagatgcagagcaagatatgactatagcccacaacccaaagaagcaaaaattcatttttatcttttgaaatcgagtttcttttgtattgagtcaagggtgtcagtaggaatcaaaagttgggggtgggttgcaaaatgttctttcagtttttagaacctccattttataaaagaattatcctatcaatggattctttagtggaaggatttatgcttctttgaaaaccagtgtgtgactcactgtagagccatgtttactgtttgactgtgtggcacaggggggcatttggcacagcaaaaagcccacccaggacttagcctcagttgatgatagtaacaatggccttaacatctaccttaacagctacctattacagccgtattctgctgtccgtggagacggtaagatcttaggttccaagattttacttcaaattacaccttcaaaactggagcagcatatagccgaaaaggagcacaactgagcactttaatagtaatttaaaagttttcaagggtcagcaatatgatgactgaaagggaaaagtggaggaaacgcagctgcaactgaagcggagactctaaacccagcttgcaggtaagagctttcacctttggtaaaagaacagctggggaggttcaaggggtttcagcatctctggagttcctttgtatctgacaatctcaggactccaaggtgcaaagcctgctgcatttgcgtgatctcaagacctccagccagaagtcccttccaaatataagagtactcatgtttatttatttccaactgagcagcaacctcctttgtttcacttatgttttttccagtatctgagataatataaagctgggtaattttttatgtaattttttggtatagcaaaactgtggaaaagccaaattaggcatacaaggagtatgatttaacagtatgacatgatgaaaaaaatacagttgtttttgaaatttaacttttgtttgtaccttcaatgtgtaagtacatgcatgttttattgtcagaggaagaacatgttttttgtattctttttttggagaggtgtgttaggataattgtccagttaatttgaaaaggccccagatgaatcaataaatataattttatagtaaaaaaaaaaaaaaaaaaaaaaaaaaaaa

SEQ ID NO: 2975 - protein, 359 aa, Homo sapien
MKSPFYRCQNTTSVEKGNSAVMGGVLFSTGLLGNLLALGLLARSGLGWCSRRPLRPLPSVFYMLVCGLTVTDLLGKCLLSPVVLAAYAQNRSLRVLAPALDNSLCQAFAFFMSFFGLSSTLQLLAMALECWLSLGHPFFYRRHITLRLGALVAPVVSAFSLAFCALPFMGFGKFVQYCPGTWCFIQMVHEEGSLSVLGYSVLYSSLMALLVLATVLCNLGAMRNLYAMHRRLQRHPRSCTRDCAEPRADGREASPQPLEELDHLLLLALMTVLFTMCSLPVIYRAYYGAFKDVKEKNRTSEEAEDLRALRFLSVISIVDPWIFIIFRSPVFRIFFHKIFIRPLRYRSRCSNSTNMESSL

SEQ ID NO: 2976 - DNA, 1821 bp, Homo sapien
agctctgcgaggggccggagcgcggcggagccatgcagtacccgcaccccgggccggcggcgggcgccgtgggggtgccgctgtacgcgcccacgccgctgctgcaacccgcacacccgacgcccttttacatcgaggacatcctgggccgcgggcccgccgcgcccacgcccgcccccacgctgccgtcccccaactcctccttcaccagcctcgtgtccccctaccggaccccggtgtacgagcccacgccgatccatccagccttctcgcaccactccgccgccgcgctggccgctgcctacggacccggcggcttcgggggccctctgtaccccttcccgcggacggtgaacgactacacgcacgccctgctccgccacgaccccctgggcaaacctctactctggagccccttcttgcagaggcctctgcataaaaggaaaggcggccaggtgagattctccaacgaccagaccatcgagctggagaagaaattcgagacgcagaaatatctctctccgcccgagaggaagcgtctggccaagatgctgcagctcagcgagagacaggtcaaaacctggtttcagaatcgacgcgctaaatggaggagactaaaacaggagaaccctcaaagcaataaaaaagaagaactggaaagtttggacagttcctgtgatcagaggcaagatttgcccagtgaacagaataaaggtgcttctttggatagctctcaatgttcgccctcccctgcctcccaggaagaccttgaatcagagatttcagaggattctgatcaggaagtggacattgagggcgataaaagctattttaatgctggatgatgaccactggcattggcatgttcagaaaactggatttaggaataatgttttgctacagaaaatcttcatagaagaactggaaggctatataagaaagggaatcaattctctggtattctggaaacctaaaaatatttggtgcactgctcaattaacaaacctacatggagaccttaattttgacttaacaaatagtttatgtactgctcttaggttgttttgataaagtgacattatagtgattaaattcttccccctttaaaaaaacagttagtggttttcactatttataaaaaattaattttgaactttttgttaaatttttaagttatagctttaaaggttttaataggaccttcttgaacgacttttctgtaatctgtttatctcccacttaatggaaaggcaaaggggtaccccaaatccagagctgcctacatttcaggcagccttggagtattttaaaaggaaaacattctttacttttatatgacattcttatactgctgtctcaaatccaaaaacatttcagagctcttgtctcagagatgtgtgttctttttgtcagagatatggttgatgagaatcttaaatgcttgttttgcactatcacttagtacctgtttgaccaaggtgttaaggggatagtacctcccaattcaagcagagaaactgacctgactaaagttaatcgcagatgaactagaagtcacaggttaattaaatgtaagtagattgtagatactgttttatatcaaacaatgtttataatgtgtatatagaattgttcactgtaaaaaaaatggccaaaatgtgttttttttttaataagtaacttgactataaaataaagccgtccgtgggacgactgacctcgtaaaaaaaaaaaaaaaaaaaaaaaaaaaaaaaaaaaaaaaaaaaaaaaaaaaaaaaaaaaaaaaaaaaaaaaaaaaaaaaaaaaaaaaaaaaaaaaaaa

SEQ ID NO: 2977 - protein, 270 aa, Homo sapien
MQYPHPGPAAGAVGVPLYAPTPLLQPAHPTPFYIEDILGRGPAAPTPAPTLPSPNSSFTSLVSPYRTPVYEPTPIHPAFSHHSAAALAAAYGPGGFGGPLYPFPRTVNDYTHALLRHDPLGKPLLWSPFLQRPLHKRKGGQVRFSNDQTIELEKKFETQKYLSPPERKRLAKMLQLSERQVKTWFQNRRAKWRRLKQENPQSNKKEELESLDSSCDQRQDLPSEQNKGASLDSSQCSPSPASQEDLESEISEDSDQEVDIEGDKSYFNAG

SEQ ID NO: 2978 - DNA, 1447 bp, Homo sapien
gagatagcaaagcagagtgtttatcttgtgagccattctccatatttcagatataagatttcagttctcagtgagtctaagtgacagaaggaatggagaccctcttgggcctgcttatcctttggctgcagctgcaatgggtgagcagcaaacaggaggtgacacagattcctgcagctctgagtgtcccagaaggagaaaacttggttctcaactgcagtttcactgatagcgctatttacaacctccagtggtttaggcaggaccctgggaaaggtctcacatctctgttgcttattcagtcaagtcagagagagcaaacaagtggaagacttaatgcctcgctggataaatcatcaggacgtagtactttatacattgcagcttctcagcctggtgactcagccacctacctctgtgctgtgagggacaatgacatgcgctttggagcagggaccagactgacagtaaaacccaatatccagaaccctgaccctgccgtgtaccagctgagagactctaaatccagtgacaagtctgtctgcctattcaccgattttgattctcaaacaaatgtgtcacaaagtaaggattctgatgtgtatatcacagacaaaactgtgctagacatgaggtctatggacttcaagagcaacagtgctgtggcctggagcaacaaatctgactttgcatgtgcaaacgccttcaacaacagcattattccagaagacaccttcttccccagcccagaaagttcctgtgatgtcaagctggtcgagaaaagctttgaaacagatacgaacctaaactttcaaaacctgtcagtgattgggttccgaatcctcctcctgaaagtggccgggtttaatctgctcatgacgctgcggctgtggtccagctgagatctgcaagattgtaagacagcctgtgctccctcgctccttcctctgcattgcccctcttctccctctccaaacagagggaactctcccacccccaaggaggtgaaagctgctaccacctctgtgcccccccggcaatgccaccaactggatcctacccgaatttatgattaagattgctgaagagctgccaaacactgctgccaccccctctgttcccttattgctgcttgtcactgcctgacattcacggcagaggcaaggctgctgcagcctcccctggctgtgcacattccctcctgctccccagagactgcctccgccatcccacagatgatggatcttcagtgggttctcttgggctctaggtcctgcagaatgttgtgaggggtttatttttttttaatagtgttcataaagaaatacatagtattcttcttctcaagacgtggggggaaattatctcattatcgaggccctgctatgctgtgtatctgggcgtgttgtatgtcctgctgccgatgccttcattaaaatgattggga

SEQ ID NO: 2979 - protein, 269 aa, Homo sapien
METLLGLLILWLQLQWVSSKQEVTQIPAALSVPEGENLVLNCSFTDSAIYNLQWFRQDPGKGLTSLLLIQSSQREQTSGRLNASLDKSSGRSTLYIAASQPGDSATYLCAVRDNDMRFGAGTRLTVKPNIQNPDPAVYQLRDSKSSDKSVCLFTDFDSQTNVSQSKDSDVYITDKTVLDMRSMDFKSNSAVAWSNKSDFACANAFNNSIIPEDTFFPSPESSCDVKLVEKSFETDTNLNFQNLSVIGFRILLLKVAGFNLLMTLRLWSS

SEQ ID NO: 2980 - DNA, 164 bp, Homo sapien
accctcttcactctttttcagccatagttcataccgagaaggtgaacatgatgtccctcacagtgcttgggctacgaatgctgtttgcaaagactgttgccgtcaattttctcttgactgccaagttatttttcttgtaaggtaagaattagccgcttcttatt

SEQ ID NO: 2981 - protein, 177 aa, Homo sapien
PSYTGGYADKLIFGKGTRVTVEPRSQPHTKPSVFVMKNGTNVACLVKEFYPKDIRINLVSSKKITEFDPAIVISPSGKYNAVKLGKYEDSNSVTCSVQHDNKTVHSTDFEVKTDSTDHVKPKETENTKQPSKSCHKPKAIVHTEKVNMMSLTVLGLRMLFAKTVAVNFLLTAKLFFL

SEQ ID NO: 2982 - DNA, 3961 bp, Homo sapien; identical to SEQ ID NO: 2770

SEQ ID NO: 2983 - protein, 1001 aa, Homo sapien; identical to SEQ ID NO: 2771

SEQ ID NO: 2984 - DNA, 3326 bp, Homo sapien
ggccagtccgcccggcggctcgcgcacggctccgcggtcccttttgcctgtccagccggccgcctgtccctgctccctccctccgtgaggtgtccgggttcccttcgcccagctctcccacccctacccgaccccggcgcccgggctcccagagggaactgcacttcggcagagttgaatgaatgaagagagacgcggagaactcctaaggaggagattggacaggctggactccccattgcttttctaaaaatcttggaaactttgtccttcattgaattacgacactgtccacctttaatttcctcgaaaacgcctgtaactcggctgaagccatgccttgtgttcaggcgcagtatgggtcctcgcctcaaggagccagccccgcttctcagagctacagttaccactcttcgggagaatacagctccgatttcttaactccagagtttgtcaagtttagcatggacctcaccaacactgaaatcactgccaccacttctctccccagcttcagtacctttatggacaactacagcacaggctacgacgtcaagccaccttgcttgtaccaaatgcccctgtccggacagcagtcctccattaaggtagaagacattcagatgcacaactaccagcaacacagccacctgcccccccagtctgaggagatgatgccgcactccgggtcggtttactacaagccctcctcgcccccgacgcccaccaccccgggcttccaggtgcagcacagccccatgtgggacgacccgggatctctccacaacttccaccagaactacgtggccactacgcacatgatcgagcagaggaaaacgccagtctcccgcctctccctcttctcctttaagcaatcgccccctggcaccccggtgtctagttgccagatgcgcttcgacgggcccctgcacgtccccatgaacccggagcccgccggcagccaccacgtggtggacgggcagaccttcgctgtgcccaaccccattcgcaagcccgcgtccatgggcttcccgggcctgcagatcggccacgcgtctcagctgctcgacacgcaggtgccctcaccgccgtcgcggggctccccctccaacgaggggctgtgcgctgtgtgtggggacaacgcggcctgccaacactacggcgtgcgcacctgtgagggctgcaaaggcttctttaagcgcacagtgcaaaaaaatgcaaaatacgtgtgtttagcaaataaaaactgcccagtggacaagcgtcgccggaatcgctgtcagtactgccgatttcagaagtgcctggctgttgggatggtcaaagaagtggttcgcacagacagtttaaaaggccggagaggtcgtttgccctcgaaaccgaagagcccacaggagccctctcccccttcgcccccggtgagtctgatcagtgccctcgtcagggcccatgtcgactccaacccggctatgaccagcctggactattccaggttccaggcgaaccctgactatcaaatgagtggagatgacacccagcatatccagcaattctatgatctcctgactggctccatggagatcatccggggctgggcagagaagatccctggcttcgcagacctgcccaaagccgaccaagacctgctttttgaatcagctttcttagaactgtttgtccttcgattagcatacagaatatgaacatcgacatttctgccttctcctgcattgctgccctggctatggtcacagagagacacgggctcaaggaacccaagagagtggaagaactgcaaaacaagattgtaaattgtctcaaagaccacgtgactttcaacaatggggggttgaaccgccccaattatttgtccaaactgttggggaagctcccagaacttcgtaccctttgcacacaggggctacagcgcattttctacctgaaattggaagacttggtgccaccgccagcaataattgacaaacttttcctggacactttacctttctaagacctcctcccaagcacttcaaaggaactggaatgataatggaaactgtcaagagggggcaagtcacatgggcagagatagccgtgtgagcagtctcagctcaagctgccccccatttctgtaaccctcctagcccccttgatccctaaagaaaacaaacaaacaaacaaaaactgttgctatttcctaacctgcaggcagaacctgaaagggcattttggctccggggcatcctggatttagaacatggactacacacaatacagtggtataaactttttattctcagtttaaaaatcagtttgttgttcagaagaaagattgctataatgtataatgggaaatgtttggccatgcttggttgttgcagttcagacaaatgtaacacacacacacatacacacacacacacacacacagagacacatcttaaggggacccacaagtattgccctttaacaagacttcaaagttttctgctgtaaagaaagctgtaatatatagtaaaactaaatgttgcgtgggtggcatgagttgaagaaggcaaaggcttgtaaatttacccaatgcagtttggctttttaaattattttgtgcctatttatgaataaatattacaaattctaaaagataagtgtgtttgcaaaaaaaaagaaaataaatacataaaaaagggacaagcatgttgattctaggttgaaaatgttataggcacttgctacttcagtaatgtctatattatataaatagtatttcagacactatgtagtctgttagattttataaagattggtagttatctgagcttaaacattttctcaattgtaaaataggtgggcacaagtattacacatcagaaaatcctgacaaaagggacacatagtgtttgtaacaccgtccaacattccttgtttgtaagtgttgtatgtaccgttgatgttgataaaaagaaagtttatatcttgattattttgttgtctaaagctaaacaaaacttgcatgcagcagcttttgactgtttccagagtgcttataatatacataactccctggaaataactgagcactttgaattttttttatgtctaaaattgtcagttaatttattattttgtttgagtaagaattttaatattgccatattctgtagtatttttctttgtatatttctagtatggcacatgatatgagtcactgcctttttttctatggtgtatgacagttagagatgctgattttttttctgataaattctttctttgagaaagacaattttaatgtttacaacaataaaccatgtaaatgaaaaaaaaaa

SEQ ID NO: 2985 - protein, 455 aa, Homo sapien
MPCVQAQYGSSPQGASPASQSYSYHSSGEYSSDFLTPEFVKFSMDLTNTEITATTSLPSFSTFMDNYSTGYDVKPPCLYQMPLSGQQSSIKVEDIQMHNYQQHSHLPPQSEEMMPHSGSVYYKPSSPPTPTTPGFQVQHSPMWDDPGSLHNFHQNYVATTHMIEQRKTPVSRLSLFSFKQSPPGTPVSSCQMRFDGPLHVPMNPEPAGSHHVVDGQTFAVPNPIRKPASMGFPGLQIGHASQLLDTQVPSPPSRGSPSNEGLCAVCGDNAACQHYGVRTCEGCKGFFKRTVQKNAKYVCLANKNCPVDKRRRNRCQYCRFQKCLAVGMVKEVVRTDSLKGRRGRLPSKPKSPQEPSPPSPPVSLISALVRAHVDSNPAMTSLDYSRFQANPDYQMSGDDTQHIQQFYDLLTGSMEIIRGWAEKIPGFADLPKADQDLLFESAFLELFVLRLAYRI

SEQ ID NO: 2986 - DNA, 3321 bp, Homo sapien
atggaggccgagcggggtcccgagcgccggcctgcggagcgtagcagcccgggccagacgccggaggagggcgcgcaggccttggccgagttcgcggcgctgcacggcccggcgctgcgcgcttcgggggtccccgaacgttactggggccgcctcctgcacaagctggagcacgaggttttcgacgctggggaagtgtttgggatcatgcaagtggaggaggtagaagaggaggaggacgaggcagcccgggaggtgcggaagcagcagcccaacccggggaacgagctgtgctacaaggtcatcgtgaccagggagagcgggctccaggcagcccaccccaacagcatcttcctcatcgaccacgcctggacgtgccgtgtggagcacgcgcgccagcagctgcagcaggtgcccgggctgctgcaccgcatggccaacctgatgggcattgagttccacggtgagctgcccagtacagaggctgtggccctggtgctggaggagatgtggaagttcaaccagacctaccagctggcccatgggacagctgaggagaagatgccggtgtggtatatcatggacgagttcggttcgcggatccagcacgcggacgtgcccagcttcgccacggcacccttcttctacatgccgcagcaggtggcctacacgctgctgtggcccctgagggacctggacactggcgaggaggtgacccgagactttgcctacggagagacggaccccctgatccggaagtgcatgctgctgccctgggcccccaccgacatgctggacctcagctcttgcacacccgagccgcccgccgagcactaccaggccattctggaggaaaacaaggagaagctgccacttgacatcaaccccgtggtgcacccccacggccacatcttcaaggtctacacggacgtgcagcaggtggccagcagcctcacccacccgcgcttcaccctcacccagagtgaggcggacgccgacatcctcttcaacttctcacacttcaaggactacaggaaactcagccaggagaggccaggcgtgctgctgaaccagttcccctgcgagaacctgctgactgtcaaggactgcctggcctccatcgcgcgccgggcaggtggccccgagggcccaccctggctgccccgaaccttcaacctgcgcactgagctgccccagtttgtcagctacttccagcagcgggaaaggtggggcgaggacaaccactggatctgcaagccctggaacctggcgcgcagcctggacacccacgtcaccaagagcctgcacagcatcatccggcaccgagagagcacccccaaggttgtgtccaagtacatcgaaagtcccgtgttgttccttcgagaagacgtgggaaaggtcaagttcgacatccgctacatcgtgctgctgcggtcagtgaggcccctacggttgttcgtgtatgatgtgttctggctgcggttctccaaccgggcctttgcactcaacgacctggatgactacgagaagcacttcacggtcatgaactatgacccggatgtggtgctgaagcaggtgcactgtgaagagttcatccccgagtttgagaagcaatacccagaatttccctggacggacgtccaggctgagatcttccgggccttcacggagctgttccaggtggcctgtgccaagccaccacccctgggcctctgcgactacccctcatcccgggccatgtatgccgtcgacctcatgctgaagtgggacaacggcccagatggaaggcgggtgatgcagccgcagatcctggaggtgaacttcaaccccgactgtgagcgagcctgcaggtaccaccccaccttcttcaacgacgtcttcagcaccttgtttctggaccagcccggtggctgccacgttacctgccttgtctaggcactcgctgtccccaaaacctgtgcttggggcaggattccaacctcagttctctgagctgcttctgcaaaggcccccatgtccctccccacaccggccctgggcatagcctcagccccaggcctctgtcctgccgagccatcctcccggcgccacactccgggagcacagcatcctcctctcacctgtgggtcagagcaggacagtgatggtgtccccagggctgagcaccaccccacgccctgccctcacccctcaccaccatctgtgcactgatgagtctccagtttagccaagggctttgttcctggcatggagaatttgttcctggctgctgtgtttccagggggtgctgggggaagggttccgtggagcgagacaaggtgtcctcgggagcagggttccaccgggaagcgtttgggagccctgtatcacacggggcaggcgggtttctcttccggggtctctgctcttatgcatcaggacgaccccgggacggctgtggggccccacactgcacccacagggctctatgcgacaggggcccaggaacagcctgaggccaccacccagcaagcccgccttatcacccattccagctcacccagaaccttcaccagcaaacctcctgctgaggtcctggcaggaggccaccgtcttgttaccgtttccttttcgtttgctgagggtcacagaccccaacagggaaatcagtatctgtcttcccagtggttgccctgctcgccgggcactccacggggtcccgcccttgtgtgagatgggccaggatccttcggcaaggggcgcctggggctggggctgattgtgggcggtggagcgccagacagaaaaggattccaatgagaacttcaggttaaagtcagatgccacctaccagggtctacagtcaaaatgttggctttttcttattttttaatgtatgggagaaaaatgtaaaattccagttcttttctaattgtgtttctgaaattaggagtcagctgccagcgtttttgtgtggctgcagtgtgcctgggcccagctcacgggcagtgggtggacctaactgcccaggcaggcgagagctacttccagagccttccagtgcatgggagggcagggctaggtgtagcggtgtctcctctttgaaattaagaactatctttcttgtagcaaagctgcacctgatgatgctgcctctcctctctgtgttgtctgggcccttgtttacaagcacgcgttacccttcctgaggggagccatgctctagcccctggagggcctgttgcaggggcagggcgggcccgtcgcctttggcagctcctggagagctgtggacatgcagtccccctcagttcgtgctgcaataaaggccatcttctctta

SEQ ID NO: 2987 - protein, 644 aa, Homo sapien
MEAERGPERRPAERSSPGQTPEEGAQALAEFAALHGPALRASGVPERYWGRLLHKLEHEVFDAGEVFGIMQVEEVEEEEDEAAREVRKQQPNPGNELCYKVIVTRESGLQAAHPNSIFLIDHAWTCRVEHARQQLQQVPGLLHRMANLMGIEFHGELPSTEAVALVLEEMWKFNQTYQLAHGTAEEKMPVWYIMDEFGSRIQHADVPSFATAPFFYMPQQVAYTLLWPLRDLDTGEEVTRDFAYGETDPLIRKCMLLPWAPTDMLDLSSCTPEPPAEHYQAILEENKEKLPLDINPVVHPHGHIFKVYTDVQQVASSLTHPRFTLTQSEADADILFNFSHFKDYRKLSQERPGVLLNQFPCENLLTVKDCLASIARRAGGPEGPPWLPRTFNLRTELPQFVSYFQQRERWGEDNHWICKPWNLARSLDTHVTKSLHSIIRHRESTPKVVSKYIESPVLFLREDVGKVKFDIRYIVLLRSVRPLRLFVYDVFWLRFSNRAFALNDLDDYEKHFTVMNYDPDVVLKQVHCEEFIPEFEKQYPEFPWTDVQAEIFRAFTELFQVACAKPPPLGLCDYPSSRAMYAVDLMLKWDNGPDGRRVMQPQILEVNFNPDCERACRYHPTFFNDVFSTLFLDQPGGCHVTCLV

SEQ ID NO: 2988 - DNA, 2646 bp, Homo sapien
cctacccgcgcgcaggccaagttgctgaatcaatggagccctccccaacccgggcgttccccagcgaggcttccttcccatcctcctgaccaccggggcttttcgtgagctcgtctctgatctcgcgcaagagtgacacacaggtgttcaaagacgcttctggggagtgagggaagcggtttacgagtgacttggctggagcctcaggggcgggcactggcacggaacacaccctgaggccagccctggctgcccaggcggagctgcctcttctcccgcgggttggtggacccgctcagtacggagttggggaagctctttcacttcggaggattgctcaacaaccatgctgggcatctggaccctcctacctctggttcttacgtctgttgctagattatcgtccaaaagtgttaatgcccaagtgactgacatcaactccaagggattggaattgaggaagactgttactacagttgagactcagaacttggaaggcctgcatcatgatggccaattctgccataagccctgtcctccaggtgaaaggaaagctagggactgcacagtcaatggggatgaaccagactgcgtgccctgccaagaagggaaggagtacacagacaaagcccatttttcttccaaatgcagaagatgtagattgtgtgatgaaggacatgatgtgaacatggaatcatcaaggaatgcacactcaccagcaacaccaagtgcaaagaggaaggatccagatctaacttggggtggctttgtcttcttcttttgccaattccactaattgtttgggtgaagagaaaggaagtacagaaaacatgcagaaagcacagaaaggaaaaccaaggttctcatgaatctccaaccttaaatcctgaaacagtggcaataaatttatctgatgttgacttgagtaaatatatcaccactattgctggagtcatgacactaagtcaagttaaaggctttgttcgaaagaatggtgtcaatgaagccaaaatagatgagatcaagaatgacaatgtccaagacacagcagaacagaaagttcaactgcttcgtaattggcatcaacttcatggaaagaaagaagcgtatgacacattgattaaagatctcaaaaaagccaatctttgtactcttgcagagaaaattcagactatcatcctcaaggacattactagtgactcagaaaattcaaacttcagaaatgaaatccaaagcttggtctagagtgaaaaacaacaaattcagttctgagtatatgcaattagtgtttgaaaagattcttaatagctggctgtaaatactgcttggttttttactgggtacattttatcatttattagcgctgaagagccaacatatttgtagatttttaatatctcatgattctgcctccaaggatgtttaaaatctagttgggaaaacaaacttcatcaagagtaaatgcagtggcatgctaagtacccaaataggagtgtatgcagaggatgaaagattaagattatgctctggcatctaacatatgattctgtagtatgaatgtaatcagtgtatgttagtacaaatgtctatccacaggctaaccccactctatgaatcaatagaagaagctatgaccttttgctgaaatatcagttactgaacaggcaggccactttgcctctaaattacctctgataattctagagattttaccatatttctaaactttgtttataactctgagaagatcatatttatgtaaagtatatgtatttgagtgcagaatttaaataaggctctacctcaaagacctttgcacagtttattggtgtcatattatacaatatttcaattgtgaattcacatagaaaacattaaattataatgtttgactattatatatgtgtatgcattttactggctcaaaactacctacttctttctcaggcatcaaaagcattttgagcaggagagtattactagagctttgccacctctccatttttgccttggtgctcatcttaatggcctaatgcacccccaaacatggaaatatcaccaaaaaatacttaatagtccaccaaaaggcaagactgcccttagaaattctagcctggtttggagatactaactgctctcagagaaagtagctttgtgacatgtcatgaacccatgtttgcaatcaaagatgataaaatagattcttatttttcccccacccccgaaaatgttcaataatgtcccatgtaaaacctgctacaaatggcagcttatacatagcaatggtaaaatcatcatctggatttaggaattgctcttgtcatacccccaagtttctaagatttaagattctccttactactatcctacgtttaaatatctttgaaagtttgtattaaatgtgaattttaagaaataatatttatatttctgtaaatgtaaactgtgaagatagttataaactgaagcagatacctggaaccacctaaagaacttccatttatggaggatttttttgccccttgtgtttggaattataaaatataggtaaaagtacgtaattaaataatgtttttggtaaaaaaaaaaaaaaaaaaaaaaaaaaaaaaaaaaaaaaaaaaaaaaaaaaaaaaaaaaaaaaaaaaa

SEQ ID NO: 2989 - protein, 149 aa, Homo sapien
MLGIWTLLPLVLTSVARLSSKSVNAQVTDINSKGLELRKTVTTVETQNLEGLHHDGQFCHKPCPPGERKARDCTVNGDEPDCVPCQEGKEYTDKAHFSSKCRRCRLCDEGHDVNMESSRNAHSPATPSAKRKDPDLTWGGFVFFFCQFH

SEQ ID NO: 2990 - DNA, 7869 bp, Homo sapien; identical to SEQ ID NO: 584

SEQ ID NO: 2991 - protein, 2004 aa, Homo sapien
MVKLANPLYTEWILEAIKKVKKQKQRPSEERICNAVSSSHGLDRKTVLEQLELSVKDGTILKVSNKGLNSYKDPDNPGRIALPKPRNHGKLDNKQNVDWNKLIKRAVEGLAESGGSTLKSIERFLKGQKDVSALFGGSAASGFHQQLRLAIKRAIGHGRLLKDGPLYRLNTKATNVDGKESCESLSCLPPVSLLPHEKDKPVAEPIPICSFCLGTKEQNREKKPEELISCADCGNSGHPSCLKFSPELTVRVKALRWQCIECKTCSSCRDQGKNADNMLFCDSCDRGFHMECCDPPLTRMPKGMWICQICRPRKKGRKLLQKKAAQIKRRYTNPIGRPKNRLKKQNTVSKGPFSKVRTGPGRGRKRKITLSSQSASSSSEEGYLERIDGLDFCRDSNVSLRFNKKTKGLIDGLTKFFTPSPDGRKARGEVVDYSEQYRIRKRGNRKSSTSDWPTDNQDGWDGKQENEERLFGSQEIMTEKDMELFRDIQEQALQKVGVTGPPDPQVRCPSVIEFGKYEIHTWYSSPYPQEYSRLPKLYLCEFCLKYMKSRTILQQHMKKCGWFHPPANEIYRKNNISVFEVDGNVSTIYCQNLCLLAKLFLDHKTLYYDVEPFLFYVLTQNDVKGCHLVGYFSKEKHCQQKYNVSCIMILPQYQRKGYGRFLIDFSYLLSKREGQAGSPEKPLSDLGRLSYMAYWKSVILECLYHQNDKQISIKKLSKLTGICPQDITSTLHHLRMLDFRSDQFVIIRREKLIQDHMAKLQLNLRPVDVDPECLRWTPVIVSNSVVSEEEEEEAEEGENEEPQCQERELEISVGKSVSHENKEQDSYSVESEKKPEVMAPVSSTRLSKQVLPHDSLPANSQPSRRGRWGRKNRKTQERFGDKDSKLLLEETSSAPQEQYGECGEKSEATQEQYTESEEQLVASEEQPSQDGKPDLPKRRLSEGVEPWRGQLKKSPEALKCRLTEGSERLPRRYSEGDRAVLRGFSESSEEEEEPESPRSSSPPILTKPTLKRKKPFLHRRRRVRKRKHHNSSVVTETISETTEVLDEPFEDSDSERPMPRLEPTFEIDEEEEEEDENELFPREYFRRLSSQDVLRCQSSSKRKSKDEEEDEESDDADDTPILKPVSLLRKRDVKNSPLEPDTSTPLKKKKGWPKGKSRKPIHWKKRPGRKPGFKLSREIMPVSTQACVIEPIVSIPKAGRKPKIQESEETVEPKEDMPLPEERKEEEEMQAEAEEAEEGEEEDAASSEVPAASPADSSNSPETETKEPEVEEEEEKPRVSEEQRQSEEEQQELEEPEPEEEEDAAAETAQNDDHDADDEDDGHLESTKKKELEEQPTREDVKEEPGVQESFLDANMQKSREKIKDKEETELDSEEEQPSHDTSVVSEQMAGSEDDHEEDSHTKEELIELKEEEEIPHSELDLETVQAVQSLTQEESSEHEGAYQDCEETLAACQTLQSYTQADEDPQMSMVEDCHASEHNSPISSVQSHPSQSVRSVSSPNVPALESGYTQISPEQGSLSAPSMQNMETSPMMDVPSVSDHSQQVVDSGFSDLGSIESTTENYENPSSYDSTMGGSICGNSSSQSSCSYGGLSSSSSLTQSSCVVTQQMASMGSSCSMMQQSSVQPAANCSIKSPQSCVVERPPSNQQQQPPPPPPQQPQPPPPQPQPAPQPPPPQQQPQQQPQPQPQQPPPPPPPQQQPPLSQCSMNNSFTPAPMIMEIPESGSTGNISIYERIPGDFGAGSYSQPSATFSLAKLQQLTNTIMDPHAMPYSHSPAVTSYATSVSLSNTGLAQLAPSHPLAGTPQAQATMTPPPNLASTTMNLTSPLLQCNMSATNIGIPHTQRLQGQMPVKGHISIRSKSAPLPSAAAHQQQLYGRSPSAVAMQAGPRALAVQRGMNMGVNLMPTPAYNVNSMNMNTLNAMNSYRMTQPMMNSSYHSNPAYMNQTAQYPMQMQMGMMGSQAYTQQPMQPNPHGNMMYTGPSHHSYMNAAGVPKQSLNGPYMRR

SEQ ID NO: 2992 - DNA, 660 bp, Homo sapien
ctgaaaaaaatggataaagaaggtaaaacattaaaaaaacataaattgaagcataaagagagggaaaaagaaaagcataaaaaagaaattgaaggtgaaaaggaaaaatacaaaactaaggatagtgccaaagaactgcagaggagtgtggaatttgatagagaattttgggaaagagaatttttttaaaagtgatgaaactgaagatctctttttaaatatggaacatgaatccttaacattagaaaaaaaatcaaaattggaaaaaaacatcaaagatgataaatcaaccaaggaaaagcatgtgtcaaaagagaggaactttaaagaggaacgagacaagattaaaaaggaaagcgagaatttacttctttggggtatgagtgccattgaggaatctatagggcttcatttagtggaaaaggaaatagacattgaaaaacaagaaaagcatataaaggaaagtaaagaaaaacctgagaagcgatctcaaattaaagaaaaggacattgagaagatggaaagaaaaacctttgacaaaggacaagcttatattcgcatcacacagacaaaatggccatacaagaagggtgagaaggagcaaaaatactgctgcttattaaaaaaacctgacggacagagagaaaagtaggagaaagg

SEQ ID NO: 2993 - DNA, 1807 bp, Homo sapien
ctggaaggagtcatggcggatggtcaggtggcggaactgctgctccggcggctggaggcgtctgatggcggcctggacagcgccgagttggcggctgagctgggcatggagcaccaggcggtggtgggcgccgtgaagagccttcaggcgctgggcgaggtcatcgaggctgaacttcggtccaccaagcactgggagcttactgcggagggcgaggagattgcccgggagggcagccatgaggcccgtgtgtttcgaagcattcccccagagggcctggcccagagcgagcttatgcgactgcccagtggcaaagtgggcttcagcaaggccatgtccaacaagtggattcgggtggacaagagtgcggctgacgggccccgggtgttccgagtggtggacagcatggaggatgaggtgcagcggcggctccagctggtccgggggggacaggctgagaagctgggggagaaggagaggagcgagctgaggaagaggaagctgttggctgaagtgactctgaagacctactgggtgagcaaaggcagtgcctttagtaccagcatctccaagcaagagacagagctgagcccagagatgatctccagtggctcttggcgggaccggcccttcaagccctacaacttcttggcccacggtgtcctccccgacagcggccaccttcacccgctgctcaaggtccgctcccagttccgacagatcttcctggagatggggttcaccgagatgccgactgataacttcattgagagctccttctggaactttgacgccctcttccagccccagcagcacccagcccgtgaccagcacgacaccttcttccttcgagatccagcggaggccctgcagctcccaatggactatgtccagcgggtcaagcggacccactctcagggcggctacggctcacaggggtacaagtataactggaagctggacgaggcccggaaaaacctactgcgaacccacaccacatcagccagcgcccgtgcgctctaccgccttgcccagaagaagcccttcactccggtcaagtacttctccatcgaccgcgtattccggaatgagaccctggacgccacgcacctggctgagttccaccagatcgagggcgtggtggcggatcatggtctcaccttgggccacctcatgggcgttctgcgggagttcttcaccaagctgggtatcacgcaactccgcttcaagccagcctacaacccatacacagagcccagcatggaggtgttcagctaccaccaaggcctgaagaagtgggtggaggtcggaaactcgggggtcttccgtccagagatgctgctgcccatggggcttcccgagaacgtgtcggtcattgcctggggcctctccctggagcgcccaacgatgatcaaatatggcatcaacaatatccgggagctggtgggccacaaggtgaacctgcagatggtgtatgacagtcccctgtgccgcctggatgccgagccgaggccccctcccacacaggaggctgcgtgacatgggccactctaggacaggtcatcctccccgagtccctgctgctgcgctcctttgcatccctggccagtgaccttgtatttatgaggctctgtgaggccagcccccaccttcctctttcccacctgtcccaggaccagaatcccagggacagaggactgggtagcaggttccttctgttgtcctgtgtggtgtgtctactgtgagggtgggccctgaggagacctgtgggccacctattgtctaataaagtgggcagttgccccca

SEQ ID NO: 2994 - protein, 508 aa, Homo sapien
MADGQVAELLLRRLEASDGGLDSAELAAELGMEHQAVVGAVKSLQALGEVIEAELRSTKHWELTAEGEEIAREGSHEARVFRSIPPEGLAQSELMRLPSGKVGFSKAMSNKWIRVDKSAADGPRVFRVVDSMEDEVQRRLQLVRGGQAEKLGEKERSELRKRKLLAEVTLKTYWVSKGSAFSTSISKQETELSPEMISSGSWRDRPFKPYNFLAHGVLPDSGHLHPLLKVRSQFRQIFLEMGFTEMPTDNFIESSFWNFDALFQPQQHPARDQHDTFFLRDPAEALQLPMDYVQRVKRTHSQGGYGSQGYKYNWKLDEARKNLLRTHTTSASARALYRLAQKKPFTPVKYFSIDRVFRNETLDATHLAEFHQIEGVVADHGLTLGHLMGVLREFFTKLGITQLRFKPAYNPYTEPSMEVFSYHQGLKKWVEVGNSGVFRPEMLLPMGLPENVSVIAWGLSLERPTMIKYGINNIRELVGHKVNLQMVYDSPLCRLDAEPRPPPTQEAA

SEQ ID NO: 2995 - DNA, 8467 bp, Homo sapien
ttccccaaattgatggacataaacccatatgcttatctcagcatgtgtttaaaaagcacttgctgagattcagtgaccatccaacattaaaaactgctgatagaaggaaactcacttagctgaattaaggacgtgttcttaaaatctaccgccaacgtaatggggaggagctcacggcgttcgttaatttattcattccgcaaatatgttttgggcagttacataccgaatagtagatggaggtgtgcctgctgtcatggagatagggtgatttcatcctgttgatcaggaaaactcctaggtgcttgcaggtaaatgtgccacaaagaaagtgaggaccaaaggttagttgatgtaaaaacaagtttgaaatgcattttggggtaatttatccggtcgcttcgggcattcctcgcggaaggcgtggtctggtgactcagaagccaacacactgcgggagtccagccgtcggccccctgccgtgtggcgaggcccagtgtgtcccctttgtaaggacagcacaagcaggagttaatggaccggccatccatagcggtggtggggcagggagccagtttccgaaagaaactcacgccgccgcaggagggccctgtgggatgctctgtgcagagctgttgtgcggaccgggagacgggaaagcctggtggctgcaggagggcaccgtgcagaagtatccagtaaaccacccacagcacggcagcagaaaaacgaggaaattatatgtgtgtatgtttataagaactcagaagcaatggtgagcaaaaagcaaaagcaagaggagaaagtcacagtgtgctggcatcaagttgcattgagaggagcccgcggggtagtgcacccgcatttcctcgttgcgttgagaggcgcccgcggggtagtgcacccgcatttcctcgtttgagaggcgcccgcggggtagtgcacccgcatttcctagttgccttgagaggtgccgcggggtagtgcacccgcatttcctagttgccttgagaggtgcccgcggggtagtgcacccgcatttcctagttgccttgagaggtgccgcggggtagtgcacccgcatttcctcgtttcattgagcggtgcccgcggggtagtgcactcgcatttcctagttgccttgagaggtgccgcggggtagtgcacccacatttcttcactcgtttagagttcggggctctcagaacacagggagaatatgggagaattccttactagatgttacagaggccacacagggccacttttttcttttttttttattgtgtcaggtatacgtaaatattcctttcggtcagttcagcacgtaggactgagtggcattaggtacgctcactgtacagccaatgcctccataggccactttttaaatacgcggggctaagggccaacgacaagattgtcatcgaggacaataagtcgatggcgctgcctggtcactggcttggtcagaaaacacatgccagggtgactggatttaacgttcagttttagaaccacaaatctgccagcccaggcattcaagaggaagtgagtaattcactgaattgatggttagcaagacccttcaaagtccttggaagttccgtgtttgctgggggtcacaacagcaattgcgtttctaaaacattgaaaaccacccgtttttcacacatctgaatagcctgagttgtaacagacctaagtaaaggcgtccaaacgtgcctgatcctgtggctgggtcccaggagccttaacaaggcattgagagagctggattgattgattagactcttgccaactgctgtgcggaatacagaaaatgcagctccagctctcaaagggctgaaaatctaattgaggtgaaaaaggtaacatgtgtgaaaaccatgtctgtgtagacttgttttgtatggaccagaaaagttggaagtccagagatggatgcgaggaagtaggggatggagtttccttataacctctggagggacagtccagatacataccggggtgtgtagcgggtggaggttctaagacaggctggaggaacagtgcagacacacaccagggtgtgtagggggtagaggttctaagacagtctggagggagagtgcagacacacaccggggtgtgtaagcagtggaggttctaagacaggctggaggaacagtggagacacacaccagggcgtgtagggggtagaggttctaagacaggctggaggaacagtggagacacacaccacggcgtgtagggggtagaggttctaagacagtctggtgggagagtgcagacacacccggggccgtgtagggggtacaggttctaagacagtctggtgggagagtgcagacacacacggggctgtgtcggggatagaggttctaagacagtctggtgggagagtgcagacacacaccagggcgtgtagggggtggaggttctaagacaggctggaggaacagtggagacacacactggggagcataggggtgcttttctctgagtcccctagtacatggtagaggctgtagaccctccgctcttgggcacgtgggtaggctctcaggatgactcttggctcttgggcatgtgggtgagctctcaggatgatgcccagccccaattttcaggcaattgtgcaaggacttgacccattcatccgctgagctgagttgctgagactgctgggtgcccgggtggtgatcattgtccgtggcatacagaacacactgcagcttctgcaaagtgagctcatttcacgcattttatggctttgccaggctgctgttgacctgccagaacttttaatcagacatttggaggacctgttttgtagtcagtggagaaatattacaaggatagggtaatttgaaatatctaaggattgtaagtgacaagttcatgtctaattttgcatttccagtgaaagcaagtgttggctttgaatgttacttatgtgctgagatgtgtatattcctcagtgcttaattactaaggatttttagggccaagttttgttacagtgaatgattgtggatgcataaagaataaatttaatatttttaaggcatggagattatttgtatctaagaaaccaggtaaaataaagaaacatttatgcttgtgtgactgataaaagagttagagagacactcatattctgggagtttgaagaatgtcattttcattctctaaaagtcttgttagtgtcacagcattgaaaatttaaaaatccgtgtgtattttcttgctagtgctggtacttgaatatctgtatcatccacctatccatccacctacccatatttctataatccaccgtccctcgacatgcctatcatctgtccaccatttctctctgtctaattttcaaaacatcctgtaagtttatataaaggaagatttttcttcttgtgaagttctctaaggctgacaagttacctggcatgactgtggcggatgcccatagccaggtggtcctcggggtacagatggggcaggggcacttgtgagaaacacctgaagtgcttttccccagcctccccggccctgccgggtggtggaggcgctgcacggtgccttccatggagcaagcccggggctccgcagggtcctcagcatgattcagatttccttccacccccagctctagatgatttggtaaaaccacaaacaggcacaaaacagcccacatggaattctaaagttttaatttcattttggaatttatgcactcagatgaaatgatttatgatgatgttgagaatggggatgaaggtggaaacagctccttggaatacggatggagttcgagtgaatttgaaagttacgaagagcagagtgactcggagtgcaagaatgggattcccaggtccttcctgcgcagcaaccacaaaaagcaactttctcatgacctaacccgtttaaaggagcactatgagaaaaagatgagagatttgatggcaagcacggtgggcgtggtggagattcagcagctcaggcagaagcatgaactgaagatgcagaagctcgtgaaggccgcgaaggacggcaccaaggacgggctggagaggaccagggcagccgtgaagaggggccgctccttcatcaggaccaagtctctcatcgcacaggatcacagatcttctcttgaggaagaacagaatttgttcattgatgttgactgcaagcacccggaagccatcttgaccccgatgcccgagggtttatctcagcagcaggttgtaagaagatatatactgggttcagttgtcgacagtgaaaagaactacgtagatgctcttaagaggattttggagcaatatgagaagccgctgtctgagatggagccaaaggttctgagtgagaggaagctgaagacggtgttctaccgagtcaaagagatcctgcagtgccactcgctatttcagatcgcgctggccagccgcgtttccgagtgggactccgtggaaatgataggcgatgtcttcgtggcttcgttttctaagtccatggtgctggatgcatacagtgaatatgtgaacaatttcagcacagccgtggcagtcctcaagaaaacatgtgccacaaagcccgcttttcttgaatttttaaagcaggaacaggaggccagccccgatcgaaccacgctctacagcctgatgatgaagcccatccagaggttcccacagttcatcctcctgctccaggacatgctgaagaacacctccaaaggccaccccgacaggctgcctcttcagatggccctgacagagctcgaaacactagcagagaagttaaatgaaagaaagagagatgctgatcaacgctgtgaagtgaagcaaatagccaaagccataaacgaaagatacctgaacaagcttctcagcagtggaagccgatacctcattcgatcagatgatatgatagaaacagtttacaacgacagaggagagattgttaaaaccaaagaacgccgagtcttcatgttaaatgatgtgttaatgtgtgccaccgtcagctcacgcccctctcatgacagccgtgtgatgagcagccagaggtacttgctgaagtggagcgttccactgggacatgtggacgccatcgagtatggcagcagcgcaggcacgggcgagcacagcaggcaccttgccgttcacccgccggagagcctggccgtggttgctaacgcgaaaccaaacaaagtttacatggggccaggacaactgtatcaagatttacaaaacttgttgcatgacttaaatgtaattggccaaatcactcagctgataggaaaccttaaaggaaactatcagaacttaaaccagtcagtagcccatgactggacatcaggtttacaaaggcttattttgaagaaagaagatgaaatcagagctgcggactgctgcagaattcagttacagcttcccgggaagcaggacaaatctgggcgaccgacgttctttacagctgtgttcaatacgttcacccctgccatcaaggagtcctgggtcaacagcttacagatggccaagctcgccctagaagaggagaaccacatgggctggttctgtgtggaagacgatgggaatcacattaaaaaggagaagcatcctctcctcgtcggacacatgcccgtgatggtggccaagcagcaggagttcaagattgaatgtgctgcttataaccctgaaccttacctaaataatgaaagccagccagattcattttccacggcacatggtttcctgtggatcggaagttgcacccatcaaatgggtcagattgccatcgtctcgtttcaaaattccactcccaaagtcattgagtgcttcaacgtggaatctcgcatcctgtgcatgctgtacgttcccgtcgaggagaagcgcagagagcctggggcacccccggaccccgagaccccggccgtgagagcttctgatgtccccacgatctgtgtagggacggaggagggaagcatttccatttataaaagcagtcaaggctccaagaaagtgagacttcagcactttttcactcctgagaagtccacagtcatgagcctggcttgcacgtctcagagcctgtacgctggcctggtcaacggggcagtcgccagctacgccagagccccagatggatcctgggattcagaacctcaaaaagtgatcaagttaggcgtcctaccagttagaagtctactcatgatggaagacacgttgtgggcggcttccggaggtcaagtcttcatcatcagtgtggagactcatgctgtagagggtcagctggaggcccaccaggaggaaggcatggtgatctcccacatggccgtgtccggcgtcgggatctggattgccttcacctcagggtccacgctccgcctttttcacacggaaactctcaagcacctgcaggacatcaacatcgccacccctgttcacaacatgctgccagggcaccagcggctgtcggtgacgagcctgctcgtctgccacggattgctgatggtcggcaccagcctgggagtcctcgtggccctgccggtcccacgtctgcaagggattcccaaagtgaccggaagaggcatggtctcctaccatgcacacaacagtcctgtcaaattcatcgtcctggccacggctctgcacgagaaagacaaggacaaatccagggacagcctggctcctggccccgagcctcaggacgaagaccagaaggacgcacttccgagtggaggagctggttcatctctgagccagggtgaccctgacgcagccatctggttgggagattcgctgggatcgatgactcagaaaagcgacctgtcctcctcatctgggtccctgagcttgtctcacggctccagctctctagagcacagatcagaggacagcaccatctatgatctcctgaaggatcctgtctcgctgagaagcaaagcacgccgggccaagaaagccaaggccagctcggcgctggtggtctgtggagggcagggccaccgccgggtgcacaggaaggcccggcagccccaccaggaagagctggcgccgaccgtcatggtctggcagatccctctgctgaatatataagcaggacggccgccttctgctgtcagaatttgcaatcaagggtgacttctcagctaatcctacagcctgagtggttaagctgtgtctacactggttgggaataaattaaaaacagtatttgggggagaaacgtgcaatagcgtaatggtggtgtccctgccaattccttccttctcttctgtacagcagaagtaattacaagcacttctcacgaaggcagaagactgatgcaattttcgagtaattgagtgcagttctgggaaaataccacattctttttgactgctgtagtccatatatgaatactaaatgttaaacttcatcagcgtcagacctattgtatcatattagagaatttgcagactaagaatttatgagaaaatatatgtattcagtagtgcaggcatttattaacaattcttaaaagttttacctgattcagattcacgacttttatttatattctatatttttgaatttcagagtaaaatttgttaacaattttaaaagccaggtaacacctaccagtccagttagcatgatttgctttcagaagtgagctgggttttccaaagtggtataatgtgtgtactgtatattttaacaaagtaatatttttgtattgcatttttctattaaaaaattaacagttaatgtttcagtcaatgtattatctgtagcatttcacaaataatgtttgctttgaaccaaaatgctcagtgcctatcaacatttggactcaagcatcaacaccaaattattcctcccttctcgtataaatagagtgactatccacaggagaaaagtgtgtgctttagtattagaggagataggcagagaagtcttgcttagttccttcgtgcagcttcttgcccctgttgacgtggaatgctgtgtctgctttagcacgcacgctccgaatgactcctggtgctaggccatgctggctgctgtcactgagcgggactcaggccaagaggcgtgacctcgggccagcctgtctgttgtgcagacgcctcctctgcagaacgcatcagtttctattctgcagttgcagagccagccccgcgtgagaacgtgcataatgagtgcacaccatcatgtcaaggtgcatacttagtgagcgccatcctgctgaacgtgtatttcagtgtttcacttactggacggataacaagaaaaaaatcctaacacaggcagtcaccagaaataaatgtctcagcactttacagatgactaaaaatgttaattttatgacttagccaaatatgttctaggttgcatatatcccccatgtgaaagtgatttcttcccaagcttctcaaactgttagctgctgtctgacttcatcaataaagtatttttatttt

SEQ ID NO: 2996 - protein, 1121 aa, Homo sapien
MHSDEMIYDDVENGDEGGNSSLEYGWSSSEFESYEEQSDSECKNGIPRSFLRSNHKKQLSHDLTRLKEHYEKKMRDLMASTVGVVEIQQLRQKHELKMQKLVKAAKDGTKDGLERTRAAVKRGRSFIRTKSLIAQDHRSSLEEEQNLFIDVDCKHPEAILTPMPEGLSQQQVVRRYILGSVVDSEKNYVDALKRILEQYEKPLSEMEPKVLSERKLKTVFYRVKEILQCHSLFQIALASRVSEWDSVEMIGDVFVASFSKSMVLDAYSEYVNNFSTAVAVLKKTCATKPAFLEFLKQEQEASPDRTTLYSLMMKPIQRFPQFILLLQDMLKNTSKGHPDRLPLQMALTELETLAEKLNERKRDADQRCEVKQIAKAINERYLNKLLSSGSRYLIRSDDMIETVYNDRGEIVKTKERRVFMLNDVLMCATVSSRPSHDSRVMSSQRYLLKWSVPLGHVDAIEYGSSAGTGEHSRHLAVHPPESLAVVANAKPNKVYMGPGQLYQDLQNLLHDLNVIGQITQLIGNLKGNYQNLNQSVAHDWTSGLQRLILKKEDEIRAADCCRIQLQLPGKQDKSGRPTFFTAVFNTFTPAIKESWVNSLQMAKLALEEENHMGWFCVEDDGNHIKKEKHPLLVGHMPVMVAKQQEFKIECAAYNPEPYLNNESQPDSFSTAHGFLWIGSCTHQMGQIAIVSFQNSTPKVIECFNVESRILCMLYVPVEEKRREPGAPPDPETPAVRASDVPTICVGTEEGSISIYKSSQGSKKVRLQHFFTPEKSTVMSLACTSQSLYAGLVNGAVASYARAPDGSWDSEPQKVIKLGVLPVRSLLMMEDTLWAASGGQVFIISVETHAVEGQLEAHQEEGMVISHMAVSGVGIWIAFTSGSTLRLFHTETLKHLQDINIATPVHNMLPGHQRLSVTSLLVCHGLLMVGTSLGVLVALPVPRLQGIPKVTGRGMVSYHAHNSPVKFIVLATALHEKDKDKSRDSLAPGPEPQDEDQKDALPSGGAGSSLSQGDPDAAIWLGDSLGSMTQKSDLSSSSGSLSLSHGSSSLEHRSEDSTIYDLLKDPVSLRSKARRAKKAKASSALVVCGGQGHRRVHRKARQPHQEELAPTVMVWQIPLLNI

SEQ ID NO: 2997 - DNA, 1497 bp, Homo sapien; identical to SEQ ID NO: 1171

SEQ ID NO: 2998 - protein, 363 aa, Homo sapien; identical to SEQ ID NO: 1172

SEQ ID NO: 2999 - DNA, 2871 bp, Homo sapien
gccccgcgccgcgccggacccgagcatatttcattttctgtcattggactttgagccattagaaccatgagcaactacagtgtgtcactggttggcccagctccttggggtttccggctgcagggcggtaaggatttcaacatgcctctgacaatctctagtctaaaagatggcggcaaggcagcccaggcaaatgtaagaataggcgatgtggttctcagcattgatggaataaatgcacaaggaatgactcatcttgaagcccagaataagattaagggttgtacaggctctttgaatatgactctgcaaagagcatctgctgcacccaagcctgagccggttcctgttcaaaagcccaccaagaaaacacattgtggagcgctatacagagttttatcatgtacccactcacagtgatgccagcaagaagagactgattgaggatactgaagactggcgtccaaggactggaacaactcagtctcgctctttccgaatccttgcccagatcactgggactgaacatttgaaagaatctgaagccgataatacaaagaaggcaaataactctcaggagccttctccgcagttggcttcctcggtagcttccacacggagcatgcccgagagcctggacagcccaacctctggcagaccaggggttaccagcctcacaactgcagctgccttcaagcctgtaggatccactggcgtcatcaagtcaccaagctggcaacggccaaaccaaggagtaccttccactggaagaatctcaaacagcgctgcttactcaggatcagtggcaccagccaactcagctttgggacaaacccagccaagtgaccaggacactttagtgcaaagagctgagcacattccagcagggaaacgaactccgatgtgcgcccattgtaaccaggtcatcagaggaccattcttagtggcactggggaaatcttggcacccagaagaattcaactgcgctcactgcaaaaatacaatggcctacattggatttgtagaggagaaaggagccctgtattgtgagctgtgctatgagaaattctttgcccctgaatgtggtcgatgccaaaggaagatccttggagaagtcatcaatgcgttgaaacaaacttggcatgtttcctgttttgtgtgtgtagcctgtggaaagcccattcggaacaatgtttttcacttggaggatggtgaaccctactgtgagactgattattatgccctctttggtactatatgccatggatgtgaatttcccatagaagctggtgacatgttcctggaagctctgggctacacctggcatgacacttgctttgtatgctcagtgtgttgtgaaagtttggaaggtcagacctttttctccaagaaggacaagcccctgtgtaagaaacatgctcattctgtgaatttttgaaagtcaacagttcaggagaagagaaggaatttgaagagaaaaaggaaaattaaaattactaattaatttttagattcaatatttatatggagttttgaaaaataatagtggccctgaaggaataaattccagctttaaaaaccaagtctgaggaaatatttggcttcataaagtaaagagacggtttggcatttattattactttttcctgtattttatgcccataaaataagctttataaaaaccaatttcctgatggactattaaattcatcttagaataaattagtgaagaatttaattttagaataaataatccaatctgaaataattataccttctttccttgttaggtagttatgagtaaatctgcaaaaggcaatgaaaatgccttaaattttatcaataacagaattattgtatttaaaaaaaaactaatacttatctttaaaatagtaaataggattttaaacagagaattttatcagtaataggtgtcagtttttaaaaaattgcttgtaggctgagcgcggtggctcacgcctgtaatcccagcactttgggaggccaaggtgggtggaccacatgaggtcaggagtttgagatcagcctggccaacatggtgaaaccccatctctactaaaaatacaaaaattagccggacgcagtggcacgcgcctgtaatcccagctactcaagaggctgaggcacgagaatcacttgaacccgggagggagaggttgcagtgagccaagatcgtaccactgcactccagcctgggtgacagagtgagactctgtctccaaaaaaaactttgcttgtatattatttttgccttacagtggatcattctagtaggaaaggacaataagattttttatcaaaatgtgtcatgccagtaagagatgttatattcttttctcatttcttccccacccaaaaataagctaccatatagcttataagtctcaaatttttgccttttactaaaatgtgattgtttctattcattgtgtatgcttcatcacctatattaggcaaattccatttttttcccttgtgctaaggtaaagatttaattaaataattttggcctctcatagttttctctctctttaaagagaataaatagagggccaggtgtggtggctcacgcctgtgatcccagcactttgggaggccaagacgggcggatcatgaggtcaagagatcaagatcatcctggccaacatggtgaaaccctgtctctactaaaaatacaaaaatgagctgggcatggtggggcgtgcctgtagtcccatgtacttgggaggctgaggcaggaaaattcttgaacccaggagacggaagttgcagtgagctgagatcacaccactgcactccagcctggtgacagagcaagactccggctcttaaaaaaaaaaaaaaaaaaaa

SEQ ID NO: 3000 - protein, 456 aa, Homo sapien
MSNYSVSLVGPAPWGFRLQGGKDFNMPLTISSLKDGGKAAQANVRIGDVVLSIDGINAQGMTHLEAQNKIKGCTGSLNMTLQRASAAPKPEPVPVQKPTKKTHCGALYRVLSCTHSQDASKKRLIEDTEDWRPRTGTTQSRSFRILAQITGTEHLKESEADNTKKANNSQEPSPQLASSVASTRSMPESLDSPTSGRPGVTSLTTAAAFKPVGSTGVIKSPSWQRPNQGVPSTGRISNSAAYSGSVAPANSALGQTQPSDQDTLVQRAEHIPAGKRTPMCAHCNQVIRGPFLVALGKSWHPEEFNCAHCKNTMAYIGFVEEKGALYCELCYEKFFAPECGRCQRKILGEVINALKQTWHVSCFVCVACGKPIRNNVFHLEDGEPYCETDYYALFGTICHGCEFPIEAGDMFLEALGYTWHDTCFVCSVCCESLEGQTFFSKKDKPLCKKHAHSVNF

SEQ ID NO: 3001 - DNA, 1379 bp, Homo sapien
gcgcgcagcagccatctccactccaaagttagacaaaatgccaggaatgttcttctctgctaacccaaaggaattgaaaggaaccactcattcacttctagacgacaaaatgcaaaaaaggaggccaaagacttttggaatggatatgaaagcatacctgagatctatgatcccacatctggaatctggaatgaaatcttccaagtccaaggatgtactttctgctgctgaagtaatgcaatggtctcaatctctggaaaaacttcttgccaaccaaactggtcaaaatgtctttggaagtttcctaaagtctgaattcagtgaggagaatattgagttctggctggcttgtgaagactataagaaaacagagtctgatcttttgccctgtaaagcagaagagatatataaagcatttgtgcattcagatgctgctaaacaaatcaatattgacttccgcactcgagaatctacagccaagaagattaaagcaccaacccccacgtgttttgatgaagcacaaaaagtcatatatactcttatggaaaaggactcttatcccaggttcctcaaatcagatatttacttaaatcttctaaatgacctgcaggctaatagcctaaagtgactggtccctggctgaagggaattaacagatagtatcaagcgcagaaggaatgtgccagtatggctccctgggtgaacagcttggccttttgtgggtgtcttgacagcccaagaagaacaaatgactcagaatggattaacatgaaagttatccaggcgcagagttgaagaagcataagcaagacaaaaacagagagaccgcagaaggaggaagatactgtggtactgtcataaaaaacagtggagctctgtattagaaagcccctcagaactgggaaggccaggtaactctagttacacagaaactgtgactaaagtctatgaaactgattacaacagactgtaagaatcaaagtcaactgacatctatgctacatattattatatagtttgtactgagctattgaagtcccattaacttaaagtatatgttttcaaattgccattgctactattgcttgtcggtgttattttattttattgtttttgactttggaagagatgaactgtgtatttaacttaagctattgctcttaaaaccagggagtcagaatatatttgtaagttaaatcattggtgctaataataaatgtggattttgtattaaaatatatagaagcaatttctgtttacatgtccttgctacttttaaaaacttgcatttattcctcagattttaaaaataaataaataattcatttaaaaaaaaaaaaaaaaaaaaaaaaaaaaaaaaaaaaaaaaaaaaaaaaaaa

SEQ ID NO: 3002 - protein, 196 aa, Homo sapien
MPGMFFSANPKELKGTTHSLLDDKMQKRRPKTFGMDMKAYLRSMIPHLESGMKSSKSKDVLSAAEVMQWSQSLEKLLANQTGQNVFGSFLKSEFSEENIEFWLACEDYKKTESDLLPCKAEEIYKAFVHSDAAKQINIDFRTRESTAKKIKAPTPTCFDEAQKVIYTLMEKDSYPRFLKSDIYLNLLNDLQANSLK

SEQ ID NO: 3003 - DNA, 1026 bp, Homo sapien
cagcatgttgagccgggcagtgtgcggcaccagcaggcagctgcctccggttttggggtatctgggctccaggcagaagcacagcctccccgacctgccctacgactacggcgccctggaacctcacatcaacgcgcagatcatgcagctgcaccacagcaagcaccacgcggcctacgtgaacaacctgaacgtcaccgaggagaagtaccaggaggcgttggccaagggagatgttacagcccagatagctcttcagcctgcactgaagttcaatggtggtggtcatatcaatcatagcattttctggacaaacctcagccctaacggtggtggagaacccaaaggggagttgctggaagccatcaaactggactttggttcctttgacaagtttaaggagaagctgacggctgcatctgttggtgtccaaggctcaggttggggttggcttggtttcaataaggaacggggacacttacaaattgctgcttgtccaaatcaggatccactgcaaggaacaacaggccttattccactgctggggattgatgtgtgggagcacgcttactaccttcagtataaaaatgtcaggcctgattatctaaaagctatttggaatgtaatcaactgggagaatgtaactgaaagatacatggcttgcaaaaagtaaaccacgatcgttatgctgagtatgttaagctctttatgactgtttttgtagtggtatagagtactgcagaatacagtaagctgctctattgtagcatttcttgatgttgcttagtcacttatttcataaacaacttaatgttctgaataatttcttactaaacattttgttattgggcaagtgattgaaaatagtaaatgctttgtgtgattgaatctgattggacattttcttcagagagctaaattacaattgtcatttataaaaccatcaaaaatattccatccatatactttggggacttgtagggatgcctttctagtcctattctattgcagttatagaaaatctag

SEQ ID NO: 3004 - protein, 222 aa, Homo sapien
MLSRAVCGTSRQLPPVLGYLGSRQKHSLPDLPYDYGALEPHINAQIMQLHHSKHHAAYVNNLNVTEEKYQEALAKGDVTAQIALQPALKFNGGGHINHSIFWTNLSPNGGGEPKGELLEAIKLDFGSFDKFKEKLTAASVGVQGSGWGWLGFNKERGHLQIAACPNQDPLQGTTGLIPLLGIDVWEHAYYLQYKNVRPDYLKAIWNVINWENVTERYMACKK

SEQ ID NO: 3005 - DNA, 1743 bp, Homo sapien
ccggcagcaccatgtcgctcacggtcgtcagcatggcgtgcgttgggttcttcttgctgcagggggcctggccactcatgggtggtcaggacaaacccttcctgtctgcccggcccagcactgtggtgcctcgaggaggacacgtggctcttcagtgtcactatcgtcgtgggtttaacaatttcatgctgtacaaagaagacagaagccacgttcccatcttccacggcagaatattccaggagagcttcatcatgggccctgtgaccccagcacatgcagggacctacagatgtcggggttcacgcccacactccctcactgggtggtcggcacccagcaaccccgtggtgatcatggtcacaggaaaccacagaaaaccttccctcctggcccacccagggcccctgctgaaatcaggagagacagtcatcctgcaatgttggtcagatgtcatgtttgagcacttctttctgcacagagaggggatctctgaggacccctcacgcctcgttggacagatccatgatggggtctccaaggccaacttctccatcggtcccttgatgcctgtccttgcaggaacctacagatgttatggttctgttcctcactccccctatcagttgtcagctcccagtgaccccctggacatcgtgatcacaggtctatatgagaaaccttctctctcagcccagccgggccccacggttcaggcaggagagaacgtgaccttgtcctgtagctcctggagctcctatgacatctaccatctgtccagggaaggggaggcccatgaacgtaggctccgtgcagtgcccaaggtcaacagaacattccaggcagactttcctctgggccctgccacccacggagggacctacagatgcttcggctctttccgtgccctgccctgcgtgtggtcaaactcaagtgacccactgcttgtttctgtcacaggaaacccttcaagtagttggccttcacccacagaaccaagctccaaatctggtatctgcagacacctgcatgttctgattgggacctcagtggtcatcttcctcttcatcctcctcctcttctttctcctttatcgctggtgctccaacaaaaagaatgctgctgtaatggaccaagagcctgcgggggacagaacagtgaataggcaggactctgatgaacaagaccctcaggaggtgacgtacgcacagttggatcactgcgttttcatacagagaaaaatcagtcgcccttctcagaggcccaagacacccctaacagataccagcgtgtacacggaacttccaaatgctgagcccagatccaaagttgtctcctgcccacgagcaccacagtcaggtcttgagggggttttctagggagacaacagccctgtctcaaaaccaggttgccagatccaatgaaccagcagctggaatctgaaggcatcagtctgcatcttaggggatcgctcttcctcacaccacgaatctgaacatgcctctctcttgcttacaaatgcctaaggtcgccactgcctgctgcagagaaaacacactcctttgcttagcccacaagtatctatttcacttgacccctgcccacctctccaacctaactggcttacttcctagtcctacttgaggctgcaatcacactgaggaactcacaattccaaacatacaagaggctccctcttaacacggcacttacacacttgctgttccaccttccctcatgctg

SEQ ID NO: 3006 - protein, 455 aa, Homo sapien [sequence omitted]

SEQ ID NO: 3007 - DNA, 1040 bp, Homo sapien; identical to SEQ ID NO: 1305

SEQ ID NO: 3008 - protein, 250 aa, Homo sapien; identical to SEQ ID NO: 1306

SEQ ID NO: 3009 - DNA, 8789 bp, Homo sapien
atgtctgacaaaatgtcgagtttcctacatattggagacatttgttctctgtacgcggagggatcgacaaatggatttattagcaccttgggcctggttgatgatcgttgtgttgtacagccagaaaccggggaccttaacaatccacctaagaaattcagagactgcctctttaagctatgtcccatgaaccgctactctgcccaaaagcagttctggaaagccgctaagcctggggccaacagcaccacagacgcagtgctactcaacaaactgcaccacgctgcagacttggaaaagaagcagaatgagacagaaaacaggaaattgctggggaccgtaatccagtatggcaatgtgatccagctcctgcatttgaaaagtaataaatacctaacagtgaataagaggcttcctgctctgttggagaagaatgccatgagagtcacattggacgaggctggaaatgaagggtcctggttttatattcagccattctacaagctgcgatccattggagacagcgtggtcataggtgacaaggtggttctgaaccccgtcaatgctggtcagcccctacatgctagcagccatcaactggtagataacccaggctgcaatgaggtcaattccgtcaactgcaatacaagctggaaaatagtccttttcatgaaatggagtgataacaaagacgacatattaaaggggggtgacgtggtgaggctgtttcatgctgagcaggagaagtttctcacctgtgacgaacacaggaagaagcagcacgtcttcctgagaaccacgggccggcagtcggccacatctgccaccagttcaaaagccctgtgggaggtggaggtggtccagcatgacccatgtcggggcggagcagggtattggaacagccttttccgtttcaagcatctggccacggggcattacttggcagcagaggtggaccctgatcaggacgcctctcgaagtaggttgcggaatgcccaagaaaagatggtatactccctggtctctgtgcctgaaggcaatgacatctcctccattttcgagctagatcccaccactctgcgtggaggtgacagccttgtcccaaggaactcttatgttcggctcagacacctatgtactaatacctgggttcacagcacaaatattcctattgacaaggaagaagaaaagcccgtgatgctgaaaattggcacctctcctgtgaaggaggataaggaagcatttgccatagttccggtttctcctgctgaagttcgggacctggacttcgccaatgatgccagcaaggtgctgggctccattgctgggaagctagagaagggcaccatcacccagaatgaaaggaggtctgtaaccaagctgctagaagatttggtttacttcgtcactggtggaactaattctggtcaagatgttctcgaagttgtcttctccaagcccaacagagaacggcagaaactgatgagagaacagaatattctcaagcagatcttcaagttgttacaagccccattcacagactgcggtgatggcccaatgcttcggctggaagagctcggggaccagcggcacgctcctttcagacacatctgccggctctgctacagggtgctgagacactcgcagcaagactacaggaagaaccaggagtatatagccaagcagtttggcttcatgcagaagcagattggctatgatgtgttggctgaagacactatcactgccctgctccacaataatcggaaactcctggaaaaacacattaccgcggcagagattgacacatttgtcagcctggtgcgaaagaacagggagcccagattcttagattacctctccgacctctgtgtctccatgaacaaatcaattccagtgacccaggaactgatatgtaaagctgtgctgaaccccaccaacgctgacatcctgattgagaccaaattggttctttctcgttttgaatttgaaggtgtctcttccactggagagaatgctctggaggcaggagaagacgaggaagaggtgtggctgttttggagggacagcaacaaagagattcgcagcaagagtgtgagggaattggctcaggatgctaaagaagggcagaaggaggaccgagacgttctcagctactacagatatcagctgaacctctttgcgaggatgtgtctggaccgccaatacctggccatcaacgaaatctcaggccagctggatgtcgatctcattctccgctgcatgtctgacgagaacctgccctatgacctcagggcgtccttctgccgcctcatgcttcacatgcatgtggaccgagatccccaggaacaagtcacccccgtgaaatatgcccgcctctggtcggagattccctcggagatcgccattgacgactatgatagtagtggagcttccaaagatgaaattaaggagagatttgctcagaccatggagtttgtggaggagtatttaagagatgtggtttgtcagaggttccctttctctgataaagagaagaataagcttacgtttgaggttgtaaatttagctaggaatctcatatactttggtttctacaacttctctgaccttctacgattaactaagatccttctggccatattggactgtgtacatgtgacaacaatcttccccattagcaagatggcgaaaggagaagagaataaaggtaacaatgatgtggagaagctgaagagcagtaacgtgatgagatctattcatggcgtgggagagctgatgacccaggtggtgctccggggaggaggctttttgcccatgactcccatggctgctgcccctgaaggcaatgtgaagcaggcagagcctgagaaggaggacatcatggtcatggacaccaagctgaagatcattgagatactccagtttattttgaatgtgaggttggattataggatctcctgcctcctgtgtatatttaagcgagagtttgatgaaagcaattcccagacttcagaaacatcctccggaaacagcagccaagaagggccaagtaatgtaccaggtgctcttgactttgaacacattgaagaacaagcagaaggcatctttggaggaagtgaggagaacaccccactggacttggatgaccacggcggcagaacctttctccgtgtcctgctccacttgacgatgcatgactacccacccctggtgtcaggggccctgcagctcctcttccggcacttcagccagaggcaggaggtgctccaggccttcaaacaggttcaactgctggttaccagccaagatgtggacaactacaaacagatcaaacaagacttggatcaactgaggtccatcgtggaaaagtcagagctttgggtgtacaaagggcagggccccgatgagactatggatggtgcatctggagaaaatgaacataagaaaacggaggagggaaataacaagccacaaaagcatgaaagcaccagcagctacaactacagagtggtcaaagagattttgattcggcttagcaaactctgtgttcaagagagtgcctcagtgagaaagagcaggaagcagcaacagcgtctgctccggaacatgggcgcgcacgccgtggtgctggagctgctgcagattccctatgagaaggccgaagataccaagatgcaagagataatgaggttggctcatgaatttttgcagaatttctgcgcaggcaaccagcagaatcaagctttgctacataaacacataaacctgtttctcaacccagggatcctggaggcagtaaccatgcagcacatcttcatgaacaatttccagctttgcagtgagatcaacgagagagttgttcagcacttcgttcactgcatagagactcacggtcggaatgtccagtatataaagttcttacagacaattgtcaaggcagaagggaaatttattaaaaaatgccaagacatggttatggccgagctggtcaattcgggagaggatgtcctcgtgttctacaacgacagagcctctttccagactctgatccagatgatgcggtcagaacgggatcggatggatgagaacagccctctcatgtaccacatccacttggtcgagctcctggctgtgtgcacggagggtaagaatgtctacacagagatcaagtgcaactccctgctcccgctggatgacatcgttcgcgtggtgacccacgaggactgcatccctgaggttaaaattgcatacattaacttcctgaatcactgctatgtggatacagaggtggaaatgaaggagatttataccagcaatcacatgtggaaattgtttgagaatttccttgtagacatctgcagggcctgtaacaacactagtgacaggaaacatgcagactcgattttggagaagtatgtcaccgaaatcgtcatgagtattgttactactttcttcagctctcccttctcagaccagagtacgactttgcagactcgccagcctgtctttgtgcaactgctgcaaggcgtgttcagggtttaccactgcaactggttaatgccaagccaaaaagcctccgtggagagctgtattcgggtgctgtctgatgtagccaagagccgggccattgccattcccgtggacctggacagccaagtcaacaacctctttctcaagtcccacagcattgtgcagaaaacagccatgaactggcggctctcagcccgcaatgccgcacgcagggactctgttctggcagcttccagagactaccggaatatcattgagagattgcaggacatcgtctccgcgctggaggaccgtctcaggcccctggtgcaggcagagttatctgtgctcgtggatgttctccacagacccgagctgcttttcccagagaacacagacgccagaaggaaatgtgaaagtggcggtttcatttgcaagttaataaagcatacaaaacagctgctagaagaaaatgaagagaagctctgcattaaggtcctacagaccctgagggaaatgatgaccaaagatagaggctatggagaaaagctaatttccattgatgaattggataatgctgagcttcctccagctccggattctgagaacgccactgaggagcttgaaccaagtccacccctgcggcagctggaagaccataaaaggggtgaggcgctcaggcaagttctggtcaaccgttactatggaaacgtcagaccttcgggacgaagagagagccttaccagctttggcaatggcccactgtcagcaggaggacccggcaagcccgggggaggagggggaggttccggatccagctctatgagcaggggtgagatgagtctggccgaggttcagtgtcaccttgacaaggagggggcttccaatctagttatcgacctcatcatgaacgcatccagtgaccgagtgttccatgaaagcattctcctggccattgcccttctggaaggaggcaacaccaccatccagcactcctttttctgtcgcttgacagaagataagaagtcagagaaattctttaaggtgttttatgaccggatgaaggtggcccagcaagaaatcaaagcaacagtgacagtgaacaccagtgacttgggaaataaaaagaaagacgatgaggtagacagggatgccccatcacggaaaaaagctaaagagcccacaacacagataacagaagaggtccgggatcagctcctggaggcctccgctgccaccaggaaagccttcaccactttcaggagggaggctgatcccgacgaccactaccagcctggagagggcacccaggccactgccgacaaggccaaggacgacctggagatgagcgcggtcatcaccatcatgcagcccatcctccgcttccttcagctcctgtgtgaaaaccacaaccgagacctgcagaacttcctccgttgccaaaataacaagaccaactacaatttggtatgtgagaccctgcagtttctggactgtatttgtggaagcacaactggaggccttggtcttctgggcttgtatataaatgaaaagaacgtagcgcttatcaaccaaaccctggaaagtctgaccgaatactgtcaaggaccttgccatgagaaccagaactgcatagccacccatgaatccaatggcattgacatcatcacagccctgatcctcaatgatatcaatcctttgggaaagaagaggatggaccttgtgttagaactgaagaacaatgcctcgaagttgctcctggccatcatggaaagcaggcacgacagtgaaaacgcagagaggatactttataacatgaggcccaaggaactggtggaagtgatcaagaaagcctacatgcaaggtgaagtggaatttgaggatggagaaaacggtgaggatggggcggcgtcccccaggaacgtggggcacaacatctacatattagcccatcagttggctcggcataacaaagaacttcagagcatgctgaaacctggtggccaagtggacggagatgaagccctggagttttatgccaagcacacggcgcagatagagattgtcagattagaccgaacaatggaacagatagtctttcccgtgcccagcatatgtgaattcctaaccaaggagtcaaaactacgaatttactatactacggagagagacgaacaaggcagcaaaatcaatgatttctttctgcggtctgaagacctcttcaatgaaatgaattggcagaagaaactgagagcccagcccgtgttgtactggtgtgcccgcaacatgtctttctggagcagcatttcgtttaacctggccgtcctgatgaacctgctggtggcgtttttctacccgtttaagggagtccgaggaggaaccctggagccccactggtcgggactcctgtggacagccatgctcatctctctggccatcgtcattgccctccccaagccccatggcatccgggccttaattgcctccacaattctacgattgatattttcagtcgggttacaacccacgttgtttcttctgggcgctttcaatgtatgcaataaaatcatctttctaatgagctttgtgggcaactgtgggacattcacaagaggctaccgagccatggttctggatgttgagttcctctatcacttgttgtatctggtgatctgtgccatggggctctttgtccatgaattcttctacagtctgctgctttttgatttagtgtacagagaagagactttgcttaatgtcattaaaagtgtcactcgcaatggacgggccatcatcctgacagcagttctggctctgatcctcgtttacctgttctcaatagtgggctatcttttcttcaaggatgactttatcttggaagtagataggctgcccaatgaaacagctgttccagaaaccggcgagagtttggcaagcgagttcctgttctccgatgtgtgtagggtggagagtggggagaactgctcctctcctgcacccagagaagagctggtccctgcagaagagacggaacaggataaagagcacacatgtgagacgctgctgatgtgcattgtcactgtgctgagtcacgggctgcggagcgggggtggagtaggagatgtactcaggaagccgtccaaagaggaacccctgtttgctgctagagttatttatgacctcttgttcttcttcatggtcatcatcattgttcttaacctgatttttggggttatcattgacacttttgctgacctgaggagtgagaagcagaagaaggaagagatcttgaagaccacgtgctttatctgtggcttggaaagagacaagtttgacaacaagactgtcacctttgaagagcacatcaaggaagaacacaacatgtggcactatctgtgcttcatcgtcctggtgaaagtaaaggactccaccgaatatactgggcctgagagttacgtggcagaaatgatcaaggaaagaaaccttgactggttccccaggatgagagccatgtcattggtcagcagtgattctgaaggagaacagaatgagctgagaaacctgcaggagaagctggagtccaccatgaaacttgtcacgaacctttctggccagctgtcggaattaaaggatcagatgacagaacaaaggaagcagaaacaaagaattggtcttctaggacatcctcctcacatgaatgtcaacccacaacaaccagcataagcaaatgaaagaaaggaattgtatttaccttttataattattattagtgtgggaatggctaatgagttctgattcacccacgaaggttacatttatgctgaatacatttgtaaatactcagttttatactgtatgtatatgattgctactctaaaggtttggatatatgtattgtaattagaattgttggcatgatgacatttcatttgtgccaaaaatattaaaaatgccttttttggaaggactaacagaaagcacctgatttgcacttgaaccagattatagatttaaaagtatatgacatgtattttgtatttaaaactagaatagccagtatttatgttttttataaaactgtgcaatacgaattatgcaatcacaatacatttgtagctcccgagtgtcctaaagggagtgcacttctttgaagctggtgtgttaatactatgtaataaatggttaactttcaaatgatgctgctgccaaaattatattaatagagagtttcaggcccctgggaattcctgcagcccgggggatccccgggtaccgagctc

SEQ ID NO: 3010 - protein, 2743 aa, Homo sapien
MSDKMSSFLHIGDICSLYAEGSTNGFISTLGLVDDRCVVQPETGDLNNPPKKFRDCLFKLCPMNRYSAQKQFWKAAKPGANSTTDAVLLNKLHHAADLEKKQNETENRKLLGTVIQYGNVIQLLHLKSNKYLTVNKRLPALLEKNAMRVTLDEAGNEGSWFYIQPFYKLRSIGDSVVIGDKVVLNPVNAGQPLHASSHQLVDNPGCNEVNSVNCNTSWKIVLFMKWSDNKDDILKGGDVVRLFHAEQEKFLTCDEHRKKQHVFLRTTGRQSATSATSSKALWEVEVVQHDPCRGGAGYWNSLFRFKHLATGHYLAAEVDPDQDASRSRLRNAQEKMVYSLVSVPEGNDISSIFELDPTTLRGGDSLVPRNSYVRLRHLCTNTWVHSTNIPIDKEEEKPVMLKIGTSPVKEDKEAFAIVPVSPAEVRDLDFANDASKVLGSIAGKLEKGTITQNERRSVTKLLEDLVYFVTGGTNSGQDVLEVVFSKPNRERQKLMREQNILKQIFKLLQAPFTDCGDGPMLRLEELGDQRHAPFRHICRLCYRVLRHSQQDYRKNQEYIAKQFGFMQKQIGYDVLAEDTITALLHNNRKLLEKHITAAEIDTFVSLVRKNREPRFLDYLSDLCVSMNKSIPVTQELICKAVLNPTNADILIETKLVLSRFEFEGVSSTGENALEAGEDEEEVWLFWRDSNKEIRSKSVRELAQDAKEGQKEDRDVLSYYRYQLNLFARMCLDRQYLAINEISGQLDVDLILRCMSDENLPYDLRASFCRLMLHMHVDRDPQEQVTPVKYARLWSEIPSEIAIDDYDSSGASKDEIKERFAQTMEFVEEYLRDVVCQRFPFSDKEKNKLTFEVVNLARNLIYFGFYNFSDLLRLTKILLAILDCVHVTTIFPISKMAKGEENKGNNDVEKLKSSNVMRSIHGVGELMTQVVLRGGGFLPMTPMAAAPEGNVKQAEPEKEDIMVMDTKLKIIEILQFILNVRLDYRISCLLCIFKREFDESNSQTSETSSGNSSQEGPSNVPGALDFEHIEEQAEGIFGGSEENTPLDLDDHGGRTFLRVLLHLTMHDYPPLVSGALQLLFRHFSQRQEVLQAFKQVQLLVTSQDVDNYKQIKQDLDQLRSIVEKSELWVYKGQGPDETMDGASGENEHKKTEEGNNKPQKHESTSSYNYRVVKEILIRLSKLCVQESASVRKSRKQQQRLLRNMGAHAVVLELLQIPYEKAEDTKMQEIMRLAHEFLQNFCAGNQQNQALLHKHINLFLNPGILEAVTMQHIFMNNFQLCSEINERVVQHFVHCIETHGRNVQYIKFLQTIVKAEGKFIKKCQDMVMAELVNSGEDVLVFYNDRASFQTLIQMMRSERDRMDENSPLMYHIHLVELLAVCTEGKNVYTEIKCNSLLPLDDIVRVVTHEDCIPEVKIAYINFLNHCYVDTEVEMKEIYTSNHMWKLFENFLVDICRACNNTSDRKHADSILEKYVTEIVMSIVTTFFSSPFSDQSTTLQTRQPVFVQLLQGVFRVYHCNWLMPSQKASVESCIRVLSDVAKSRAIAIPVDLDSQVNNLFLKSHSIVQKTAMNWRLSARNAARRDSVLAASRDYRNIIERLQDIVSALEDRLRPLVQAELSVLVDVLHRPELLFPENTDARRKCESGGFICKLIKHTKQLLEENEEKLCIKVLQTLREMMTKDRGYGEKLISIDELDNAELPPAPDSENATEELEPSPPLRQLEDHKRGEALRQVLVNRYYGNVRPSGRRESLTSFGNGPLSAGGPGKPGGGGGGSGSSSMSRGEMSLAEVQCHLDKEGASNLVIDLIMNASSDRVFHESILLAIALLEGGNTTIQHSFFCRLTEDKKSEKFFKVFYDRMKVAQQEIKATVTVNTSDLGNKKKDDEVDRDAPSRKKAKEPTTQITEEVRDQLLEASAATRKAFTTFRREADPDDHYQPGEGTQATADKAKDDLEMSAVITIMQPILRFLQLLCENHNRDLQNFLRCQNNKTNYNLVCETLQFLDCICGSTTGGLGLLGLYINEKNVALINQTLESLTEYCQGPCHENQNCIATHESNGIDIITALILNDINPLGKKRMDLVLELKNNASKLLLAIMESRHDSENAERILYNMRPKELVEVIKKAYMQGEVEFEDGENGEDGAASPRNVGHNIYILAHQLARHNKELQSMLKPGGQVDGDEALEFYAKHTAQIEIVRLDRTMEQIVFPVPSICEFLTKESKLRIYYTTERDEQGSKINDFFLRSEDLFNEMNWQKKLRAQPVLYWCARNMSFWSSISFNLAVLMNLLVAFFYPFKGVRGGTLEPHWSGLLWTAMLISLAIVIALPKPHGIRALIASTILRLIFSVGLQPTLFLLGAFNVCNKIIFLMSFVGNCGTFTRGYRAMVLDVEFLYHLLYLVICAMGLFVHEFFYSLLLFDLVYREETLLNVIKSVTRNGRAIILTAVLALILVYLFSIVGYLFFKDDFILEVDRLPNETAVPETGESLASEFLFSDVCRVESGENCSSPAPREELVPAEETEQDKEHTCETLLMCIVTVLSHGLRSGGGVGDVLRKPSKEEPLFAARVIYDLLFFFMVIIIVLNLIFGVIIDTFADLRSEKQKKEEILKTTCFICGLERDKFDNKTVTFEEHIKEEHNMWHYLCFIVLVKVKDSTEYTGPESYVAEMIKERNLDWFPRMRAMSLVSSDSEGEQNELRNLQEKLESTMKLVTNLSGQLSELKDQMTEQRKQKQRIGLLGHPPHMNVNPQQPA

SEQ ID NO: 3011 - DNA, 1054 bp, Homo sapien; identical to SEQ ID NO: 1469

SEQ ID NO: 3012 - protein, 255 aa, Homo sapien; identical to SEQ ID NO: 1470

SEQ ID NO: 3013 - DNA, 3383 bp, Homo sapien
ggcggccggacgcggcccggaggcgcggggtcccgatgtggggcccggggccgcgtggcctgcgggagcccatcccccaccctaccccccgggcccgggggacaggtgtgcacggggcggccaagggcaccttcgccaccttcgagcgggcgaggtccgggcggggacggggcggggaccgagctagcggagccagcgcagcctgcccggctcagcccggcccggccacagcacaaaggaaagcgagggcgggggaggagcggagcgggctgggggccagggcgccccgcccaccggggggcctctcggagtgggccgccctccccccgaaacctgggctggagtgaggtggaaggatgtttgctgccacatggcgaccgcgaagtgactcccttaccgccgcgggtcgcggaggaggcagggggaaggtgcccatctggttcctaggcctcctctccctgctggcagatgggaacaggttcttcttgaggaaactgaggcaaagaggagggcaggtctgagggaccccgcttgggctggcctcacccgcacactgggagggcagccaggtggggactctgacctgggggcttctggaggagaggatgagatggctgggcatccatggcatggtactgcagcactggccagcagccaggcctggagggatggacgcgagagacaagctctcgtgtcctgcagggctctgtacacatatgaagatggctccgatgacctcaagcttgcagcatcaggagaagggggcttgcaggagctttcgggacactttgagaaccagaaggtgatgtacggcttctgcagtgtcaaggactcccaagctgctctgccaaaatacgtgctcatcaactgggtgggcgaagatgtgcctgatgcccgcaagtgcgcttgtgccagccacgtggctaaggtggcagagttcttccagggtgtcgacgtgatcgtgaacgccagcagcgtggaagacatagacgcgggtgccatcgggcagcggctctctaacgggctggcgcgactctccagccctgtgctgcaccgactgcggctgcgagaggatgagaacgcagagcccgtgggcaccacctaccagaagacggatgcagctgtggaaatgaagcggattaaccgagagcagttctgggagcaggccaagaaggaagaagagctgcggaaggaggaggagcggaagaaggccctggatgagaggctcaggttcgagcaggagcggatggagcaggagcggcaggagcaagaggagcgcgagcggcgctaccgggagcgggagcagcagatcgaggagcacaggaggaaacagcagactttagaagcggaagaggccaagaggcggttgaaggagcagtctatctttggtgaccatcgggatgaggaggaagagacccacatgaagaagtcagagtcggaggtggaggaggcagcagctattattgcccagcggcctgacaacccaagggagttcttcaagcagcaggaaagagtcgcatcggcctctgcgggcagctgtgatgtaccctcgcccttcaaccatcgaccaggcagccacctggacagccaccggaggatggcgcccactcccatccccacgcggagcccgtctgactccagcaccgcctccacccctgtcgctgagcagatagagcgggccctggatgaggtcacctcctcgcagcctccaccactgccaccgccacccccaccagcccaagagacccaggagcccagccccatcctagacagtgaggagaccagagcagcagcccctcaggcctgggccggccccatggaggagccccctcaggcacaggcgcctccccgggggccaggcagccctgcagaggacttgatgttcatggagtctgcagagcaggctgtcctggctgctcccgtggagcctgccacagctgacgccacggagatccacgatgcagctgacaccattgaaactgacactgccactgctgacaccactgttgccaacaacgtaccccccgccgccaccagcctcattgacctatggcctggcaacggggaaggggcctccacactccagggtgagcccagggcccccacgccaccctcgggtactgaggtcaccctggcagaggtgcccctgctggatgaggtggctccggagccactgctgccagcaggcgaaggctgtgccacccttctcaactttgatgagctgcctgagccgccagccaccttctgtgacccagaggaagtggaaggggagcccctggctgccccccagaccccaactctgccctcagcccttgaggagctggagcaagagcaggagccggagccccacctgctaaccaatggcgagaccacccagaaggaggggacccaggccagtgaggggtacttcagtcaatcacaggaggaggagtttgcccaatcggaagagctctgtgccaaggctccgcctcctgtgttctacaacaagcctccagagatcgacatcacatgctgggatgcagacccagttccagaagaggaggagggcttcgagggtggtgattagcggtggcgccagccctaggctacccttgccaaggccgcccacctgcatcagcctctggccagacggcccgccgtgcctgcattcgcagcagctccgcctggcacccactccggattccggccctggctggggacttggccgcttccctacccacagggcctgacttttacagcttttctctttttttaaaaagttgataggagacttgtacagttgactggctttcctctcgttggtagttgagacgctgttgcaaattccacccctccttccctggtccagattgtagctcttagtcctccctgctcagctggccgggttggaggcctcaccctgcttggggcctggcgtggggggagctctggtgggaaaatgtcccccacctcttttcctagttttatgtttcttgggaaaatatcactttgtattctctgtccagggcttcagatattttgcacgaattttaaaacatggcaataaatggctcgtgggctctggctccctgggaccccctccccgcccttcttttgaccccttcctgtctggcccaaaggaagtagcaggcccagctggggcccctcggctaccccccgtctcctgccgggcaggtcccaggttggaggccctaggcgcggttcaggtcagggctatggatggggcccaggggctttggtggcccctccccaactccttcctctttgcttgggttcctttttcacgtttagtaactgtttttttttttttttttttttttttggaaagcacaaacttctgtaacgggtcgtgctcatgtctgttaataaagaaatccagatcc

SEQ ID NO: 3014 - protein, 651 aa, Homo sapien
MAGHPWHGTAALASSQAWRDGRERQALVSCRALYTYEDGSDDLKLAASGEGGLQELSGHFENQKVMYGFCSVKDSQAALPKYVLINWVGEDVPDARKCACASHVAKVAEFFQGVDVIVNASSVEDIDAGAIGQRLSNGLARLSSPVLHRLRLREDENAEPVGTTYQKTDAAVEMKRINREQFWEQAKKEEELRKEEERKKALDERLRFEQERMEQERQEQEERERRYREREQQIEEHRRKQQTLEAEEAKRRLKEQSIFGDHRDEEEETHMKKSESEVEEAAAIIAQRPDNPREFFKQQERVASASAGSCDVPSPFNHRPGSHLDSHRRMAPTPIPTRSPSDSSTASTPVAEQIERALDEVTSSQPPPLPPPPPPAQETQEPSPILDSEETRAAAPQAWAGPMEEPPQAQAPPRGPGSPAEDLMFMESAEQAVLAAPVEPATADATEIHDAADTIETDTATADTTVANNVPPAATSLIDLWPGNGEGASTLQGEPRAPTPPSGTEVTLAEVPLLDEVAPEPLLPAGEGCATLLNFDELPEPPATFCDPEEVEGEPLAAPQTPTLPSALEELEQEQEPEPHLLTNGETTQKEGTQASEGYFSQSQEEEFAQSEELCAKAPPPVFYNKPPEIDITCWDADPVPEEEEGFEGGD

SEQ ID NO: 3015 - DNA, 1670 bp, Homo sapien
cggcacgaggcaagtgacgccgagggcctgagtgctccagtagccaccgcatctggagaaccagcggttaccatggaggggatcagtatatacacttcagataactacaccgaggaaatgggctcaggggactatgactccatgaaggaaccctgtttccgtgaagaaaatgctaatttcaataaaatcttcctgcccaccatctactccatcatcttcttaactggcattgtgggcaatggattggtcatcctggtcatgggttaccagaagaaactgagaagcatgacggacaagtacaggctgcacctgtcagtggccgacctcctctttgtcatcacgcttcccttctgggcagttgatgccgtggcaaactggtactttgggaacttcctatgcaaggcagtccatgtcatctacacagtcaacctctacagcagtgtcctcatcctggccttcatcagtctggaccgctacctggccatcgtccacgccaccaacagtcagaggccaaggaagctgttggctgaaaaggtggtctatgttggcgtctggatccctgccctcctgctgactattcccgacttcatctttgccaacgtcagtgaggcagatgacagatatatctgtgaccgcttctaccccaatgacttgtgggtggttgtgttccagtttcagcacatcatggttggccttatcctgcctggtattgtcatcctgtcctgctattgcattatcatctccaagctgtcacactccaagggccaccagaagcgcaaggccctcaagaccacagtcatcctcatcctggctttcttcgcctgttggctgccttactacattgggatcagcatcgactccttcatcctcctggaaatcatcaagcaagggtgtgagtttgagaacactgtgcacaagtggatttccatcaccgaggccctagctttcttccactgttgtctgaaccccatcctctatgctttccttggagccaaatttaaaacctctgcccagcacgcactcacctctgtgagcagagggtccagcctcaagatcctctccaaaggaaagcgaggtggacattcatctgtttccactgagtctgagtcttcaagttttcactccagctaacacagatgtaagagacttttttttatacgataaataacttttttttaagttacacatttttcagatataaaagactgaccaatattgtacagtttttattgcttgttggatttttgctcttgtgtttctttagtttttcgtgaaggtttaattgacttatttatataaattttttttgtttcatattgatgtgtgtctaggcaggacctgtggccaagttcttagttgctgtatgtctcgtggtaggactgtagaaaagggaactgaacattccagagcgtgtagtgaatcacgtaaagctagaaatgatccccagctgtttatgcatagataatctctccattcccgtggaacgtttttcctgttcttaagacgtgattttgctgtagaagatggcacttataaccaaagcccaaagtggtatagaaatgctggtttttcagttttcaggagtgggttgatttcagcacctacagtgtacagtcttgtattaagttgttaataaaagtacatgttaaacttaaaaaaaaaaaaaaaaa

SEQ ID NO: 3016 - protein, 352 aa, Homo sapien; identical to SEQ ID NO: 1961

SEQ ID NO: 3017 - DNA, 1800 bp, Homo sapien
atgggggagcagccgatcttcaccacccgagcgcatgtcttccagattgaccccaacaccaagaagaactggatgcctgcgagcaagcaggcggtcaccgtttcctacttctatgatgtcacaaggaacagctatcggatcatcagtgtggacggagccaaggtgatcataaacagcacaatcacaccgaatatgaccttcaccaaaacgtcacagaagtttgggcagtgggccgacagcagagccaacacagtgtttggtttggggttttcctctgagcagcagctgacaaagtttgcagagaaattccaggaggtgaaagaagctgccaagatagccaaagacaagacgcaggagaaaatcgagacctcaagtaatcattcccaagaatctgggcgtgaaaccccatcttctactcaggcatccagtgtcaacgggacggacgaggaaaaggcctctcacgccggtccagccaacacacaactgaagtctgagaatgacaagctgaagattgccttgacgcagagcgcagccaacgtgaagaagtgggagatcgagctgcagacccttcgggagagcaatgcacggctgaccacagcactgcaggagtcggcagccagtgtggagcagtggaagaggcagttctccatctgccgtgatgagaatgaccggctccgcaacaagattgatgagctggaagaacaatgcagtgagatcaacagagagaaggagaagaacacgcagctgaagaggaggatcgaggagctggaggcagagctccgagaaaaggagacagagctgaaagatctccgaaaacaaagtgaaatcatacctcagctcatgtcagagtgcgaatatgtctctgagaagctagaggcggcagagagagacaatcaaaacctggaagacaaagtgcgttccttaaagacagacattgaggagagcaaataccgacagcgccacctgaaggtggagttgaagagcttcctggaggtgctggacgggaagattgacgacctgcatgacttccgccgagggctctccaagctgggcaccgataactagggctggccgaggcccaggccccgcccgtgagtcccaagcgtgtgtgcgagaccagatagctctaggacgttcttctgtgtgcattgcttctgtaaatgcaggcgcagtttgtcgtgtttccaaaccagttgtgccgtccactcactccttttcagaatagaaatctcctctcgcttctctggccttgtgaggttgtggacaactggaagattctgactcaggaatccagaactaggtctaccttcaacatttatgcagtcagggcagggatgtttatatctttcataagggctgttgcaaccatatgaactgaaaaaacacgcattttgtaatccaaatattgatattctttacaccaagccatcaggctccttttatcaaatagcattcagagtatttgaatgtccaccagacaccagccccggggggcacagagagaacaacattcctctctgtcaacatcgagaggctttaaaacaactgtttagtggaaactttctgagagatggaaaacaagcttctggtgggtgcattttctggcccggagttgcctgcatccacgctactgccccctgccccccgcccccccagtttgtacggttgcaacagtgttccttttcttggttttaatttctgagcagatgatttgctgtgggaacagcacacagtgagggtgcctagcacaatgtctggcacaaagtaggtgcttaataaatatttgttcaattaaaaaaa

SEQ ID NO: 3018 - protein, 354 aa, Homo sapien
MGEQPIFTTRAHVFQIDPNTKKNWMPASKQAVTVSYFYDVTRNSYRIISVDGAKVIINSTITPNMTFTKTSQKFGQWADSRANTVFGLGFSSEQQLTKFAEKFQEVKEAAKIAKDKTQEKIETSSNHSQESGRETPSSTQASSVNGTDEEKASHAGPANTQLKSENDKLKIALTQSAANVKKWEIELQTLRESNARLTTALQESAASVEQWKRQFSICRDENDRLRNKIDELEEQCSEINREKEKNTQLKRRIEELEAELREKETELKDLRKQSEIIPQLMSECEYVSEKLEAAERDNQNLEDKVRSLKTDIEESKYRQRHLKVELKSFLEVLDGKIDDLHDFRRGLSKLGTDN

SEQ ID NO: 3019 - DNA, 4134 bp, Homo sapien
gccggaagctggcgtactccggcagcgaaagcggtgcagacgggaggaaggcagctgagcctgaggtggaggtggaggtgtaccggcgggactccaagaagctgccaggcctgggagaccctgacatcgactgggaggagagcgtctgcctgaatctcatcctgcagaagctggactacatggtgacctgtgcggtgtgcacacgtgctgacggcggggacattcacatccataagaagaaatctcagcaagtgttcgcgtcccccagtaaacaccccatggacagcaagggggaggagtccaagatcagctaccccaacatcttcttcatgattgacagcttcgaggaggtgttcagcgacatgaccgtaggggaaggagagatggtctgtgtggagctggtggctagtgacaaaaccaacacgttccagggggtcatctttcagggctccatccgctacgaggcgctcaagaaggtgtatgacaaccgggtgagcgtggccgcccgcatggcacagaagatgtcgtttggcttctacaagtacagcaacatggagtttgtgcgcatgaagggcccccagggcaagggccacgccgagatggcggtcagccgagtgtctacaggtgacacatccccctgtgggactgaagaggactccagcccagcttcgcccatgcacgagcgggtgacctccttcagcacaccccccaccccagaacggaacaaccggcctgccttcttctccccatccctcaagaggaaggtgccccggaaccggatcgctgagatgaagaagtcgcactcggccaacgacagcgaggagttcttccgggaggacgacggtggagccgatctgcacaatgcaaccaacctgcggtctcggtccctgtcgggcacaggacggtccctggtcgggtcctggctgaagctgaacagagcagatggaaacttccttctctatgcacacttaacctacgtcacgttgccgctgcatcggattttaacagacatcctggaagttcggcagaagcccatcctgatgacctagccgcgtgcggagcctgcgcagagccccggccgggcccagccctcggagtgctgccaagtgcctacctgtccaccgccaccggggtctgcgatggcacgccagtgctggagccgcagccaggcgaggccactcgactcccggggccggggccgactccacgaacaccagcccaaactgaagtgcctcttccctcccctgctggcgctgctccgccctgtgccccccgcccatcgccccccacccatctctggagagccctctgcacccaaagaggactagagatgccgagcggccatgagagagagcggaaggagcagctgatgcccagagcggggccagagcggcgggtctatgttcacgtccccccagcagcaggcggaaccacccagccagggcactcagtgcattggactgtccacatgttcttgaggaaagccggtggaagattctggaatgccgtgcggatgaacttcagcgcccgagtcagtcccagctcatcctccccagtttaccactttgttctaataggagatgggaacacgagaagtttgatggctttgccctgggctgggaatacctcacccacgcccagttccagaaaggcctccagctgagcagacggccccgatcccgccagaacggccttttgcttccagccaaagaacaccgccaacacgcacacctccaacctgggacatcccacgctgggcctcgcacggaggaacctgcagaatttggattctgagggtagtcgggaggcctcggtagccaggcagaacaggatatctgccaaagggtgtctgatgtggggtggggctggcatcctcccaggaaggttctaggtgggaccccgtcttctgggggcgggggtgtcttttcatcttccctggtttcctagaactcacttcctttgacggcgtgtgttggtcccatctctcagaccagctcactgaggcagaggagttgctcagaggctcacatgggcacccccattggttcgtgtgagcagctgcccagccccaggcctgccctcggcctggtccagcatgaaggcgtttccatctgcaaggatgcacggtaccctccccgagagcaggcctgtcccctacccaactgggaataaactggaagctgggtctctttgttgctatgtttttttgtttgaagttcccaggaatatttgaggggttccggtgatgtgtttagggatcttctctgtgggggaaaaggaagaggagggtcttgttctcccatctgtttattctttgggctctgggaacaggggactactttggggctttctccagacttttgtatgttgttattaaaagcgagctattgcatttcattctgcctcagtttgcccacctgtgaaatggggctgataccacctacctcactgaagtcccagggttcaagtgtgtggctgggtcagggcgtggtcacccgtcattctgcataggtcgggttggatgttagactcctgggatgccctcctcccccctcgccctttgtaataacctaatctgagaccgtgcttggtggggggatgtgaactttctctctcccccagcagtgtctgctcaggcctgacagctcagctctgcacgatttcatgttcctaaacccatgtcttagggcagcacagagccaggtcatgtcatgccccaaagtgtggggacagagcctcagggagccccgagcatggtccagccccatttgagtgctctccggggatgccaaatgctgcttccaagtttgagtccatgtggctaaaatacacccatttcttcaggaactcttcccctggttgttctggggatcttgggagaaacacagccctgacagctcgtccgtgggaagatgaggcagtccaggttgtgaggagcacagcggcccgccctctgttctcagaggtgaggggcgggagaaggttgtctcctctggggccagcatttggccaagctcggaggcttggccagcactgctggatggctcagagcaagctgggctccccgtctgtaagatggcaaaaatgctgcccccctcacagggtgaccatgaggaccagtcacagtgatgtgtgaaagggctcgctggtcacagaaacgtgtacaaatcatgctattttagagatcagccctcaatttgtaaggcatgtgaacagggcacgcggtgggctggtggtttcatagccgacacacagcgcctaccatgtgcagctgcctgtccgaccccatcttacagacgagaaaaccagcacacaggcaccaaggaactgtccggaactaacagcaggggccggcgatgggagtcaaacccaggcacgcggcctggcctgcatgctgagccacatggtgctgtccggacagatggacagacactcggtggagtctgcctttctcaggccctaaatccctctccaaagggtacttgcgatgccggatttaaaacttgctcagagccacttagccacttgagaaccagacagtaaggtgttactcccaggtttgtttttccaaagtaacagatgacatgtggaataaagtaatagagtaacaagtggcagggccagaaccagggtccccaaagtcctggtgttggcacatttgtacttcttgtaagaccatctttaatttttctgggaacacacctgccttttgtgtaatgcggggaagactaatgcatggtgacacctggttttcctcaacaggacacttgatcccaaaacccctttaagaccttaggtttcctcagcggaaaactgtactttaatcccaaaccccctttaagacatattggggctgggcgcagtggctcacgcctgtaatcccagcactttgggaggctgagatgggtggatcacctgagatcaggagttcaagaccagcctgactaacatgctgaaaccccatgtctactaaagatagaaaaattagccggacatggtggcaggcacctgtaatcccagctactcggaaggctgaggaaggagaatcacttgaacctagtaggcagaggttgcagtgagccgagatcacgccattgcattctagcctgggcaacgagagcgaaactctgtctc

SEQ ID NO: 3020 - protein, 348 aa, Homo sapien
RKLAYSGSESGADGRKAAEPEVEVEVYRRDSKKLPGLGDPDIDWEESVCLNLILQKLDYMVTCAVCTRADGGDIHIHKKKSQQVFASPSKHPMDSKGEESKISYPNIFFMIDSFEEVFSDMTVGEGEMVCVELVASDKTNTFQGVIFQGSIRYEALKKVYDNRVSVAARMAQKMSFGFYKYSNMEFVRMKGPQGKGHAEMAVSRVSTGDTSPCGTEEDSSPASPMHERVTSFSTPPTPERNNRPAFFSPSLKRKVPRNRIAEMKKSHSANDSEEFFREDDGGADLHNATNLRSRSLSGTGRSLVGSWLKLNRADGNFLLYAHLTYVTLPLHRILTDILEVRQKPILMT

SEQ ID NO: 3021 - DNA, 1670 bp, Homo sapien; identical to SEQ ID NO: 1655

SEQ ID NO: 3022 - protein, 368 aa, Homo sapien; identical to SEQ ID NO: 1656

SEQ ID NO: 3023 - DNA, 5932 bp, Homo sapien
ggggcactgaggagcggcgcccgcggggcagcgaggagcccgatgcagggttctgcgcgtcatttccggtcccgcgggcgccccgtgaagcccacctggatccgccagcgctgtgccactccccagtgccgagctccgagctgtctccgcggcctcgcgcccggcccctccaccgcgcacctcttaggccccgcccgccagcgtccctttgttgtgaaggcgccggggcctagcgctatgcctgcggcggagactgcatcaggctctcgcgtctgcttctgcgctttgcctgggagaggccctggtggcctcgttcctggcgcccggagtccctgctgcggccccacccccgggcggtcacggtgacccatgctgcccagcctggaggtaaaatcgttcgtggctgtggcttcagcatgtcgtcctcggtgaaaaccccagcactggaagagctggttcctggctccgaagagaagccgaaaggcaggtcgcctctcagctggggctctctgtttggtcaccgaagtgagaagattgtttttgccaagagcgacggcggcacagatgagaacgtactgaccgtcaccatcacggagaccacggtcatcgagtcagacttgggtgtgtggagctcgcgggcgctgctctacctcacgctgtggttcttcttcagcttctgcacgctcttcctcaacaagtacatcctgtccctgctgggaggcgagcccagcatgctaggtgcggtgcagatgctgtccaccacggttatcgggtgtgtgaaaaccctcgttccttgctgtttgtatcagcacaaggcccggctttcctacccacccaacttccttatgacgatgctgtttgtgggtctgatgaggtttgcaactgtggttttgggtttggtcagcctgaaaaatgtggcggtttcgtttgctgagacggtgaagagctccgcccccatcttcacggtgatcatgtctcggatgattctgggggagtacacagggctgctggtcaacctctccctcatcccagtcatgggcgggctggcgctgtgcacggccactgagatcagcttcaatgtcctggggttctcggccgcactgtccaccaacatcatggactgtttgcaaaatgttttttcaaaaaagctgctcagcggggacaaatacaggttctcggccccggagctgcagttctacaccagcgccgctgcggtggccatgctcgtcccggcccgggttttctttacggacgtcccagtgatcgggaggagcgggaagagcttcagctacaaccaggacgtggtgctgctgcttctgacagacggagtcctgttccaccttcagagcgtcacggcgtacgccctcatggggaaaatctccccggtgactttcagcgtcgccagcaccgtgaaacatgccttgtccatctggctcagcgtaatcgttttcggcaacaagatcaccagcttgtcggccgttggcacagccctggtgaccgttggggtcctgctctacaacaaagccaggcaacaccagcaggaggcgctgcagagcctggctgcagccactggccgggccccagacgacacagtggagccgctgcttccacaggaccccaggcagcatccctgagagcaggaagctgccagctgctgctgtcctcgtgacactgcatcccccagaaatgggcagggacgccctcctccatggccctgctggggtgcaggacatggggagctaagttggccattgcctgcggctttctcggtttgtcggtgaagaccagcagaaactcaaactggggattccaggtatcagcttcctggagtagacaccagaccagtagctgactgtgtccgccgagcccatccccgtgtaatgtgaaaacagcctctgaggctcccatgctgggggtgcccacttcctctctgggcgacaccccagggtccaccgggagccagaggtgggtccagtgccaacgagagccgctccctgccacagccaagagagccctcggcttcccacaccagccatcgaaggccctgaggccctggaccggcggcagactggccctgggcatgaggccacagagcagggccgaagggaggggacagagggccctggaaggaagggtctcctgctgccacggtgggcactcagaacttctccccacctgacccagggctgtgggcatcctcagactatcccagaggcatcgcaagcctcaagctgcagcattgcacggcactcaagggctatgaccacggaggccgttcagtcgcttctgtttagaggaaggccccctacctcttccacaccctgccctcctatcccttccacaccctgggctgcatgagctccccgcaaccccagggcaccctgccctcctacctgtgggggtttccagccctgaggttgaggacaaacctctcgtgtttaacttgggaggagatgtgtacgttccttttcttttttggactctgagtatgaggcaggctgttctgaggtccccgtggggtgagcctgtctgtcctccctcagagcccaccgttcctatcatcatctagcacctgtccggttccccacgtgagccttgggcaggacgctgcagtgttgatggtttgggttacgtggcgtttacctgggcgccgtccttgctgaaaaaggaaacgtccacactgaatgtttctggggcgcgtggtgtgtgtcaggcgcccaccctgtcccactctccccaagggacagtagtacggcacactggggccaccagccagctcaactcatcctcctgtgtcacgcacccccgagggcgcaggaggcctgaggagtggctactggagccgtgtgttaggcagaggcttctgaccatgtctgagctctttacccccaatctcgcaaccggcggattcccatgcccggtgcagcctgttgccagccagcctttgagacccagagctccagggcttgtcagaggcagcatggggctccagtggtcccgagtctcatttccctgcctgctctttaggcctttggcacccatggtcacttcactggttttccatttggcttctcacctgggaaatacaaaaatagcccctcctgaagataaaatcgttcagaaacagagcaataattctgactcattaacttctacctactcaaaaaagtctgccatgatgatggaccgaagtgaggctttttaacccacaagtaacctttttatttttttgagacggtcttgctctgtcacccaggctggagtgcagtggcatgatcttggctcgctgcagcctcgacttcctgggctcaagtgatccacctcagcctcccatgtggctggaaccgcaggcacgtgccaccatgcctggctatttttttgttgagctgggctctcgctttgttgcccaggctggtcttgaactcctcggctcaagcaatccttcccactcagcctcctgtagtgtcgagaatataggcgtgggctactacacctgcttcagccgcttctataaaaccgctgacctgtgtgtggaggacaggccaggtgtgtgctcactgcgctgcgaagatgttttgtcacgtgactttccctgggtttccatttctttttttctgctttcctcaaaaactaatagaagaccggctgcggtagctcaggcctctagtcccagcactttgggaggctgcagatggcggatcacaaggccaggagttcgagaccagcctggccaacatgatgaaaccctgtctctaccaaaaatacaaaaattagctgggtgtgatggtgggtgcctgtggtctcagctactcaggaggctgaggcaggagaattgtttgagccccagaggcggaggttgcagtgagccaagatcgtgccattgcactccagcctgggcaacagggcaagattccgtctcaaaaacaaacactattagaaaatgctctggaggtggcggggagttgttgatttgtgaggacagattgaaagcaactcccagggtggccttgtccacctccccatcgagaatatggctgccggcctctttgaagattgtggtctggcataaggagaggtgcaggcgcctggttctgagcaccttggaatttccagccgcacagcatctggtgccctcccctccaccctcacaaggagctgccatcctgtttggattttctgtttgtggaccagaaacaaacgtttttccaaaggattagcaaataggttgatttcctgtgtaacgctgctctggggcctcttcctcatcctggcagaaggagcctggagcccatgaggcagccagcactgtgcccttgctcagtcgtgctgtcccctccctctccctcagtctcttctccatgcccaagtcagtttccagccgctggtcttcatggcattcccagcacagctggacaccaagaggcaaaacccaaggcctggcttggccgtgttaacgattgtacagacatttttttaaataactttgtgtaatacttttctagaatagtaagttcttgttgaactgtcacagatgagcttctaggaacacaccgggtgtggttacttccactgggtgtgtccatggtcgtggtctgtgcctttgtaaacaaacagaacacttgaaccaccttccgaattgggtcatcggcttctttacattgatacttagagatttgcagctctctaactttcaaggaaacttcccctactgaaaggcataaaaaggttaaaaaagaaaatccgagagtcccaattccctgtataacagcattaaaataatctgcctgcctggaaagatgagaacactgttgcacaacccaaaatgtgtttttaatttgtgaaaaattaccatggtgagtcagacagtcattttaaacagctgaacagagactatcatcagcaaatagagctcagctttgtagctgcctttaaaatccttgtcccaaatccggtgagctctgcttgctgccgccgcgctcctgggtgatcactcagacgggtcagtgggaataacgggccaacaagacagctttttacatgtgtccaaaggatggcctttcgaaggcctggaagtatttcactgttggaagaagtaaacaagaatgacattccagatggaaatagaattctctctcttgcctttgaccaacatggtactaaggggtttcttctttcccaatgtatgtacgtgccctgctgggggccttactttatagaatgagagcatccgagcttccctaatgaatctggctagttctgtgtctggctgaggatacaggagtgggacatccactctcggatccctcagagcacagaaaccttcagctttgctgtctctgaagtatttcctccagtttccctgcgggcccctatgtttgagtttgatggctgctggatcctcactcaacgaaaactcggttggaaactgttccgcctggcagtccttttttgttgttttccatctcatttcccttccatctgaaagtggcattcagctgacttgctcatttagactgttcacggagtctgaatctgccaacgtggtgttggaggctccaccttgaaaagggccacagtcagggcaactttccccatacaggaaaacttgaaaattacatcaacagtctacgtcacagccaaattatatttcctttataccaaacaaaactatggagaactaaaagtacatcacacaaaacgtttatagtgttttgcatgtgacctatttcagtatttatataactagattagtgctttctagcaaacggttctgttaattagcgagtcactgttgattctgctgtggtggtaagttgataccgtgtaactaatcccgtggatgcctcctcgttatttttgtccaaacgaagcagccgtggtagtagctgtctatgattcttgctcagcaaagtaaaataaatgttaaatatgg

SEQ ID NO: 3024 - protein, 466 aa, Homo sapien
RYACGGDCIRLSRLLLRFAWERPWWPRSWRPESLLRPHPRAVTVTHAAQPGGKIVRGCGFSMSSSVKTPALEELVPGSEEKPKGRSPLSWGSLFGHRSEKIVFAKSDGGTDENVLTVTITETTVIESDLGVWSSRALLYLTLWFFFSFCTLFLNKYILSLLGGEPSMLGAVQMLSTTVIGCVKTLVPCCLYQHKARLSYPPNFLMTMLFVGLMRFATVVLGLVSLKNVAVSFAETVKSSAPIFTVIMSRMILGEYTGLLVNLSLIPVMGGLALCTATEISFNVLGFSAALSTNIMDCLQNVFSKKLLSGDKYRFSAPELQFYTSAAAVAMLVPARVFFTDVPVIGRSGKSFSYNQDVVLLLLTDGVLFHLQSVTAYALMGKISPVTFSVASTVKHALSIWLSVIVFGNKITSLSAVGTALVTVGVLLYNKARQHQQEALQSLAAATGRAPDDTVEPLLPQDPRQHP

SEQ ID NO: 3025 - DNA, 1918 bp, Homo sapien
gggtagtagaacaatgggattatgctgtcacaaaaaccaaagaaaaaacataatttcttaaatcatggtctgtcactgaatctggttataaaaccttatcttgcactagaaggatctgtagcttttccagctgagaatggggttcaggataccgaatcaacacaagaaaagagagaaactggggatgaagaaaactcagctaaatttcctgtaggaaggagagattttgacacactcagctgtatgctgggaagagtctaccaatcttgctggcaagtctgattctttttttgatatggacctgttggtctatgtcatcttttcagaagaaaagcatttaattgccaatgggaggagaagcccataatgttactgtaacttgggtattatgttaaatgtctggtttaaaagaaagtagcgttaagatagatcagtaaccaaaatcataggctttttctgtgcattgaactttgtgaaaattctgtataattatgacttactagtatttttgaacaatgcttaacatactaaccttacatacactctagaccaaaataaggcatcataatttacaccttaatctcaaaaattaagcatgtctttggtgaatggttttatatatacataaacctaaagcatataagacaaaaatttatgtttggagcctgtgttctgtaaagagaaggttgatttgtcttttagctatcgtatttggagtggaactataatacaaatgtataatattctttttttttttttttttttgagatggagtctcactctgttgcccaggctggagtgcaatggcacgatctcggctcactgaaacctctgcctcccgggttcaagcaatttcctgcctcagcctcatgaatagctgggattacaggtgcccaccaccatgcctggctagtttttgtatttttagtagaggcaaggtttcaccatcttggtcaagttggtctggaactcctgacctcgtgatccacctgcctcggcttcccaaagtgctgggattacaggcgtgcaccactgagtccagcctatattcttgtttatcagttcaaaaatgttctgctctgtttttgactctttaaaaataacttagattcaaatttatagtagaaagaaaaaaaaatctttcagataagaggtgttctccagaatggaggaactacttggcatgtaagaaatagcgtcagtgtcctaatgcatattgtgactgtttgcatatacttctgtttgtaaaaatatcagttttacttttcagaggatttgtaagaaacatttaaattttcattgaaataaatgacaagtcatactgccacttaaaaaaaaaaagacctttgtcaaggagagtgcagtcaaccagtaaattgcagattctcagaatgtttattgacgtactgattattcattctgttatactctaacatctgtatatttttaccagtattctcagaccacttctaccaaaacataaatctgtgattgtgatctctgaaagtcagtccttttatctactcaataactgatctgataatgtcaacttttgaaaacagatagttatgactcaaggctttgagaatgtaaagagaccaccttcacttgttgagaaatggtacgatttcacgttatcagtgcagttccgttctcgggggaaagcccatccgtactaccaggagactggatccgcaaagtagacacttggtctcatgaagccactgctgggctccagagagaagggaaaactaagaggttttaaaacccctaccctccttggtttacctccatcattaaaaaacaacaatgacaacgacaacaaaaaacaaaactaaaacgacttattatttattaattatgttgtggcagacaatatgctgaacattagacataattaaatctttttaaaaattga

SEQ ID NO: 3026 - protein, 86 aa, Homo sapien
MLSQKPKKKHNFLNHGLSLNLVIKPYLALEGSVAFPAENGVQDTESTQEKRETGDEENSAKFPVGRRDFDTLSCMLGRVYQSCWQV

SEQ ID NO: 3027 - DNA, 1822 bp, Homo sapien
ccgctttagtgcgctcgccgtcggctctacctgcgtgctttagctccttctcgcctgatccttctgtctctcccaaccccggacacccggcttcgactggttatatcttcggtgttcttttcctctcttcttctttcgcggttcagcatgcaggaaaaagacgcctcctcacaaggtttcctgccacacttccaacatttcgccacgcaggcgatccatgtgggccaggatccagagcaatggacctccagggctgtagtgccccccatctcactgtccaccacgttcaagcaaggggcgcctggccagcactcgggttttgaatatagccgttctggaaatcccactaggaattgccttgaaaaagcagtggcagcactggatggggctaagtactgtttggcctttgcttcaggtttagcagccactgtaactattacccatcttttaaaagcaggagaccaaattatttgtatggatgatgtgtatggaggtacaaacaggtacttcaggcaagtggcatctgaatttggattaaagatttcttttgttgattgttccaaaatcaaattactagaggcagcaattacaccagaaaccaagcttgtttggatcgaaacccccacaaaccccacccagaaggtgattgacattgaaggctgtgcacatattgtccataagcatggagacattattttggtcgtggataacacttttatgtcaccatatttccagcgccctttggctctgggagctgatatttctatgtattctgcaacaaaatacatgaatggccacagtgatgttgtaatgggcctggtgtctgttaattgtgaaagccttcataatagacttcgtttcttgcaaaactctcttggagcagttccatctcctattgattgttacctctgcaatcgaggtctgaagactctacatgtccgaatggaaaagcatttcaaaaacggaatggcagttgcccagttcctggaatctaatccttgggtagaaaaggttatttatcctgggctgccctctcatccacagcatgagttggtgaagcgtcagtgtacaggttgtacagggatggtcaccttttatattaagggcactcttcagcatgctgagattttcctcaagaacctaaagctatttactctggccgagagcttgggaggattcgaaagccttgctgagcttccggcaatcatgactcatgcatcagttcttaagaatgacagagatgtccttggaattagtgacacactgattcgactttctgtgggcttagaggatgaggaagacctactggaagatctagatcaagctttgaaggcagcacaccctccaagtggaagtcacagctagtattccagagctgctattagaagctgcttcctgtgaagatcaaatcttcctgagtaattaaatggaccaacaatgagcctttgcaaaattttcaagcggaaattttaaggcacctcattatctttcataactgtaattttcttagggatcatctctgttaaaaagttttctgtatgtcatgttataattacaggtcaattctgttaatatctttttgttaattttgctctatgtttgcctctgaaggaggtgagatttgtgctactttgggagattatgttcttttttcatgtctaagatttattttgatcatgtttataatataatggtaattcatttttgatgttttgtgaagaatttaaatttaaacgaatgttcttaaatcaagtgtgatttttttgcatatcattgaaaagaacattaaaagcaatggtttacacttaaaaaaaaaaaaaaa

SEQ ID NO: 3028 - protein, 405 aa, Homo sapien
MQEKDASSQGFLPHFQHFATQAIHVGQDPEQWTSRAVVPPISLSTTFKQGAPGQHSGFEYSRSGNPTRNCLEKAVAALDGAKYCLAFASGLAATVTITHLLKAGDQIICMDDVYGGTNRYFRQVASEFGLKISFVDCSKIKLLEAAITPETKLVWIETPTNPTQKVIDIEGCAHIVHKHGDIILVVDNTFMSPYFQRPLALGADISMYSATKYMNGHSDVVMGLVSVNCESLHNRLRFLQNSLGAVPSPIDCYLCNRGLKTLHVRMEKHFKNGMAVAQFLESNPWVEKVIYPGLPSHPQHELVKRQCTGCTGMVTFYIKGTLQHAEIFLKNLKLFTLAESLGGFESLAELPAIMTHASVLKNDRDVLGISDTLIRLSVGLEDEEDLLEDLDQALKAAHPPSGSHS

SEQ ID NO: 3029 - DNA, 1186 bp, Homo sapien
gttcacttcacagtacagagtcctgaaaataaagaagaaaatttttttttatctagaaaaagaaccaaacatgtcactttctagcctgctgaaggtggtcacagcttcactgtggctaggacctggcattgcccagaagataactcaaacccaaccaggaatgttcgtgcaggaaaaggaggctgtgactctggactgcacatatgacaccagtgatccaagttatggtctattctggtacaagcagcccagcagtggggaaatgatttttcttatttatcaggggtcttatgaccagcaaaatgcaacagaaggtcgctactcattgaatttccagaaggcaagaaaatccgccaaccttgtcatctccgcttcacaactgggggactcagcaatgtatttctgtgcaatgagagcggtgtacaccgataaactcatctttggaaaaggaacccgtgtgactgtggaaccaagaagtcagcctcataccaaaccatccgtttttgtcatgaaaaatggaacaaatgtcgcttgtctggtgaaggaattctaccccaaggatataagaataaatctcgtgtcatccaagaagataacagagtttgatcctgctattgtcatctctcccagtgggaagtacaatgctgtcaagcttggtaaatatgaagattcaaattcagtgacatgttcagttcaacacgacaataaaactgtgcactccactgactttgaagtgaagacagattctacagatcacgtaaaaccaaaggaaactgaaaacacaaagcaaccttcaaagagctgccataaacccaaagccatagttcataccgagaaggtgaacatgatgtccctcacagtgcttgggctacgaatgctgtttgcaaagactgttgccgtcaattttctcttgactgccaagttatttttcttgtaaggctgactggcatgaggaagctacactcctgaagaaaccaaaggcttacaaaaatgcatctccttggcttctgacttctttgtgattcaagttgacctgtcatagccttgttaaaatggctgctagccaaaccactttttcttcaaagacaacaaacccagctcatcctccagcttgatgggaagacaaaagtcctggggaaggggggtttatgtcctaactgctttgtatgctgttttataaagggat

SEQ ID NO: 3030 - protein, 288 aa, Homo sapien [sequence omitted]

SEQ ID NO: 3031 - DNA, 1834 bp, Homo sapien
ggaggcacagataaagataagttttactgtcacgctgcttttaacataacagagcaacatcacctaggaaaaaagtttgtaggaggatttttaatccatatatttgtcttatggctagataaagatttctctgaaaaaaagaagcatgtcaggaatctctgggtgcccctttttcctctggggacttctagcattgttgggcttggctttggttatatcactgatcttcaatatttcccactatgtggaaaagcaacgacaagataaaatgtacagctactccagtgaccacaccagggttgatgagtattatattgaagacacaccaatttatggtaacttagatgatatgatttcagaaccaatggatgaaaattgctatgaacaaatgaaagcccgaccagagaaatctgtaaataagatgcaggaagccaccccatctgcacaggcaaccaatgaaacacagatgtgctacgcctcacttgatcacagcgttaaggggaagcgtagaaagcccaggaaacagaatactcatttctcagacaaggatggagatgagcaactacatgcaatagatgccagcgtttctaagaccaccttagtagacagtttctccccagaaagccaggcagtagaggaaacattcatgatgatcccatcagactgtttggattgatccgtgctaagagagaacctataaactagctggaccatgatctagttcaatgatttggctcctattgaagatggcttctaagaaaacaagatgcacagaggacacagaaggacttggcagcagggtgatgacctgatcatttgttgatgggatggtggcttacctcttattcacagcttacacttatgcatgccaaatgtaaggccatgaaaatcagtatttcaaataccttaaaaaatgctttactactaaaatgtaaaaaattaatgtgctcacctcggcagcacatatactaaaaattaataagacccagcttgaaaattgagcctgataacaagattacaaattcacaatacctaatacttagggaagtataaaaatttaagcatgaatgcgttctggaacacgttagaagaaaaataaaagccaatgagtttttttttaattctcctttctcaccaatgggcaatagcccataattgaaataaatttctgattgaaaggtataggaaacattaaaatgcattactaagagaagtaatataattttcttacaaagtatttttcccaaagatagctttactatttcaaaaattgtcaaattaatgcatgctccttacaacaaacaaatatcaaaaagagtttaggaattctactagccagagatagtcacttggagaaactttctatatatccttctaaatatttttctgggcatgcttatgtatgtacatcagttgtttctttttattttgaaccaaaaatgtggtttcttttgtacacattacttaaactttctttccagtcaaccatatattgtggatttattttcactgttatatttaactatatataaatacgcatatattgtaattttaatgtctgcttagcaccccactgataaccaaatcacagtttatttaaataattttaatgacttttcaaaaacaatttattgatgcaaaaagcaaggttgagatgacaatgtttctttcaataattaaaaaatactgcttcactgtcttctctctgtttcatcagaaacacatactataatacttgtctctgtccttaagtgtgatacacgctatttttctgattgttaagactttccttattactggttctaatttgattataatatgccaaggtatggtc

SEQ ID NO: 3032 - protein, 176 aa, Homo sapien
MSGISGCPFFLWGLLALLGLALVISLIFNISHYVEKQRQDKMYSYSSDHTRVDEYYIEDTPIYGNLDDMISEPMDENCYEQMKARPEKSVNKMQEATPSAQATNETQMCYASLDHSVKGKRRKPRKQNTHFSDKDGDEQLHAIDASVSKTTLVDSFSPESQAVEETFMMIPSDCLD

SEQ ID NO: 3033 - DNA, 468 bp, Homo sapien; identical to SEQ ID NO: 2818

SEQ ID NO: 3034 - protein, 61 aa, Homo sapien; identical to SEQ ID NO: 2819

SEQ ID NO: 3035 - DNA, 2175 bp, Homo sapien
agcagctctgtaatgcgcttgtggtttcagatgtgggcggcctgtgtgaacctgtcgtgcaaagctcacgtcaccaactgctgcagttatctcctgaatcaggctgagggtctttgctgtgcacccagagatagttgggtgacaaatcacctccaggttggggatgcctcagacttgtgatgggactgggcagatgcatctgggaagtaactgctgcaagaacggacagacactgctgcagagaacttgccacggtgtttcatgctgtggctggtggttccaggctgcacgctccattctaggaaaggggccctcagcccagtcccttgcaggctggaccttggagagtgaggccctgaggcgagacatgggcacctggctcctggcctgcatctgcatctgcacctgtgtctgcttgggagtctctgtcacaggggaaggacaagggccaaggtctagaaccttcacctgcctcaccaacaacattctcaggatcgattgccactggtctgccccagagctgggacagggctccagcccctggctcctcttcaccaggctcctggcggcacacataagtgcatcttgcggggcagtgagtgcaccgtcgtgctgccacctgaggcagtgctcgtgccatctgacaatttcaccatcactttccaccactgcatgtctgggagggagcaggtcagcctggtggacccggagtacctgccccggagacacgagcaacatcagttctggccactgcatcctgacctggagcatcagtcctgccttggagccaatgaccacacttctcagctatgagctggccttcaagaagcaggaagaggcctgggagcaggcccagcacagggatcacattgtcggggtgacctggcttatacttgaagcctttgagctggaccctggctttatccatgaggccaggctgcgtgtccagatggccacactggaggatgatgtggtagaggaggagcgttatacaggccagtggagtgagtggagccagcctgtgtgcttccaggctccccagagacaaggccctctgatcccaccctgggggtggccaggcaacacccttgttgctgtgtccatctttctcctgctgactggcccgacctacctcctgttcaagctgtcgcccagacttggatgggggcccacggggccggtgtgctgttgagccaggactgtgctggcaccccacagggagccttggagccctgcgtccaggaggccactgcactgctcacttgtggcccagcgcgtccttggaaatctgtggccctggaggaggaacaggagggccctgggaccaggctcccggggaacctgagctcagaggatgtgctgccagcagggtgtacggagtggagggtacagacgcttgcctatctgccacaggaggactgggcccccacgtccctgactaggccggctcccccagactcagagggcagcaggagcagcagcagcagcagcagcagcaacaacaacaactactgtgccttgggctgctatgggggatggcacctctcagccctcccaggaaacacacagagctctgggcccatcccagccctggcctgtggcctttcttgtgaccatcagggcctggagacccagcaaggagttgcctgggtgctggctggtcactgccagaggcctgggctgcatgaggacctccagggcatgttgctcccttctgtcctcagcaaggctcggtcctggacattctaggtccctgactcgccagatgcatcatgtccattttgggaaaatggactgaagtttctggagcccttgtctgagactgaacctcctgagaaggggcccctagcagcggtcagaggtcctgtctggatggaggctggaggctcccccctcaacccctctgctcagtgcctgtggggagcagcctctaccctcagcatcctggccacaagttcttccttccattgtcccttttctttatccctgacctctctgagaagtggggtgtggtctctcagctgttctgccctcatacccttaaagggccagcctgggcccagtggacacaggtaaggcaccatgaccacctggtgtgacctctctgtgccttactgaggcacctttctagagattaaaaggggcttgatggctgttaaaaaaaaaaaaaaaaaa

SEQ ID NO: 3036 - protein, 332 aa, Homo sapien
MHLGSNCCKNGQTLLQRTCHGVSCCGWWFQAARSILGKGPSAQSLAGWTLESEALRRDMGTWLLACICICTCVCLGVSVTGEGQGPRSRTFTCLTNNILRIDCHWSAPELGQGSSPWLLFTRLLAAHISASCGAVSAPSCCHLRQCSCHLTISPSLSTTACLGGSRSAWWTRSTCPGDTSNISSGHCILTWSISPALEPMTTLLSYELAFKKQEEAWEQAQHRDHIVGVTWLILEAFELDPGFIHEARLRVQMATLEDDVVEEERYTGQWSEWSQPVCFQAPQRQGPLIPPWGWPGNTLVAVSIFLLLTGPTYLLFKLSPRLGWGPTGPVCC

SEQ ID NO: 3037 - DNA, 328 bp, Homo sapien
cagtctgccctgactcagcctcgctcagtgtccggatctcctggacagtcagtcaccatctcctgcaccggaaccagcagtgatgttggtggttataactatgtctcctggtaccaacagcacccaggcaaagcccccacactcatgatttatgatgtcattaagcggccctcaggggtccctgatcgcttctctggctccaaatctggcaacacggcctccctgaccatctctgggctccaggctgaggatgaggctgattattattgcagctcaaatgcaggcagtttttatgtcttcggaactgggaccaaggtcaccgtcctag

SEQ ID NO: 3038 - DNA, 2314 bp, Homo sapien
cgcgcgcacagagcgagctcttgcagcctccccgcccctcccgcaacgctcgaccccaggattcccccggctcgcctgcccgccatggccgacaaggaagcagccttcgacgacgcagtggaagaacgagtgatcaacgaggaatacaaaatatggaaaaagaacaccccttttctttatgatttggtgatgacccatgctctggagtggcccagcctaactgcccagtggcttccagatgtaaccagaccagaagggaaagatttcagcattcatcgacttgtcctggggacacacacatcggatgaacaaaaccatcttgttatagccagtgtgcagctccctaatgatgatgctcagtttgatgcgtcacactacgacagtgagaaaggagaatttggaggttttggttcagttagtggaaaaattgaaatagaaatcaagatcaaccatgaaggagaagtaaacagggcccgttatatgccccagaacccttgtatcatcgcaacaaagactccttccagtgatgttcttgtctttgactatacaaaacatccttctaaaccagatccttctggagagtgcaacccagacttgcgtctccgtggacatcagaaggaaggctatgggctttcttggaacccaaatctcagtgggcacttacttagtgcttcagatgaccataccatctgcctgtgggacatcagtgccgttccaaaggagggaaaagtggtagatgcgaagaccatctttacagggcatacggcagtagtagaagatgtttcctggcatctactccatgagtctctgtttgggtcagttgctgatgatcagaaacttatgatttgggatactcgttcaaacaatacttccaaaccaagccactcagttgatgctcacactgctgaagtgaactgcctttctttcaatccttatagtgagttcattcttgccacaggatcagctgacaagactgttgccttgtgggatctgagaaatctgaaacttaagttgcattcctttgagtcacataaggatgaaatattccaggttcagtggtcacctcacaatgagactattttagcttccagtggtactgatcgcagactgaatgtctgggatttaagtaaaattggagaggaacaatccccagaagatgcagaagacgggccaccagagttgttgtttattcatggtggtcatactgccaagatatctgatttctcctggaatcccaatgaaccttgggtgatttgttctgtatcagaagacaatatcatgcaagtgtggcaaatggcagagaacatttataatgatgaagaccctgaaggaagcgtggatccagaaggacaagggtcctagatatgtctttacttgttgtgattttagactccccttttttcttctcaaccctgagagtgatttaacactggttttgagacagactttattcagctatccctctatataataggtaccaccgataatgctattagcccaaaccgtgggtttttctaaatattaataggggggcttgattcaacaaagccacagacttaacgttgaaattttcttcaggaattttctagtaacccaggtctaaagtagctacagaaaggggaatattatgtgtgattatttttcttcttatgctatatccccaagtttttcagactcatttaagtaaaggctagagtgagtaaggaatagagccaaatgaggtaggtgtctgagccatgaagtataaatactgaaagatgtcacttttattcaggaaatagggggagttcaagtcgtatagattcctactcgaaaatcttgacacctgactttccaggatgcacattttcatacgtagaccagtttcctcttggtttcttcagttaagtcaaaacaacacgttcctctttccccatatattcatatatttttgctcgttagtgtatttcttgagctgttttcatgttgtttatttcctgtctgtgaaatggtgtttttttttttgttgttggttttttttttttttttttaacttgggaccaccaagttgtaaagatgtatgtttttacctgacagttataccacaggtagactgtcaagttgagaagagtgaatcaataacttgtatttgttttaaaaattaaattaatccttgataagagttgctttttttttttaggagttagtccttgaccactagtttgatgccatctccattttgggtgacctgtttcaccagcaggcctgttactctccatgactaactgtgtaagtgcttaaaatggaataaattgcttttctacataaaaaaaaa

SEQ ID NO: 3039 - protein, 425 aa, Homo sapien
MADKEAAFDDAVEERVINEEYKIWKKNTPFLYDLVMTHALEWPSLTAQWLPDVTRPEGKDFSIHRLVLGTHTSDEQNHLVIASVQLPNDDAQFDASHYDSEKGEFGGFGSVSGKIEIEIKINHEGEVNRARYMPQNPCIIATKTPSSDVLVFDYTKHPSKPDPSGECNPDLRLRGHQKEGYGLSWNPNLSGHLLSASDDHTICLWDISAVPKEGKVVDAKTIFTGHTAVVEDVSWHLLHESLFGSVADDQKLMIWDTRSNNTSKPSHSVDAHTAEVNCLSFNPYSEFILATGSADKTVALWDLRNLKLKLHSFESHKDEIFQVQWSPHNETILASSGTDRRLNVWDLSKIGEEQSPEDAEDGPPELLFIHGGHTAKISDFSWNPNEPWVICSVSEDNIMQVWQMAENIYNDEDPEGSVDPEGQGS

SEQ ID NO: 3040 - DNA, 370 bp, Homo sapien
taacatctgcagtccctcagctggaagctgagctcttaatgcccctgcctcccctctgccctgggcctgctctcaactgccacaagctggcgcagaagaaagggcctgaggagatgcgggagctcctctgcaggtcctcccaggcaccaaccccttctgggaggaaggcttgggagtcccctaagacacatcttcagtcacttctctctgcctgtgactcaggaagaccagctcctcctactgtcttctgtgctagggatcacttccttgttgagtggggccggagttttaagaggatcttctgctcctcctcatctggtccctttccttccaaggcccccgagaggaaggcatgcggtgggccctactg

SEQ ID NO: 3041 - protein, 122 aa, Homo sapien [sequence omitted]

SEQ ID NO: 3042 - DNA, 330 bp, Homo sapien
atgacatccattcgagctgtatttatattcctgtggctgcagctggacttggtgaatggagagaatgtggagcagcatccttcaaccctgagtgtccaggagggagacagcgctgttatcaagtgtacttattcagacagtgcctcaaactacttcccttggtataagcaagaacttggaaaaggacctcagcttattatagacattcgttcaaatgtgggcgaaaagaaagaccaacgaattgctgttacattgaacaagacagccaaacatttctccctgcacatcacagagacccaacctgaagactcggctgtctacttctgtgca

SEQ ID NO: 3043 - protein, 109 aa, Homo sapien
MTSIRAVFIFLWLQLDLVNGENVEQHPSTLSVQEGDSAVIKCTYSDSASNYFPWYKQELGKGPQLIIDIRSNVGEKKDQRIAVTLNKTAKHFSLHITETQPEDSAVYFC

SEQ ID NO: 3044 - DNA, 3075 bp, Homo sapien
acttccgccccggaaagcgaggccgccaccatcttttgggtccgggaggattgagtcatcgggctccaatgcgtggggatgtttaccgccgtttatccgggatagagactccatcgtgctgacagcatccttttattcaccgcctccgaatttgcaaagaggaggaaggagggacttcttggcttctcccagcatagccccagttatgccatctcagaactatgaccttccccagaagaagcaggagaaaatgaccaagtttcaggaggctgtgacattcaaggatgtggctgtggtcttctccagggaggaactgcgactgctcgatcttacccagaggaagctgtaccgagatgtcatggtggagaacttcaagaacctggttgcagtggggcatcttcccttccaaccagatatggtatcccaattggaagcagaagaaaagctttggatgatggaaacagaaacccaaagaagcagcaagcatcaaaataagatggaaacactccaaaaatttgcattaaaatacctttcaaatcaagagctgtcctgctggcaaatctggaaacaggttgcaagtgaattaaccaggtgtcttcaggggaagagttcccagttattacaaggtgactctattcaggtttctgaaaatgagaacaatataatgaaccctaaaggagatagctctatttatattgaaaatcaagagtttccattttggagaacccagcattcttgcgggaatacatatctgagtgagtcacagattcagagtagaggtaagcaaattgatgtgaaaaataacctgcaaatacatgaagacttcatgaagaaatcaccatttcatgagcatattaaaactgacacagaaccaaaaccctgcaaaggtaatgaatatggcaaaatcattagtgatggctccaaccagaaattacccttaggagagaaaccccatccatgtggtgagtgtggaaggggcttcagttatagcccaaggcttccccttcatccgaatgttcacacaggagaaaaatgcttcagtcaaagctcacatctgcgaactcatcagagaattcacccaggagagaaactcaatagatgtcatgaatctggtgattgcttcaataagagctcttttcattcttatcaatctaatcatacaggagagaagtcttatagatgcgacagttgcggcaagggattcagtagcagcacgggtcttatcattcattacagaactcatactggagagaaaccctataaatgcgaggaatgtggtaaatgctttagtcaaagttcaaattttcagtgccatcagagagtccacactgaagaaaaaccatacaaatgcgaagagtgtggtaagggcttcggttggagtgttaatctccgtgttcaccagagggtccacaggggtgagaagccctataaatgtgaggaatgtggtaagggcttcactcaggctgcacattttcacatccatcagagagtccacactggagagaaaccctacaagtgtgatgtgtgtggtaagggcttcagccacaattcaccattaatatgccatcggagagtccacacaggagagaagccatacaagtgtgaggcgtgtgggaaaggctttacccgtaatacagatctgcatattcatttcagagttcacacgggagagaaaccctataaatgtaaggagtgtggtaagggcttcagtcaggcttcaaatcttcaagtccatcagaatgtccacactggggagaaacgattcaagtgtgaaacgtgtgggaagggcttcagtcagtcctcaaagcttcaaacccatcagcgagtccacactggagagaaaccatatagatgtgatgtgtgtggtaaggacttcagttatagttcaaatcttaaactacaccaagtaattcacactggagaaaaaccatataaatgtgaggaatgtgggaagggcttcagttggagatcaaatcttcatgcacatcaaagagttcactcaggagaaaaaccctataaatgtgagcagtgtgataagagcttcagtcaggccatagattttcgggtacatcagagagtccatactggagagaagccatacaaatgtggtgtctgtggtaagggcttcagtcagtcctctggtcttcaatcccatcagagagtccacacgggggaaaagccatacaaatgtgatgtgtgtggaaagggctttagatacagttcgcagtttatataccatcagagaggccacactggagaaaaaccttacaaatgtgaagagtgtgggaaaggctttggtaggagcttgaatcttcgccatcatcagagggtccacacgggagagaaaccccatatatgtgaggagtgtggtaaggccttcagtctcccctcaaatcttcgagtccacctgggtgttcacaccagggaaaaactctttaaatgtgaagagtgtggtaaaggcttcagtcagagtgcacgtcttgaagcccatcagagagtccacactggagaaaaaccatacaaatgtgacatatgtgataaggacttccgtcaccgttcacgtcttacatatcatcagaaagtccatactggtaaaaagctttagaaatgagaaatgtgttaccaacttttgtctgaatgcacatcttcaagtttttggctagtccatgctggtggtaaaccctgtaaaactactgagagtggaagggggtttgttcacacttggaatctttctaacaaatccatcaagatgataacacagaaccatgaacaggaatagaactcgtatttaggggagaaatagggctggtggctctcttggtaagatctagttaatataaatgatcacctttcattgtgaatatatgcctgaagataatgtgtggaaggatatttgccatatgctaactggttttttggccagggagagttttgggttattatcccttttctttaattttcattttatacttacagtgatcattattttcataaaagctgtaaagctatgaaaaatgaataaaattactaaaaattttctgtaaaaaaaaaaaaaaaagaaaaaaaaaaaaaaaa

SEQ ID NO: 3045 - protein, 799 aa, Homo sapien
MPSQNYDLPQKKQEKMTKFQEAVTFKDVAVVFSREELRLLDLTQRKLYRDVMVENFKNLVAVGHLPFQPDMVSQLEAEEKLWMMETETQRSSKHQNKMETLQKFALKYLSNQELSCWQIWKQVASELTRCLQGKSSQLLQGDSIQVSENENNIMNPKGDSSIYIENQEFPFWRTQHSCGNTYLSESQIQSRGKQIDVKNNLQIHEDFMKKSPFHEHIKTDTEPKPCKGNEYGKIISDGSNQKLPLGEKPHPCGECGRGFSYSPRLPLHPNVHTGEKCFSQSSHLRTHQRIHPGEKLNRCHESGDCFNKSSFHSYQSNHTGEKSYRCDSCGKGFSSSTGLIIHYRTHTGEKPYKCEECGKCFSQSSNFQCHQRVHTEEKPYKCEECGKGFGWSVNLRVHQRVHRGEKPYKCEECGKGFTQAAHFHIHQRVHTGEKPYKCDVCGKGFSHNSPLICHRRVHTGEKPYKCEACGKGFTRNTDLHIHFRVHTGEKPYKCKECGKGFSQASNLQVHQNVHTGEKRFKCETCGKGFSQSSKLQTHQRVHTGEKPYRCDVCGKDFSYSSNLKLHQVIHTGEKPYKCEECGKGFSWRSNLHAHQRVHSGEKPYKCEQCDKSFSQAIDFRVHQRVHTGEKPYKCGVCGKGFSQSSGLQSHQRVHTGEKPYKCDVCGKGFRYSSQFIYHQRGHTGEKPYKCEECGKGFGRSLNLRHHQRVHTGEKPHICEECGKAFSLPSNLRVHLGVHTREKLFKCEECGKGFSQSARLEAHQRVHTGEKPYKCDICDKDFRHRSRLTYHQKVHTGKKL

SEQ ID NO: 3046 - DNA, 1581 bp, Homo sapien
  Unsure 1396-1413: Unknown base
cacagatcctaatttagcctcatggatccagaggcaaaaaaagtttaatccctcttttacattatatagactttcaaaattcaaagacggctgtcatgcgttcctggagccctcactcttgctaattaggcttctgacttcagacaggtcagaagctctgtccagcaaaatttttaaatctttaatataaggagcatgaaccagatgacatttaagatccttccctctctgacattctataaacttcagtttgagtctctgaaaaaaatggaacttttttgctttttccctttcttttcaccatctatatcaaatatagatgattctcttgagtagtaaaagagtacaagcatattcaatgctatttcttaggaaccgttaattaatctttcaacaatcaattcaatcatgattacaacagctttgatgagcactagtgctacagcaactgagacagcaaccaagaggcaagaaacctgggattggttttcatggttgtttctaccatcagagtcaaagaatcatcttcacacaacaacacaaatggctggtaatgagttattattatctcatagcgtatgttttcttgacagccttgaataattttgattgacctctgggatgttattaaagcctaacgttccttctattctcacaaattttcgttatgacttcagaaggatcattaactctggtatctgtttgtttgcttgtatggcaccaataagcagatttcttctttctaatctatggattagtatagaccaggagaaggctaatacagagactatgaaacgggaataagtttttttaacgatatggcaaaattgtgactctgaaagatcattcatgtatattctaaaattaccacagtcataaaaagtcttggactttcatgaggaaatagcatagctagatatgaaaaaatatagaaaatcttcatcaatggaactattcttggggtagacactaatcatatgaaaagacaaatgctcattccctaagatagcctgaatctcatttaaaatgtagaaaacccctttttagtaaagagacatcttctacagtaaccactgagaagaagtggaagtttttcatctcctttttttattcaaaaagaaaaagaatttctcaatttctgaaccacagttcactttagttaacccctttgattgcctaataatgccaaaaatgatttctctgttaattggcttcacatttttgctctatgctgaagtagtattgggaactgcagtgtagcttccatctctgtttggaggtacactgatctgatctgatactagagaagataaaaaatgaattagcaaattgtgaacacaatgaaatgactgacgtaggtgtagattccaacatttttctgaaggtgtcttgaccnnnnnnnnnnnnnnnnnnggcacgtgtgaaacctttccattctgttcttgatggcttggctttaatggcatatggttaatgagttaataataaacatatctgaaagtgtgggggagttttcattagcctttaaaaacttatatggtgagattatgtccacacttattctttcagctttcttaaaga

SEQ ID NO: 3047 - protein, 62 aa, Homo sapien
  Unsure 1396-1413: Unknown amino acid
TDPNLASWIQRQKKFNPSFTLYRLSKFKDGCHAFLEPSLLLIRLLTSDRSEALSSKIFKSLI

SEQ ID NO: 3048 - DNA, 712 bp, Homo sapien
atcaaatttagctctcacttatcagtgagaacaactttcatcccacatctaatttgtctttcttcactctggtgtggaaattttgatagagattccaatatcacttaaacgtttcccagaatatttagatagaataatttagtttcttctgaaaagtttattttaggctagtgccacatggttgtgaatattagcatggtagccaaataatagtttgtttaaatgtatatttcccaatataaatataaggggcatcataatttttaaaaactataaaatctagaagaaaaatctatggataaaatccataattctatcatctgaatgcaatgaacattagcatttaggtatattttcttgcaggttttttaaccatatacttatagagaatatgtaatttgggtctgtgttttttacatataaatatttttctatgttaaatagtcttcataagttaattataaagatctgcttaatagttctgctactgcagttttcattattagataagttggtcattatagttggacatttaggtttacaatattaaagcagtggtttatatcaatttcagtggtttaaaatatgaatttctattttggaatgaaagtattaatttaatgtagtgaatctcatattccagaactgagatgattgatttgatgctatttgtgacagacagaacccataataaagcctttctatgcaagtt

SEQ ID NO: 3049 - protein, 35 aa, Homo sapien [sequence omitted]

SEQ ID NO: 3050 - DNA, 412 bp, Homo sapien
gttcgatgtgactgcagtatgagattaaagccacaactattgtttattttggggactctaggccaccaagtattagcacacatacttatgttttctctactaatctggtccaggtcctcatggaccacaggacaaagctttcattttcattcattcttctattgaaattataccaaattcagctgaggaatatggaagtaactttagacttaaacaagacaaaagttttttcactgaagaattgacaagtatttgctccttaaaacaatgcagattagtgaacgtggattcctgctgaggggagtgcatcccataatatggcaataattttcagtttctccaacgaaaagatagtgaaggaattaaatcttttgtcctcccatggttaaaaaaaaaaaaaaagctgtgttca

SEQ ID NO: 3051 - protein, 54 aa, Homo sapien
VRCDCSMRLKPQLLFILGTLGHQVLAHILMFSLLIWSRSSWTTGQSFHFHSFFY

SEQ ID NO: 3052 - DNA, 3483 bp, Homo sapien
aaaatcttgtgggaagagctgaagcaggcgctcttggctcggcgcggcccgctgcaatccgtggaggaacgcgccgccgagccaccatcatgcctgggcacttacaggaaggcttcggctgcgtggtcaccaaccgattcgaccagttatttgacgacgaatcggaccccttcgaggtgctgaaggcagcagagaacaagaaaaaagaagccggcgggggcggcgttgggggccctggggccaagagcgcagctcaggccgcggcccagaccaactccaacgcggcaggcaaacagctgcgcaaggagtcccagaaagaccgcaagaacccgctgccccccagcgttggcgtggttgacaagaaagaggagacgcagccgcccgtggcgcttaagaaagaaggaataagacgagttggaagaagacctgatcaacaacttcagggtgaagggaaaataattgatagaagaccagaaaggcgaccacctcgtgaacgaagattcgaaaagccacttgaagaaaagggtgaaggaggcgaattttcagttgatagaccgattattgaccgacctattcgaggtcgtggtggtcttggaagaggtcgagggggccgtggacgtggaatgggccgaggagatggatttgattctcgtggcaaacgtgaatttgataggcatagtggaagtgatagatcttctttttcacattacagtggcctgaagcacgaggacaaacgtggaggtagcggatctcacaactggggaactgtcaaagacgaattaacagagtcccccaaatacattcagaaacaaatatcttataattacagtgacttggatcaatcaaatgtgactgaggaaacacctgaaggtgaagaacatcatccagtggcagacactgaaaataaggagaatgaagttgaagaggtaaaagaggagggtccaaaagagatgactttggatgagtggaaggctattcaaaataaggaccgggcaaaagtagaatttaatatccgaaaaccaagtgaaggtgctgatgggcagtggaagaagggatttgttcttcataaatcaaagagtgaagaggctcatgctgaagattcggttatggaccatcatttccggaagccagcaaatgatataacgtctcagctggagatcaattttggagaccttggccgcccaggacgtggcggcaggggaggacgaggtggacgtgggcgtggtgggcgcccaaaccgtggcagcaggaccgacaagtcaagtgcttctgctcctgatgtggatgacccagaggcattcccagctctggcttaactggatgccataagacaaccctggttcctttgtgaacccttctgttcaaagcttttgcatgcttaaggattccaaacgactaagaaattaaaaaaaaaaagactgtcattcataccattcacacctaaagactgaattttatctgttttaaaaatgaacttctcccgctacacagaagtaacaaatatggtagtcagttttgtatttagaaatgtattggtagcagggatgttttcataattttcagagattatgcattcttcatgaatacttttgtattgctgcttgcaaatatgcatttccaaacttgaaatataggtgtgaacagtgtgtaccagtttaaagctttcacttcatttgtgttttttaattaaggatttagaagttcccccaattacaaactggttttaaatattggacatactggttttaatacctgctttgcatattcacacatggtcaactgggacatgttaaactttgatttgtcaaattttatgctgtgtggaatactaactatatgtattttaacttagttttaatattttcatttttggggaaaaatcttttttcacttctcatgatagctgttatatatatatgctaaatctttatatacagaaatatcagtacttgaacaaattcaaagcacatttggtttattaacccttgctccttgcatggctcattaggttcaaattataactgatttacattttcagctatatttactttttaaatgcttgagtttcccattttaaaatctaaactagacatcttaattggtgaaagttgtttaaactacttattgttggtaggcacatcgtgtcaagtgaagtagttttataggtatgggttttttctcccccttcaccagggtgggtggaataagttgatttggccaatgtgtaatatttaaactgttctgtaaaataagtgtctggccatttggtatgatttctgtgtgtgaaaggtcccaaaatcaaaatggtacatccataatcagccaccatttaacccttccttgttctaaaacaaaaaccaaagggcgctggttggtagggtgaggtgggggagtattttaatttttggaatttgggaagcagacagctttactttgtaaggttggaacagcagcactatacatgaaatataaaccaaaaacctttactgtttctaaatttcctagattgctattatttggttgtaagttgagtattccacagaaggtggtaattatctcttctctcttcctccattagaaaattaggtaaataatggattcctataatgggagcatcaccacttattaaaacacacatagaatgatgaattaaaaaagttttctaggattgtcttttattctgccacatttattgataaacagtgaaggaatttttaaaaaatttttaagaattgtttgtcacgtcatttttagaaatgttctacctgtatatggtaatgtccagttttaaaaatattggacatcttcaatcttaaacatttctatttagctgattggttctcacatatacttctaaaagaaacttttatgttataagagttactttttggataagatttattaatctcagttacctactattctgacattttaggaaggaggtaattgtttttaatgatggataaacttgtgctggtgttttggatcttatgatgctgagcatgttctgcactggtgctaatgtctaataattttatatttacacacatacgtgctacccagagattaatttagtccatatgaactattgacccattgttcattgagacagcaacatacgcactcctaaatcagtgtgtttagacttttcaagtatctaactcatttccaaacatgtaccatgttttataaacctcttgatttccagcaacatactatagaaaacacctgctactcaaaacacaacttctcagtgtcatccattgctgtcgtgagagacaacatagcaatatctggtatgttgcaagctttcaagatagcctgaacttaaaaagttggtgcattagttgtatctgatggatataaatttgcctcctagttcactttgtgtcaagagctaaaactgtgaacctaactttctcttattggtgggtaataactgaaaataaagatttattttcatgctcacttcttaaaagtcat

SEQ ID NO: 3053 - protein, 408 aa, Homo sapien
MPGHLQEGFGCVVTNRFDQLFDDESDPFEVLKAAENKKKEAGGGGVGGPGAKSAAQAAAQTNSNAAGKQLRKESQKDRKNPLPPSVGVVDKKEETQPPVALKKEGIRRVGRRPDQQLQGEGKIIDRRPERRPPRERRFEKPLEEKGEGGEFSVDRPIIDRPIRGRGGLGRGRGGRGRGMGRGDGFDSRGKREFDRHSGSDRSSFSHYSGLKHEDKRGGSGSHNWGTVKDELTESPKYIQKQISYNYSDLDQSNVTEETPEGEEHHPVADTENKENEVEEVKEEGPKEMTLDEWKAIQNKDRAKVEFNIRKPSEGADGQWKKGFVLHKSKSEEAHAEDSVMDHHFRKPANDITSQLEINFGDLGRPGRGGRGGRGGRGRGGRPNRGSRTDKSSASAPDVDDPEAFPALA

SEQ ID NO: 3054 - DNA, 2201 bp, Homo sapien; identical to SEQ ID NO: 2066

SEQ ID NO: 3055 - protein, 387 aa, Homo sapien; identical to SEQ ID NO: 2067

SEQ ID NO: 3056 - DNA, 1843 bp, Homo sapien
gcgagatccctaccgcagtagccgcctctgccgccgcggagcttcccgaacctctcagccgcccggagccgctcccggagcccggccgtagaggctgcaatcgcagccgggagcccgcagcccgcgccccgagcccgccgccgcccttcgagggcgccccaggccgcgccatggtgaaggtgacgttcaactccgctctggcccagaaggaggccaagaaggacgagcccaagagcggcgaggaggcgctcatcatcccccccgacgccgtcgcggtggactgcaaggacccagatgatgtggtaccagttggccaaagaagagcctggtgttggtgcatgtgctttggactagcatttatgcttgcaggtgttattctaggaggagcatacttgtacaaatattttgcacttcaaccagatgacgtgtactactgtggaataaagtacatcaaagatgatgtcatcttaaatgagccctctgcagatgccccagctgctctctaccagacaattgaagaaaatattaaaatctttgaagaagaagaagttgaatttatcagtgtgcctgtcccagagtttgcagatagtgatcctgccaacattgttcatgactttaacaagaaacttacagcctatttagatcttaacctggataagtgctatgtgatccctctgaacacttccattgttatgccacccagaaacctactggagttacttattaacatcaaggctggaacctatttgcctcagtcctatctgattcatgagcacatggttattactgatcgcattgaaaacattgatcacctgggtttctttatttatcgactgtgtcatgacaaggaaacttacaaactgcaacgcagagaaactattaaaggtattcagaaacgtgaagccagcaattgtttcgcaattcggcattttgaaaacaaatttgccgtggaaactttaatttgttcttgaacagtcaagaaaaacattattgaggaaaattaatatcacagcataaccccaccctttacattttgtgcagtgattattttttaaagtcttctttcatgtaagtagcaaacagggctttactatcttttcatctcattaattcaattaaaaccattaccttaaaatttttttctttcgaagtgtggtgtcttttatatttgaattagtaactgtatgaagtcatagataatagtacatgtcaccttaggtagtaggaagaattacaatttctttaaatcatttatctggatttttatgttttattagcattttcaagaagacggattatctagagaataatcatatatatgcatacgtaaaaatggaccacagtgacttatttgtagttgttagttgccctgctacctagtttgttagtgcatttgagcacacattttaattttcctctaattaaaatgtgcagtattttcagtgtcaaatatatttaactatttagagaatgatttccacctttatgttttaatatcctaggcatctgctgtaataatattttagaaaatgtttggaatttaagaaataacttgtgttactaatttgtataacccatatctgtgcaatggaatataaatatcacaaagttgtttaactagactgcgtgttgtttttcccgtataataaaaccaaagaatagtttggttcttcaaatcttaagagaatccacataaaagaagaaactattttttaaaaattcacttctatatatacaatgagtaaaatcacagattttttctttaaataaaaataagtcattttaataactaaaccagattctttgtggatactattaaagtaacatttaagcctcaaccttg

SEQ ID NO: 3057 - protein, 266 aa, Homo sapien
MVKVTFNSALAQKEAKKDEPKSGEEALIIPPDAVAVDCKDPDDVVPVGQRRAWCWCMCFGLAFMLAGVILGGAYLYKYFALQPDDVYYCGIKYIKDDVILNEPSADAPAALYQTIEENIKIFEEEEVEFISVPVPEFADSDPANIVHDFNKKLTAYLDLNLDKCYVIPLNTSIVMPPRNLLELLINIKAGTYLPQSYLIHEHMVITDRIENIDHLGFFIYRLCHDKETYKLQRRETIKGIQKREASNCFAIRHFENKFAVETLICS

SEQ ID NO: 3058 - DNA, 1843 bp, Homo sapien; identical to SEQ ID NO: 3056

SEQ ID NO: 3059 - protein, 266 aa, Homo sapien; identical to SEQ ID NO: 3057

SEQ ID NO: 3060 - DNA, 4575 bp, Homo sapien
gcgccccgccctttctcggcccccggaggtgacggggtgaaggcgggggaaccgaggtggggagtccgccagagctcccagactgcgagcacgcgagccgccgcagccgtcacccgcgccgcgtcacggctcccgggcccgccctcctctgacccctcccctctctccgtttgcccctctccccctcctccgccgaccgagcagtgacttaagcaacggagcgcggtgaagctcatttttctccttcctcgcagccgcgccagggagctcgcggcgcgcggcccctgtcctccggcccgagatgaatcctgcggcagaagccgagttcaacatcctcctggccaccgactcctacaaggttactcactataaacaatatccacccaacacaagcaaagtttattcctactttgaatgccgtgaaaagaagacagaaaactccaaattaaggaaggtgaaatatgaggaaacagtattttatgggttgcagtacattcttaataagtacttaaaaggtaaagtagtaaccaaagagaaaatccaggaagccaaagatgtctacaaagaacatttccaagatgatgtctttaatgaaaagggatggaactacattcttgagaagtatgatgggcatcttccaatagaaataaaagctgttcctgagggctttgtcattcccagaggaaatgttctcttcacggtggaaaacacagatccagagtgttactggcttacaaattggattgagactattcttgttcagtcctggtatccaatcacagtggccacaaattctagagagcagaagaaaatattggccaaatatttgttagaaacttctggtaacttagatggtctggaatacaagttacatgattttggctacagaggagtctcttcccaagagactgctggcataggagcatctgctcacttggttaacttcaaaggaacagatacagtagcaggacttgctctaattaaaaaatattatggaacgaaagatcctgttccaggctattctgttccagcagcagaacacagtaccataacagcttgggggaaagaccatgaaaaagatgcttttgaacatattgtaacacagttttcatcagtgcctgtatctgtggtcagcgatagctatgacatttataatgcgtgtgagaaaatatggggtgaagatctaagacatttaatagtatcgagaagtacacaggcaccactaataatcagacctgattctggaaaccctcttgacactgtgttaaaggttttggagattttaggtaagaagtttcctgttactgagaactcaaagggttacaagttgctgccaccttatcttagagttattcaaggggatggagtagatattaataccttacaagagattgtagaaggcatgaaacaaaaaatgtggagtattgaaaatattgccttcggttctggtggaggtttgctacagaagttgacaagagatctcttgaattgttccttcaagtgtagctatgttgtaactaatggccttgggattaacgtcttcaaggacccagttgctgatcccaacaaaaggtccaaaaagggccgattatctttacataggacgccagcagggaattttgttacactggaggaaggaaaaggagaccttgaggaatatggtcaggatcttctccatactgtcttcaagaatggcaaggtgacaaaaagctattcatttgatgaaataagaaaaaatgcacagctgaatattgaactggaagcagcacatcattaggctttatgactgggtgtgtgttgtgtgtatgtaatacataatgtttattgtacagatgtgtggggtttgtgttttatgatacattacagccaaattatttgttggtttatggacatactgccctttcattttttttcttttccagtgtttaggtgatctcaaattaggaaatgcatttaaccatgtaaaagatgagtgctaaagtaagctttttagggccctttgccaataggtagtcattcaatctggtattgatcttttcacaaataacagaactgagaaacttttatatataactgatgatcacataaaacagatttgcataaaattaccatgattgctttatgtttatatttaacttgtatttttgtacaaacaagattgtgtaagatatatttgaagtttcagtgatttaacagtctttccaacttttcatgatttttatgagcacagactttcaagaaaatacttgaaaataaattacattgccttttgtccattaatcagcaaataaaacatggccttaacaaagttgtttgtgttattgtacaatttgaaaattatgtcgggacataccctatagaattactaaccttactgccccttgtagaatatgtattaatcattctacattaaagaaaataatggttcttactggaatgtctaggcactgtacagttattatatatcttggttgttgtattgtaccagtgaaatgccaaatttgaaaggcctgtactgcaattttatatgtcagagattgcctgtggctctaatatgcacctcaagattttaaggagataatgtttttagagagaatttctgcttccactatagaatatatacataaatgtaaaatacttacaaaagtggaagtagtgtattttaaagtaattacacttctgaatttatttttcatattctatagttggtatgacttaaatgaattactggagtgggtagtgagtgtacttaaatgtttcaattctgttatattttttattaagtttttaaaaaattaaattggatattaaattgtatggacatcatttattaattttaaactgaatgccctcaataagtaatactgaagcacattcttaaatgaagataaattatctccaatgaaaagcatgacatgtgtttcaatagaagaatcttaagttggctaaattcaaagtgcttgacatcaaaatgttctagagtgattagctactagattctgaatcatacatcacatctgactagagaccagtttctttcgaatgattcttttatgtatgtagatctgttcttctgaggcagcggttggccaactatagcccaaaggccaaatttggacttctttttataaatgcagattgtctatggctgctttcccactactccagcctaaggtaaacagctgcaatagaagccaaatgagaatcgcaaagcccaaaatgtttattaacctgccctttacacaaaatcacacaaaaagtttcctgatctctgttctaagaaaaggagtgtgccttgcatttaaaaggaaatgttggtttctagggaagggaggaggctaaataattgatacggaattttcctcttttgtcttcttttttctcacttaagaatccgatactggaagactgatttagaaaagtttttaacatgacattaaatgtgaaattttaaaaattgaaaagccataaatcatctgttttaaatagttacatgagaaaatgatcactagaataacctaattagaagtgttatcttcattaaatgttttttgtaagtggtattagaaagaatatgtttttcagatggttctttaaacatgtagtgagaacaataagcattattcacttttagtaagtcttctgtaatccatgatataaaataattttaaaatgattttttaatgtatttgagtaaagatgagtagtattaagaaaaacacacatttcttcacaaaatgtgctaaggggcgtgtaaagaatcaaaagaaactattaccaataatagttttgataatcacccataattttgtgtttaaacattgaaattatagtacagacagtattctctgtgttctgtgaatttcagcagcttcagaatagagtttaatttagaaatttgcagtgaaaaaagctatctctttgttcacaaccataaatcaggagatggagattaattctattggctcttagtcacttggaactgattaattctgactttctgtcactaagcacttggtatttggccatctccattctgagcaccaaacggttaacacgaatgtccactagaactctgctgtgtgtcacccttaaatcagtctaaatcttccagacaaaagcaaatggcatttatggatttaagtcattagattttcaactgacattaattaatccctcttgattgattatatcatcaagtatttatatcttaaataggaggtaggatttctgtgttaagactcttatttgtaccctataattaaagtaaaatgttttttatgagtatcccttgttttcccttcttaaattgttatcaaacaatttttataatgaaatctatcttggaaaattagaaagaaaaatggcaaggtatttattgttctgtttgccataatttagaactcacacttaagtattttgtagttttacattcctttttaacccattcagtggagaatgtcagcttttctcccaagttgtatgttaagtctattctaatatgtactcaacatcaagttataaacatgtaataaacatggaaataaagtttagctctattagtgaagtgttaaa

SEQ ID NO: 3061 - protein, 491 aa, Homo sapien [sequence omitted]

SEQ ID NO: 3062 - DNA, 2376 bp, Homo sapien
cgcgcggcccctgtcctccggcccgagatgaatcctgcggcagaagccgagttcaacatcctcctggccaccgactcctacaaggttactcactataaacaatatccacccaacacaagcaaagtttattcctactttgaatgccgtgaaaagaagacagaaaactccaaattaaggaaggtgaaatatgaggaaacagtattttatgggttgcagtacattcttaataagtacttaaaaggtaaagtagtaaccaaagagaaaatccaggaagccaaagatgtctacaaagaacatttccaagatgatgtctttaatgaaaagggatggaactacattcttgagaagtatgatgggcatcttccaatagaaataaaagctgttcctgagggctttgtcattcccagaggaaatgttctcttcacggtggaaaacacagatccagagtgttactggcttacaaattggattgagactattcttgttcagtcctggtatccaatcacagtggccacaaattctagagagcagaagaaaatattggccaaatatttgttagaaacttctggtaacttagatggtctggaatacaagttacatgattttggctacagaggagtctcttcccaagagactgctggcataggagcatctgctcacttggttaacttcaaaggaacagatacagtagcaggacttgctctaattaaaaaatattatggaacgaaagatcctgttccaggctattctgttccagcagcagaacacagtaccataacagcttgggggaaagaccatgaaaaagatgcttttgaacatattgtaacacagttttcatcagtgcctgtatctgtggtcagcgatagctatgacatttataatgcgtgtgagaaaatatggggtgaagatctaagacatttaatagtatcgagaagtacacaggcaccactaataatcagacctgattctggaaaccctcttgacactgtgttaaaggttttggagattttaggtaagaagtttcctgttactgagaactcaaagggttacaagttgctgccaccttatcttagagttattcaaggggatggagtagatattaataccttacaagagattgtagaaggcatgaaacaaaaaatgtggagtattgaaaatattgccttcggttctggtggaggtttgctacagaagttgacaagagatctcttgaattgttccttcaagtgtagctatgttgtaactaatggccttgggattaacgtcttcaaggacccagttgctgatcccaacaaaaggtccaaaaagggccgattatctttacataggacgccagcagggaattttgttacactggaggaaggaaaaggagaccttgaggaatatggtcaggatcttctccatactgtcttcaagaatggcaaggtgacaaaaagctattcatttgatgaaataagaaaaaatgcacagctgaatattgaactggaagcagcacatcattaggctttatgactgggtgtgtgttgtgtgtatgtaatacataatgtttattgtacagatgtgtggggtttgtgttttatgatacattacagccaaattatttgttggtttatggacatactgccctttcattttttttcttttccagtgtttaggtgatctcaaattaggaaatgcatttaaccatgtaaaagatgagtgctaaagtaagctttttagggccctttgccaataggtagtcattcaatctggtattgatcttttcacaaataacagaactgagaaacttttatatataactgatgatcacataaaacagatttgcataaaattaccatgattgctttatgtttatatttaacttgtatttttgtacaaacaagattgtgtaagatatatttgaagtttcagtgatttaacagtctttccaacttttcatgatttttatgagcacagactttcaagaaaatacttgaaaataaattacattgccttttgtccattaatcagcaaataaaacatggccttaacaaagttgtttgtgttattgtacaatttgaaaattatgtcgggacataccctatagaattactaaccttactgccccttgtagaatatgtattaatcattctacattaaagaaaataatggttcttactggaatgtctaggcactgtacagttattatatatcttggttgttgtattgtaccagtgaaatgccaaatttgaaaggcctgtactgcaattttatatgtcagagattgcctgtggctctaatatgcacctcaagattttaaggagataatgtttttagagagaatttctgcttccactatagaatatatacataaatgtaaaatacttacaaaagtgg

SEQ ID NO: 3063 - protein, 491 aa, Homo sapien [sequence omitted]

SEQ ID NO: 3064 - DNA, 1098 bp, Homo sapien
cggcacgagggtcccgcgcgctcctccgacccgctccgctccgctccgctcggccccgcgccgcccgtcaacatgatccgctgcggcctggcctgcgagcgctgccgctggatcctgcccctgctcctactcagcgccatcgccttcgacatcatcgcgctggccggccgcggctggttgcagtctagcgaccacggccagacgtcctcgctgtggtggaaatgctcccaagagggcggcggcagcgggtcctacgaggagggctgtcagagcctcatggagtacgcgtggggtagagcagcggctgccatgctcttctgtggcttcatcatcctggtgatctgtttcatcctctccttcttcgccctctgtggaccccagatgcttgtcttcctgagagtgattggaggtctccttgccttggctgctgtgttccagatcatctccctggtaatttaccccgtgaagtacacccagaccttcacccttcatgccaaccctgctgtcacttacatctataactgggcctacggctttgggtgggcagccacgattatcctgattggctgtgccttcttcttctgctgcctcctcaactacgaagatgaccttctgggcaatgccaagcccaggtacttctacacatctgcctaacttgggaatgaatgtgggagaaaatcgctgctgctgagatggactccagaagaagaaactgtttctccaggcgactttgaacccattttttggcagtgttcatattattaaactagtcaaaaatgctaaaataatttgggagaaaatattttttaagtagtgttatagtttcatgtttatcttttattatgttttgtgaagttgtgtcttttcactaattacctatactatgccaatatttccttatatctatccataacatttatactacatttgtaagagaatatgcacgtgaaacttaacactttataaggtaaaaatgaggtttccaagatttaataatctgatcaagttcttgttatttccaaatagaatggactcggtctgttaagggctaaggagaagaggaagataaggttaaaagttgttaatgaccaaacattc

SEQ ID NO: 3065 - protein, 193 aa, Homo sapien
MIRCGLACERCRWILPLLLLSAIAFDIIALAGRGWLQSSDHGQTSSLWWKCSQEGGGSGSYEEGCQSLMEYAWGRAAAAMLFCGFIILVICFILSFFALCGPQMLVFLRVIGGLLALAAVFQIISLVIYPVKYTQTFTLHANPAVTYIYNWAYGFGWAATIILIGCAFFFCCLLNYEDDLLGNAKPRYFYTSA

SEQ ID NO: 3066 - DNA, 1017 bp, Homo sapien
gaaaaggagctcctgctgccactgctcttccggagcctgcagcatggggcccctgccgcgcaccgtggagctcttctatgacgtgctgtccccctactcctggctgggcttcgagatcctgtgccggtatcagaatatctggaacatcaacctgcagttgcggcccagcctcataacagggatcatgaaagacagtggaaacaagcctccaggtctgcttccccgcaaaggactatacatggcaaatgacttaaagctcctgagacaccatctccagattcccatccacttccccaaggatttcttgtctgtgatgcttgaaaaaggaagtttgtctgccatgcgtttcctcaccgccgtgaacttggagcatccagagatgctggagaaagcgtcccgggagctgtggatgcgcgtctggtcaaggaatgaagacatcaccgagccgcagagcatcctggcggctgcagagaaggctggtatgtctgcagaacaagcccagggacttctggaaaagatcgcaacgccaaaggtgaagaaccagctcaaggagaccactgaggcagcctgcagatacggagcctttgggttgcccatcaccgtggcccatgtggatggccaaacccacatgttatttggctctgaccggatggagctgctggcgcacctgctgggagagaagtggatgggccctatacctccagccgtgaatgccagactttaagattgcccggaggaagcaaactcttcgtataaaaaaagcaggccatctgcttaacccttggctccaccataaggcactgggactcggatttctctatctgatagaggtattttctgtggccctgggagctgtctgtctttcccctacccccaaggatgccaggaagacgtccaccattagccatgtggcaacctttacttctatgcctcacaagtgcctttcagagagccccaattctgctttcccacaaaataaacctaatgccatcaggcaaaaaaaaaaaaaaaaaaaaa

SEQ ID NO: 3067 - protein, 226 aa, Homo sapien
MGPLPRTVELFYDVLSPYSWLGFEILCRYQNIWNINLQLRPSLITGIMKDSGNKPPGLLPRKGLYMANDLKLLRHHLQIPIHFPKDFLSVMLEKGSLSAMRFLTAVNLEHPEMLEKASRELWMRVWSRNEDITEPQSILAAAEKAGMSAEQAQGLLEKIATPKVKNQLKETTEAACRYGAFGLPITVAHVDGQTHMLFGSDRMELLAHLLGEKWMGPIPPAVNARL

SEQ ID NO: 3068 - DNA, 2538 bp, Homo sapien
gctggagcatcccgctctggtgccgctgcagccggcagagatggttgagctcatgttcccgctgttgctcctccttctgcccttccttctgtatatggctgcgccccaaatcaggaaaatgctgtccagtggggtgtgtacatcaactgttcagcttcctgggaaagtagttgtggtcacaggagctaatacaggtatcgggaaggagacagccaaagagctggctcagagaggagctcgagtatatttagcttgccgggatgtggaaaagggggaattggtggccaaagagatccagaccacgacagggaaccagcaggtgttggtgcggaaactggacctgtctgatactaagtctattcgagcttttgctaagggcttcttagctgaggaaaagcacctccacgttttgatcaacaatgcaggagtgatgatgtgtccgtactcgaagacagcagatggctttgagatgcacataggagtcaaccacttgggtcacttcctcctaacccatctgctgctagagaaactaaaggaatcagccccatcaaggatagtaaatgtgtcttccctcgcacatcacctgggaaggatccacttccataacctgcagggcgagaaattctacaatgcaggcctggcctactgtcacagcaagctagccaacatcctcttcacccaggaactggcccggagactaaaaggctctggcgttacgacgtattctgtacaccctggcacagtccaatctgaactggttcggcactcatctttcatgagatggatgtggtggcttttctcctttttcatcaagactcctcagcagggagcccagaccagcctgcactgtgccttaacagaaggtcttgagattctaagtgggaatcatttcagtgactgtcatgtggcatgggtgtctgtccaagctcgtaatgagactatagcaaggcggctgtgggacgtcagttgtgacctgctgggcctcccaatagactaacaggcagtgccagttggacccaagagaagactgcagcagactacacagtacttcttgtcaaaatgattctccttcaaggttttcaaaacctttagcacaaagagagcaaaaccttccagccttgcctgcttggtgtccagttaaaactcagtgtactgccagattcgtctaaatgtctgtcatgtccagatttactttgcttctgttactgccagagttactagagatatcataataggataagaagaccctcatatgacctgcacagctcattttccttctgaaagaaactactacctaggagaatctaagctatagcagggatgatttatgcaaatttgaactagcttctttgttcacaattcagttcctcccaaccaaccagtcttcacttcaagagggccacactgcaacctcagcttaacatgaataacaaagactggctcaggagcagggcttgcccaggcatggtggatcaccggaggtcagtagttcaagaccagcctggccaacatggtgaaaccccacctctactaaaaattgtgtatatctttgtgtgtcttcctgtttatgtgtgccaagggagtattttcacaaagttcaaaacagccacaataatcagagatggagcaaaccagtgccatccagtctttatgcaaatgaaatgctgcaaagggaagcagattctgtatatgttggtaactacccaccaagagcacatgggtagcagggaagaagtaaaaaaagagaaggagaatactggaagataatgcacaaaatgaagggactagttaaggattaactagccctttaaggattaactagttaaggattaatagcaaaagatattaaatatgctaacatagctatggaggaattgagggcaagcacccaggactgatgaggtcttaacaaaaaccagtgtggcaaaaaaaaaaaaaaaaaaaaaaaaaaaaaatcctaaaaacaaacaaacaaaaaaaacaattcttcattcagaaaaattatcttagggactgatattggtaattatggtcaatttaataatattttggggcatttccttacattgtcttgacaagattaaaatgtctgtgccaaaattttgtattttatttggagacttcttatcaaaagtaatgctgccaaaggaagtctaaggaattagtagtgttcccatcacttgtttggagtgtgctattctaaaagattttgatttcctggaatgacaattatattttaactttggtgggggaaagagttataggaccacagtcttcacttctgatacttgtaaattaatcttttattgcacttgttttgaccattaagctatatgtttagaaatggtcattttacggaaaaattagaaaaattctgataatagtgcagaataaatgaattaatgttttacttaatttatattgaactgtcaatgacaaataaaaattctttttgattattttttgttttcatttaccagaataaaaactaagaattaaaagtttgattacagtcaaaaaaaaaaaaaaaaaaaaaaa

SEQ ID NO: 3069 - protein, 318 aa, Homo sapien
MVELMFPLLLLLLPFLLYMAAPQIRKMLSSGVCTSTVQLPGKVVVVTGANTGIGKETAKELAQRGARVYLACRDVEKGELVAKEIQTTTGNQQVLVRKLDLSDTKSIRAFAKGFLAEEKHLHVLINNAGVMMCPYSKTADGFEMHIGVNHLGHFLLTHLLLEKLKESAPSRIVNVSSLAHHLGRIHFHNLQGEKFYNAGLAYCHSKLANILFTQELARRLKGSGVTTYSVHPGTVQSELVRHSSFMRWMWWLFSFFIKTPQQGAQTSLHCALTEGLEILSGNHFSDCHVAWVSVQARNETIARRLWDVSCDLLGLPID

SEQ ID NO: 3070 - DNA, 2183 bp, Homo sapien
ccagggcctgactaaacctggagactcgggtggccgaggggcttcataccagctgaagagcgacaagccgctggcagccgcggatctcaccgccgctcagggtttttagaacttcagccataaaaatgggcagaattttccttgatcatatcggtggtacccgtctgttttcttgtgcaaactgtgatacgatcctgaccaaccgctcagaactcatctccactcgtttcacaggcgccactggcagagcatttctttttaacaaggtagttaacctgcagtacagcgaagttcaagatcgggtcatgctcactggccgccacatggttcgagatgtgagctgcaaaaactgcaatagcaaactgggatggatctatgagtttgccactgaagacagccagcgatataaggaaggccgcgtgatcctggaacgtgctctagttcgagagagtgagggctttgaggagcatgtaccatctgataactcttgaagatacagagagaaatccatcttttcccaggtctccttcactgaaaacaaaaatctacttacatacactgtcaccttagcatcagagtcggattaatgaactgcggaacaagaggttgtgagaatctaagatggaacctttctttctttctttctttttttttaaattttgtattttccatccaacagcagtgtgtagagagaatattatgcagatgccgttaattttttaccctatgtttacatcttgaggcagcagagtctgtctgcagctatgtggtgagctatgtaaggaaaaaaatctgggctgttagagtgaaaaagtgtgttttatgtcaattgtgaaaggaaaatgttaggagtatggtttttaaacttgggcttcattttaaacttttttttttaaacccagttatttcacttgatttgctagcttcagagaagagatccgaatctgtgcccagcgctaaaggctcagtgttagcatggcttgtgctggccggtgtgccatattcttgttggagatgaaccgtagcaccagagcccattcttccttgtcagtcttggcccaaagatgtcaccattcctagttatttgtcaccacataattggtgttgattggaaactttttctgagatgggacagaactgctgggttgtctttttccatgtaacttaagcatagtaatataaataaagtaatagttggatgcttttggtcctgtgttgcttttaaaaacaccttataaaagaggagagtatttgataagcaattttcatagtagtaaagttttttttcatctcttaaactaaattgaccatgcatataatattctttgtttaaatgaaagcatactgttgaaacccgcagtgttgcatttagaaaacagttgaacagaatgtcaatgtgcattcatgcaaaaaaacatttaatctgcatctgttttagaaaagggggaaatgaagcaacttgtctaaaaatactgctttacaaagcatttcagcctttccccctcagttttgcattgattttttgacaagtctgtagagcctaatagtttccatcaaaggcctagatctcttatttagcatttttttcagctcttctctcagaagttcagctgttgaaacgaaaactgtactttgtaccctcacatacaaagggatcaaatttgacctggtgttattttagccccaaatttatgacattacacaatattaaaatgtaaatgtttctttacccaaactacttctagatattctagtatttgcttctggtggaattaaatgacggtaaaattggctaattatttgaatgaatgaatggatggatgttttgcatgctcaatttctaggtcctttgtctagaaaggaaatttgcctcagttgaattagtgaaatatttctgtcgttgatattaaaagtgacttctgagtacagttaagttcctcctatttgccactgggctgttggttagaagcataggtaactgattaagtaggtatgatactgcatttgaaataagtggacacaaactatcctttctccaccatggactcaatctgagaacaacagcattcatttccattcatttccatactggcttttgattatatgcagattcctagtagcatgccttacctacagcactatgtgcatttgctgtcacaataaagtatattttgtcttgcaaa

SEQ ID NO: 3071 - protein, 121 aa, Homo sapien
MGRIFLDHIGGTRLFSCANCDTILTNRSELISTRFTGATGRAFLFNKVVNLQYSEVQDRVMLTGRHMVRDVSCKNCNSKLGWIYEFATEDSQRYKEGRVILERALVRESEGFEEHVPSDNS

SEQ ID NO: 3072 - DNA, 2413 bp, Homo sapien
gcgactcgtcccgccttctggggcactagtttgactttgtgattggctactagtatcaaggaatcccggcgtggacagcgcgaggagaaagatggcggcgatggcggtcgggggtgctggtgggagccgcgtgtccagcgggagggacctgaattgcgtccccgaaatagctgacacactaggggctgtggccaagcaggggtttgatttcctctgcatgcctgtcttccatccgcgtttcaagagggagttcattcaggaacctgctaagaatcggcccggtccccagacacgatcagacctactgctgtcaggaagggactggaatacgctaattgtgggaaagctttctccatggattcgtccagactcaaaagtggagaagattcgcaggaactccgaggcggccatgttacaggagctgaattttggtgcatatttgggtcttccagctttcctgctgccccttaatcaggaagataacaccaacctggccagagttttgaccaaccacatccacactggccatcactcttccatgttctggatgcgggtacccttggtggcaccagaggacctgagagatgatataattgagaatgcaccaactacacacacagaggagtacagtggggaggagaaaacgtggatgtggtggcacaacttccggactttgtgtgactatagtaagaggattgcagtggctcttgaaattggggctgacctcccatctaatcatgtcattgatcgctggcttggggagcccatcaaagcagccattctccccactagcattttcctgaccaataagaagggatttcctgttctttctaagatgcaccagaggctcatcttccggctcctcaagttggaggtgcagttcatcatcacaggcaccaaccaccactcagagaaggagttctgctcctacctccaatacctggaatacttaagccagaaccgtcctccacctaatgcctatgaactctttgccaagggctatgaagactatctgcagtccccgcttcagccactgatggacaatctggaatctcagacatatgaagtgtttgaaaaggaccccatcaaatactctcagtaccagcaggccatctataaatgtctgctagaccgagtaccagaagaggagaaggataccaatgtccaggtactgatggtgctgggagcaggacggggacccctggtgaacgcttccctgcgggcagccaagcaggccgaccggcggataaagctgtatgctgtggagaaaaacccaaatgccgtggtgacgctagagaactggcagtttgaagaatggggaagccaagtgaccgtagtctcatcagacatgagggaatgggtggctccagagaaagcagacatcattgtcagtgagcttctgggctcatttgctgacaatgaattgtcgcctgagtgcctggatggagcccagcacttcctaaaagatgatggtgtgagcatccccggggagtacacttcctttctggctcccatctcttcctccaagctgtacaatgaggtccgagcctgtagggagaaggaccgtgaccctgaggcccagtttgagatgccttatgtggtacggctgcacaacttccaccagctctctgcaccccagccctgtttcaccttcagccatcccaacagagatcctatgattgacaacaaccgctattgcaccttggaatttcctgtggaggtgaacacagtactacatggctttgccggctactttgagactgtgctttatcaggacatcactctgagtatccgtccagagactcactctcctgggatgttctcatggtttcccatcctcttccctattaagcagcccataacggtacgtgaaggccaaaccatctgtgtgcgtttctggcgatgcagcaattccaagaaggtgtggtatgagtgggctgtgacagcaccagtctgttctgctattcataaccccacaggccgctcatataccattggcctctagccctgcgtgccaagtgtccagagccttggaagcagcttcaggttcctgctcctgtagtacagaaggtgcagtacatctatgggctgtgattcccccttgcccatcagagaggagcatttcaatctgctttcctgccttacatcaaggtgggcaagggattataattaattgcagggctcaagccaccaatctatgaagacctcaggccagggggtgaggaattagtgctggatttgaagctacgcactcagcctcaagaactccctggaatatccctgagaacatggggtttgaacggattttcagcctttttctgttcttgttttgatggttttgtgtaagaggaaataccaataaagttatagccctttactgccaaaaaaaaaaaaaaaaaaaaaaaaaaaaaaa

SEQ ID NO: 3073 - protein, 637 aa, Homo sapien
MAAMAVGGAGGSRVSSGRDLNCVPEIADTLGAVAKQGFDFLCMPVFHPRFKREFIQEPAKNRPGPQTRSDLLLSGRDWNTLIVGKLSPWIRPDSKVEKIRRNSEAAMLQELNFGAYLGLPAFLLPLNQEDNTNLARVLTNHIHTGHHSSMFWMRVPLVAPEDLRDDIIENAPTTHTEEYSGEEKTWMWWHNFRTLCDYSKRIAVALEIGADLPSNHVIDRWLGEPIKAAILPTSIFLTNKKGFPVLSKMHQRLIFRLLKLEVQFIITGTNHHSEKEFCSYLQYLEYLSQNRPPPNAYELFAKGYEDYLQSPLQPLMDNLESQTYEVFEKDPIKYSQYQQAIYKCLLDRVPEEEKDTNVQVLMVLGAGRGPLVNASLRAAKQADRRIKLYAVEKNPNAVVTLENWQFEEWGSQVTVVSSDMREWVAPEKADIIVSELLGSFADNELSPECLDGAQHFLKDDGVSIPGEYTSFLAPISSSKLYNEVRACREKDRDPEAQFEMPYVVRLHNFHQLSAPQPCFTFSHPNRDPMIDNNRYCTLEFPVEVNTVLHGFAGYFETVLYQDITLSIRPETHSPGMFSWFPILFPIKQPITVREGQTICVRFWRCSNSKKVWYEWAVTAPVCSAIHNPTGRSYTIGL

SEQ ID NO: 3074 - DNA, 4447 bp, Homo sapien
atgcggcggcgctcgcggatgctgctctgcttcgccttcctgtgggtgctgggcatcgcctactacatgtactcggggggcggctctgcgctggccgggggcgcgggcggcggcgccggcaggaaggaggactggaatgaaattgaccccattaaaaagaaagaccttcatcacagcaatggagaagagaaagcacaaagcatggagaccctccctccagggaaagtacggtggccagactttaaccaggaagcttatgttggagggacgatggtccgctccgggcaggacccttacgcccgcaacaagttcaaccaggtggagagtgataagcttcgaatggacagagccatccctgacacccggcatgaccagtgtcagcggaagcagtggcgggtggatctgccggccaccagcgtggtgatcacgtttcacaatgaagccaggtcggccctactcaggaccgtggtcagcgtgcttaagaaaagcccgccccatctcataaaagaaatcatcttggtggatgactacagcaatgatcctgaggacggggctctcttggggaaaattgagaaagtgcgagttcttagaaatgatcgacgagaaggcctcatgcgctcacgggttcggggggccgatgctgcccaagccaaggtcctgaccttcctggacagtcactgcgagtgtaatgagcactggctggagcccctcctggaaagggtggcggaggacaggactcgggttgtgtcacccatcatcgatgtcattaatatggacaactttcagtatgtgggggcatctgctgacttgaagggcggttttgattggaacttggtattcaagtgggattacatgacgcctgagcagagaaggtcccggcaggggaacccagtcgcccctataaaaacccccatgattgctggtgggctgtttgtgatggataagttctattttgaagaactggggaagtacgacatgatgatggatgtgtggggaggagagaacctagagatctcgttccgcgtgtggcagtgtggtggcagcctggagatcatcccgtgcagccgtgtgggacacgtgttccggaagcagcacccctacacgttcccgggtggcagtggcactgtctttgcccgaaacacccgccgggcagcagaggtctggatggatgaatacaaaaatttctattatgcagcagtgccttctgctagaaacgttccttatggaaatattcagagcagattggagcttaggaagaaactcagctgcaagcctttcaaatggtaccttgaaaatgtctatccagagttaagggttccagaccatcaggatatagcttttggggccttgcagcagggaactaactgcctcgacactttgggacactttgctgatggtgtggttggagtttatgaatgtcacaatgctgggggaaaccaggaatgggccttgacgaaggagaagtcggtgaagcacatggatttgtgccttactgtggtggaccgggcaccgggctctcttataaagctgcagggctgccgagaaaatgacagcagacagaaatgggaacagatcgagggcaactccaagctgaggcacgtgggcagcaacctgtgcctggacagtcgcacggccaagagcgggggcctaagcgtggaggtgtgtggcccggccctttcgcagcagtggaagttcacgctcaacctgcagcagtaggagggtccgggaggccctgccgtcctgtctcctgcaccattgggtggagtctggtgatcgcattattgattatgtttcttaaactttctgcgaaactaatatacctcagtattccatcatggtctgaaagtcaaacttcggcaaggcacggacgactgtgcagacacatcagcggcaagaagcgagaactgccctccccctcctctcggtgcagccagccgggcccccttccccaggccggagcgcccctcttccttccagctttcacttctgccggtccgcaactgagtgacacccagcgacaaccgactggggagtggtagaagcaactgaacggatgcgtgcgagctgaggacagggcgggaggaggggcacacatgccccaggggagcgaggagaactcttgaaatctccattttcaatcccttcgaaatcacgtatggtttccacaaagccgagtcgtgtcacgtggcaggtttacgtcaatagtccctctctctgctcctccattcgcaagtgtcttcctgggccagactcccctccccctcatgtacttgctatattgaggatgaagttttctatggtgggacactaaatataaagctatatagagaaagaatgtacggtcagttccctatggtttctgtagatcatcgtcatcttgtatattccccacaaagccgttcgcagcttccgggagaaggggccagagcccggtatggggcaagttctctaacagagggaggaggtggcctttgtgtcccctggaggcccccggatccagccagttggtgctactgctgtggccagctggggggcttcctccagaccaccggcctcggccccggcatccctgttgggcgtcagcctgagagtccctactgtgcgtcagaatccaccttgcgtgctgtgcgtatctgtgaacctgggagacggttacttattttgacagatatcactttgggtctttttacattaaatttcttttctctaaggaatataagacataccccatagctctgtgtgagccagcaataccgctgccccctggcgacagggcagaccaatgatgccaggcagctgtcacacgctagtattggcttcattgtgatctgagccctgcacgctgggccttcagaattaatggccagcagtgtcagggatgagcccgtcagccagggcacaggcctggctcacagtcctgcacacctgctggcctgggggagctccagccaggcagcgagtcctgccccgcccgcagctccctcccacaccccgcctggccaagatgactgcttcagggggctttggggaaagaattaggaagggtcagaaccaaacaatacctgctcatttacactgaggattcagggcgggagacaggagccttggggtcctgttaaaccacagacagttatgaactgaaagtcataacggggagaggtgcctggcttctacctgggtgctcaggaatgttcctcctcacccctgccactctgtggtcggtgccctgcttcctcctccactcctggccgccttctccagcgccgcacacacagatgctcagtctcagagaggctggcacggcctggcagtctgagaaaatcgtcagttagccactgcaggccctcggtgggacagcggcggccttggattaggagccacctgggagtgtgccggtgccatgctcctccctgtgtcttgtatgaaagggccactgtgtgtcttcctccccggcgggagcccacatgttgcactgtaggacagcggcccgaagtggaagcctggctggaggctgccctataggtctctctccgcctcccctgccatgcaaccagatgtgtgtgaatgggccacgtgcccccacgctggatactccgccacgcttctgtctttcacggtgggcgctcggggggagctgagaaaaccccttagtactgtgcgagctgtggagtgcaggccagagcagggtgtgcgtagcccccagcacccaggttcttctgtcagaccctgtgacctgcgagctgctactactgtaaggagggaaatggatgaatctggctcgttttaaaatcacgttttctgacgaatcctttgccccttcacctttaccccgcccgcacccctaggccctctcagccttcctatcatcccacgtgtctacccagacccttgtgcggcccatgccctgggggcggcgtcctgtccctgagctgggaggcggctttggatggtccgggcgtcaagagcaggggtgggccggggaggggtcctttgcggtgagctatgtttacattgacacagtgtgccaaagtgacttactgcggttgcgttagtttctgtcatcaggacactatctcaccctcccactcctgtttttaaaactcagaattctttcctaagagcccttcgaagcaaagcgtgccgaagttagttgtcttctctgtgctggtcctttcttatgtcctcataaaagctcagatgatggtatctgtgagtatgttttgcaaattcaaaatatagtttggtaattttttttgccagttgatttttaaaaagaactgctgtacagagctagtactttgtccattttatgaatggaaaccatccttgaaaattgtttaacttaaataaagagaagatactttctagataccgctctttgctggccagagtctgtcctggtgtgtgaaggctgggtggggtgggtgtggggactgggattggggtc

SEQ ID NO: 3075 - protein, 571 aa, Homo sapien
MRRRSRMLLCFAFLWVLGIAYYMYSGGGSALAGGAGGGAGRKEDWNEIDPIKKKDLHHSNGEEKAQSMETLPPGKVRWPDFNQEAYVGGTMVRSGQDPYARNKFNQVESDKLRMDRAIPDTRHDQCQRKQWRVDLPATSVVITFHNEARSALLRTVVSVLKKSPPHLIKEIILVDDYSNDPEDGALLGKIEKVRVLRNDRREGLMRSRVRGADAAQAKVLTFLDSHCECNEHWLEPLLERVAEDRTRVVSPIIDVINMDNFQYVGASADLKGGFDWNLVFKWDYMTPEQRRSRQGNPVAPIKTPMIAGGLFVMDKFYFEELGKYDMMMDVWGGENLEISFRVWQCGGSLEIIPCSRVGHVFRKQHPYTFPGGSGTVFARNTRRAAEVWMDEYKNFYYAAVPSARNVPYGNIQSRLELRKKLSCKPFKWYLENVYPELRVPDHQDIAFGALQQGTNCLDTLGHFADGVVGVYECHNAGGNQEWALTKEKSVKHMDLCLTVVDRAPGSLIKLQGCRENDSRQKWEQIEGNSKLRHVGSNLCLDSRTAKSGGLSVEVCGPALSQQWKFTLNLQQ

SEQ ID NO: 3076 - DNA, 4447 bp, Homo sapien; identical to SEQ ID NO: 3074

SEQ ID NO: 3077 - protein, 571 aa, Homo sapien; identical to SEQ ID NO: 3075

SEQ ID NO: 3078 - DNA, 1494 bp, Homo sapien
ctcgcgaaagggcaggcatcgcggggctggccacttccgtacttccgctttccggcccagccagcgcccgcgatgactgccactctccgcccctacctgagtgccgtgcgggccacattgcaggctgccctctgcctggagaacttctcctcccaggttgtggaacgacacaacaagccggaagtggaagtcaggagtagcaaagagctcctgttacaacctgtgaccatcagcaggaatgagaaggaaaaggttctgattgagggctccatcaactctgtccgggtcagcattgctgtgaaacaggctgatgagatcgagaagattttgtgccacaagttcatgcgcttcatgatgatgcgagcagagaacttctttatccttcgaaggaagcctgtggaggggtatgatatcagctttctgatcaccaacttccacacagagcagatgtacaaacacaagttggtggactttgtgatccacttcatggaggagattgacaaggagatcagtgagatgaagctgtcagtcaatgcccgtgcccgcattgtggctgaagagttccttaagaatttttaaaccatctggctggatctcgtggccttccccctcagactacccatgtctccacgaaggcgtcctggagtcactccccgagcagcgcggcggcggcagggagttgggttggggtgggcatttgatgcgggaggtgggtggtgtgcttgctagctgggcaagaaagcagcagtggacctgccccaaggccacacgtgcctggtcaggctggcttctgatgttcagtcccctgggccgggacagattttttttaacgtcttgaaacttaaactctgtgcttgtaggatactgtaacctttttgtctttttttttttttttttttttaaacctccacctccagtggctgtgactggtcccagtgattatacgttattggttgctgtgggtctgggcgggcctggagccagaaggcgacttattttttctctcctatgccaccccaggtggggagggagggaggtttcagactccagtttctcccttgcccttttattcccaagcctccttggccccagtataagtgttgggaactctctgccagcttcctgagttctgcctaaagatggccccccagcactggttggggacaagggccaaattggtgaccaccagtcatgcctaggacctggggcccaaaagccgggcaacctctggctacaggggccattgggtgccctcccagttgagaggggccgctgtttcgccttgtccgtcagtgccagtgcctgtgccagaggtggcgaggtgagtcctccagagcttcctggccgggccctcctcctgcctgttctggctcctctgctcccacgctagctgtcccttttctgattctggtggatcctccctcccctaattaaagtctctttttgcccctttggggctgcatgaaaaaaaaaaaaaaaaaaaaaaaaaaaaaa

SEQ ID NO: 3079 - protein, 168 aa, Homo sapien
MTATLRPYLSAVRATLQAALCLENFSSQVVERHNKPEVEVRSSKELLLQPVTISRNEKEKVLIEGSINSVRVSIAVKQADEIEKILCHKFMRFMMMRAENFFILRRKPVEGYDISFLITNFHTEQMYKHKLVDFVIHFMEEIDKEISEMKLSVNARARIVAEEFLKNF

SEQ ID NO: 3080 - DNA, 3319 bp, Homo sapien
ccacgcgtccggggagcagcgagcacgcgtttcccgcaacccgataccatcggacaggatttctccgcctcagcccaacggggagatctctggaaacatggctacagaacatgttaatggaaatggtactgaagagcccatggatactacttctgcagttatccattcagaaaattttcagacattgcttgatgctggtttaccacagaaagttgctgaaaaactagatgaaatttacgttgcagggctagttgcacatagtgatttagatgaaagagctattgaagctttaaaagaattcaatgaagacggtgcattggcagttcttcaacagtttaaagacagtgatctctctcatgttcagaacaaaagtgcctttttatgtggagtcatgaagacttacaggcagagagaaaaacaagggaccaaagtagcagattctagtaaaggaccagatgaggcaaaaattaaggcactcttggaaagaacaggctacacacttgatgtgaccactggacagaggaagtatggaggaccacctccagattccgtttattcaggtcagcagccttctgttggcactgagatatttgtgggaaagatcccaagagatctatttgaggatgaacttgttccattatttgagaaagctggacctatatgggatcttcgtctaatgatggatccactcactggtctcaatagaggttatgcgtttgtcactttttgtacaaaagaagcagctcaggaggctgttaaactgtataataatcatgaaattcgttctggaaaacatattggtgtctgcatctcagttgccaacaataggctttttgtgggctctattcctaagagtaaaaccaaggaacagattcttgaagaatttagcaaagtaacagagggtcttacagacgtcattttataccaccaaccggatgacaagaaaaaaaacagaggcttttgctttcttgaatatgaagatcacaaaacagctgcccaggtaaaagtgctgtttgtacgcaaccttgccaatactgtaacagaagagattttagaaaaggcatttagtcagtttgggaaactggaacgagtgaagaagttaaaagattatgcgttcattcattttgatgagcgagatggtgctgtcaaggctatggaagaaatgaatggcaaagacttggagggagaaaatattgaaattgtttttgccaagccaccagatcagaaaaggaaagaaagaaaagctcagaggcaagcagcaaaaaatcaaatgtatgacgattactactattatggtccacctcatatgccccctccaacaagaggtcgagggcgtggaggtagaggtggttatggatatcctccagattattatggatatgaagattattatgattattatggttatgattaccataactatcgtggtggatatgaagatccatactatggttatgaagattttcaagttggagctagaggaaggggtggtagaggagcaaggggtgctgctccatccagaggtcgtggggctgctcctccccgcggtagagccggttattcacagagaggaggtcctggatcagcaagaggcgttcgaggtgcgagaggaggtgcccaacaacaaagaggccgcgggcagggaaaaggggtcgaggccggtcctgacctgttacaatgaagactgacttgctatgtgggattacaccagaagcttgcagtggagtaatggtaaggaaatcaagcaaccttaaatatgtcggctgtataggagcatattctattgcagaagaccttcctatgaagatcatggaatcaaatacgggacattgaactaatacttggactttgatatgaatttctttaacaattttctctgcagtgcaagttattaaactaaagctactctattttcaaaatgtgttccaacagaaatccttcataactcctagcatggtatcttaataaagaataaagttcttttaaaaatctgctctaagtagatttttccccttttttaaattaaggatcccaacagtggtattttgaaatattctcttgaatttgtgcatttaaattttattgcagtggtatagatgaatgccactgatggtatccttaaattttatttctgctcaccaaggttaatcatgattgtctatatcttttttatagtgatcacttttgaattgtgttcagatatgcagtttcaggtgtaatcatcagagctggttagtcaggcattccagatagtggttcttttcagaacctttttaaaagggttggttaactacctcagtagcagaggattgaactataccctgtctgtactgtacatagaaaatctttgtagataaaagcaaggcttgttaaatatgatatgagggtaagattttaatataccaaatgtaacattcttagttgcctttagtttcagaggcttgtaagacttcctcatgaccatcataacaggccttgcttttgtcgtattttgtggctgaaaaagcagccttgcttcttcagatattgtagttatttggatgtataatagtttagcaagatgttacttttgtaagacatcagatgttcaaaaaagtgcatccgaacttgtactaaatactgcagtgtccctttataaaaagtcagactaaaactgacaattgtacagcgaagcctgacatttggatattttgaagttttttcataaatcatagaaattagtatatggctgtagtttagctttttaggtaaaaggtatgtttcattagtgcatttcttcctgctgatcactgtaaacatgtgaatcagctttccatttcttatgcaggtcatgataacttgtagagtagagtacaatcatttgtgctatgtttttaattttctaaagcaccttgatgacagtgagtgtccagtggtgaagcatcctctattgaaccaccctcaaaaatttttttgccaagtcctaagttgatagcttaaagtaaaaagtgaaaattatagtttcattaggacttggtgtaaagaaatcccctccccccttccccaaagggatactgcagttatatcacatacccaataggcaccacgatgaagatcagagcttatacttaattaaggttttatacacaccagttccccagtaaatgcaaatttaacaagaaaatcagacatgtcatatgttcaaaatgctcatggcaaacaatcattttgcattcctgcaaataaaattgttttatactgtaagctggaggcgagtgtaacttatttttgtaataaagtttttatttttttttaaaaaaaaaaaaaaaaaaaaaaaaaa

SEQ ID NO: 3081 - protein, 527 aa, Homo sapien
MATEHVNGNGTEEPMDTTSAVIHSENFQTLLDAGLPQKVAEKLDEIYVAGLVAHSDLDERAIEALKEFNEDGALAVLQQFKDSDLSHVQNKSAFLCGVMKTYRQREKQGTKVADSSKGPDEAKIKALLERTGYTLDVTTGQRKYGGPPPDSVYSGQQPSVGTEIFVGKIPRDLFEDELVPLFEKAGPIWDLRLMMDPLTGLNRGYAFVTFCTKEAAQEAVKLYNNHEIRSGKHIGVCISVANNRLFVGSIPKSKTKEQILEEFSKVTEGLTDVILYHQPDDKKKNRGFCFLEYEDHKTAAQVKVLFVRNLANTVTEEILEKAFSQFGKLERVKKLKDYAFIHFDERDGAVKAMEEMNGKDLEGENIEIVFAKPPDQKRKERKAQRQAAKNQMYDDYYYYGPPHMPPPTRGRGRGGRGGYGYPPDYYGYEDYYDYYGYDYHNYRGGYEDPYYGYEDFQVGARGRGGRGARGAAPSRGRGAAPPRGRAGYSQRGGPGSARGVRGARGGAQQQRGRGQGKGVEAGPDLLQ

SEQ ID NO: 3082 - DNA, 1941 bp, Homo sapien
ctccactcgcgccggacacagggagcagcgagcacgcgtttcccgcaacccgataccatcggacaggatttctccgcctcagcccaacggggagggctagttgcacatagtgatttagatgaaagagctattgaagctttaaaagaattcaatgaagacggtgcattggcagttcttcaacagtttaaagacagtgatctctctcatgttcagaacaaaagtgcctttttatgtggagtcatgaagacttacaggcagagagaaaaacaagggaccaaagtagcagattctagtaaaggaccagatgaggcaaaaattaaggcactcttggaaagaacaggctacacacttgatgtgaccactggacagaggaagtatggaggaccacctccagattccgtttattcagatatttgtgggaaagatcccaagagatctatttgaggatgaacttgttccattatttgagaaagctggacctatatgggatcttcgtctaatgatggatccactcactggtctcaatagaggttatgcgtttgtcactttttgtacaaaagaagcagctcaggaggctgttaaactgtataataatcatgaaattcgttctggaaaacatattggtgtctgcatctcagttgccaacaataggctttttgtgggctctattcctaagagtaaaaccaaggaacagattcttgaagaatttagcaaagtaacagagggtcttacagacgtcattttataccaccaaccggatgacaagaaaaaaaacagaggctcttgctttcttgaatatgaagatcacaaaacagctgcccaggcaaggcgtaggttaatgagtggtaaagtcaaggtctgggggaatgttggaactgttgaatgggctgatcctatagaagatcctgatcctgaggttatggcaaaggtaaaagtgctgtttgtacgcaaccttgccaatactgtaacagaagagattttagaaaaggcatttagtcagtttgggaaactggaacgagtgaagaagttaaaagattatgcgttcattcattttgatgagcgagatggtgctgtcaaggctatggaagaaatgaatggcaaagacttggagggagaaaatattgaaattgtttttgccaagccaccagatcagaaaaggaaagaaagaaaagctcagaggcaagcagcaaaaaatcaaatgtatgacgattactactattatggtccacctcatatgccccctccaacaagaggtcgagggcgtggaggtagaggtggttatggatatcctccagattattatggatatgaagattattatgattattatggttatgattaccataactatcgtggtggatatgaagatccatactatggttatgaagattttcaagttggagctagaggaaggggtggtagaggagcaaggggtgctgctccatccagaggtcgtggggctgctcctccccgcggtagagccggttattcacagagaggaggtcctggatcagcaagaggcgttcgaggtgcgagaggaggtgcccaacaacaaagaggccgcgggcagggaaaaggggtcgaggccggtcctgacctgttacaatgaagactgacttgctatgtgggattacaccagaagcttgcagtggagtaatggtaaggaaatcaagcaaccttaaatatgtcggctgtataggagcatattctattgcagaagaccttcctatgaagatcatggaatcaaatacgggacattgaactaatacttggactttgatatgaatttctttaacaattttctctgcagtgcaagttattaaactaaagctactctattttcaaaatgtgttccaacagaaatccttcataactcctagcatggtatcttaataaagaataaagttcttttaaaaaaaaaaaaaaaaaaaaaaaaaaaaa

SEQ ID NO: 3083 - protein, 410 aa, Homo sapien [sequence omitted]

SEQ ID NO: 3084 - DNA, 1833 bp, Homo sapien
ggcacgagtgggagtacaggactcgcctcctcagggttccctgtgctgccacttttcagccatggccacaagtgaacagagtatctgccaagcccgggcttccgtgatggtctacgatgacaccagtaagaaatgggtaccaatcaaacctggccagcagggattcagccggatcaacatctaccacaacactgccagcaacaccttcagagtcgttggagtcaagttgcaggatcagcaggttgtgatcaattattcaatcgtgaaagggctgaagtacaatcaggccacgccaaccttccaccagtggcgagatgcccgccaggtctacggcttaaactttgcaagtaaagaagaggcaaccacgttctccaatgcaatgctgtttgccctgaacatcatgaattcccaagaaggaggcccctccagccagcgtcaggtgcagaatggcccctctcctgatgagatggacatccagagaagacaagtgatggagcagcaccagcagcagcgtcaggaatctctagaaagaagaacctcggccacagggcccatcctcccaccaggacatccttcatctgcagccagcgcccccgtctcatgtagtgggcctccaccgccccccccacccccagtcccacctccacccactggggctaccccacctcccccacccccactgccagccggaggagcccaggggtccagccacgacgagagctccatgtcaggactggccgctgccatagctggggccaagctgagaagagtccaacggccagaagacgcatctggaggctccagtcccagtgggacctcaaagtccgatgccaaccgggcaagcagcgggggtggcggaggaggcctcatggaggaaatgaacaaactgctggccaagaggagaaaagcagcctcccagtcagacaagccagccgagaagaaggaagatgaaagccaaatggaagatcctagtacctccccctctccggggacccgagcagccagccagccacctaactcctcagaggctggccggaagccctgggagcggagcaactcggtggagaagcctgtgtcctcgattctgtccagaaccccgtctgtggcaaagagccccgaagctaagagcccccttcagtcgcagcctcactctaggatgaagcctgctgggagcgtgaatgacatggccctggatgccttcgacttggaccggatgaagcaggagatcctagaggaggtggtgagagagctccacaaggtgaaggaggagatcatcgacgccatcaggcaggagctgagtgggatcagcaccacgtaaggggccggcctcgctgcgctgattcgtcgagcccatccggcgacagaggacagccagaagcccagccagccccagactccagtgcaccagagcacgcacaggagcctgggcgcgctgctgtgaaacgtcctgacctgtgatcacacatgacagtgaggaaaccaagtgcaactcctgggtttttttagattctgcctgacacggaacaccaggtctgctcgtcttttttgtgttttatatttgcttatttaaggtacatttctttgggtttctagagacgcccctaagtcacctgcttcattagacggtttccaggttttctcccaggtgacgctgttagcgcctcagctggcggtgacagccggcccagcgtggcgccaccacacaccgcagagctgtccaggcacagctccgtccccagcgctcatggtgttgaaactgtctgtcatgcaccacggtgtctgtgtccacacagtaataaacggtttactgtccgcaaaaaaaaaaaaaaaaaa

SEQ ID NO: 3085 - protein, 418 aa, Homo sapien
MATSEQSICQARASVMVYDDTSKKWVPIKPGQQGFSRINIYHNTASNTFRVVGVKLQDQQVVINYSIVKGLKYNQATPTFHQWRDARQVYGLNFASKEEATTFSNAMLFALNIMNSQEGGPSSQRQVQNGPSPDEMDIQRRQVMEQHQQQRQESLERRTSATGPILPPGHPSSAASAPVSCSGPPPPPPPPVPPPPTGATPPPPPPLPAGGAQGSSHDESSMSGLAAAIAGAKLRRVQRPEDASGGSSPSGTSKSDANRASSGGGGGGLMEEMNKLLAKRRKAASQSDKPAEKKEDESQMEDPSTSPSPGTRAASQPPNSSEAGRKPWERSNSVEKPVSSILSRTPSVAKSPEAKSPLQSQPHSRMKPAGSVNDMALDAFDLDRMKQEILEEVVRELHKVKEEIIDAIRQELSGISTT

SEQ ID NO: 3086 - DNA, 1297 bp, Homo sapien
gcgcaggcgtggggctctctccttgtcagtcggcgccgcgtgcgggctggtggctctgtggcagcggcggcggcaggactccggcactatgagcggcttcagcaccgaggagcgcgccgcgcccttctccctggagtaccgagtcttcctcaaaaatgagaaaggacaatatatatctccatttcatgatattccaatttatgcagataaggatgtgtttcacatggtagttgaagtaccacgctggtctaatgcaaaaatggagattgctacaaaggaccctttaaaccctattaaacaagatgtgaaaaaaggaaaacttcgctatgttgcgaatttgttcccgtataaaggatatatctggaactatggtgccatccctcagacttgggaagacccagggcacaatgataaacatactggctgttgtggtgacaatgacccaattgatgtgtgtgaaattggaagcaaggtatgtgcaagaggtgaaataattggcgtgaaagttctaggcatattggctatgattgacgaaggggaaaccgactggaaagtcattgccattaatgtggatgatcctgatgcagccaattataatgatatcaatgatgtcaaacggctgaaacctggctacttagaagctactgtggactggtttagaaggtataaggttcctgatggaaaaccagaaaatgagtttgcgtttaatgcagaatttaaagataaggactttgccattgatattattaaaagcactcatgaccattggaaagcattagtgactaagaaaacgaatggaaaaggaatcagttgcatgaatacaactttgtctgagagccccttcaagtgtgatcctgatgctgccagagccattgtggatgctttaccaccaccctgtgaatctgcctgcacagtaccaacagacgtggataagtggttccatcaccagaaaaactaatgagatttctctggaatacaagctgatattgctacatcgtgttcatctggatgtattagaagtaaaagtagtagcttttcaaagctttaaatttgtagaactcatctaactaaagtaaattctgctgtgactaatccaatatactcagaatgttatccatctaaagcatttttcatatctcaactaagataacttttagcacatgcttaaatatcaaagcagttgtcatttggaagtcacttgtgaatagatgtgcaaggggagcacatattggatgtatatgttaccatatgttaggaaataaaattattttgctgaaacttggaaaaaaaaaaaaaa

SEQ ID NO: 3087 - protein, 289 aa, Homo sapien
MSGFSTEERAAPFSLEYRVFLKNEKGQYISPFHDIPIYADKDVFHMVVEVPRWSNAKMEIATKDPLNPIKQDVKKGKLRYVANLFPYKGYIWNYGAIPQTWEDPGHNDKHTGCCGDNDPIDVCEIGSKVCARGEIIGVKVLGILAMIDEGETDWKVIAINVDDPDAANYNDINDVKRLKPGYLEATVDWFRRYKVPDGKPENEFAFNAEFKDKDFAIDIIKSTHDHWKALVTKKTNGKGISCMNTTLSESPFKCDPDAARAIVDALPPPCESACTVPTDVDKWFHHQKN

SEQ ID NO: 3088 - DNA, 6702 bp, Homo sapien
ccccgactagcccgacagtccccgactagcccgacagccccagcaggatctgcatcgtcatcgagccggcccagcttctgaagggagatgtcatggtgaaatgctaccacaagaaataccgctcggccacccgtgacgtcattttccgcctgcagtttcacactggggctgtgcagggctacgggctggtgtttgggaaggaggatctggacaatgccagcaaagatgaccgttttcctgactatgggaaggttgaattagtcttctctgccacgcctgagaagattcaagggtccgaacacttgtacaacgaccacggtgtgattgtggactacaacacaacagacccactgatacgctgggactcgtacgagaacctcagtgcagatggagaagtgctacacacgcagggccctgtcgatggcagcctttacgcgaaggtgaggaagaaaagctcctcggatcctggcatcccaggtggcccccaggcaatcccggccaccaacagcccagaccacagtgaccacaccttgtctgtcagcagtgactccggccactctacagcctctgccaggacggataagacggaagagcgcctggccccaggaaccaggaggggcctgagtgcccaggagaaggcagagttggaccagctgctcagtggctttggcctggaagatcctggaagctccctcaaggaaatgactgatgctcgaagcaagtacagtgggacccgccacgtggtgccagcccaggttcacgtgaatggagacgctgctctgaaggatcgggagacagacattctggatgacgagatgccccaccacgacctgcacagtgtggacagccttgggaccctgtcctcctcggaagggcctcagtcggcccacctgggtcccttcacctgccacaagagcagccagaactcactcctatctgacggttttggcagcaacgttggtgaagatccgcagggcaccctcgttccggacctgggccttggcatggacggcccctatgagcgggagcggacttttgggagtcgagagcccaagcagccccagcccctgctgagaaagccctcagtgtccgcccagatgcaggcctatgggcagagcagctactccacacagacctgggtgcgccagcagcagatggttgtagctcaccagtatagcttcgccccagatggggaggcccggctggtgagccgctgccctgcagacaatcctggcctcgtccaggcccagcccagagtgccactcacccccacccgagggaccagcagtagggtggctgtccagaggggtgtaggcagtgggccacatccccctgacacacagcagccctctcccagcaaagcgttcaaacccaggtttccaggagaccaggttgtgaatggagccggcccagagctgagcacaggcccctccccaggctcgcccaccctggacatcgaccagtccatcgagcagctcaacaggctgatcctggagctggatcccaccttcgagcccatccctacccacatgaacgccctcggtagccaggccaatggctctgtgtctccagacagcgtgggaggtgggctccgggcaagcagcaggctgcctgacacaggagagggccccagcagggccaccgggcggcaaggctcctctgctgaacagcccctgggcgggagactcaggaagctgagcctggggcagtacgacaacgatgctggggggcagctgcccttctccaaatgtgcatggggaaaggctggtgtggactatgccccaaacctgccgccattcccctcaccagcggacgtcaaagagacgatgacccctggctatccccaggacctcgatattatcgatggcagaattttaagtagcaaggagtccatgtgttcaactccagcatttcctgtgtctccagagacaccgtatgtgaaaacagcgctgcgccatcctccgttcagcccacctgagcccccgctgagcagcccagccagtcagcacaaaggaggacgtgaaccacgaagctgccctgagacgctcactcacgctgtggggatgtcagagagccccatcggacccaaatccacgatgctccgggctgatgcgtcctcgacgccctcctttcagcaggcttttgcttcttcctgcaccatttccagcaacggccctgggcagaggagagagagctcctcttctgcagaacgccagtgggtggagagcagccccaagcccatggtttccctgctggggagcggccggcccaccggaagtcccctcagcgctgagttctccggtaccaggaaggactccccagtgctgtcctgcttcccgccgtcagagctccaggctcctttccacagccatgagctgtccctagcagagccaccggactccctggcgcctcccagcagccaggccttcctgggcttcggcaccgccccagtgggaagtggccttccgcccgaggaggacctgggggccttgctggccaattctcatggagcgtcaccgacccccagcatcccgctgacagcgacaggggctgccgacaatggcttcctgtcccacaactttctcacggtggcgcctggacacagcagccaccacagtccaggcctgcagggccagggtgtgaccctgcccgggcagccacccctccctgagaagaagcgggcctcggagggggatcgttctttgggctcagtctctccctcctccagtggcttctccagcccgcacagcgggagcaccatcagtatccccttcccaaatgtccttcccgacttttccaaggcttcagaagcggcctcacctctgccagatagtccaggtgataaacttgtgatcgtgaaatttgttcaagacacttccaagttctggtacaaggcggatatttcaagagaacaagccatcgccatgttgaaggacaaggagccgggctcattcattgttcgagacagccattccttccgaggggcctatggcctggccatgaaggtggccacgcccccaccttcagtcctgcagctgaacaagaaagctggagatttggccaatgaactcgtccggcactttttgatcgagtgtaccccgaagggagtgcggttgaaagggtgctcgaatgaaccatatttcgggagcctgacggccttggtgtgccagcattccatcacgcccttggccttgccgtgcaagctgcttatcccagagagagatccattggaggaaatagcagaaagttctccccagacggcagccaattcagcagctgagctgttgaagcagggggcagcctgcaacgtgtggtacttgaactctgtggagatggagtccctcaccggccaccaggcgatccagaaggccctgagcatcaccctggtccaggagcctccacctgtgtccacagttgtgcacttcaaggtgtcagcccagggcatcaccctgacagacaatcagaggaagctcttcttccggaggcattaccccgtgaacagtgtgattttctgtgccttggacccacaagacaggaagtggatcaaagatggcccttcctcaaaagtctttggatttgtggcccggaagcagggcagtgccacggataatgtgtgccacctgtttgcagagcatgaccctgagcagcctgccagtgccattgtcaacttcgtatcaaaggtcatgattggttccccaaagaaggtctgagaactcccctccctccctggacccaccgatgcctctcgaagccctggagacagccgttgggtgagggtggggcccccactttttaccaaactagtaaacctgacattccaggcccatgaggggaaagaggatcttccagctctgcaaaaacaagaacaaacaacatcaccgtgaattggcctttcctgaaagtgacttatctgacacatctctgtagccacatgctttttgggtagaagaagctgggcatgggtgcaccccaccccctagggtccccatgggaaagggacatgcaaggaaacagcacagaacacgaggtggtccccatgtccctggcacactagcattccgggggatgaggaatccccagcccttgaggcagaggtgccgagtgactgccatgcttcgcccgtccgcatgggcgcttctgtccagctgcacccgaggccgggggtttccctcacctcggtcttcccaagatggagatgctaacgaaactgagaagggggcgtatgtttgacgaaggtttgtgcaagtcaggcccttctggaacacagcagggcctacaacgaggggcctttgcgatgggctgtgaggatgggggtggtgggaagaattggccacgttagagaccccatgccaccccaccatggtgagtgctctgtgcctcctgctcacctgtggtgagctgggcgagctgggcgagctgggcgagctgggctggggagagcctgtgaggaccgagaggagaaatgagaagaaggaacaaaaatattatttctatgtaatttatattttacttatgccaaattatttatgataatttgccattgctatactgtaccagtgtcaaatgctgcagcctgccaagctgtgattttgtgaggcttgtccctatgtaggatgcaccgcaggcccctggccactgaaagagtgtgcagtggactgtgggtctcccatatgcggtgccgcccaaaggtggctttgcctcaagcaacctaccctgatgttttactcattggaatgtttttccccgattgtggatgacttcttttctgatggagagagtccaggagggatggaaaactcctggatttaagctcagcatcccccacatgggcttttcgatcatcttcaggcctgaagctgcacgacctgaagttcgcctgcatttatcagccctctttgtgctgctccttgccaccttggggttcctgctggggaccatgtgtggttgtggcatgtgtgagcagaagggaggatgaggaaaaagagaagaaaccccggtactgacaagctgtttttgagtgccactgtttgccatcatctaagccactgaatcaagtgtatttcaggcttatttcaacattccaatgccctggttttcctgcttgaatctgttcgtggtcaaaggtttgggggaatttgtgaccctggaacatccccagagtgaaagatggagctgggccacatcagaataaggccttggccccatcctctcacagcctaggtgctctgcaggcatgctgactgtcctgattgcgatccagcccgaaattccctcctctgctttcaaaagtcaaatcccccattcttaggccacactggtgtcacaagctcctgtcagggagctggggtttgggaatgtgctttgtgaactctgctttaaagtgaggggccgaggaaaacttagaaacaggcagagttggaagcagccaaatcacagtgggtgttgtgtgtgtgtgcgtgtgtgcatgcgtgcgtgtatgcgtgtgtgaaagcaggtggaccattccactttttagctcctattgatgcaccaaaccaagtgcctcatttctgtgccaaatgtttgccttggtcgttgtggacctccttctctaacttgcggtggcatgactgtcaggaggtgctggcattttcagcagatcctcatgtgttgaccctgatgtctttagcagaggcctctagcatctcggtttttcatccactgcaggaatgtggccacagggagcagaggtttgtactttccccaagaggtcctcatcctgagacggtctctacccatgtttaacccaaagagtgcaggccaggttccttatccttctgatgaaggatgagagagctcatttagaagtcagagcaaactagggtctcagtattgagaaacgcagcctgccagggaatcacagagacatcggggtgcccgcgatggccctcatgaagccatgcctcgacggcattcaggaagccctgcaaacgtgctttttgaactcattggccaggtgtgatttttacacaaggtaaacgtggtcaagggcatcggggaatttgctccaagcagatagctccctctgaggaaccaaaggaagcaagtttccacgatttctgaagagctggtataggaagtttctttcttccttttgtgttacatgtgcattaaacagaacaagctgtgtgtcatcacagattgtactgtgggctcagaaaccgtgagagagcccccaccgtggacaccggctctagggccacaggaaaaggaacgtttccaggcattttgtctccagggctcccgctggacaggcacgtactgccctggggagtaaatgcggagagttcacgaactgtgcccaacgcatgttatagccagggtcctactaactactcagtaaaagaacgtattgttgtattcctccagtgttaagctatagccatgttaaaagtcactgtgcatttattctcagcatcaaataccttgtaacgtcttctctgccttgttagtgcatatttttacttttctgatactgtaaagaatatatccagtatgtaaatgaatgttctataaatcttttgtatagtcattttctctgctccttaaatatcatctctattcagagtataataaaattatgaacttggtaaaaaaaaaaaaaaaaaaaaaaaaaaaaaaaaaaaaaaaaaaaaaaaaaaaaaaaaaaaaaaaaaaaaaaaa

SEQ ID NO: 3089 - protein, 1205 aa, Homo sapien
MVKCYHKKYRSATRDVIFRLQFHTGAVQGYGLVFGKEDLDNASKDDRFPDYGKVELVFSATPEKIQGSEHLYNDHGVIVDYNTTDPLIRWDSYENLSADGEVLHTQGPVDGSLYAKVRKKSSSDPGIPGGPQAIPATNSPDHSDHTLSVSSDSGHSTASARTDKTEERLAPGTRRGLSAQEKAELDQLLSGFGLEDPGSSLKEMTDARSKYSGTRHVVPAQVHVNGDAALKDRETDILDDEMPHHDLHSVDSLGTLSSSEGPQSAHLGPFTCHKSSQNSLLSDGFGSNVGEDPQGTLVPDLGLGMDGPYERERTFGSREPKQPQPLLRKPSVSAQMQAYGQSSYSTQTWVRQQQMVVAHQYSFAPDGEARLVSRCPADNPGLVQAQPRVPLTPTRGTSSRVAVQRGVGSGPHPPDTQQPSPSKAFKPRFPGDQVVNGAGPELSTGPSPGSPTLDIDQSIEQLNRLILELDPTFEPIPTHMNALGSQANGSVSPDSVGGGLRASSRLPDTGEGPSRATGRQGSSAEQPLGGRLRKLSLGQYDNDAGGQLPFSKCAWGKAGVDYAPNLPPFPSPADVKETMTPGYPQDLDIIDGRILSSKESMCSTPAFPVSPETPYVKTALRHPPFSPPEPPLSSPASQHKGGREPRSCPETLTHAVGMSESPIGPKSTMLRADASSTPSFQQAFASSCTISSNGPGQRRESSSSAERQWVESSPKPMVSLLGSGRPTGSPLSAEFSGTRKDSPVLSCFPPSELQAPFHSHELSLAEPPDSLAPPSSQAFLGFGTAPVGSGLPPEEDLGALLANSHGASPTPSIPLTATGAADNGFLSHNFLTVAPGHSSHHSPGLQGQGVTLPGQPPLPEKKRASEGDRSLGSVSPSSSGFSSPHSGSTISIPFPNVLPDFSKASEAASPLPDSPGDKLVIVKFVQDTSKFWYKADISREQAIAMLKDKEPGSFIVRDSHSFRGAYGLAMKVATPPPSVLQLNKKAGDLANELVRHFLIECTPKGVRLKGCSNEPYFGSLTALVCQHSITPLALPCKLLIPERDPLEEIAESSPQTAANSAAELLKQGAACNVWYLNSVEMESLTGHQAIQKALSITLVQEPPPVSTVVHFKVSAQGITLTDNQRKLFFRRHYPVNSVIFCALDPQDRKWIKDGPSSKVFGFVARKQGSATDNVCHLFAEHDPEQPASAIVNFVSKVMIGSPKKV

SEQ ID NO: 3090 - DNA, 1238 bp, Homo sapien
ggcggcggcggcggaggctgccatggacgacgaggaggagacgtaccggctctggaaaatccgcaagaccatcatgcagctgtgccacgaccgtggctatctggtgacccaggacgagcttgaccagaccctggaggagttcaaagcccaatttggggacaagccgagtgaggggcggccgcggcgcacggacctcaccgtgctggtggcccacaacgatgaccccaccgaccagatgtttgtgttctttccagaggagcccaaggtgggcatcaagaccatcaaggtgtactgccagcgcatgcaggaggagaacatcacacgggctctcatcgtggtgcagcagggcatgacaccctccgccaagcagtccctggtcgacatggcccccaagtacatcctggagcagtttctgcagcaggagctgctcatcaacatcacggagcacgagctagtccctgagcacgtcgtcatgaccaaggaggaggtgacagagctgctggcccgatataagctccgagagaaccagctgcccaggatccaggcgggggaccctgtggcgcgctactttgggataaagcgtgggcaggtggtgaagatcatccggcccagtgagacggctggcaggtacatcacctaccggctggtgcagtagctaccgcctgacagcccctagaggcggacacacagcgacccccatccctgcaggacaaacgcccctgccctgccagaatccggcccccacagctctcacggctgctgctcctctggactccccaaggcaggtggcctccacccacgttctcccgtcctggggtgaggcttcctgtggcccagcccgccccattcacctgtggatttgtgcgagatgcagcctcagaaggaacaaggcccccagagggaggtcacctgggggcagctggtgccgggtcttcacccagaccacgctgggtcccctctgttgggggtttggggtccgggtctcccaccagccactgcttcctcctgggccctcggcttccacccctcgtcttccctccctcggggccctgatgcgtggcggcccccacccggcctcggctctttactccattcacagccatgcacgcgctcaagtacaccagggtgcgagatgccagctctggagttctcggttgttgtaggaggttgggtgttttcaaatggtaaagatgttttgacgaaataaatttgcttgatacagaaaaaaaaaaaaaaaa

SEQ ID NO: 3091 - protein, 210 aa, Homo sapien
MDDEEETYRLWKIRKTIMQLCHDRGYLVTQDELDQTLEEFKAQFGDKPSEGRPRRTDLTVLVAHNDDPTDQMFVFFPEEPKVGIKTIKVYCQRMQEENITRALIVVQQGMTPSAKQSLVDMAPKYILEQFLQQELLINITEHELVPEHVVMTKEEVTELLARYKLRENQLPRIQAGDPVARYFGIKRGQVVKIIRPSETAGRYITYRLVQ

SEQ ID NO: 3092 - DNA, 1862 bp, Homo sapien
ggactttgtgttccgctgaccctcctcggggcgcttcctcccgtgccgcccttcccctcccccgccgcgtccttgcgaggcgcctcccattcggtgggaccgacccggggggatggagggggcacgcttctacaaccctcctgggaccccgaagagacgcccgcgtgcgacctgagacgccgccctcgccgagggcccatgggcgcgtccccacaggcgggcagtggacgtgagggcggcgagcggcggggccgcggcgtccaggagggccgcgctcgggctcggcccgcgcaggccgcgcgcgcgcgctcccgccgccgcccgggccgcgcccgccccgcctctaggcgccggccccggagcccggtccgcgagcagcggcggctgccggagggacgatgagctgcgcggggcgggcgggccctgcccggctcgccgcgctcgccctgctgacctgcagcctgtggccggcacgggcagacaacgcgagccaggagtactacacggcgctcatcaacgtgacggtgcaggagcccggccgcggcgccccgctcacgtttcgcatcgaccgcgggcgctacgggcttgactcccccaaggccgaggtccgcggccaggtgctggcgccgctgcccctccacggagttgctgatcatctgggctgtgatccacaaacccggttctttgtccctcctaatatcaaacagtggattgccttgctgcagaggggaaactgcacgtttaaagagaaaatatcacgggccgctttccacaatgcagttgctgtagtcatctacaataataaatccaaagaggagccagttaccatgactcatccaggcactggagatattattgctgtcatgataacagaattgaggggtaaggatattttgagttatctggagaaaaacatctctgtacaaatgacaatagctgttggaactcgaatgccaccgaagaacttcagccgtggctctctagtcttcgtgtcaatatcctttattgttttgatgattatttcttcagcatggctcatattctacttcattcagaagatcaggtacacaaatgcacgcgacaggaaccagcgtcgtctcggagatgcagccaagaaagccatcagtaaattgacaaccaggacagtaaagaagggtgacaaggaaactgacccagactttgatcattgtgcagtctgcatagagagctataagcagaatgatgtcgtccgaattctcccctgcaagcatgttttccacaaatcctgcgtggatccctggcttagtgaacattgtacctgtcctatgtgcaaacttaatatattgaaggccctgggaattgtgccgaatttgccatgtactgataacgtagcattcgatatggaaaggctcaccagaacccaagctgttaaccgaagatcagccctcggcgacctcgccggcgacaactcccttggccttgagccacttcgaacttcggggatctcacctcttcctcaggatggggagctcactccgagaacaggagaaatcaacattgcagtaacaaaagaatggtttattattgccagttttggcctcctcagtgccctcacactctgctacatgatcatcagagccacagctagcttgaatgctaatgaggtagaatggttttgaagaagaaaaaacctgctttctgactgattttgccttgaaggaaaaaagaacctatttttgtgcatcatttaccaatcatgccacacaagcatttatttttagtacattttattttttcataaaattgctaatgccaaagctttgtattaaaagaaataaataataaaataaaaaaaaaaaaaaaaaaaaaaaaaaaaaaaaaaa

SEQ ID NO: 3093 - protein, 419 aa, Homo sapien
MSCAGRAGPARLAALALLTCSLWPARADNASQEYYTALINVTVQEPGRGAPLTFRIDRGRYGLDSPKAEVRGQVLAPLPLHGVADHLGCDPQTRFFVPPNIKQWIALLQRGNCTFKEKISRAAFHNAVAVVIYNNKSKEEPVTMTHPGTGDIIAVMITELRGKDILSYLEKNISVQMTIAVGTRMPPKNFSRGSLVFVSISFIVLMIISSAWLIFYFIQKIRYTNARDRNQRRLGDAAKKAISKLTTRTVKKGDKETDPDFDHCAVCIESYKQNDVVRILPCKHVFHKSCVDPWLSEHCTCPMCKLNILKALGIVPNLPCTDNVAFDMERLTRTQAVNRRSALGDLAGDNSLGLEPLRTSGISPLPQDGELTPRTGEINIAVTKEWFIIASFGLLSALTLCYMIIRATASLNANEVEWF

SEQ ID NO: 3094 - DNA, 2993 bp, Homo sapien
cgctggggcgctttccgaggaaattcgggactcgagtttcccggggaagaggcgcggcctgagcccggcgagggtggggagggcaggcgcaggtggaccccggcgccccccgagccccgctgtgaccttggccgcgggggaggggctgggccgctgcggggcagtcgcggccgccagagggggcagcggagaagaacttgcccaacttggcggcgcgggctggggcggctctgcgcctccgcgcccgcctccccggcctccgccttctcccctcccgcgagcctcctcccctcccgcgagcctcctcccctgggccctcctcccgtcctccccgccgccgccggtcccggtgcgcgcccatccctgcccgcagccccgcgcgccggccgagtcgctgagccgcggctgccggacgggacgggaccggctaggctgggcgcgccccccgggccccgccgtgggcatgggcgcactggcccgggcgctgctgctgcctctgctggcccagtggctcctgcgcgccgccccggagctggcccccgcgcccttcacgctgcccctccgggtggccgcggccacgaaccgcgtagttgcgcccaccccgggacccgggacccctgccgagcgccacgccgacggcttggcgctcgccctggagcctgccctggcgtcccccgcgggcgccgccaacttcttggccatggtagacaacctgcagggggactctggccgcggctactacctggagatgctgatcgggacccccccgcagaagctacagattctcgttgacactggaagcagtaactttgccgtggcaggaaccccgcactcctacatagacacgtactttgacacagagaggtctagcacataccgctccaagggctttgacgtcacagtgaagtacacacaaggaagctggacgggcttcgttggggaagacctcgtcaccatccccaaaggcttcaatacttcttttcttgtcaacattgccactatttttgaatcagagaatttctttttgcctgggattaaatggaatggaatacttggcctagcttatgccacacttgccaagccatcaagttctctggagaccttcttcgactccctggtgacacaagcaaacatccccaacgttttctccatgcagatgtgtggagccggcttgcccgttgctggatctgggaccaacggaggtagtcttgtcttgggtggaattgaaccaagtttgtataaaggagacatctggtatacccctattaaggaagagtggtactaccagatagaaattctgaaattggaaattggaggccaaagccttaatctggactgcagagagtataacgcagacaaggccatcgtggacagtggcaccacgctgctgcgcctgccccagaaggtgtttgatgcggtggtggaagctgtggcccgcgcatctctgattccagaattctctgatggtttctggactgggtcccagctggcgtgctggacgaattcggaaacaccttggtcttacttccctaaaatctccatctacctgagagacgagaactccagcaggtcattccgtatcacaatcctgcctcagctttacattcagcccatgatgggggccggcctgaattatgaatgttaccgattcggcatttccccatccacaaatgcgctggtgatcggtgccacggtgatggagggcttctacgtcatcttcgacagagcccagaagagggtgggcttcgcagcgagcccctgtgcagaaattgcaggtgctgcagtgtctgaaatttccgggcctttctcaacagaggatgtagccagcaactgtgtccccgctcagtctttgagcgagcccattttgtggattgtgtcctatgcgctcatgagcgtctgtggagccatcctccttgtcttaatcgtcctgctgctgctgccgttccggtgtcagcgtcgcccccgtgaccctgaggtcgtcaatgatgagtcctctctggtcagacatcgctggaaatgaatagccaggcctgacctcaagcaaccatgaactcagctattaagaaaatcacatttccagggcagcagccgggatcgatggtggcgctttctcctgtgcccacccgtcttcaatctctgttctgctcccagatgccttctagattcactgtcttttgattcttgattttcaagctttcaaatcctccctacttccaagaaaaataattaaaaaaaaaacttcattctaaaccaaaacagagtggattgggctgcaggctctatggggttcgttatgccaaagtgtctacatgtgccaccaacataaaacaaaaccaagccttggctcgttctcttctctcttcaatctctggaaaaataagtacatatagttgataacccctcttagcttacaggaagctttttgtattaattgcctttgaggttattttccgccagacctcaacctgggtcaaagtggtacaggaaggcttgcagtatgatggcaggagaatcagcctggggcctggggatgtaaccaagctgtacccttgagacctggaaccagagccacaggccccttttgtgggtttctctgtgctctgaatgggagccagaattcactaggaggtcatcaaccgatggtcctcacaagcctcttctgaagatggaaggccttttgcccgttgaggtagaggggaaggaaatctcctcttttgtacccaatacttatgttgtattgttggtgcgaaagtaaaaacactacctcttttgagactttgcccagggtcctgtgcctggatgggggtgcaggcagccttgaccacggctgttcccctcacccaaaagaattatcatcccaacagccaagacccaacaggtgctgaactgtgcatcaaccaggaagagttctatccccaagctggccactatcacatatgcttactcttgcttaaaattaataaatcatgttttgatgagaaaaaactattcta

SEQ ID NO: 3095 - protein, 518 aa, Homo sapien
MGALARALLLPLLAQWLLRAAPELAPAPFTLPLRVAAATNRVVAPTPGPGTPAERHADGLALALEPALASPAGAANFLAMVDNLQGDSGRGYYLEMLIGTPPQKLQILVDTGSSNFAVAGTPHSYIDTYFDTERSSTYRSKGFDVTVKYTQGSWTGFVGEDLVTIPKGFNTSFLVNIATIFESENFFLPGIKWNGILGLAYATLAKPSSSLETFFDSLVTQANIPNVFSMQMCGAGLPVAGSGTNGGSLVLGGIEPSLYKGDIWYTPIKEEWYYQIEILKLEIGGQSLNLDCREYNADKAIVDSGTTLLRLPQKVFDAVVEAVARASLIPEFSDGFWTGSQLACWTNSETPWSYFPKISIYLRDENSSRSFRITILPQLYIQPMMGAGLNYECYRFGISPSTNALVIGATVMEGFYVIFDRAQKRVGFAASPCAEIAGAAVSEISGPFSTEDVASNCVPAQSLSEPILWIVSYALMSVCGAILLVLIVLLLLPFRCQRRPRDPEVVNDESSLVRHRWK

SEQ ID NO: 3096 - DNA, 3277 bp, Homo sapien
aatcgctcggcctcccccatcccccgggtaacggtcgctggtgagtttaaatgagcaggggctggccgggccggagccgctacagggggggcctgaggcactgcagaaagtgggcctgagcctcgaggatgacggtgctgcaggaacccgtccaggctgctatatggcaagcactaaaccactatgcttaccgagatgcggttttcctcgcagaacgcctttatgcagaagtacactcagaagaagccttgtttttactggcaacctgttattaccgctcaggaaaggcatataaagcatatagactcttgaaaggacacagttgtactacaccgcaatgcaaatacctgcttgcaaaatgttgtgttgatctcagcaagcttgcagaaggggaacaaatcttatctggtggagtgtttaataagcagaaaagccatgatgatattgttactgagtttggtgattcagcttgctttactctttcattgttgggacatgtatattgcaagacagatcggcttgccaaaggatcagaatgttaccaaaagagccttagtttaaatcctttcctctggtctccctttgaatcattatgtgaaataggtgaaaagccagatcctgaccaaacatttaaattcacatctttacagaactttagcaactgtctgcccaactcttgcacaacacaagtacctaatcatagtttatctcacagacagcctgagacagttcttacggaaacaccccaggacacaattgaattaaacagattgaatttagaatcttccaattcaaagtactccttgaatacagattcctcagtgtcttatattgattcagctgtaatttcacctgatactgtcccactgggaacaggaacttccatattatctaaacaggttcaaaataaaccaaaaactggtcgaagtttattaggaggaccagcagctcttagtccattaaccccaagttttgggattttgccattagaaaccccaagtcctggagatggatcctatttacaaaactacactaatacacctcctgtaattgatgtgccatccaccggagccccttcaaaaaagtctgttgccagaatcggccaaactggaacaaagtctgtcttctcacagagtggaaatagccgagaggtaactccaattcttgcacaaacacaaagttctggtccacaaacaagtacaacacctcaggtattgagccccactattacatctcccccaaacgcactgcctcgaagaagttcacgactctttactagtgacagctccacaaccaaggagaatagcaaaaaattaaaaatgaagtttccacctaaaatcccaaacagaaaaacaaaaagtaaaactaataaaggaggaataactcaacctaacataaatgatagcctggaaattacaaaattggactcttccatcatttcagaagggaaaatatccacaatcacacctcagattcaggcctttaatctacaaaaagcagcagcagcaggtttgatgagccttcttcgtgaaatggggaaaggttatttagctttgtgttcatacaactgcaaagaagctataaatattttgagccatctaccttctcaccactacaatactggttgggtactgtgccaaattggaagggcctattttgaactttcagagtacatgcaagctgaaagaatattctcagaggttagaaggattgagaattatagagttgaaggcatggagatctactctacaacactttggcatcttcaaaaagatgttgctctttcagttctgtcaaaagacttaacagacatggataaaaattcgccagaggcctggtgtgctgcagggaactgtttcagtctgcaacgggaacatgatattgcaattaaattcttccagagagctatccaagttgatccaaattacgcttatgcctatactctattagggcatgagtttgtcttaactgaagaattggacaaagcattagcttgttttcgaaatgctatcagagtcaatcctagacattataatgcatggtatggtttaggaatgatttattacaagcaagaaaaattcagccttgcagaaatgcatttccaaaaagcgcttgatatcaaccctcaaagttcagttttactttgccacattggagtagttcaacatgcactgaaaaaatcagagaaggctttggataccctaaacaaagccattgtcattgatcccaagaaccctctatgcaaatttcacagagcctcagttttatttgcaaatgaaaaatataagtctgctttacaagaacttgaagaattgaaacaaattgttcccaaagaatccctcgtttacttcttaataggaaaggtttacaagaagttaggtcaaacgcacctcgccctgatgaatttctcttgggctatggatttagatcctaaaggagccaataaccagattaaagaggcaattgataagcgttatcttccagatgatgaggagccaataacccaagaagaacagatcatgggaacagatgaatcccaggagagcagcatgacagatgcggatgacacacaacttcatgcagctgaaagtgatgaattttaacttctggaaatcagacttttacaactggatgtgtgactagtgctgacgtgtttcttgtccctctgtatactgagtctttactcttgagctggcggtgtcatcgtccgtcacttataccatgagtgtgccactttcattggaccctgactgtatacagaatgaaaggcagtgcaatatttagctgctaacaagactggctcttttaccagtatgaatgacaatttatggggggtagggtggggaactttcttttctgtttttctttaatctccctttgttggaaagtatcatgaaggaagagttatgctttatcttgaaggaaccattagatatggaaaatagtgatgaaccagagtttcttggttgctttttcaaaaatttgtttttatttggttctgttccagataaacagagtaactgaccttcatttctaggttcttcaagaatggtgtttgcaagtgccagatggaacaataaaagacgttgcctataacagtgacttgattgccaaggaatgtaaattaccttaaacttcgatgatctcccataaacaaatgtaatgggcatattgggactcgtatgtaggaatcaaatatccctccatacagtgtactcttattcttggcaagaatgctttaatgtataaccaagaattttaatttattcatcttgct

SEQ ID NO: 3097 - protein, 824 aa, Homo sapien
MTVLQEPVQAAIWQALNHYAYRDAVFLAERLYAEVHSEEALFLLATCYYRSGKAYKAYRLLKGHSCTTPQCKYLLAKCCVDLSKLAEGEQILSGGVFNKQKSHDDIVTEFGDSACFTLSLLGHVYCKTDRLAKGSECYQKSLSLNPFLWSPFESLCEIGEKPDPDQTFKFTSLQNFSNCLPNSCTTQVPNHSLSHRQPETVLTETPQDTIELNRLNLESSNSKYSLNTDSSVSYIDSAVISPDTVPLGTGTSILSKQVQNKPKTGRSLLGGPAALSPLTPSFGILPLETPSPGDGSYLQNYTNTPPVIDVPSTGAPSKKSVARIGQTGTKSVFSQSGNSREVTPILAQTQSSGPQTSTTPQVLSPTITSPPNALPRRSSRLFTSDSSTTKENSKKLKMKFPPKIPNRKTKSKTNKGGITQPNINDSLEITKLDSSIISEGKISTITPQIQAFNLQKAAAAGLMSLLREMGKGYLALCSYNCKEAINILSHLPSHHYNTGWVLCQIGRAYFELSEYMQAERIFSEVRRIENYRVEGMEIYSTTLWHLQKDVALSVLSKDLTDMDKNSPEAWCAAGNCFSLQREHDIAIKFFQRAIQVDPNYAYAYTLLGHEFVLTEELDKALACFRNAIRVNPRHYNAWYGLGMIYYKQEKFSLAEMHFQKALDINPQSSVLLCHIGVVQHALKKSEKALDTLNKAIVIDPKNPLCKFHRASVLFANEKYKSALQELEELKQIVPKESLVYFLIGKVYKKLGQTHLALMNFSWAMDLDPKGANNQIKEAIDKRYLPDDEEPITQEEQIMGTDESQESSMTDADDTQLHAAESDEF

SEQ ID NO: 3098 - DNA, 1109 bp, Homo sapien
actggaagaccaggcagcccagctgaaggcagtaagctcggctcacagtcgcaggagagttctggggtacacgggcaaaggggcttgagaaggcccggaggcgaagccgaagagaagcaactgtgccccggagaagagaagctcgcccattccagactgggaaccagctttcagtgaagatggcagggccagaactgttgctcgactccaacatccgcctctgggtggtcctacccatcgttatcatcactttcttcgtaggcatgatccgccactacgtgtccatcctgctgcagagcgacaagaagctcacccaggaacaagtatctgacagtcaagtcctaattcgaagcagagtcctcagggaaaatggaaaatacattcccaaacagtctttcttgacacgaaaatattatttcaacaacccagaggatggatttttcaaaaaaactaaacggaaggtagtgccaccttctcctatgactgatcctactatgttgacagacatgatgaaagggaatgtaacaaatgtcctccctatgattcttattggtggatggatcaacatgacattctcaggctttgtcacaaccaaggtcccatttccactgaccctccgttttaagcctatgttacagcaaggaatcgagctactcacattagatgcatcctgggtgagttctgcatcctggtacttcctcaatgtatttgggcttcggagcatttactctctgattctgggccaagataatgccgctgaccaatcacgaatgatgcaggagcagatgacgggagcagccatggccatgcccgcagacacaaacaaagctttcaagacagagtgggaagctttggagctgacggatcaccagtgggcactagatgatgtcgaagaagagctcatggccaaagacctccacttcgaaggcatgttcaaaaaggaattacagacctctattttttgaagaccgagcagggattagctgtgtcaggaacttggagttgcacttaaccttgtaactttgtttggagctggcacctcttgaaataaaaaggaggatgcacgagctggcaggcatgcaaaaaaaaaaaaaaaaaaaaaaaaaaaa

SEQ ID NO: 3099 - protein, 261 aa, Homo sapien
MAGPELLLDSNIRLWVVLPIVIITFFVGMIRHYVSILLQSDKKLTQEQVSDSQVLIRSRVLRENGKYIPKQSFLTRKYYFNNPEDGFFKKTKRKVVPPSPMTDPTMLTDMMKGNVTNVLPMILIGGWINMTFSGFVTTKVPFPLTLRFKPMLQQGIELLTLDASWVSSASWYFLNVFGLRSIYSLILGQDNAADQSRMMQEQMTGAAMAMPADTNKAFKTEWEALELTDHQWALDDVEEELMAKDLHFEGMFKKELQTSIF

SEQ ID NO: 3100 - DNA, 3655 bp, Homo sapien
ggcacgaggcgctaggtagagcgccgggacctgtgacagggctggtagcagcgcacaggaaaggcggcttttagccaggtatttcagtgtctgtagacaagatggaatcatctccatttaatagacggcaatggacctcactatcattgagggtaacagccaaagaactttctcttgtcaacaagaacaagtcatcggctattgtggaaatattctccaagtaccagaaagcagctgaagaaacaaacatggagaagaagagaagtaacaccgaaaatctctcccagcactttagaaaggggaccctgactgtgttaaagaagaagtgggagaacccagggctgggagcagagtctcacacagactctctacggaacagcagcactgagattaggcacagagcagaccatcctcctgctgaagtgacaagccacgctgcttctggagccaaagctgaccaagaagaacaaatccaccccagatctagactcaggtcacctcctgaagccctcgttcagggtcgatatccccacatcaaggacggtgaggatcttaaagaccactcaacagaaagtaaaaaaatggaaaattgtctaggagaatccaggcatgaagtagaaaaatcagaaatcagtgaaaacacagatgcttcgggcaaaatagagaaatataatgttccgctgaacaggcttaagatgatgtttgagaaaggtgaaccaactcaaactaagattctccgggcccaaagccgaagtgcaagtggaaggaagatctctgaaaacagctattctctagatgacctggaaataggcccaggtcagttgtcatcttctacatttgactcggagaaaaatgagagtagacgaaatctggaacttccacgcctctcagaaacctctataaaggatcgaatggccaagtaccaggcagctgtgtccaaacaaagcagctcaaccaactatacaaatgagctgaaagccagtggtggcgaaatcaaaattcataaaatggagcaaaaggagaatgtgcccccaggtcctgaggtctgcatcacccatcaggaaggggaaaagatttctgcaaatgagaatagcctggcagtccgttccacccctgccgaagatgactcccgtgactcccaggttaagagtgaggttcaacagcctgtccatcccaagccactaagtccagattccagagcctccagtctttctgaaagttctcctcccaaagcaatgaagaagtttcaggcacctgcaagagagacctgcgtggaatgtcagaagacagtctatccaatggagcgtctcttggccaaccagcaggtgtttcacatcagctgcttccgttgctcctattgcaacaacaaactcagtctaggaacatatgcatctttacatggaagaatctattgtaagcctcacttcaatcaactctttaaatctaagggcaactatgatgaaggctttgggcacagaccacacaaggatctatgggcaagcaaaaatgaaaacgaagagattttggagagaccagcccagcttgcaaatgcaagggagacccctcacagcccaggggtagaagatgcccctattgctaaggtgggtgtcctggctgcaagtatggaagccaaggcctcctctcagcaggagaaggaagacaagccagctgaaaccaagaagctgaggatcgcctggccaccccccactgaacttggaagttcaggaagtgccttggaggaagggatcaaaatgtcaaagcccaaatggcctcctgaagacgaaatcagcaagcccgaagttcctgaggatgtcgatctagatctgaagaagctaagacgatcttcttcactgaaggaaagaagccgcccattcactgtagcagcttcatttcaaagcacctctgtcaagagcccaaaaactgtgtccccacctatcaggaaaggctggagcatgtcagagcagagtgaagaatctgtgggtggaagagttgcagaaaggaaacaagtggaaaatgccaaggcttctaagaagaatgggaatgtgggaaaaacaacctggcaaaacaaagaatctaaaggagagacagggaagagaagtaaggaaggtcatagtttggagatggagaatgagaatcttgtagaaaatggtgcagactccgatgaagatgataacagcttcctcaaacaacaatctccacaagaacccaagtctctgaattggtcgagttttgtagacaacacctttgctgaagaattcactactcagaatcagaaatcccaggatgtggaactctgggagggagaagtggtcaaagagctctctgtggaagaacagataaagagaaatcggtattatgatgaggatgaggatgaagagtgacaaattgcaatgatgctgggccttaaattcatgttagtgttagcgagccactgccctttgtcaaaatgtgatgcacataagcaggtatcccagcatgaaatgtaatttacttggaagtaactttggaaaagaattccttcttaaaatcaaaaacaaaacaaaaaaacacaaaaaacacattctaaatactagagataactttacttaaattcttcattttagcagtgatgatatgcataagtgctgtaaggcttgtaactggggaaatattccacctgataatagcccagattctactgtattcccaaaaggcaatattaaggtagatagatgattagtagtatattgttacacactattttggaattagagaacatacagaaggaatttaggggcttaaacattacgactgaatgcactttagtataaagggcacagtttgtatatttttaaatgaataccaatttaattttttagtatttacctgttaagagattatttagtctttaaattttttaggttaattttcttgctgtgatatatatgaggaatttactactttatgtcctgctctctaaactacatcctgaactcgacgtcctgaggtataatacaacagagcactttttgaggcaattgaaaaaccaacctacactcttcggtgcttagagagatctgctgtctcccaaataagcttttgtatctgccagtgaatttactgtactccaaatgattgctttcttttctggtgatatctgtgcttctcataattactgaaagctgcaatattttagtaataccttcgggatcactgtcccccatcttccgtgttagagcaaagtgaagagtttaaaggaggaagaagaaagaactgtcttacaccacttgagctcagacctctaaaccctgtatttcccttatgatgtcccctttttgagacactaatttttaaatacttactagctctgaaatatattgatttttatcacagtattctcagggtgaaattaaaccaactataggcctttttcttgggatgattttctagtcttaaggtttggggacattataaacttgagtacatttgttgtacacagttgatattccaaattgtatggatgggagggagaggtgtcttaagctgtaggcttttctttgtactgcatttatagagatttagctttaatattttttagagatgtaaaacattctgctttcttagtcttacctagtctgaaacatttttattcaataaagattttaattaaaatttg

SEQ ID NO: 3101 - protein, 759 aa, Homo sapien
MESSPFNRRQWTSLSLRVTAKELSLVNKNKSSAIVEIFSKYQKAAEETNMEKKRSNTENLSQHFRKGTLTVLKKKWENPGLGAESHTDSLRNSSTEIRHRADHPPAEVTSHAASGAKADQEEQIHPRSRLRSPPEALVQGRYPHIKDGEDLKDHSTESKKMENCLGESRHEVEKSEISENTDASGKIEKYNVPLNRLKMMFEKGEPTQTKILRAQSRSASGRKISENSYSLDDLEIGPGQLSSSTFDSEKNESRRNLELPRLSETSIKDRMAKYQAAVSKQSSSTNYTNELKASGGEIKIHKMEQKENVPPGPEVCITHQEGEKISANENSLAVRSTPAEDDSRDSQVKSEVQQPVHPKPLSPDSRASSLSESSPPKAMKKFQAPARETCVECQKTVYPMERLLANQQVFHISCFRCSYCNNKLSLGTYASLHGRIYCKPHFNQLFKSKGNYDEGFGHRPHKDLWASKNENEEILERPAQLANARETPHSPGVEDAPIAKVGVLAASMEAKASSQQEKEDKPAETKKLRIAWPPPTELGSSGSALEEGIKMSKPKWPPEDEISKPEVPEDVDLDLKKLRRSSSLKERSRPFTVAASFQSTSVKSPKTVSPPIRKGWSMSEQSEESVGGRVAERKQVENAKASKKNGNVGKTTWQNKESKGETGKRSKEGHSLEMENENLVENGADSDEDDNSFLKQQSPQEPKSLNWSSFVDNTFAEEFTTQNQKSQDVELWEGEVVKELSVEEQIKRNRYYDEDEDEE

SEQ ID NO: 3102 - DNA, 1721 bp, Homo sapien
agacgggctgcaagagggagccggcccgacgcggaccgcttccctgcagtgccccgagtcccgggcccgcgccgccgccgcccggctccgctcgcggcccctctgtctgcaggcgtgccccggcggcggcggagagccgtcctcggccgaggaggctgggaaacgcgagcgcaggcggcagagaggcctcaacgccgtccctttcgccaccgccttttccttgcctcgcgccgctgtgcatttctctccttttcctttgtttttttggcccctcgcgggtgtgggcattgttggttagcaaaagtgcagcctcaagatggctgatggcaacgaggatctgcgggctgacgacttgcctgggccagccttcgagagctatgagtccatggagcttgcctgccccgctgagcgcagcggccacgtagccgtcagcgacgggcgccacatgttcgtctggggcggctacaagagtaatcaagtcagaggattatatgacttttatctgcctagagaagaactatggatctacaacatggagactggaagatggaaaaaaatcaacactgaaggtgatgttcctccttctatgtcaggaagctgtgctgtgtgtgtagacagggtgctgtacttgtttggaggacaccattcaagaggcaataccaataagttctacatgctggattcaaggtctacagacagagtgttacagtgggaaagaattgattgccaaggaattcctccatcatcaaaggacaaacttggtgtctgggtatataaaaacaagttaatattttttggagggtatggatatttgcctgaagataaagtattgggaacttttgaattcgatgaaacatctttttggaattcaagtcatccaagaggatggaatgatcatgtacatattttagatactgaaacatttacctggagccagcctataactactggtaaagcaccttcacctcgtgctgcccatgcctgtgcaactgtcggaaatagaggcttcgtgtttggaggcaggtatcgagatgctagaatgaatgatcttcactatcttaatctggatacatgggagtggaatgaattaattccacaaggcatatgcccagttggtcgatcttggcactcactaacaccagtttcttcagatcatctttttctctttggaggatttaccactgataaacagccactaagtgatgcctggacttactgcatcagtaaaaatgaatggatacaatttaatcatccatataccgaaaaaccaaggttatggcacacagcttgtgccagcgatgaaggagaagtaattgtttttggtggatgtgccaacaacttgcttgtccatcacagagctgcacacagtaatgaaatactaatattttcagttcaaccaaaatctcttgtacggctaagcttagaagcagtcatttgctttaaagaaatgttagccaactcatggaactgccttccaaaacacttacttcacagtgttaatcagaggtttggtagtaacaacacttctggatcttaaggcttcataaataatgcctatgatcaccttgcatggacagcaatcctgtaaacatcacagagtggcatcatttgtataattatatgcattgttgtagtttgcacctgttggttttaatgtgcatgtgaatggcctagagaacctatttttgtgtctaaagtttacaataaatgtatttaacacc

SEQ ID NO: 3103 - protein, 406 aa, Homo sapien
MADGNEDLRADDLPGPAFESYESMELACPAERSGHVAVSDGRHMFVWGGYKSNQVRGLYDFYLPREELWIYNMETGRWKKINTEGDVPPSMSGSCAVCVDRVLYLFGGHHSRGNTNKFYMLDSRSTDRVLQWERIDCQGIPPSSKDKLGVWVYKNKLIFFGGYGYLPEDKVLGTFEFDETSFWNSSHPRGWNDHVHILDTETFTWSQPITTGKAPSPRAAHACATVGNRGFVFGGRYRDARMNDLHYLNLDTWEWNELIPQGICPVGRSWHSLTPVSSDHLFLFGGFTTDKQPLSDAWTYCISKNEWIQFNHPYTEKPRLWHTACASDEGEVIVFGGCANNLLVHHRAAHSNEILIFSVQPKSLVRLSLEAVICFKEMLANSWNCLPKHLLHSVNQRFGSNNTSGS

SEQ ID NO: 3104 - DNA, 2605 bp, Homo sapien
gcggagctccgcatccaaccccgggccgcggccaacttctctggactggaccagaagtttctagccggccagttgctacctccctttatctcctccttcccctctggcagcgaggaggctatttccagacacttccacccctctctggccacgtcacccccgcctttaattcataaaggtgcccggcgccggcttcccggacacgtcggcggcggagaggggcccacggcggcggcccggccagagactcggcgcccggagccagcgccccgcacccgcgccccagcgggcagaccccaacccagcatgagcgccgccacccactcgcccatgatgcaggtggcgtccggcaacggtgaccgcgaccctttgccccccggatgggagatcaagatcgacccgcagaccggctggcccttcttcgtggaccacaacagccgcaccactacgtggaacgacccgcgcgtgccctctgagggccccaaggagactccatcctctgccaatggcccttcccgggagggctctaggctgccgcctgctagggaaggccaccctgtgtacccccagctccgaccaggctacattcccattcctgtgctccatgaaggcgctgagaaccggcaggtgcaccctttccatgtctatccccagcctgggatgcagcgattccgaactgaggcggcagcagcggctcctcagaggtcccagtcacctctgcggggcatgccagaaaccactcagccagataaacagtgtggacaggtggcagcggcggcggcagcccagcccccagcctcccacggacctgagcggtcccagtctccagctgcctctgactgctcatcctcatcctcctcggccagcctgccttcctccggcaggagcagcctgggcagtcaccagctcccgcgggggtacatctccattccggtgatacacgagcagaacgttacccggccagcagcccagccctccttccaccaagcccagaagacgcactacccagcgcagcagggggagtaccagacccaccagcctgtgtaccacaagatccagggggatgactgggagccccggcccctgcgggcggcatccccgttcaggtcatctgtccagggtgcatcgagccgggagggctcaccagccaggagcagcacgccactccactccccctcgcccatccgtgtgcacaccgtggtcgacaggcctcagcagcccatgacccatcgagaaactgcacctgtttcccagcctgaaaacaaaccagaaagtaagccaggcccagttggaccagaactccctcctggacacatcccaattcaagtgatccgcaaagaggtggattctaaacctgtttcccagaagcccccacctccctctgagaaggtagaggtgaaagttccccctgctccagttccttgtcctcctcccagccctggcccttctgctgtcccctcttcccccaagagtgtggctacagaagagagggcagcccccagcactgcccctgcagaagctacacctccaaaaccaggagaagccgaggctcccccaaaacatccaggagtgctgaaagtggaagccatcctggagaaggtgcaggggctggagcaggctgtagacaactttgaaggcaagaagactgacaaaaagtacctgatgatcgaagagtatttgaccaaagagctgctggccctggattcagtggaccccgagggacgagccgatgtgcgtcaggccaggagagacggtgtcaggaaggttcagaccatcttggaaaaacttgaacagaaagccattgatgtcccaggtcaagtccaggtctatgaactccagcccagcaaccttgaagcagatcagccactgcaggcaatcatggagatgggtgccgtggcagcagacaagggcaagaaaaatgctggaaatgcagaagatccccacacagaaacccagcagccagaagccacagcagcagcgacttcaaaccccagcagcatgacagacacccctggtaacccagcagcaccgtagcctctgccctgtaaaaatcagactcggaaccgatgtgtgctttagggaattttaagttgcatgcatttcagagactttaagtcagttggtttttattagctgcttggtatgcagtaacttgggtggaggcaaaacactaataaaagggctaaaaaggaaaatgatgcttttcttctatattcttactctgtacaaataaagaagttgcttgttgtttgagaagtttaaccccgttgcttgttctgcagccctgtctacttgggcacccccaccacctgttagctgtggttgtgcactgtcttttgtagctctggactggaggggtagatggggagtcaattacccatcacataaatatgaaacatttatcagaaatgttgccattttaatgagatgattttcttcatctcataattaaaatacctgactttagagagagtaaaatgtgccaggagccataggaatatctgtatgttggatgactttaatgctacattttaaaaaaagaaaataaagtaataatataactcaaaaaaaaaaaaaaaaaaaaaaaaaaaaaaaaaaaaaaaaa

SEQ ID NO: 3105 - protein, 575 aa, Homo sapien
MSAATHSPMMQVASGNGDRDPLPPGWEIKIDPQTGWPFFVDHNSRTTTWNDPRVPSEGPKETPSSANGPSREGSRLPPAREGHPVYPQLRPGYIPIPVLHEGAENRQVHPFHVYPQPGMQRFRTEAAAAAPQRSQSPLRGMPETTQPDKQCGQVAAAAAAQPPASHGPERSQSPAASDCSSSSSSASLPSSGRSSLGSHQLPRGYISIPVIHEQNVTRPAAQPSFHQAQKTHYPAQQGEYQTHQPVYHKIQGDDWEPRPLRAASPFRSSVQGASSREGSPARSSTPLHSPSPIRVHTVVDRPQQPMTHRETAPVSQPENKPESKPGPVGPELPPGHIPIQVIRKEVDSKPVSQKPPPPSEKVEVKVPPAPVPCPPPSPGPSAVPSSPKSVATEERAAPSTAPAEATPPKPGEAEAPPKHPGVLKVEAILEKVQGLEQAVDNFEGKKTDKKYLMIEEYLTKELLALDSVDPEGRADVRQARRDGVRKVQTILEKLEQKAIDVPGQVQVYELQPSNLEADQPLQAIMEMGAVAADKGKKNAGNAEDPHTETQQPEATAAATSNPSSMTDTPGNPAAP

SEQ ID NO: 3106 - DNA, 2093 bp, Homo sapien
cgctgtttcgtgggaccaggattgaaacaagatggcgggttcgtggtgagaagccgtcaagcaggagtagaaattggtatgcttagaagcagattctaaaagcagtttctcttcagaacatcttttttcataccacttgataagcatcttgaaacaccatggctgtagctgcagtaaaatgggtgatgtcaaagagaactatcttgaaacatttatttccagtccaaaattcgggcgtacatgtgcagatggagctttatattgtgtttgtcataaatctacgtattctcctctaccagatgactataattgcaacgtagagcttgctctgacttctgatggcaggacaatagtatgctaccacccttctgtggacattccatatgaacacacaaaacctatccctcggccagatcctgtgcataataatgaagaaacacatgatcaagtgctgaaaaccagattggaagaaaaagttgaacaccttgaggaaggacctatgatagaacaacttagcaaaatgttctttactactaagcaccgttggtatcctcatggacggtatcacagatgtcgtaagaatctgaatcctccaaaagacagatgatgcggaggttcctgggggaatcaaagagaaatgtgcctcatttgccatttgagaaaatgcagtctggtgtattcagtaatatatagtaaagtaataatgataaaatatcttttcatatattagaatgtgtacttttatataaagtaattctggatttgacattctcatttagagaaacctattttcttttttctttttctattttagtgtttcatttatgtgcggtctccaatttaggacttttccatagtgccaaagccatacatattcagtagaacatcaataaattacatcagaaattcaacactttattataaaacgggcttcgtgttagataattttgctaaacagtaggctactgtaagtgttctgagcatatttaagacaggctagcattttcaatttacaatattttcaactgatagtaggtttattgggatgtaaccctatgataagttgagaaacatctctttttgtgtgtctactgtgatttaagtatttttaatcatcagccaagcattgttagtagtataaatatgattaataaaaatgtgcatggctttcctgaaggagattttttaattgcctttgagaataaactcataaggtctaccaagaaaataaatgttatgatgtttcagttggcttctaggaaataattaaattagtgatattttaatcaggttttactatctgctaggccccttccatcaattcttattaaattctcaaaataatcctttgaaaagggagtataattacattttacagtgactcgaaccttacccaaacaagtgggagagccaggagccaaactatcaggctccaaagcttttttttagtgcatcacaatgacaaaggggtggttttctttcacccaagaatgtgctttcctggaaatttttctagatagaatattatgtaatttgttttgaaggttttttttcctgactgtcttaaagattatgctagctttagaacacatgcaaacagctgcagctctgtgattaaaatgttaaggtcactagaatagtgttaggaaaatgttaatagataattctgctgcctctattagcttatgtatgatccttaatagcattgcttccccttcagtttctatttaggaggtgaagaatcttttaataaggtagaaagttgctttatttaaatttgtactgtagaatgtttgtgatacagtatttgtaaaattgatatgaaaaataatttctcaaagtctattgtttgatctagttattttaataaaggaactctagaagtttcaagtggccagtgaagtgtgaggaatagagagtaaaggaaataattaataatggtgaccctctgttaagtggtttactttttccattaatataaatttcatttggaaagattaaaaaaacaagtttgattgaacttgataaatcagaaatatttaaaaaaaaaaaaaaaaaaaaaaaaaaaaaaaaaaaaaaaaaaaaaaaaaaaa

SEQ ID NO: 3107 - protein, 142 aa, Homo sapien
MGDVKENYLETFISSPKFGRTCADGALYCVCHKSTYSPLPDDYNCNVELALTSDGRTIVCYHPSVDIPYEHTKPIPRPDPVHNNEETHDQVLKTRLEEKVEHLEEGPMIEQLSKMFFTTKHRWYPHGRYHRCRKNLNPPKDR

SEQ ID NO: 3108 - DNA, 2147 bp, Homo sapien
ggctcttttaaatgaccccaggcgtcgtgtattgaatcctagactcacgtccgtctcgccggcgcccgagccagtccgcgcgcaccgcgtctgcgtccccgaaagccccgcccgcaagggctgccctgcctacctggtctccgacgtgctcgtctggagggcggtgcgaggggccgagccgacgagatgttcttgctgcctcttccggctgcggggcgagtagtcgtccgacgtctggccgtagtacgttctgggagccggagtctctccaccgcagacatgacgaagggccttgttttaggaatctattccaaagaaaaagaagatgatgtgccacagttcacaagtgcaggagagaattttgataaattgttagctggaaagctgagagagactttgaacatatctggaccacctctgaaggcagggaagactcgaaccttttatggtctgcatcaggacttccccagcgtggtgctagttggcctcggcaaaaaggcagctggaatcgacgaacaggaaaactggcatgaaggcaaagaaaacatcagagctgctgttgcagcggggtgcaggcagattcaagacctggagctctcgtctgtggaggtggatccctgtggagacgctcaggctgctgcggagggagcggtgcttggtctctatgaatacgatgacctaaagcaaaaaaagaagatggctgtgtcggcaaagctctatggaagtggggatcaggaggcctggcagaaaggagtcctgtttgcttctgggcagaacttggcacgccaattgatggagacgccagccaatgagatgacgccaaccagatttgccgaaattattgagaagaatctcaaaagtgctagtagtaaaaccgaggtccatatcagacccaagtcttggattgaggaacaggcaatgggatcattcctcagtgtggccaaaggatctgacgagcccccagtcttcttggaaattcactacaaaggcagccccaatgcaaacgaaccacccctggtgtttgttgggaaaggaattacctttgacagtggtggtatctccatcaaggcttctgcaaatatggacctcatgagggctgacatgggaggagctgcaactatatgctcagccatcgtgtctgctgcaaagttaaatttgcccattaatattataggtctggcccctctttgtgaaaatatgcccagcggcaaggccaacaagccgggggatgttgttagagccaaaaacgggaagaccatccaggttgataacactgatgctgaggggaggctcatactggctgatgcgctctgttacgcacacacgtttaacccgaaggtcatcctcaatgccgccaccttaacaggtgccatggatgtagctttgggatcaggtgccactggggtctttaccaattcatcctggctctggaacaaactcttcgaggccagcattgaaacaggggaccgtgtctggaggatgcctctcttcgaacattatacaagacaggttgtagattgccagcttgctgatgttaacaacattggaaaatacagatctgcaggagcatgtacagctgcagcattcctgaaagaattcgtaactcatcctaagtgggcacatttagacatagcaggcgtgatgaccaacaaagatgaagttccctatctacggaaaggcatgactgggaggcccacaaggactctcattgagttcttacttcgtttcagtcaagacaatgcttagttcagatactcaaaaatgtcttcactctgtcttaaattggacagttgaacttaaaaggtttttgaataaatggatgaaaatcttttaacggagacaaaggatggtatttaaaaatgtagaacacaatgaaatttgtatgccttgatttttttttcatttcacacaaagatttataaaggtaaagttaatatcttacttgataaggatttttaagatactctataaatgattaaaatttttagaacttcctaatcacttttcagagtatatgtttttcattgagaagcaaaattgtaactcagatttgtgatgctaggaacatgagcaaactgaaaattactatgcacttgtcagaaacaataaatgcaacttgttgtgaaaaaaaaaaaaaaaaaaaaaaa

SEQ ID NO: 3109 - protein, 519 aa, Homo sapien
MFLLPLPAAGRVVVRRLAVVRSGSRSLSTADMTKGLVLGIYSKEKEDDVPQFTSAGENFDKLLAGKLRETLNISGPPLKAGKTRTFYGLHQDFPSVVLVGLGKKAAGIDEQENWHEGKENIRAAVAAGCRQIQDLELSSVEVDPCGDAQAAAEGAVLGLYEYDDLKQKKKMAVSAKLYGSGDQEAWQKGVLFASGQNLARQLMETPANEMTPTRFAEIIEKNLKSASSKTEVHIRPKSWIEEQAMGSFLSVAKGSDEPPVFLEIHYKGSPNANEPPLVFVGKGITFDSGGISIKASANMDLMRADMGGAATICSAIVSAAKLNLPINIIGLAPLCENMPSGKANKPGDVVRAKNGKTIQVDNTDAEGRLILADALCYAHTFNPKVILNAATLTGAMDVALGSGATGVFTNSSWLWNKLFEASIETGDRVWRMPLFEHYTRQVVDCQLADVNNIGKYRSAGACTAAAFLKEFVTHPKWAHLDIAGVMTNKDEVPYLRKGMTGRPTRTLIEFLLRFSQDNA

SEQ ID NO: 3110 - DNA, 6409 bp, Homo sapien
aaagatcttttttttttttttttctttttttttcggcggagatcctcgttggggctgggaaactcctgcaaaactcgagaccaggaagccagcccgcaccccaacccccaccaaagccacctactcttcttctgtgggaggccagtccacatccgctctcacccgagagagatattcagctggatccaaagtgactgatgaagggaaggaaatcatgtcaagcgaagccttgaaaaagctgccctgagacggtgtcccgccgaaagaatgttggctcaattaagaaacatcagggagataaattcaacccagtgtgtctaaaaatgactacaaaacgaagtttgtttgtgcggttggtaccatgtcgctgtctacgaggggaagaggagactgtcactactcttgattattctcattgcagcttagaacaagttccgaaagagatttttacttttgaaaaaaccttggaggaactctatttagatgctaatcagattgaagagcttccaaagcaactttttaactgtcagtctttacacaagctgagtttgccagacaatgatttaacaacgttaccagcatccattgcaaaccttattaatctcagggaactggatgtcagcaagaatggaatacaggagtttccagaaaatataaaaaattgtaaagttttgacaattgtggaggccagtgtaaaccctatttccaagctccctgatggattttctcagctgttaaacctaacccagttgtatctgaatgatgcttttcttgagttcttgccagcaaattttggcagattaactaaactccaaatattagagcttagagaaaaccagttaaaaatgttgcctaaaactatgaatagactgacccagctggaaagattggatttgggaagtaacgaattcacggaagtgcctgaagtacttgagcaactaagtggattgaaagagttttggatggatgctaatagactgacttttattccagggtttattggtagtttgaaacagctcacatatttggatgtttctaaaaataatattgaaatggttgaagaaggaatttcaacatgtgaaaaccttcaagacctcctattatcaagcaattcacttcagcagcttcctgagactattggttcgttgaagaatataacaacgcttaaaatagatgaaaaccagttaatgtatctgccagactctataggagggttaatatcagtagaagaactggattgtagtttcaatgaggttgaagctttgccttcatctattgggcagcttactaacttaagaacttttgctgctgatcataattacttacagcagttgcccccagagattggaagctggaaaaatataactgtgctgtttctccattccaataaacttgagacacttccagaggaaatgggtgatatgcaaaaattaaaagtcattaatttaagtgataatagattaaagaatttaccctttagctttacaaagctacagcaattgacagctatgtggctctcagataatcagtccaaacccctgatacctcttcaaaaagaaactgattcagagacccagaaaatggtgcttaccaactacatgttccctcaacagccaaggactgaggatgttatgtttatatcagataatgaaagttttaacccttcattgtgggaggaacagaggaaacagcgggctcaagttgcatttgaatgtgatgaagacaaagatgaaagggaggcacctcccagggagggaaatttaaaaagatatccaacaccatacccagatgagcttaagaatatggtcaaaactgttcaaaccattgtacatagattaaaagatgaagagaccaatgaagactcaggaagagatttgaaaccacatgaagatcaacaagatataaataaagatgtgggtgtgaagacctcagaaagtactactacagtaaaaagcaaagttgatgaaagagaaaaatatatgataggaaactctgtacagaagatcagtgaacctgaagctgagattagtcctgggagtttaccagtgactgcaaatatgaaagcctctgagaacttgaagcatattgttaaccatgatgatgtttttgaggaatctgaagaactttcttctgatgaagagatgaaaatggcggagatgcgaccaccattaattgaaacctctattaaccagccaaaagtcgtagcacttagtaataacaaaaaagatgatacaaaggaaacagattctttatcagatgaagttacacacaatagcaatcagaataacagcaattgttcttctccatctcggatgtctgattcagtttctcttaatactgatagtagtcaagacacctcactctgctctccagtgaaacaaactcatattgatattaattccaaaatcaggcaagaagatgaaaattttaacagccttttacaaaatggagatattttaaacagttcaacagaggaaaagttcaaagctcatgataaaaaagattttaacttacctgaatatgatttgaatgttgaagagcgattagttctaattgagaaaagtgttgactcaacagccacagctgatgacactcacaaattagatcatatcaatatgaatcttaataaacttataactaatgatacatttcaaccagagatcatggaaagatcaaaaacacaggatattgtgcttggaacaagctttttaagcattaattctaaagaggaaactgagcacttggaaaatggaaacaagtatcctaatttggaatccgtaaataaggtaaatggacattctgaggaaacttcccagtctcctaataggactgaaccacatgacagtgattgttctgttgacttaggtatttccaaaagcactgaagatctctcccctcagaaaagtggtccagttggatctgttgtgaaatctcatagcataactaatatggagattggagggctaaaaatctatgatattcttagtgataatggacctcagcagccaagtacaaccgttaaaatcacatctgctgttgatggaaaaaatatagtcaggagcaagtctgccacactgttgtatgatcaaccattgcaggtatttactggttcttcctcatcttctgatttaatatcaggaacaaaggcaattttcaagtttgattcaaatcataatcccgaagagccaaatataataagaggccccacaagtggcccacaatctgcacctcaaatatatggtcctccacagtataatatccaatacagtagcagtgctgcagtcaaagacactttgtggcactccaaacaaaatccccaaatagaccatgccagttttcctcctcagctccttcctagatcagagagcacagaaaatcaaagttatgctaaacattctgccaatatgaatttctctaatcataacaatgttcgagctaatactgcataccatttacatcagagacttggcccagcaagacatggggaaatgtgggccatctcaccaaacgaccgacttattcctgcagtaactcgaagtacaatccagcgacaaagtagtgtgtcctccacagcctctgtaaatcttggtgatccaggctctacaaggcgggctcagattcctgaaggagattatttatcatacagagagttccactcagcgggaagaactcctccaatgatgccaggatcacagagacccctttctgcacgaacatacagcatagatggtccaaatgcatcaagacctcagagtgctcgaccctctattaatgaaataccagagagaactatgtcagttagtgatttcaattattcacggactagtccttcaaaaagaccaaatgcaagggttggttctgagcattctttattagatcctccaggaaaaagtaaagttcctcgtgactggagagaacaagtacttcgacatattgaagccaaaaagttagaaaagatgcctttgagtaatggacagatgggccagcctctcaggcctcaggcaaattatagtcaaatacatcacccccctcaggcatctgtggcaaggcatccctctagagaacaactaattgattacttgatgctgaaagtggcccaccagcctccatatacacagccccattgttctcctagacaaggccatgaactggcaaaacaagagattcgagtgagggttgaaaaggatccagaacttggatttagcatatcaggtggtgtcgggggtagaggaaacccattcagacctgatgatgatggtatatttgtaacaagggtacaacctgaaggaccagcatcaaaattactgcagccaggtgataaaattattcaggctaatggctacagttttataaatattgaacatggacaagcagtgtccttgctaaaaactttccagaatacagttgaactcatcattgtacgagaagtttcctcataagcactgtggacaaaaaaagcggggaagacagcaagatttattggaagatacttacaggggaaattaatattttgactatttttatatataaagaagaactcaaaaaattatgttcaaatttgtacattaatgaaataatggataaaggagactgttgaattcataccatataaaacttgttaggtttttaaacatagcaatcaaggctacaaaaacaaacctgtgttgtttttgtatagattgtaggtttatttttggatttcatatacatgactgaactgtgtgcaaggcaatagttagccttgattttagcccagagacagatggcagagctatctctctcatagcttttatgcccttatttttattcaactggtattaatgtttttctcctgaaactactttttttgatgtgggcaagagatttgaagtgttggcttttgctatgtgcatattgaattgaagagtgagtaggtgaaggtggtgctggtgggttcactttccaaggccagactaaaacagttattttctataaaaatctggaagcaaagaatggggatggggagagctacgtggtagtatgtttttattaggagaataatgcaataaaatatgtaatgtcttttttataaagcaaaaaagacaataattgcatttatgagctcggcaggatctgttcttgtcatagccattgactatacatttgctactggtgattcagtttttaattttttagtcacaggaaatttttaactctactgtagatgcatgtccatgcattttctgtgttatggaaatccactgatttttttttttttttcaaatggtggtacttgcaatctgttttataattagtgctccatttaaatctaatttataatttttattttaagcagcaaatgaaacaaaaatggccagttttaagattgtgttgcctgtaacacaaaatgttacgaaggtttaggaaagcctctttgatttttgtttggccttgcattggcccttggtaaagtaaaaggaaacagtacacttggagctaggaaaccaaagcaagctttgtgaaactggcacagtgatagagaattgctgtggagagttatagagcaaagggatgggtccttgaggcctgccagtgtgtaaaggtgttcaaataaagggctgtttctacaggtaacattaaatgtgaactcaacacttccagagtctttaaagggtttctatgtgtatcagtgtaatagtgttttaccaccaactgcctttctttgttcctagttactgtaacaaatatttgatgatagaggtttattaattttgtttatccagaccattaattttatttgtttttgtctatgtaatcaaataaaatttgagtaacatgtaatggtaaggattaatgcatggttatttggaccagaaaaaagtgccatagaagaccaataactgtttagttgaggctagtctggaacctttcattagagcaatatttggttattgcacttcatttttatttactaagaaatgcaatttgggaatttttaatctgttatgctttgtttatcaaccttgattttaattaagacttttataagactagcttaaaacaccaaccaacattatttttgcaaaagtgagttggactcactttccattcttgctagtcagagtaagtaggcagcacttttaaaaatatgtgaactcaaatattgcacttctttcaagatgttatcaattggttattgtactgtatagttttaataattttgattgaaaccctttaacaactctttgtaaattttaactcattttagttgattttcagtactatttacataggaattgatttttatggatatagtagaagaaatgtgctgtattttgataaaattcacttattgtatgtgtgttgtaatctaaaaaaaaaaagaatgacaaacagcttctttaagacaaaaaaaaaaaaaaaaaaaaaa

SEQ ID NO: 3111 - protein, 1371 aa, Homo sapien
MTTKRSLFVRLVPCRCLRGEEETVTTLDYSHCSLEQVPKEIFTFEKTLEELYLDANQIEELPKQLFNCQSLHKLSLPDNDLTTLPASIANLINLRELDVSKNGIQEFPENIKNCKVLTIVEASVNPISKLPDGFSQLLNLTQLYLNDAFLEFLPANFGRLTKLQILELRENQLKMLPKTMNRLTQLERLDLGSNEFTEVPEVLEQLSGLKEFWMDANRLTFIPGFIGSLKQLTYLDVSKNNIEMVEEGISTCENLQDLLLSSNSLQQLPETIGSLKNITTLKIDENQLMYLPDSIGGLISVEELDCSFNEVEALPSSIGQLTNLRTFAADHNYLQQLPPEIGSWKNITVLFLHSNKLETLPEEMGDMQKLKVINLSDNRLKNLPFSFTKLQQLTAMWLSDNQSKPLIPLQKETDSETQKMVLTNYMFPQQPRTEDVMFISDNESFNPSLWEEQRKQRAQVAFECDEDKDEREAPPREGNLKRYPTPYPDELKNMVKTVQTIVHRLKDEETNEDSGRDLKPHEDQQDINKDVGVKTSESTTTVKSKVDEREKYMIGNSVQKISEPEAEISPGSLPVTANMKASENLKHIVNHDDVFEESEELSSDEEMKMAEMRPPLIETSINQPKVVALSNNKKDDTKETDSLSDEVTHNSNQNNSNCSSPSRMSDSVSLNTDSSQDTSLCSPVKQTHIDINSKIRQEDENFNSLLQNGDILNSSTEEKFKAHDKKDFNLPEYDLNVEERLVLIEKSVDSTATADDTHKLDHINMNLNKLITNDTFQPEIMERSKTQDIVLGTSFLSINSKEETEHLENGNKYPNLESVNKVNGHSEETSQSPNRTEPHDSDCSVDLGISKSTEDLSPQKSGPVGSVVKSHSITNMEIGGLKIYDILSDNGPQQPSTTVKITSAVDGKNIVRSKSATLLYDQPLQVFTGSSSSSDLISGTKAIFKFDSNHNPEEPNIIRGPTSGPQSAPQIYGPPQYNIQYSSSAAVKDTLWHSKQNPQIDHASFPPQLLPRSESTENQSYAKHSANMNFSNHNNVRANTAYHLHQRLGPARHGEMWAISPNDRLIPAVTRSTIQRQSSVSSTASVNLGDPGSTRRAQIPEGDYLSYREFHSAGRTPPMMPGSQRPLSARTYSIDGPNASRPQSARPSINEIPERTMSVSDFNYSRTSPSKRPNARVGSEHSLLDPPGKSKVPRDWREQVLRHIEAKKLEKMPLSNGQMGQPLRPQANYSQIHHPPQASVARHPSREQLIDYLMLKVAHQPPYTQPHCSPRQGHELAKQEIRVRVEKDPELGFSISGGVGGRGNPFRPDDDGIFVTRVQPEGPASKLLQPGDKIIQANGYSFINIEHGQAVSLLKTFQNTVELIIVREVSS

SEQ ID NO: 3112 - DNA, 1125 bp, Homo sapien
ggcacgaggaagcgaccgagggactgggagtcgttagtgagagtttcactcttgttgcctaggctggagtgcaatggtgcgatcttggctcatcacgaccttcgcctcccaggttcaagtgattgtcccatttcagcctcccgagtagctgggattacaggatgacgcggcatggcaagaactgcaccgcaggggccgtctacacctaccacgagaagaagaaggacacagcggcctcgggctatgggacccagaacattcgactgagccgggatgccgtgaaggacttcgactgctgttgtctctccctgcagccttgccacgatcctgttgtcaccccagatggctacctgtatgagcgtgaggccatcctggagtacattctgcaccagaagaaggagattgcccggcagatgaaggcctacgagaagcagcggggcacccggcgcgaggagcagaaggagcttcagcgggcggcctcgcaggaccatgtgcggggcttcctggagaaggagtcggctatcgtgagccggcccctcaaccctttcacagccaaggccctctcgggcaccagcccagatgatgtccaacctgggcccagtgtgggtcctccaagtaaggacaaggacaaagtgctgcccagcttctggatcccgtcgctgacgcccgaagccaaggccaccaagctggagaagccgtcccgcacggtgacctgccccatgtcagggaagcccctgcgcatgtcggacctgacgcccgtgcacttcacaccgctagacagctccgtggaccgcgtggggctcatcacccgcagcgagcgctacgtgtgtgccgtgacccgcgacagcctgagcaacgccaccccctgcgctgtgctgcggccctctggggctgtggtcaccctcgaatgcgtggagaagctgattcggaaggacatggtggaccctgtgactggagacaaactcacagaccgcgacatcatcgtgctgcagcggggcggtaccggcttcgcgggctccggagtgaagctgcaagcggagaaatcacggccggtgatgcaggcctgagtgtgtgcgggagaccaaataaaccggcttgggtgcgcaaaaaaaaaaaaaaaaaaaa

SEQ ID NO: 3113 - protein, 301 aa, Homo sapien
MTRHGKNCTAGAVYTYHEKKKDTAASGYGTQNIRLSRDAVKDFDCCCLSLQPCHDPVVTPDGYLYEREAILEYILHQKKEIARQMKAYEKQRGTRREEQKELQRAASQDHVRGFLEKESAIVSRPLNPFTAKALSGTSPDDVQPGPSVGPPSKDKDKVLPSFWIPSLTPEAKATKLEKPSRTVTCPMSGKPLRMSDLTPVHFTPLDSSVDRVGLITRSERYVCAVTRDSLSNATPCAVLRPSGAVVTLECVEKLIRKDMVDPVTGDKLTDRDIIVLQRGGTGFAGSGVKLQAEKSRPVMQA

SEQ ID NO: 3114 - DNA, 1278 bp, Homo sapien
acaggggaaataccgcggcgccggtagttgctgtggtttccgttctgagctcgcagcttaggagctgaagatcgcggacttagcgttgccgcgtccgagtccggccatcagtggctgcagatccggagccaggagctcaaccacccttcttcggaacagggccggcctgctgctgtgccctcgacgctcggtgcctgtatctactccggggcctaggtcggctccgggggcggcttaggagaaggccgccggcgagatgttcaaaaacacgttccagagcggcttcctctccatcctctacagcatcggcagcaagcctctgcaaatctgggacaaaaaggtacggaatggccacatcaaaagaatcactgataatgacatccagtccctggtgctagagattgaagggacaaatgtaagcaccacatatatcacatgccctgcagaccccaagaagacgctgggaattaaacttcctttccttgtcatgattatcaaaaacctgaagaagtattttaccttcgaagtgcaggtactagatgacaagaatgtgcgtcgtcgctttcgggcaagtaactaccagagcaccacccgggtcaaacccttcatctgcaccatgcccatgcggctggatgacggctggaaccagattcagttcaacttgctagacttcacacggcgagcatacggcaccaattacatcgagaccctcagagtgcagatccatgcaaattgtcgcatccgacgggtttacttctcagacagactctactcagaagatgagctgccggcagagttcaaactgtatctcccagttcagaacaaggcaaagcaataactggaattgtgactcgagggatagacccctggatgtgactcttctttttaaaaggaaactatgtggaggacgatgcaaaaacatatttatcttagtttgctctgctgtagttctgttatttatacttggtgttgcttgtcatggacaccggtgaacatgccgtaactctgtgactgcattgtaagtgcagtgggggtaagcagtcctgtgagtggcgcatgaacgctggagcttattccgccgcctgccccagtgtggggggagatacctttaccatgaacttacagaattaaagatggcccataaggaattccagaccaatatttcttcctgcggtttattctatgttttatatattatctaaatatatgtatatgctgtgtcatactcataatctggaaatgaataaagtgatatattcctggtttgtaaaaaaaaaa

SEQ ID NO: 3115 - protein, 193 aa, Homo sapien
MFKNTFQSGFLSILYSIGSKPLQIWDKKVRNGHIKRITDNDIQSLVLEIEGTNVSTTYITCPADPKKTLGIKLPFLVMIIKNLKKYFTFEVQVLDDKNVRRRFRASNYQSTTRVKPFICTMPMRLDDGWNQIQFNLLDFTRRAYGTNYIETLRVQIHANCRIRRVYFSDRLYSEDELPAEFKLYLPVQNKAKQ

SEQ ID NO: 3116 - DNA, 6919 bp, Homo sapien
cccacggatcatcagaaggcgcggacctggaggaggcgccccagaaggcgacgcctcttgcctcctgtctctcgcctctcgaaggaagtttgctcttaatttcagagccgggttcgccgtcggatcaacctccaggagctagcagcgggcgcggaccgggcagtttccgcgctcagcacaggcagctcgcggtcatgggcggctcagcctccagccagctggacgagggcaagtgcgcttacatccgagggaaaactgaggctgccatcaaaaacttcagtccctactacagtcgtcagtactctgtggctttctgcaatcacgtgcgcactgaagtagaacagcaaagagatttaacgtcacagtttttgaagaccaagccaccattggcgcctggaactattttgtatgaagcagagctatcacaattttctgaagacataaagaagtggaaggagagatacgttgtagttaaaaatgattatgctgtggagagctatgagaataaagaggcctatcagagaggagctgctcctaaatgtcgaattcttccagccggtggcaaggtgttaacctcagaagatgaatataatctgttgtctgacaggcatttcccagaccctcttgcctccagtgagaaggagaacactcagccctttgtggtcctgcccaaggaattcccagtgtacctgtggcagcccttcttcagacacggctacttctgcttccacgaggctgctgaccagaagaggtttagtgccctcctgagtgactgcgtcaggcatctcaatcatgattacatgaagcagatgacatttgaagcccaagcctttttagaagctgtgcaattcttccgacaggagaagggtcactatggttcctgggaaatgatcactggggatgaaatccagatcctgagtaacctggtgatggaggagctcctgcccactcttcagacagacctgctgcctaagatgaaggggaagaagaatgacagaaagaggacgtggcttggtctcctcgaggaggcctacaccctggttcagcatcaagtttcagaaggattaagtgccttgaaggaggaatgcagagctctgacaaagggcctggaaggaacgatccgttctgacatggatcagattgtgaactcaaagaactatttaattggaaagatcaaagcgatggtggcccagccggcggagaaaagctgcttggagagtgtgcagccattcctggcatccatcctggaggagctcatgggaccagtgagctcgggattcagtgaagtacgtgtactctttgagaaagaggtgaatgaagtcagccagaacttccagaccaccaaagacagtgtccagctaaaggagcatctagaccggcttatgaatcttccgctgcattccgtgaagatggaaccttgttatactaaagtcaacctgcttcacgagcgcctgcaggatctcaagagccgcttcagattcccccacattgatctggtggttcagaggacacagaactacatgcaggagctaatggagaatgcagtgttcacttttgagcagttgctttccccacatctccaaggagaggcctccaaaactgcagttgccattgagaaggttaaactccgagtcttaaagcaatatgattatgacagcagcaccatccgaaagaagatatttcaagaggcactagttcaaatcacacttcccactgtgcagaaggcactggcgtccacatgcaaaccagagcttcagaaatacgagcagttcatctttgcagatcataccaatatgattcacgttgaaaatgtctatgaggagattttacatcagatcctgcttgatgaaactctgaaagtgataaaggaagctgctatcttgaagaaacacaacttatttgaagataacatggccttgcccagtgaaagtgtgtccagcttaacagatctaaagccccccacagggtcaaaccaggccagccctgccaggagagcttctgccattctgccaggagttctgggtagtgagaccctcagtaacgaagtattccaggagtcagaggaagagaagcagcctgaggtccctagctcgttggccaaaggagaaagcctttctctccctgggccaagcccacccccagatgggactgagcaggtgattatttcaagagtggatgaccccgtggtgaatcctgtggcaacagaggacacagcaggactcccgggcacatgctcatcagagctggagtttggagggacccttgaggatgaagaacccgcccaggaagagccagaacccatcactgcctcgggttctttgaaggcgctcagaaagttgctgacagcgtccgtggaagtaccagtggactctgctccagtgatggaagaagatacgaatggggagagccacgttccccaagaaaatgaagaagaagaggaaaaagagcccagtcaggcagctgccatccaccccgacaactgtgaagaaagtgaagtcagcgagagggaggcccaacctccctgtcccgaggcccatggggaggagttggggggatttccagaggtaggcagcccagcctctccgccagccagtggagggctcaccgaggagcccctggggcccatggagggggagctcccaggagaggcctgcacactcactgcccatgaaggaagagggggcaagtgtaccgaggaaggggatgcctcacagcaagagggctgcaccttaggttctgaccccatctgcctcagtgagagccaggtttctgaggaacaagaagagatgggagggcaaagcagcgcggcccaggccacggccagtgtgaatgcagaggagatcaaggtagcccgtattcatgagtgtcagtgggtggtggaggatgctccaaacccggatgtcctgctgtcacacaaagatgacgtgaaggagggagaaggtggtcaggagagtttcccagagctgccctcagaggagtgaaagggacaatttggctgaagtctttctctgaaaaaagccaaagcgttataggggtacacttaggggttgcatgcaagctgttaccaaaaaatttttaagtattttcttaatttgaataataaaaccagaggaaatgcatacagggcatgagcaactgaggcaaacctttgtggacatgaattgttctacgatgaatttttgctttagtattttaataagaattacaaagacaatggcatacttggggtgagagggagctgaggatgtctgaggagggaatagtattgcagggaagactgagaaaacagtaggatgacagttttgagtatactctgcacttttcaattgtgcaatcttcttgtgcactttaaggctttttaattttgtttgagaatgcaaatgtatactgtaagtctacctttactatctactatgcctacttcaccatctcttaaggactcggcatttgtccacagtcagactgcaagagagggtaggtcatgaacagtcacccgtgctggctgtagcccccacagaggcaatcatgcccaatagattcaagagaagctaagcggaaatggagggtggaaggtgtgatctgtgggactgtctgggcctgttactcatcctgctatcaatttcttattaattaatcttgatgattcttattaattaatcacatttgcaggaaattcagatgaggcaagaaaattttattggcctgggtaagactgaaagcattccaaattaggcttagactgtgcaaagggcttagctaagttatcgagcttaaaacccgtcaattaaacaaacattatttgaacagttactgcatgccacgcactgtgttgggcttagtaataaaaaaaagaaaagataagtgcttgttctagcataaattaaaaggtccaagggaatttaatctggaagagaacatatgccaatttttaaactatgacagcttttttttctctttccattcaaatagtcctggttcattcccagaagggcacaaaatgaatgaataaataaataaatgaataaagacaaaagccaaggtgtatgctctcaagttccaaagatgttatcaaamgctgaaatcatttgtttggtcattcagcaagctaattgagtctctgttatataccaagcactggggataccatggcgaaaaacaactttgttccttcctcctagaacttacattttaatggaaatagacaaaacacatcttcttaacggatggtgacctataaccattaatgttgaaaatggaagagacttgcttccaaaagattaaaaggagttgttcttttctccttcagaaaaataccagatcatttcctaaaatctccagtcccaagtattacatcgtggtttccctccccgactttttattttattttattctatttttttgagatggagtctcgctctgtcgccaaggctggagtgcagtggtgtgatctcggctcactgcaacctccgcctcctgggttcaggagattctcctctgtcagcgtcccaagtagctggaattacagccatgcggcaccattcccggctaatttttgtatttttggtggagatgggttttcaccatgttggccaggctggtctcraactcctgatttcaggcgatccacccacctcgacttcccaaagtgctgggattacagcgtgagctacctggcccctccccaaattttaacatcagatctcaacatatttgttgagaacttgtttagatcatcactatcgagtaaatttatgtcagttctttagagcatttgcttcacacacagttcaaccatttaaccagaaattaaaatatcacccttttcagccctcccatgaagaatttctaggtcataaacatgaataatactcagtatatgtataatatcatatttaattgttgcaacttttcttggcgtgtttaaatcctcatgtctttgagggatcccaccacaggtgaaggaagtaaagaccacttctcccccagtctctgctttctgcagtgctcactcatatcctggcatttagcatggtgtgttgaaattaggtttacttcttgtctctccaagtggctcctctcttaaaagacagaaactagggtttagtcatcatttgtgcttcctgctagaaacccacagccttgaataatggcttcctgcctccttgagtcactttaatatccctggtgcataggacctggcatgcgtcaggctgctcgggaaatgtgggaactggacacccagaacactgctgtgctggggctatttggggcctgctgtcaggcagaaagacgttttgaattgggctttctgcccttgttgagttttctcttaagtaaagtccaaagtccaaggggcagatggccagatgcactgcccagtaaggcaggaagccaaagaggcagtgccagccccacaaaggctgcccgactccctgggacagtagtgtggagtcccagcccaggctgacctcacaccggagcttcctagcttcctttctttgctcaatgcagggcttcttgcaccccctggaaagctaagagatttttttcaaccctaaaagagagtacctttcactgcattggatggatgaacatcagtgccctaactttatccatcatgtaggtcagggaggactgggcactatttggcaggatgtactccagaatataatcaaagaattttctgtacatatttcactaaagacaagtttttgggctggatgtggtagcttacacctataatcccagcactttgggaggctgaggtgagagggtcacttgagcccaggagttctagacaagcctgggaaacatagcaagatctcatccttacaaaaaataataatggtgtgtgcctgcagtcctagctacttgggtggttgaggcaggaggattgtttgagcgagggaagttgaggctgcagtgaactatgattttaccactgcactccagcttgggcgacggagtgagaccctgtctcaaaaaaaaaaaaagttttctagaataagcaggatgattgtttaatttgaagatggaacaggaaactagagtgcatttaaaatactctgtcttcattttaacatgttgaatggaataactgcatatcaccatgagtttgttttgcttttcatacagacttgtatgtgtcatttgagtggtttccagattggagcgaggttattctgatctaaatgaacagcatttttttccttagcctctgtttgccactctgggtatcgtctcctatggcaaagccattagaaatgcataaaacctcgagacatggtttttggcaaaaactccatgactttaaactagctcttttactactgacctttcacagagaaaaaatatttcccttgaaaaaaactgggcttgtcattttttcccttgtagctttaagcagagacataagtgccttgcattacacatagtaaactttctttaaaaaaaaaaaaaaaagattttggagactaccagggtaagattccaacttgtccaaaagctttctggccttacatattttattataaaaattctcaagtctggtaatcttctatgtcagagctagtgatttcaaaaggtttcacaattccccaagacaaaagtgattttcgttcattataataaggttaagtgatatgtgattcataacaattttgatgtgaagaagggaaggacatcattgacttaataatagtatcagtcggtgcaacagttggcaacatgtgccttcacactttaccataaagagacgggtttgagggtttgccttctaaagtctgcaacttcaagaaaaaaaatcgacactgtggattgactttcccggtcactatataaagcaaataaacttaaaacactttgtaaccatgtatttactctgccaggtgcctatattccaataaaatgttcatccttg

SEQ ID NO: 3117 - protein, 928 aa, Homo sapien
MGGSASSQLDEGKCAYIRGKTEAAIKNFSPYYSRQYSVAFCNHVRTEVEQQRDLTSQFLKTKPPLAPGTILYEAELSQFSEDIKKWKERYVVVKNDYAVESYENKEAYQRGAAPKCRILPAGGKVLTSEDEYNLLSDRHFPDPLASSEKENTQPFVVLPKEFPVYLWQPFFRHGYFCFHEAADQKRFSALLSDCVRHLNHDYMKQMTFEAQAFLEAVQFFRQEKGHYGSWEMITGDEIQILSNLVMEELLPTLQTDLLPKMKGKKNDRKRTWLGLLEEAYTLVQHQVSEGLSALKEECRALTKGLEGTIRSDMDQIVNSKNYLIGKIKAMVAQPAEKSCLESVQPFLASILEELMGPVSSGFSEVRVLFEKEVNEVSQNFQTTKDSVQLKEHLDRLMNLPLHSVKMEPCYTKVNLLHERLQDLKSRFRFPHIDLVVQRTQNYMQELMENAVFTFEQLLSPHLQGEASKTAVAIEKVKLRVLKQYDYDSSTIRKKIFQEALVQITLPTVQKALASTCKPELQKYEQFIFADHTNMIHVENVYEEILHQILLDETLKVIKEAAILKKHNLFEDNMALPSESVSSLTDLKPPTGSNQASPARRASAILPGVLGSETLSNEVFQESEEEKQPEVPSSLAKGESLSLPGPSPPPDGTEQVIISRVDDPVVNPVATEDTAGLPGTCSSELEFGGTLEDEEPAQEEPEPITASGSLKALRKLLTASVEVPVDSAPVMEEDTNGESHVPQENEEEEEKEPSQAAAIHPDNCEESEVSEREAQPPCPEAHGEELGGFPEVGSPASPPASGGLTEEPLGPMEGELPGEACTLTAHEGRGGKCTEEGDASQQEGCTLGSDPICLSESQVSEEQEEMGGQSSAAQATASVNAEEIKVARIHECQWVVEDAPNPDVLLSHKDDVKEGEGGQESFPELPSEE

SEQ ID NO: 3118 - DNA, 6919 bp, Homo sapien; identical to SEQ ID NO: 3116

SEQ ID NO: 3119 - protein, 928 aa, Homo sapien; identical to SEQ ID NO: 3117

SEQ ID NO: 3120 - DNA, 1875 bp, Homo sapien
agctgcggcggccgcaggttccaaagcgggtccgagccgccgccgcgcgcgcgccgcgcactgcagccccaggccccggccccccacccacgtctgcgttgctgccccgcctgggccaggccccaaaggcaaggacaaagcagctgtcagggaacctccgccggagtcgaatttacgtgcagctgccggcaaccacaggttccaagatggtttgcgggggcttcgcgtgttccaagaactgcctgtgcgccctcaacctgctttacaccttggttagtctgctgctaattggaattgctgcgtggggcattggcttcgggctgatttccagtctccgagtggtcggcgtggtcattgcagtgggcatcttcttgttcctgattgctttagtgggtctgattggagctgtaaaacatcatcaggtgttgctatttttttatatgattattctgttacttgtatttattgttcagttttctgtatcttgcgcttgtttagccctgaaccaggagcaacagggtcagcttctggaggttggttggaacaatacggcaagtgctcgaaatgacatccagagaaatctaaactgctgtgggttccgaagtgttaacccaaatgacacctgtctggctagctgtgttaaaagtgaccactcgtgctcgccatgtgctccaatcataggagaatatgctggagaggttttgagatttgttggtggcattggcctgttcttcagttttacagagatcctgggtgtttggctgacctacagatacaggaaccagaaagacccccgcgcgaatcctagtgcattcctttgatgagaaaacaaggaagatttcctttcgtattatgatcttgttcactttctgtaattttctgttaagctccatttgccagtttaaggaaggaaacactatctggaaaagtaccttattgatagtggaattatatatttttactctatgtttctctacatgtttttttctttccgttgctgaaaaatatttgaaacttgtggtctctgaagctcggtggcacctggaatttactgtattcattgtcgggcactgtccactgtggcctttcttagcatttttacctgcagaaaaactttgtatggtaccactgtgttggttatatggtgaatctgaacgtacatctcactggtataattatatgtagcactgtgctgtgtagatagttcctactggaaaaagagtggaaatttattaaaatcagaaagtatgagatcctgttatgttaagggaaatccaaattcccaattttttttggtctttttaggaaagatgtgttgtggtaaaaagtgttagtataaaaatgataatttacttgtagtcttttatgattacaccaatgtattctagaaatagttatgtcttaggaaattgtggtttaatttttgacttttacaggtaagtgcaaaggagaagtggtttcatgaaatgttctaatgtataataacatttaccttcagcctccatcagaatggaacgagttttgagtaatcaggaagtatatctatatgatcttgatattgttttataataatttgaagtctaaaagactgcatttttaaacaagttagtattaatgcgttggcccacgtagcaaaaagatatttgattatcttaaaaattgttaaataccgttttcatgaaagttctcagtattgtaacagcaacttgtcaaacctaagcatatttgaatatgatctcccataatttgaaattgaaatcgtattgtgtggctctgtatattctgttaaaaaattaaaggacagaaacctttctttgtgtatgcatgtttgaattaaaagaaagtaatggaagaattgatcgatgaaaaaaaaaa

SEQ ID NO: 3121 - protein, 204 aa, Homo sapien
MVCGGFACSKNCLCALNLLYTLVSLLLIGIAAWGIGFGLISSLRVVGVVIAVGIFLFLIALVGLIGAVKHHQVLLFFYMIILLLVFIVQFSVSCACLALNQEQQGQLLEVGWNNTASARNDIQRNLNCCGFRSVNPNDTCLASCVKSDHSCSPCAPIIGEYAGEVLRFVGGIGLFFSFTEILGVWLTYRYRNQKDPRANPSAFL

SEQ ID NO: 3122 - DNA, 1192 bp, Homo sapien
cggcgactgaccgtggtcgtgggcggacggcggcttgcagcgtggaggagctggggtcgctgtgggtcgcgaagcagagcccgggacgtgcgcgcttggtgcacgatcctgaaggggagctccgaggggcccgggtcgccagggctgctgcggccattcccggagcccggcgcggggcccgcgagatactggtttaggccgtcccagggctccgggcgcacccggtggccgctgctgcagcggagggagcgcggcggcgcgggggctcggagacagcgtttctcccggaagtcttcctcgggcagcaggtgggaagtgggagccggagcggcagctggcagcgttctctccgcaggtcggcaccatgcgccctgcagccctgcgcggggccctgctgggctgcctctgcctggcgttgctttgcctgggcggtgcggacaagcgcctgcgtgacaaccatgagtggaaaaaactaattatggttcagcactggcctgagacagtatgcgagaaaattcaaaacgactgtagagaccctccggattactggacaatacatggactatggcccgataaaagtgaaggatgtaatagatcgtggcccttcaatttagaagagattaaggatcttttgccagaaatgagggcatactggcctgacgtaattcactcgtttcccaatcgcagccgcttctggaagcatgagtgggaaaagcatgggacctgcgccgcccaggtggatgcgctcaactcccagaagaagtactttggcagaagcctggaactctacagggagctggacctcaacagtgtgcttctaaaattggggataaaaccatccatcaattactaccaagttgcagattttaaagatgcccttgccagagtatatggagtgatacccaaaatccagtgccttccaccaagccaggatgaggaagtacagacaattggtcagatagaactgtgcctcactaagcaagaccagcagctgcaaaactgcaccgagccgggggagcagccgtcccccaagcaggaagtctggctggcaaatggggccgccgagagccggggtctgagagtctgtgaagatggcccagtcttctatcccccacctaaaaagaccaagcattgatgcccaagttttggaaatattctgttttaaaaagcaagagaaattcacaaactgcag

SEQ ID NO: 3123 - protein, 256 aa, Homo sapien
MRPAALRGALLGCLCLALLCLGGADKRLRDNHEWKKLIMVQHWPETVCEKIQNDCRDPPDYWTIHGLWPDKSEGCNRSWPFNLEEIKDLLPEMRAYWPDVIHSFPNRSRFWKHEWEKHGTCAAQVDALNSQKKYFGRSLELYRELDLNSVLLKLGIKPSINYYQVADFKDALARVYGVIPKIQCLPPSQDEEVQTIGQIELCLTKQDQQLQNCTEPGEQPSPKQEVWLANGAAESRGLRVCEDGPVFYPPPKKTKH

SEQ ID NO: 3124 - DNA, 1192 bp, Homo sapien; identical to SEQ ID NO: 3122

SEQ ID NO: 3125 - protein, 256 aa, Homo sapien; identical to SEQ ID NO: 3123

SEQ ID NO: 3126 - DNA, 1760 bp, Homo sapien
gaattccgagctttttattcctaagaggagaaaatcagtaacgggagaagcaggaggatgtccagaagaaatttcatcccttgctctcgcccctactctttctggtgttagatcgagctaccctctaaaagcagtttagagtggtaaaaaaaaaaaaaacacaccaaacgctcgcagccacaaaagggatgaaatttcttctggacatcctcctgcttctcccgttactgatcgtctgctccctagagtccttcgtgaagctttttattcctaagaggagaaaatcagtcaccggcgaaatcgtgctgattacaggagctgggcatggaattgggagactgactgcctatgaatttgctaaacttaaaagcaagctggttctctgggatataaataagcatggactggaggaaacagctgccaaatgcaagggactgggtgccaaggttcatacctttgtggtagactgcagcaaccgagaagatatttacagctctgcaaagaaggtgaaggcagaaattggagatgttagtattttagtaaataatgctggtgtagtctatacatcagatttgtttgctacacaagatcctcagattgaaaagacttttgaagttaatgtacttgcacatttctggactacaaaggcatttcttcctgcaatgacgaagaataaccatggccatattgtcactgtggcttcggcagctggacatgtctcggtccccttcttactggcttactgttcaagcaagtttgctgctgttggatttcataaaactttgacagatgaactggctgccttacaaataactggagtcaaaacaacatgtctgtgtcctaatttcgtaaacactggcttcatcaaaaatccaagtacaagtttgggacccactctggaacccgaggaagtggtaaacaggctgatgcatgggattctgactgagcagaagatgatttttattccatcttctatagcttttttaacaacattggaaaggatccttcctgagcgtttcctggcagttttaaaacgaaaaatcagtgttaagtttgatgcagttattggatataaaatgaaagcgcaataagcacctagttttctgaaaactgatttaccaggtttaggttgatgtcatctaatagtgccagaattttaatgtttgaacttctgttttttctaattatccccatttcttcaatatcatttttgaggctttggcagtcttcatttactaccacttgttctttagccaaaagctgattacatatgatataaacagagaaatacctttagaggtgactttaaggaaaatgaagaaaaagaaccaaaatgactttattaaaataatttccaagattatttgtggctcacctgaaggctttgcaaaatttgtaccataaccgtttatttaacatatatttttatttttgattgcacttaaattttgtataatttgtgtttctttttctgttctacataaaatcagaaacttcaagctctctaaataaaatgaaggactatatctagtggtatttcacaatgaatatcatgaactctcaatgggtaggtttcatcctacccattgccactctgtttcctgagagatacctcacattccaatgccaaacatttctgcacagggaagctagaggtggatacacgtgttgcaagtataaaagcatcactgggggatttaaggagaattgagagaatgtacccacaaatggcagcaataataaatggatcacacttaacg

SEQ ID NO: 3127 - protein, 300 aa, Homo sapien
MKFLLDILLLLPLLIVCSLESFVKLFIPKRRKSVTGEIVLITGAGHGIGRLTAYEFAKLKSKLVLWDINKHGLEETAAKCKGLGAKVHTFVVDCSNREDIYSSAKKVKAEIGDVSILVNNAGVVYTSDLFATQDPQIEKTFEVNVLAHFWTTKAFLPAMTKNNHGHIVTVASAAGHVSVPFLLAYCSSKFAAVGFHKTLTDELAALQITGVKTTCLCPNFVNTGFIKNPSTSLGPTLEPEEVVNRLMHGILTEQKMIFIPSSIAFLTTLERILPERFLAVLKRKISVKFDAVIGYKMKAQ

SEQ ID NO: 3128 - DNA, 1834 bp, Homo sapien
ctcttccctgcaaaccatgtttgccaaaggcaaaggctcggcggtgccctcggatgggcaggctcgggaaaagttagctttatacgtctacgaatatttactgcacgtaggagcacagaaatctgcacagactttcttatcggagattcgatgggaaaaaaacatcacgttgggagaaccgcctgggtttttgcactcgtggtggtgtgtattttgggacctttactgtgcagctcctgaaaggagagacacttgtgaacattcaagtgaagcaaaagcctttcatgattatagtgcagcagctgccccgagccccgtgcttggcaacattccccccaacgatgggatgccgggaggccccatcccgccaggtttctttcagggtcctccggggtcacagccctcgccgcacgcacagcctccacctcacaatcctagcagcatgatgggaccccacagtcagccttttatgtcaccgcgatacgcaggcggccccaggcccccgatcagaatgggaaaccagcctccgggaggagttcctgggacacagccattgctgcccaattctatggatcccacacgacaacaaggccaccccaacatgggaggatcaatgcagagaatgaaccctccccgaggcatggggcccatgggtcccggcccacagaattacggcagcggcatgagaccaccacccaactccctcggccccgccatgcccgggattaacatgggcccgggagctggcagaccctggcccaatcctaacagtgctaactcaattccatactcctcctcatcacctggtacctatgtgggaccccctggtggtggcggtcctccaggaacacccattatgcccagtcccgcagattcaacaaattccagtgacaacatctacacaatgattaatccagtgccgcctggaggcagccggtccaacttcccgatgggtcccggctcggacggtccgatgggcggcatgggtggcatggagccacaccacatgaatggatcattagggtcaggcgacatagacggacttccaaaaaattctcctaacaacataagtggcattagcaatcctccaggcacccctcgagatgacggcgagctaggagggaacttcctccactcctttcagaacgacaattattctccaagcatgacgatgagtgtgtgatccccccttctccgagacgctgagagagcaggcattgcaggcgggaagatgccagaaattatgcaagaagtgaggtgtcattatccaggagctggtggggagggcatctccctgctcccctcaaccccctcccaccccatccacgccccctacctttcccaattttagtttcatgcaataaaaaggccaaactttttattccataaaacaagaaggacaaaactctcaaaaatgtatttcaagtcagtgaccagaaaaatcccaccccttgccctttccccaaaggaccttttctgtacatgacacttttttgttgttttttgtttggggttttaccattgttgggatttttttatttgttttcaggggggttttttgggggaaaatttttttaaatggaagcttctagcaagccccccaccccaatcaacctctatgctttcttcttaaaaaaaaaaaaaaaggaaaaaggaaaaaaaaaaaaggaaaaccagaagccctgctgtctgtctgtgcccaagcccttccaccagaaaagctagtctaggtgtgagagcccacattgtctgtagccatcaaaaataataataataaactggacagtttacaatcgttggtttctttcaaaaggccttttttggaaagaagaaa

SEQ ID NO: 3129 - protein, 388 aa, Homo sapien
MFAKGKGSAVPSDGQAREKLALYVYEYLLHVGAQKSAQTFLSEIRWEKNITLGEPPGFLHSWWCVFWDLYCAAPERRDTCEHSSEAKAFHDYSAAAAPSPVLGNIPPNDGMPGGPIPPGFFQGPPGSQPSPHAQPPPHNPSSMMGPHSQPFMSPRYAGGPRPPIRMGNQPPGGVPGTQPLLPNSMDPTRQQGHPNMGGSMQRMNPPRGMGPMGPGPQNYGSGMRPPPNSLGPAMPGINMGPGAGRPWPNPNSANSIPYSSSSPGTYVGPPGGGGPPGTPIMPSPADSTNSSDNIYTMINPVPPGGSRSNFPMGPGSDGPMGGMGGMEPHHMNGSLGSGDIDGLPKNSPNNISGISNPPGTPRDDGELGGNFLHSFQNDNYSPSMTMSV

SEQ ID NO: 3130 - DNA, 1690 bp, Homo sapien
ggcacgaggaaggtttttgctgcgccaacgcagtgaccgaaggctccgctcacgcccggcctgatcctgcctgaagatggtgccactggtggctgtggtatcagggccccgtgcccagctctttgcctgcctgctcaggctgggcactcagcaggtcggcccccttcagctgcacaccggggccagccatgcggccaggaaccattatgaggtgctggtgctgggtgggggcagtggcggaatcaccatggctgcccgcatgaagaggaaagtgggtgcagagaatgtggccattgttgagcccagtgagagacatttctaccagccaatctggacactggtgggtgctggtgccaaacaattgtcctcatctggtcgtcccacggcaagtgtgattccatctggtgtagaatggatcaaagctagagtgactgagttgaacccagacaagaactgcattcacacagatgacgacgagaagatctcctaccgatatcttattattgctctcggaatccagctggactatgagaagattaaaggcctacctgaaggtttcgctcatcccaaaatagggtcgaattattcagttaagactgtagagaagacatggaaagctctgcaggacttcaaagagggcaatgccatcttcaccttcccaaatactccagtgaagtgtgctggagcccctcagaagatcatgtacttatcagaagcctacttcaggaagacagggaagcgatccaaggccaatatcattttcaacacttctcttggagccattttcggggttaagaagtatgcagatgccctgcaggagatcatccaggagcggaacctcactgttaactacaagaaaaacctcattgaagtccgagccgataaacaagaggctgtatttgagaacctggacaaaccaggagagacccaagtgatttcatatgaaatgcttcatgtcacacctccaatgagcccaccagatgtcctcaagaccagtcctgtggctgatgctgctggttgggtggatgtggataaagaaactctgcaacacaggaggtacccaaatgtgtttgggattggggactgcaccaaccttcctacgtcaaagaccgctgctgcagtagctgcccagtcaggaatacttgataggacaatttctgtaattatgaagaatcaaacaccaacaaagaagtatgatggctacacatcatgtccactggtgaccggctacaaccgtgtgattcttgctgagtttgactacaaagcagagccgctagaaaccttcccctttgatcaaagcaaagagcgcctttccatgtatctcatgaaagctgacctgatgcctttcctgtattggaatatgatgctaaggggttactggggaggaccagcgtttctgcgcaagttgtttcatctaggtatgagttaaggatggctcagcacttgctcatcttggatggcttctgggccaaaactgcagtcactgaatgaccaagagcagcacgaaggacttggaacctatccttgtaaagagttccttgatgggtaatggtgaccaaatgcctcccttttcagtacctttgaacagcaaccatgtgggctactcatgatgggcttgattctttgggaataataaaatgaaataatacttttattttctgaataaaagtttgtcactgaaaaaaaaaaa

SEQ ID NO: 3131 - protein, 450 aa, Homo sapien
MVPLVAVVSGPRAQLFACLLRLGTQQVGPLQLHTGASHAARNHYEVLVLGGGSGGITMAARMKRKVGAENVAIVEPSERHFYQPIWTLVGAGAKQLSSSGRPTASVIPSGVEWIKARVTELNPDKNCIHTDDDEKISYRYLIIALGIQLDYEKIKGLPEGFAHPKIGSNYSVKTVEKTWKALQDFKEGNAIFTFPNTPVKCAGAPQKIMYLSEAYFRKTGKRSKANIIFNTSLGAIFGVKKYADALQEIIQERNLTVNYKKNLIEVRADKQEAVFENLDKPGETQVISYEMLHVTPPMSPPDVLKTSPVADAAGWVDVDKETLQHRRYPNVFGIGDCTNLPTSKTAAAVAAQSGILDRTISVIMKNQTPTKKYDGYTSCPLVTGYNRVILAEFDYKAEPLETFPFDQSKERLSMYLMKADLMPFLYWNMMLRGYWGGPAFLRKLFHLGMS

SEQ ID NO: 3132 - DNA, 1668 bp, Homo sapien
ggcacgagggtgagcgctcgcaagaggacggcagaggcccggcagctcggagctccgggaccttgtggcgcatcaggacgcggctgtccctctgccgggacccagagccgccgccgccgctctgcctcctgcgtgttagcctcctctgcgcgctccgggcaggcggccgtgggagccgctggggcgaggacggcgcgaggctgctgctgctgcccccggcccgcgcggctggaaacggagaggccgagccaagcggcggcccctcttatgctgggaggatgctggagagtagcggctgcaaagcgctgaaggagggcgtgctggagaagcgcagcgacgggttgttgcagctctggaagaaaaagtgttgcatcctcaccgaggaagggctgctgcttatcccgcccaagcagctgcaacaccagcagcagcagcaacagcagcagcagcagcagcaacaacagcccgggcaggggccggccgagccgtcccaacccagtggccccgctgtcgccagcctcgagccgccggtcaagctcaaggaactgcacttctccaacatgaagaccgtggactgtgtggagcgcaagggcaagtacatgtacttcactgtggtgatggcagagggcaaggagatcgactttcggtgcccgcaagaccagggctggaacgccgagatcacgctgcagatggtgcagtacaagaatcgtcaggccatcctggcggtcaaatccacgcggcagaagcagcagcacctggtccagcagcagcccccctcgcagccgcagccgcagccgcagctccagccccaaccccagcctcagcctcagccgcaaccccagccccaatcacaaccccagcctcagccccaacccaagcctcagccccagcagctccacccgtatccgcatccacatccacatccacactctcatcctcactcgcacccacaccctcacccgcacccgcatccgcaccaaataccgcacccacacccacagccgcactcgcagccgcacgggcaccggcttctccgcagcacctccaactctgcctgaaaggggcagctcccgggcaagacaaggttttgaggacttgaggaagtgggacgagcacatttctattgtcttcacttggatcaaaagcaaaacagtctctccgccccgcaccagatcaagtagtttggacatcaccctactgaaaacttgcgattcttcttagttttctgcatacttttcatcacgatgcaggaaacgatttcgagtcaagaagacttttatttatgaacctttgaaaggatcgtcttgtatggtgaattttctaggagcgatgatgtactgtaattttattttaatgtattttgatttatgattatttattagttttttttaaatgcttgttctaagacatttctgaatgtagaccattttccaaaaaggaaactttattttcaaaaacctaatccgtagtaattcctaatcttggagaataaaaaagggcggtggaggggaaaacattaagaatttattcattatttctcgagtactttcagaaagtctgacactttcattgttgtgccagctggttgaaattaaaactctgatattaaaaaaaaaaaaaaaaaaaaaaaaaaaaaaaaaaaaaaaaaaaaaaaaaaaaaaaaaaaaa

SEQ ID NO: 3133 - protein, 259 aa, Homo sapien
MLESSGCKALKEGVLEKRSDGLLQLWKKKCCILTEEGLLLIPPKQLQHQQQQQQQQQQQQQQPGQGPAEPSQPSGPAVASLEPPVKLKELHFSNMKTVDCVERKGKYMYFTVVMAEGKEIDFRCPQDQGWNAEITLQMVQYKNRQAILAVKSTRQKQQHLVQQQPPSQPQPQPQLQPQPQPQPQPQPQPQSQPQPQPQPKPQPQQLHPYPHPHPHPHSHPHSHPHPHPHPHPHQIPHPHPQPHSQPHGHRLLRSTSNSA

SEQ ID NO: 3134 - DNA, 3227 bp, Homo sapien
cccgtatccgcatccacatccacatccacactctcatcctcactcgcacccacaccctcacccgcacccgcatccgcaccaaataccgcacccacacccacagccgcactcgcagccgcacgggcaccggcttctccgcagcacctccaactctgcctgaaaggggcagctcccgggcaagacaaggttttgaggacttgaggaagtgggacgagcacatttctattgtcttcacttggatcaaaagcaaaacagtctctccgccccgcaccagatcaagtagtttggacatcaccctactgaacaacttggcgattcttcttagttttctgcatacttttcatcaccgatgcaggaaacgatttcgagtcaagaagacttttatttatgaacctttgaaaggatcgtcttgtatggtgaattttctaggagcgatgatgtactgtaattttattttaatgtattttgatttatgattatttattagttttttttaaatgcttgttctaagacatttctgaatgtagaccattttccaaaaaggaaactttattttcaaaaacctaatccgtagtaattcctaatcttggagaataaaaaagggcggtggaggggaaaacattaagaatttattcattatttctcgagtactttcagaaagtctgacactttcattgttgtgccagctggttgaaattaaaactctgatattactttttttgaggatttttatttttgtttttgcttaaacactatagtttgtctagaagtttaaaaagctaaaagttaaaaatggtgtaattatgaaaatctaacactcaagatagtttctaaaaggaaatcagtagttaaggatacctgatttcaaaatatttaaagcataacctaactgatggtaggatgattgtatcttgaatatgtggtagggccacatctattgtaggaaaaccttgcttttatcatctgtgtgtaaagggcttaataaggagaagaggccttttgactgatttgtgagtataaatgcatttgctgtttcatttcaaaaatgttgtggaggaaaagagtacatttaacttgtataagagaatatttgtactcctgtccaggctgcaggacctttcttcgagagctttgcacacttgacttgaaccacattttctgatccctttactttgttttagaagcacactgaaaaatctcgttgtttaaagtacaatttgtaaatatttcaaaggtctaggagtcataacttttgttttcatactgaaaatgatgttgatcagagaaaccaactgttttgcttttcattgctctgtgagaaattgaggattctgttttgctgttaggtaagctaactcagaaattgaaaggaaagactggataaacaccggattttcagtaagaaaacaaccccagtcttgtcttagaagccacttgttgaggagtctgttgggggaaaaaagaggatatgcttttaaaggtagaacaaaccttcttctgtgttaaatcaaaaggatgttcaaaatccaccaggacagatgctacttgggtttaaatggagccatagatgatacaaagtcctcttggggctgaaaatcacttcctatttgcatggctttactaactggtttctgttttccattatctttttcacagaaagtcttggtcagtatttttccagcatttaaattgaaacggtcagtattagaccactgctaggttatgtagtcaagaaataaaaatagaattacatgctacagatgtctttattctccttccatctagaaaggagttccaaggtcaaattactttttagtgcaatagttaaatgacattttgagatcataactcatatccaaaaagttgcagggaaaattaaaatagctttcccctattaagctaatggcaaacaaaacttaagtggacccccacttccagtggttgtttaggttgcagttgtgaaaatatgctgccaacatttaaaaacttgtttcatatgtatatatgtatacacatatatgaatatgtatgtatatatacatatatgagaacatgtgtgtacacatatatgaatatgtatatatgtgtatgtatgtatatatgtatatgaaatgagagccacatctaaagatttcttaaatcaagtttggttcagcttccttagaactgtggctgtactttttgaggagtacctcatagtactatatttttaatgcatgcaaatcataatagctccaaatgaaccacagttttttcccaatggaggatttttttttaattcttgtactaaaaaaaaaaaatccataccaaatatttttacaaattaagattgatgtaggttttaaaaaaggcatttgtatgttgttagcttacatatggggctaggtaatttcattgcttaaaaagatgcgcctaggctccctcttggtggctggatttctttttcttcgcccgtggtggccatggtttttaatagggccaccggaatcatggtttcttttttttttttttttttggagatggagtctcgccctgtgacccaggctggagtgcagtggcacgatctcggctcactgcaacctctgcctcttgggttcacgccattctcctgtgtcagcctcctgagtagctgggactacaggtgaatgccaccacgcccggctgatttttgtatttttagtagagatggggtttcaccatagtggtcaggctgttctcgaactcctgacctcaggtgatccacctgccttggcctcccaaagtgctaggattacaggtgtgagccaccacacccggccccagagtaatggtttcttgactttctgtagcccttgttccttagtctgctgtgatatttatgttgacctttatcattttctattctgaacccctcttagcatttaatgtgaaatctaagaaattagaagtagaatggcttttattgttttgacacctttgaaattattattaataatttttccagagcaaaaaagcaaacacgctcaataagactaaacaaaacaaaatataaatgtacatcatttaatgtcccagtggctctattctacctgtaagaaaatgatacaaaaccacctaagatattttgaagcctgacaaatcagcttcatggaaaaaggtaaaaaatgcatttttcaaccgaaagggcagatccaatagaagacccgctccttaaataaacataaaatgtaaaaagttggaaaaaaaaa

SEQ ID NO: 3135 - DNA, 1412 bp, Homo sapien
ctccttgggcgatcgcctgggtagaggagaggagtttccggggctcgggtccgggtcgccttccaggggaacgagcgcggaagcaagtgggcggcgagaggcggagcaagagacgctggagggcgtggacgcagcgggctttggaaaggccccaagttaatgaggcgtgcgccggctgccgagcgcctcttggagctgggctttcccccgcggtgcgggcgccaggagccgccttttccgctgggtgtcactcgggggtggggaagatggcccattcaaaagcgccgcgagggggcccggccagtgcccttcagtgagcgctcgcaagaggacggcagaggcccggcagctcggagctccgggaccttgtggcgcatcaggacgcggctgtccctctgccgggacccagagccgccgccgccgctctgcctcctgcgtgttagcctcctctgcgcgctccgggcaggcggccgtgggagccgctggggcgaggacggcgcgaggctgctgctgctgcccccggcccgcgcggctggaaacggagaggccgagccaagcggcggcccctcttatgctgggaggatgctggagagtagcggctgcaaagcgctgaaggagggcgtgctggagaagcgcagcgacgggttgttgcagctctggaagaaaaagtgttgcatcctcaccgaggaagggctgctgcttatcccgcccaagcagctgcaacaccagcagcagcagcaacagcagcagcagcagcagcaacaacagcccgggcaggggccggccgagccgtcccaacccagtggccccgctgtcgccagcctcgagccgccggtcaagctcaaggaactgcacttctccaacatgaagaccgtggactgtgtggagcgcaagggcaagtacatgtacttcactgtggtgatggcagagggcaaggagatcgactttcggtgcccgcaagaccagggctggaacgccgagatcacgctgcagatggtgcagtacaagaatcgtcaggccatcctggcggtcaaatccacgcggcagaagcagcagcacctggtccagcagcagcccccctcgcagccgcagccgcagccgcagctccagccccaaccccagcctcagcctcagccgcaaccccagccccaatcacaaccccagcctcagccccaacccaagcctcagccccagcagctccacccgtatccgcatccacatccacatccacactctcatcctcactcgcacccacaccctcacccgcacccgcatccgcaccaaataccgcacccacacccacagccgcactcgcagccgcacgggcaccggcttctccgcagcacctccaactctgcctgaaaggggcagctcccgggcaagacaaggttttgaggacttgaggaagtggg

SEQ ID NO: 3136 - protein, 400 aa, Homo sapien
MRRAPAAERLLELGFPPRCGRQEPPFPLGVTRGWGRWPIQKRREGARPVPFSERSQEDGRGPAARSSGTLWRIRTRLSLCRDPEPPPPLCLLRVSLLCALRAGGRGSRWGEDGARLLLLPPARAAGNGEAEPSGGPSYAGRMLESSGCKALKEGVLEKRSDGLLQLWKKKCCILTEEGLLLIPPKQLQHQQQQQQQQQQQQQQPGQGPAEPSQPSGPAVASLEPPVKLKELHFSNMKTVDCVERKGKYMYFTVVMAEGKEIDFRCPQDQGWNAEITLQMVQYKNRQAILAVKSTRQKQQHLVQQQPPSQPQPQPQLQPQPQPQPQPQPQPQSQPQPQPQPKPQPQQLHPYPHPHPHPHSHPHSHPHPHPHPHPHQIPHPHPQPHSQPHGHRLLRSTSNSA

SEQ ID NO: 3137 - DNA, 523 bp, Homo sapien
gcagatcgcttgcagcttgctagctgtgtgggctgggaggtctggtagggctgagcttgcaagaggatcaacatgcctttggctagagatttactacatccgtccttggaagaggaaaagaaaaaacataaaaagaaacgcctagtacaaagtccaaattcttactttatggatgtaaaatgtccaggttgctacaagatcaccacggttttcagccatgctcagacagtggttctttgtgtaggttgttcaacagtgttgtgccagcctacaggaggaaaggccagactcacagaagggtgttcatttagaagaaagcaacactaatgattcaaacagcttcctgaattttaattttgtgttgtctcacagaaagccttatcataaattccataattctaattaatttaccaagataatgtaattacatttggttttgtaaggtatacagcagtaatctcctattttggtgtcagtttttcaataaagttttgattatgggcaaaaaaaaaaaaaaaaaaaa

SEQ ID NO: 3138 - protein, 84 aa, Homo sapien
MPLARDLLHPSLEEEKKKHKKKRLVQSPNSYFMDVKCPGCYKITTVFSHAQTVVLCVGCSTVLCQPTGGKARLTEGCSFRRKQH

SEQ ID NO: 3139 - DNA, 3044 bp, Homo sapien
gtttgcgggtggttgttgctctcggggccgtgtggagtaggtctggacctggactcacggctgcttggagcgtccgccatgaggagaagtgaggtgctggcggaggagtccatagtatgtctgcagaaagccctaaatcaccttcgggaaatatgggagctaattgggattccagaggaccagcggttacaaagaactgaggtggtaaagaagcatatcaaggaactcctggatatgatgattgctgaagaggaaagcctgaaggaaagactcatcaaaagcatatccgtctgtcagaaagagctgaacactctgtgcagcgagttacatgttgagccatttcaggaagaaggagagacgaccatcttgcaactagaaaaagatttgcgcacccaagtggaattgatgcgaaaacagaaaaaggagagaaaacaggaactgaagctacttcaagagcaagatcaagaactgtgcgaaattctttgtatgccccactatgatattgacagtgcctcagtgcccagcttagaagagctgaaccagttcaggcaacatgtgacaactttgagggaaacaaaggcttctaggcgtgaggagtttgtcagtataaagagacagatcatactgtgtatggaagaattagaccacaccccagacacaagctttgaaagagatgtggtgtgtgaagacgaagatgccttttgtttgtctttggagaatattgcaacactacaaaagttgctacggcagctggaaatgcagaaatcacaaaatgaagcagtgtgtgaggggctgcgtactcaaatccgagagctctgggacaggttgcaaatacctgaagaagaaagagaagctgtggccaccattatgtctgggtcaaaggccaaggtccggaaagcgctgcaattagaagtggatcggttggaagaactgaaaatgcaaaacatgaagaaagtgattgaggcaattcgagtggagctggttcagtactgggaccagtgcttttatagccaggagcagagacaagcttttgcccctttctgtgctgaggactacacagaaagtctgctccagctccacgatgctgagattgtgcggttaaaaaactactatgaagttcacaaggaactctttgaaggtgtccagaagtgggaagaaacctggaggcttttcttagagtttgagagaaaagcttcagatccaaatcgatttacaaaccgaggaggaaatcttctaaaagaagaaaaacaacgagccaagctccagaaaatgctgcccaagctggaagaagagttgaaggcacgaattgaattgtgggaacaggaacattcaaaggcatttatggtgaatgggcagaaattcatggagtatgtggcagaacaatgggagatgcatcgattggagaaagagagagccaagcaggaaagacaactgaagaacaaaaaacagacagagacagagatgctgtatggcagcgctcctcgaacacctagcaagcggcgaggactggctcccaatacaccgggcaaagcacgtaagctgaacactaccaccatgtccaatgctacggccaatagtagcattcggcctatctttggagggacagtctaccactcccccgtgtctcgacttcctccttctggcagcaagccagtcgctgcttccacctgttcagggaagaaaacaccccgtactggcaggcatggagccaacaaggagaacctggagctcaacggcagcatcctgagtggtgggtaccctggctcggcccccctccagcgcaacttcagcattaattctgttgccagcacctattctgagtttgcgaaggatccgtccctctctgacagttccactgttgggcttcagcgagaactttcaaaggcttccaaatctgatgctacttctggaatcctcaattcaaccaacatccagtcctgagaagccctgatcagtcaaccagctgtggcttcctgtgcctagactggacctaattatatgggggtgactttagtttttcttcagcttaggagtgcttgaaaccttggccaggttccatgaccatgggcctaacttaaagatgtgaatgagtgttacagttgaaagcccatcataggtttagtggtcctaggagacttggttttgacttatatacatgaaaagtttatggcaagaagtgcaaattttagcatatggggcctgacttctctaccacataattctacttgctgaagcatgatcaaagcttgttttatttcaccactgtaggaaaatgattgactatgcccatccctgggggtaattttggcatgtatacctgtaactagtaattaacatcttttttgtttaggcatgttcaattaatgctgtagctatcatagctttgctcttacctgaagccttgtccccaccacacaggacagccttcctcctgaagagaatgtctttgtgtgtccgaagttgagatggcctgccctactggcaaagaggtgacaggaaggctgggagcagctttgttaaattgtgttcagttctgttacacagtgcattgccctttgttgggggtatgcatgtatgaacacacatgcttgtcggaacgctttctcggcgtttgtcccttggctctcatctcccccattcctgtgcctactttgcctgagttcttctacccccgcagttgccagccagattgggagtctgtttgttccaatgggttgagctgtctttgtcgtggagatctggaactttgcacatgtcactactggggaggtgttcctgctctagcttccacgatgaggcgccctctttacctatcctctcaatcactactcttcttgaagcactattatttattcttccgctgtctgcctgcagcagtactactgtcaacatagtgtaaatggttctcaaaagcttaccagtgtggacttggtgttagccacgctgtttacctcatacagtacgtgtcctgtttttaaaatatacaattattcttaaaaataaattaaaatcgtatacttacatttcaaaaaaaaaaaaaaaaa

SEQ ID NO: 3140 - protein, 620 aa, Homo sapien
MRRSEVLAEESIVCLQKALNHLREIWELIGIPEDQRLQRTEVVKKHIKELLDMMIAEEESLKERLIKSISVCQKELNTLCSELHVEPFQEEGETTILQLEKDLRTQVELMRKQKKERKQELKLLQEQDQELCEILCMPHYDIDSASVPSLEELNQFRQHVTTLRETKASRREEFVSIKRQIILCMEELDHTPDTSFERDVVCEDEDAFCLSLENIATLQKLLRQLEMQKSQNEAVCEGLRTQIRELWDRLQIPEEEREAVATIMSGSKAKVRKALQLEVDRLEELKMQNMKKVIEAIRVELVQYWDQCFYSQEQRQAFAPFCAEDYTESLLQLHDAEIVRLKNYYEVHKELFEGVQKWEETWRLFLEFERKASDPNRFTNRGGNLLKEEKQRAKLQKMLPKLEEELKARIELWEQEHSKAFMVNGQKFMEYVAEQWEMHRLEKERAKQERQLKNKKQTETEMLYGSAPRTPSKRRGLAPNTPGKARKLNTTTMSNATANSSIRPIFGGTVYHSPVSRLPPSGSKPVAASTCSGKKTPRTGRHGANKENLELNGSILSGGYPGSAPLQRNFSINSVASTYSEFAKDPSLSDSSTVGLQRELSKASKSDATSGILNSTNIQS

SEQ ID NO: 3141 - DNA, 2589 bp, Homo sapien
agcaacatggccgccgcctgagaggagagccgggccgccgccgtctctgcagcccgcgggtaactgggccgttgccgccgtccgcgctcggcccccgcggagagatcgagctgaaggactgcgcggctggctctcctctagtatggccaatgaagaggatgacccagttgtacaggagatcgatgtgtacttggccaagagtctggcggaaaagctgtatctatttcagtaccctgtgcgtccagcctcgatgacctacgatgacattccgcacctctcagccaagatcaagcccaagcagcagaaggtagagcttgagatggccatcgacaccctgaaccccaactattgccgcagcaaaggggagcagattgcgctgaacgtggacggggcctgcgccgacgagaccagcacgtattcctcgaagctgatggacaagcagaccttctgctcttcccagaccaccagtaacacatcccgttatgccgctgcactctacaggcaaggtgagctccacctgacacctttacatggcatcctgcagctgcggcccagcttctcctacctggataaggctgacgccaagcaccgggagagggaggcggccaacgaggcaggggactcttcacaggatgaggcggaagacgatgttaagcagatcacggtgcggttctcccggccggagtcagagcaggcccgccagcgccgtgtgcagtcctatgagttcctgcagaagaagcacgcagaggagccctgggtccacctgcattactatggcctgagggacagtcgctctgagcatgagcgtcagtacctgctgtgccccggctcaagcggggtggagaacacggagctcgtcaagtcacccagtgagtacctgatgatgctgatgccacccagccaggaggaggagaaagacaagcctgtggcccccagcaacgtcctgtcgatggcccagctgcgcacgctgcccctggccgatcagatcaagatcctgatgaagaatgtgaaggtcatgccttttgccaacttgatgagcctcctgggcccctccatcgattccgtggctgttctgcggggcatccagaaggtggcgatgttggtccaagggaactgggtggtgaagagtgacatcctataccccaaggactcgtccagccctcacagcggcgtgcctgctgaggtgctctgcaggggccgagacttcgttatgtggaagttcacgcagagccgctgggtggttaggaaagaggtggcaaccgtgaccaaactctgcgccgaggatgtgaaggacttcctggagcacatggccgtggtgaggatcaacaaaggctgggagttcattctgccttatgatggggagttcatcaagaagcacccggatgtggtccagcggcagcacatgctgtggacgggtatccaggccaaactggaaaaagtctataatcttgtaaaggaaaccatgccaaagaagccggatgcacaatcagggcctgccgggctggtctgtggggaccagcggatccaagtagccaaaaccaaggcccagcagaaccacgcgttgctggagcgggagctgcagcggcggaaggagcagctgcgggtgcctgcggtcccgcccggtgtgcggatcaaggaggagcccgtgagcgaggagggcgaggaggacgaggagcaggaggcggaggaggagcccatggacacttcccccagcggcctccacagcaagctggccaacgggctgcctctcgggcgggctgcgggcacagacagcttcaacgggcacccgccccagggctgcgccagcacccctgtggctcgggaactgaaggccttcgtggaggccacctttcagagacagtttgtgctcacgctgagcgaactcaagcgcctcttcaatctgcacttggccagcctgccccccggccacacactcttcagcggcatctcggaccgcatgctacaggacacggtgctggccgccggttgcaagcagatactggtgccttttcccccccagactgctgcttccccggatgagcagaaggtgtttgccctctgggagtctggagacatgagtgatcagcatcgacaggttttgcttgaaattttttccaaaaattaccgggtacgccgaaacatgatccagtctcggttgactcaagagtgtggagaagatctcagtaaacaggaggtggataaagtactaaaggactgctgtgtaagctatggtggcatgtggtaccttaaagggacagtacagtcttgacaatagtagcaaactactaacccagcaaatctaagcccaaggaagaagggcggaaccagaagtagggcctcgacttgcttcagacgacacagagcaagaggaactgaccatctcatgacctgtggcattgcacggtgcagtggacagaagggattatcctcagccagtcgcagggtcagcttaagttagttagatcactcccagaagagaccagctgggaccttctttgcagtacaatttgaaattcctgatgtattttgcttattatttggtttcattcccataataaagagagtgtatactgacatgggcaggatgat

SEQ ID NO: 3142 - protein, 708 aa, Homo sapien
MANEEDDPVVQEIDVYLAKSLAEKLYLFQYPVRPASMTYDDIPHLSAKIKPKQQKVELEMAIDTLNPNYCRSKGEQIALNVDGACADETSTYSSKLMDKQTFCSSQTTSNTSRYAAALYRQGELHLTPLHGILQLRPSFSYLDKADAKHREREAANEAGDSSQDEAEDDVKQITVRFSRPESEQARQRRVQSYEFLQKKHAEEPWVHLHYYGLRDSRSEHERQYLLCPGSSGVENTELVKSPSEYLMMLMPPSQEEEKDKPVAPSNVLSMAQLRTLPLADQIKILMKNVKVMPFANLMSLLGPSIDSVAVLRGIQKVAMLVQGNWVVKSDILYPKDSSSPHSGVPAEVLCRGRDFVMWKFTQSRWVVRKEVATVTKLCAEDVKDFLEHMAVVRINKGWEFILPYDGEFIKKHPDVVQRQHMLWTGIQAKLEKVYNLVKETMPKKPDAQSGPAGLVCGDQRIQVAKTKAQQNHALLERELQRRKEQLRVPAVPPGVRIKEEPVSEEGEEDEEQEAEEEPMDTSPSGLHSKLANGLPLGRAAGTDSFNGHPPQGCASTPVARELKAFVEATFQRQFVLTLSELKRLFNLHLASLPPGHTLFSGISDRMLQDTVLAAGCKQILVPFPPQTAASPDEQKVFALWESGDMSDQHRQVLLEIFSKNYRVRRNMIQSRLTQECGEDLSKQEVDKVLKDCCVSYGGMWYLKGTVQS

SEQ ID NO: 3143 - DNA, 1300 bp, Homo sapien
aacttttaaaaactctcattggagtaagtcttttcaagatgatcctccacaatggaggcagcgttcctacttgtcatcacacagctgaagacattgtttcttaggtgtgaaatcggggacaaaggacaaacagagacacacggcattgttcatgggaggcatcgtcaccctcctgggtgttctgtgggaatttcctgtgtgaggaaaacgtggccacagggttgtgctgtacccacccttccccggcgagatggccctcggcctgtgccgctgcttccaccctcgccactccatggcagcttttggtctgtttccggctctgccctctgccctgaactctcatccggcttgtacctgcctgctggacccctccacctggaggccagcccatgtctcaggcccagccctagcctcttctcctcaaattctaagtgttttctctttaggtttccctggctttgtgaatggatcatgtgtctctaggtataaacctgacatcatctttccacccggcttacctccaccagatctccccagttctgtctccatcttctgcctgcagctgctctgttctcatggtcactgctgcatcactgagtctggacccttgttatcattttcaaactggcctccttccctcgttccccacttcttaaagtcacctgtccattgccaccagattaagctttctccagccagatcacctctctctgagaaacctccattgacatggaaacaccattgtctggcacacatactcacatacccaccttcccgtcttgatccccacacatctttccagcctcccctcccactccactccctgctctctcctccacctccccatcctcttgtctcccctcccctctgaatccagcccagcggggcttctcctgcctccatcacatcacagaagtacctcctgcttctggttttaattagagccttccccgattacattttcctctgaattttttcctatctacatttgatctgtcatgtttaaaccccctacttctaagggaacttctctaatctcttatcctcatccccaaatagtgttttcttcctctgggttcttataatgttggtatcaatctcacagcatttagtgcttcctgcctggtgtgacagttacctgtgtgcatgtgcaatttctaatttcccacgctagactgtgagcttcctaaggcaagaatcatgcctcgttggtttctgtattcctcatggtgccaaacacagtgccttctacattgcaggcgctgaataaacatttttaaagcaaaaaaaaaaaaaaaaa

SEQ ID NO: 3144 - protein, 206 aa, Homo sapien
MALGLCRCFHPRHSMAAFGLFPALPSALNSHPACTCLLDPSTWRPAHVSGPALASSPQILSVFSLGFPGFVNGSCVSRYKPDIIFPPGLPPPDLPSSVSIFCLQLLCSHGHCCITESGPLLSFSNWPPSLVPHFLKSPVHCHQIKLSPARSPLSEKPPLTWKHHCLAHILTYPPSRLDPHTSFQPPLPLHSLLSPPPPHPLVSPPL

SEQ ID NO: 3145 - DNA, 1155 bp, Homo sapien
cccgagaccacgtggcctccgagcagctcagggcgcccttgaaagttcttggatctgcgggttatggccggtcccttgcagggcggtggggcccgggccctggacctactccggggcctgccgcgtgtgagcctggccaacttaaagccgaatcccggctccaagaaaccggagagaagaccaagaggtcggagaagaggtagaaaatgtggcagaggccataaaggagaaaggcaaagaggaacccggccccgcttgggctttgagggaggccagactccattttacatccgaatcccaaaatacgggtttaacgaaggacatagtttcagacgccagtataagcctttgagtctcaatagactgcagtatcttattgatttgggtcgtgttgatcctagtcaacctattgacttaacccagcttgtcaatgggagaggtgtgaccatccagccacttaaaagggattatggtgtccagctggttgaggagggtgctgacacctttacggcaaaagttaatattgaagtacagttggcttcagaactagctattgctgccattgaaaaaaatggtggtgttgttactacagccttctatgatccaagaagtctggacattgtatgcaaacctgttccattctttcttcgtggacaacccattccaaaaagaatgcttccaccagaagaactggtaccatattacactgatgcaaagaaccgtgggtacctggcggatcctgccaaatttcctgaagcacgacttgaactcgccaggaagtatggttatatcttacctgatatcactaaagatgaactcttcaaaatgctctgtactaggaaggatccaaggcagattttctttggtcttgctccaggatgggtggtgaatatggccgataagaaaatcctaaaacctacagatgaaaatctccttaagtattatacctcatgaattcccgtccaaggaagcagagttgttaaagagtactggaataggggctgaaggatctatattcccttattgcattttccttatgtataattttccagatggtgatgttacttttcagtgtactcatatgtctcattttcatctaaaattaaatggcaggaaacaaggactgcatagagaaaaaaaaaaaaaaaaaaaaaa

SEQ ID NO: 3146 - protein, 296 aa, Homo sapien [sequence omitted]

SEQ ID NO: 3147 - DNA, 4020 bp, Homo sapien
gtcaattgccctttagtcccaggactaaccggaagcttctgcaacaggaggacattgaaaataagatggaacccatccacataaggatttgcctcaaagggcactgcaaaaattgaacagaggaatcccaaggaagctgcctgaatttgcctgtatactctcgttctgcgacttataaaggaccagacaaatcaaattagtggttttggtttccgccagctgtggatgcctttgacattatgaccgcagaggattccaccgcagccatgagcagtgactcggccgccgggtcctcggccaaggtgcccgagggcgtggcgggcgcgcccaacgaggcagcactgctggcgctgatggagcgcacgggctacagcatggtgcaagagaacgggcagcgcaagtacggcggcccaccgcccggctgggagggcccgcacccgcagcgtggctgcgaggtcttcgtgggcaagatcccgcgcgacgtgtacgaggacgagctggtgcccgtgttcgaggccgtgggccgcacctacgagctgcgcctcatgatggactttgacggcaagaaccgcggctacgccttcgtcatgtactgccacaagcacgaggccaagcgcgcagtgcgtgagctcaacaactacgagatccgcccgggccgcctgctcggcgtgtgctgcagcgtggacaactgccgcctcttcatcggcgggatccccaagatgaagaagcgcgaggaaatcctggaggagattgccaaggtcaccgagggcgtgctggacgtgatcgtctacgccagcgcggccgacaagatgaagaaccgcggcttcgccttcgtggagtacgagagccaccgcgcggctgccatggctcgccgcaagctcatgcctggccgcatccagctgtggggccaccagatcgccgtggactgggccgagcctgagatcgacgtggacgaggacgtgatggagaccgtgaagatcctctacgtgcgcaacctcatgatcgagaccaccgaggacaccatcaagaagagcttcggccagttcaaccccggctgcgtggagcgcgtcaagaagatccgcgactacgccttcgtgcacttcaccagccgcgaggatgccgtgcatgccatgaacaacctcaacggcactgagctggagggctcgtgcctggaggtcacgctggccaagcccgtggacaaggagcagtactcgcgctaccagaaggcagccaggggcggcggcgcggctgaggcagcgcagcagcccagctacgtgtactcctgcgacccctacacactggcctactacggctacccctacaacgcgctcattgggcccaacagggactactttgtgaaagtagccatccctgccattggggctcagtattccatgtttccagcagctccagcccctaaaatgattgaagatggcaaaatccacacagtggagcacatgatcagccccattgctgtgcagccagacccagccagtgctgctgccgccgcagccgcggccgcagccgccgcagccgctgtcattcccactgtgtcgacgccaccacctttccagggccgcccaataactccagtatacacggtggctccaaacgttcagagaattcctactgccgggatctacggggccagttacgtgccatttgctgctccagctacagccacgatcgccacactacagaagaacgcggcagccgcggccgccgtgtatggaggatacgcaggctacatacctcaggccttccctgctgctgccattcaggtccccatccccgacgtctaccagacatactgaggctggtgaccagcacgaagacagaccacacaaacaccactgaaggaacgcttgactatttatgaagaaggaacatgttggattcacacatgcaacctgaaagtgaagaatgttagcagatttatttctgaattattttatatacatgaagttttcactagttttttaagactattttcaacttagcatgcctacgttcatacatttccaaaagacttgcaatggttcgtgccttcattccatcttttaaaaatttgtatgctgtactacatttgtatagaggtttttgttgttgtttttttaaggatatattttcagtatgaaggttattttcttaacttctgcactccagagatttctattttgtagtaccttcaataatatatcaactatatattaaaaaagcacacttgaggagctagggaactattttgaaaaatatatacaatatttaaagatacaaacagtagtgcttaaaaatactacataaagcattattttaaaggttatactggaaagtgcaattttaaaatgagtaaaacctctgtatttctgctggcattaagggttgatggtgttaccatgtatcatcatggcggtactattttttaaaagaaattaaacactggatctctccttaagccaacattgaaaagacttgccgcacttctgagtccaaacactggaaagctctccttgccaccgttagccggggctcattctccatgtgccttagccttaaacatgcccccactcccacatctctcaccctgtcccctcctccccagattcccaatcccaccgcaatgtttggcaagcctaggactgataagtagctctgatagaggagctggtggcttttatacttcttcctgggtttttgttggggtttgttgtttcgttgttttttgttttttttttgtttggttggggaagtattgtcttctacgtgtgctattttcagtagcagagtaagcacaaggttttaatcgagttgcataagacacctttgcatagctatttaattgcccaatgtaaaactttaatgccatttctaatgcttttattcatttttgaagtatgagtttgtagggacaaagaatgtatgttatcgtagacaagacccccagagactcttttcagcagaaagttatgcttctagttgccttaccatgtttcttgcaaaactgtccatggtcctcaagggtgttggaaacattatgtttattaaatgggcctctcttcctttgctgtgcacttgatgggtgaactggattggggtgtgcacatccaggaggaggaggagagacctgtagaagtttaaagatagtttgtaaatatcttctaatgcttgtttttagtccttttatgttggagaagttcatggtatgtagtttaatgcaaaatgaaaccattttatttcaatgttattaaaaaggtttgttttattaggaagttaatgtattgttgcagtgttttgtgcctgtttaaaggcttttgtttagcagagtgaatgtaaaatacagtaaaatgttaagattgtcatctactttttaaaaaaaaatatcaacttggaattgttttttaaaggctcaatcaaggaagtgaggtgtgcaataaggtagcaagtaaaacgcagttgcgtttttatgtcatgttagagatccatacaattttccactcacgggatttttgttgatggctgaattcttgtggattcataagaggatcatgcccttagcaagtacttttgttttgttttaaattaagagattcccaaatgcctttttccccctcatcttgaaatgagatgagtttttatgtgtaagcaatatttatttaactattctataaaattattgagtgcctactgaggcctttaagcaccgctaacattcctttccatcattcttttgaatgacataaaataattgtgcaatgttcctgatgatgtaccccacagctgcattcaaactcaaatctgtgggaatgagtgactcgaccaaatgtaattcggatcagatcctcatcccctgactgtgtgaaaaaagtactctccttctagtgaaggattgtcacagagtttcactggatgaaactatgacccagtattcttactgtattttacatgtgcctgtaaattattttgccgaaataagaagaagaagaggaagaaagaacagtagaaaaaaaaaataaaaaaaaa

SEQ ID NO: 3148 - protein, 524 aa, Homo sapien
MTAEDSTAAMSSDSAAGSSAKVPEGVAGAPNEAALLALMERTGYSMVQENGQRKYGGPPPGWEGPHPQRGCEVFVGKIPRDVYEDELVPVFEAVGRTYELRLMMDFDGKNRGYAFVMYCHKHEAKRAVRELNNYEIRPGRLLGVCCSVDNCRLFIGGIPKMKKREEILEEIAKVTEGVLDVIVYASAADKMKNRGFAFVEYESHRAAAMARRKLMPGRIQLWGHQIAVDWAEPEIDVDEDVMETVKILYVRNLMIETTEDTIKKSFGQFNPGCVERVKKIRDYAFVHFTSREDAVHAMNNLNGTELEGSCLEVTLAKPVDKEQYSRYQKAARGGGAAEAAQQPSYVYSCDPYTLAYYGYPYNALIGPNRDYFVKVAIPAIGAQYSMFPAAPAPKMIEDGKIHTVEHMISPIAVQPDPASAAAAAAAAAAAAAAVIPTVSTPPPFQGRPITPVYTVAPNVQRIPTAGIYGASYVPFAAPATATIATLQKNAAAAAAVYGGYAGYIPQAFPAAAIQVPIPDVYQTY

SEQ ID NO: 3149 - DNA, 2268 bp, Homo sapien
  Unsure 13: Unknown base
gggatttgaaccncgctgacgaagtttggtgatccatcttccgagtatcgccgggatttcgaatcgcgatgatcatcccctctctagaggagctggactccctcaagtacagtgacctgcagaacttagccaagagtctgggtctccgggccaacctgagggcaaccaagttgttaaaagccttgaaaggctacattaaacatgaggcaagaaaaggaaatgagaatcaggatgaaagtcaaacttctgcatcctcttgtgatgagactgagatacagatcagcaaccaggaagaagctgagagacagccacttggccatgtcaccaaaacaaggagaaggtgcaagactgtccgtgtggaccctgactcacagcagaatcattcagagataaaaataagtaatcccactgaattccagaatcatgaaaagcaggaaagccaggatctcagagctactgcaaaagttccttctccaccagacgagcaccaagaagctgagaatgctgtttcctcaggtaacagagattcaaaggtaccttcagaaggaaagaaatctctctacacagatgagtcatccaaacctggaaaaaataaaagaactgcaatcactactccaaactttaagaagcttcatgaagctcattttaaggaaatggagtccattgatcaatatattgagagaaaaagaaacattttgaagaacacaattccatgaatgaactgaagcagcagcccatcaataagggaggggtcaggactccagtacctccaagaggaagactctctgtggcttctactcccatcagccaacgacgctcgcaaggccggtcttgtggccctgcaagtcagagtaccttgggtctgaaggggtcactcaagcgctctgctatctctgcagctaaaacgggtgtcaggttttcagctgctactaaagataatgagcataagcgttcactgaccaagactccagccagaaagtctgcacatgtgaccgtgtctgggggcaccccaaaaggcgaggctgtgcttgggacacacaaattaaagaccatcacggggaattctgctgctgttattaccccattcaagttgacaactgaggcaacgcagactccagtctccaataagaaaccagtgtttgatcttaaagcaagtttgtctcgtcccctcaactatgaaccacacaaaggaaagctaaaaccatgggggcaatctaaagaaaataattatctaaatcaacatgtcaacagaattaacttctacaagaaaacttacaaacaaccccatctccagacaaaggaagagcaacggaagaaacgcgagcaagaacgaaaggagaagaaagcaaaggttttgggaatgcgaaggggcctcattttggctgaagattaataattttttaatatcttgtaaatattcctgtattctcaacttttttccttttgtaaatttttttttttttgctgtcatccccactttagtcacgagatctttttctgctaactgttcatagtctgtgtagtgtccatgggttcttcatgtgctatgatctctgaaaagacgttatcaccttaaagctcaaattctttgggatggtttttacttaagtccattaacaattcaggtttctaacgagacccatcctaaaattctgtttctagatttttaatgtcaagttcccaagttccccctgctggttctaatattaacagaactgcagtcttctgctagccaatagcatttacctgatggcagctagttatgcaagcttcaggagaatttgaacaataacaagaatagggtaagctgggatagaaaggccacctcttcactctctatagaatatagtaacctttatgaaacggggccatatagtttggttatgacatcaatattttacctaggtgaaattgtttaggcttatgtaccttcgttcaaatatcctcatgtaattgccatctgtcactcactatattcacaaaaataaaactctacaactcattctaacattgcttacttaaaagctacatagccctatcgaaatgcgaggattaatgctttaatgcttttagagacagggtctcactgtgttgcccaggctggtctcaaactccaccaaatgtacttcttattcattttatggaaaagactaggctttgcttagtatcatgtccatgtttccttcacctcagtggagcttctgagttttatactgctcaagatcgtcataaataaaattttttctcattgtcaaaaaaaaaaaaaaa

SEQ ID NO: 3150 - protein, 226 aa, Homo sapien
  Unsure 13: Unknown amino acid
MNELKQQPINKGGVRTPVPPRGRLSVASTPISQRRSQGRSCGPASQSTLGLKGSLKRSAISAAKTGVRFSAATKDNEHKRSLTKTPARKSAHVTVSGGTPKGEAVLGTHKLKTITGNSAAVITPFKLTTEATQTPVSNKKPVFDLKASLSRPLNYEPHKGKLKPWGQSKENNYLNQHVNRINFYKKTYKQPHLQTKEEQRKKREQERKEKKAKVLGMRRGLILAED

SEQ ID NO: 3151 - DNA, 1143 bp, Homo sapien
ggagctctggaggcggggcttcgagcgtggctcgtgggttttccgtgaagtcgcggtgcagcggtgggcggcatgtctgtggccggtggggagattcgtggggacacggggggagaggacactgctgctcccggccggttcagcttcagcccggagcccacgctcgaggacatccgccgcctccatgctgagtttgctgcggaacgagactgggaacagttccatcagcctcggaatctcctcctggccttggttggggaagtgggggagctggcagaactctttcagtggaaaaccgatggggaacctggcccccaaggctggtcccccagggaacgggcagcccttcaagaggagcttagtgacgtcctcatctacctggtggcattagcagcccgctgccgtgtggatctgccgctagcagtgctctccaaaatggacatcaaccggcgacgctacccagcccatctggcccgcagctcttcccgcaagtatacagaattgccccatggggccatctctgaagaccaggctgtggggcctgcggacattccctgtgactccacaggccagacctcaacctagaaagatggccacaggacttgcaactcagggtggtgtctgaagagcagagagtggcctggccctggagcctttttctagtcttttcagaatagatcatgggcctgaggcctccacttcttgaggtctgaggcccagcagcctctagaaggtagcctcctggtgtttgttctcccagtaaaatggttttgggcgataacttctagattattcctggatggccagggaggctctctgtctcagcaggtgatgacgggggtaccaggggtgcctctgagacccattctcgtgtttccctgttgtaccttttgcctgcagggcagagagatctggtttctagcaaattcccagtaggatgtcatgtaagttccttccccctcttagagattgaaggctgtaagagtccagatggtggagccaggctgtctgggttcaaatgccatctttgacacttgcaagctaaatgacattactcaaattaatcgttctgcacttcagcttccttgtctatcaaataaaaagaatagtacctgcccaaaaaaaaaaaaaaaaaaaaaaaaa

SEQ ID NO: 3152 - protein, 170 aa, Homo sapien
MSVAGGEIRGDTGGEDTAAPGRFSFSPEPTLEDIRRLHAEFAAERDWEQFHQPRNLLLALVGEVGELAELFQWKTDGEPGPQGWSPRERAALQEELSDVLIYLVALAARCRVDLPLAVLSKMDINRRRYPAHLARSSSRKYTELPHGAISEDQAVGPADIPCDSTGQTST

SEQ ID NO: 3153 - DNA, 1282 bp, Homo sapien
gtgctcggcgttgagctcctgcagccgccgccgctgcagtggtcgtccctgccctccccggccccggggtgcaccccgcaaggctcccgctggtgtccctggagcatgggaggctgctgagcgtgagtggcggtgtctggcaggagctgcgtggcagggagggcgtccatggctgcagccaacaagggcaacaagcccagagtccggggtatccgctttgcggcaggccacgatgcagaaggatcccacagccacgtccactttgatgagaagctgcatgactcggtggtcatggtcacccaggagagtgacagcagctttctggtcaaggttggcttcctgaagatcctgcacaggtatgagattaccttcactctgcccccagtgcacaggctgagcaaggatgtccgcgaggcacctgtccccagcctgcacctcaagctcctcagcgtggtgcccgtccctgaaggttatagtgtcaagtgtgagtactcggcgcacaaagagggcgtcctcaaagaggagatactgctagcctgcgaaggtggcactggcacctgtgtgcgcgtgacggtgcaggcccgcgtcatggaccggcaccacggcacgcccatgctgctggatggtgtcaagtgtgtgggcgccgagctggaatacgactcagagcacagcgactggcacggctttgactgaggcccgaggccccgcctgccccgggcccctcagccttaaaccccgccttgtccccccgacatgctgcgtgatggtgtggcttcctcgcccctctctggggtgggtgtgggggtggagtggccttgcccacgcctctcacctctgccttcatttgtgctgccaccctgcccctccctcgtcctcctctcccacttcctcctctctgtgtgcctcagtctcctgccggaagaaatgggttgatcccgaaaggaggctgtctgaggaagggagagggagggcctggggtgggtcccccactccccaccccaagccacagggactcccaccagggtctgggagaggacggagctggctctgtggcgtcgtggccccattactgctgccttgcttcagccacctctcctgcccctccctagtccccactgctgtccaccatgagtaggagggaggtgcagtccccagcccccacccctcaggtctgtgttacttggtttttaagcgactggttgggatagaaccctaaagaaataaacttccagtggataaaaaaaaaaaaaaaaaaaaaaaaaaaaaaaaaaaaaaaaaaaaa

SEQ ID NO: 3154 - protein, 174 aa, Homo sapien
MAAANKGNKPRVRGIRFAAGHDAEGSHSHVHFDEKLHDSVVMVTQESDSSFLVKVGFLKILHRYEITFTLPPVHRLSKDVREAPVPSLHLKLLSVVPVPEGYSVKCEYSAHKEGVLKEEILLACEGGTGTCVRVTVQARVMDRHHGTPMLLDGVKCVGAELEYDSEHSDWHGFD

SEQ ID NO: 3155 - DNA, 1434 bp, Homo sapien
ggggaagtcgaggcgggagtgactctgcttccgtttctggttttgctctagtgtttgggtttcttcgcggctgctcaagatgaaccgactcttcgggaaagcgaaacccaaggctccgccgcccagcctgactggctgcattggcacggtggacagtagagcagaatccattgacaagaagatttctcgattggatgctgagctagtgaagtataaggatcagatcaagaagatgagagagggtcctgcaaagaatatggtcaagcagaaagccttgcgagttttaaagcaaaagaggatgtatgagcagcagcgggacaatcttgcccaacagtcattcaacatggaacaagccaattataccatccagtctttgaaggacaccaagaccacggttgatgctatgaaactgggagtaaaggaaatgaagaaggcatacaagcaagtgaagatcgaccagattgaggatttacaagaccagctagaggatatgatggaagatgcaaatgaaatccaagaagcactgagtcgcagttatggcaccccagaactggatgaagatgatttagaagcagagttggatgcactaggtgatgagcttctggctgatgaagacagttcttatttggatgaggcagcatctgcacctgcaattccagaaggtgttcccactgatacaaaaaacaaggatggagttctggtggatgaatttggattgccacagatccctgcttcatagatttgcatcattcaagcatatcttgtaaaacaaacacatattatgggactaggaaatatttatctttccaaatttgccataacagatttaggtttctttcctttctttgaaggaaagtttaattacattgctcttttattttttccattaagagactcattgcttgggaaatgctttcttcgtactaaaatttgattcctttttttcttatgaaaaacgaactcagtttaaaagtatttttagctcgtatgacttgttttcattcattaataataatttgaaataaaactaaggaaatggaatcttaaaagtctatgacagtgtaactctacagtctcaaaatgacctgataaattgataagacaaagatgagattattggggctgttcatattatgattcagaatcattttctattgtggtattataggttggttaaagtgatggcctttttgatgggttttgttgtgtcttgtgaacaagtcgttactgtgtccattattggaatggaattatcactactgtatcatgagtgggtattttgattctatggttccctcagtattacatcttgacttgtaatcaattatgaatatttcttgatatttaatgtataggacatttatttatactcaataaatatttttcaaaaggaaaaaaaaaaaaatcaaaaaaaaaaaaaaaaaaaaaaaaaaa

SEQ ID NO: 3156 - protein, 219 aa, Homo sapien
MNRLFGKAKPKAPPPSLTGCIGTVDSRAESIDKKISRLDAELVKYKDQIKKMREGPAKNMVKQKALRVLKQKRMYEQQRDNLAQQSFNMEQANYTIQSLKDTKTTVDAMKLGVKEMKKAYKQVKIDQIEDLQDQLEDMMEDANEIQEALSRSYGTPELDEDDLEAELDALGDELLADEDSSYLDEAASAPAIPEGVPTDTKNKDGVLVDEFGLPQIPAS

SEQ ID NO: 3157 - DNA, 1554 bp, Homo sapien
gcgcgcctcgccggcgcctccatcccggatccttgctgcagcgtcagcgccgccgcccgtgcctttcctcttcctcctcctcctccttggcatccgcctcttcttcctcctgcgtcctcccccgctgcctccgctgctcccgacgcggagcccggagcccgcgccgagcccctggcctcgcggtgccatgctgccccggcggcggcgctgaaggatggcgacgccgctgcctccgccctccccgcggcacctgcggctgctgcggctgctgctctccggcctcgtcctcggcgccgccctgcgtggagccgccgccggccacccggatgtagccgcctgtcccgggagcctggactgtgccctgaagaggcgggcaaggtgtcctcctggtgcacatgcctgtgggccctgccttcagcccttccaggaggaccagcaagggctctgtgtgcccaggatgcgccggcctccaggcgggggccggccccagcccagactggaagatgagattgacttcctggcccaggagcttgcccggaaggagtctggacactcaactccgcccctacccaaggaccgacagcggctcccggagcctgccaccctgggcttctcggcacgggggcaggggctggagctgggcctcccctccactccaggaacccccacgcccacgccccacacctccatgggctcccctgtgtcatccgacccggtgcacatgtcgcccctggagccccggggagggcaaggcgacggcctcgcccttgtgctgatcctggcgttctgtgtggccggtgcagccgccctctccgtagcctccctctgctggtgcaggctgcatcgtgagatccgcctgactcagaaggccgactacgccactgcgaaggcccctggctcacctgcagctccccggatctcgcctggggaccaacggctggcacagagcgcggagatgtaccactaccagcaccaacggcaacagatgctgtgcctggagcggcataaagagccacccaaggagctggacacggcctcctcggatgaggagaatgaggacggagacttcacggtgtacgagtgcccgggcctggccccgaccggggaaatggaggtgcgcaaccctctgttcgaccacgccgcactgtccgcgcccctgccggcccccagctcaccgcctgcactgccatgacctggaggcagacagacgcccacctgctccccgacctcgaggcccccggggaggggcagggcctggagcttcccactaaaaacatgttttgatgctgtgtgcttttggctgggcctcgggctccaggccctgggaccccttgccagggagacccccgaacctttgtgccaggacacctcctggtcccctgcacctctcctgttcggtttagacccccaaactggagggggcatggagaaccgtagagcgcaggaacgggtgggtaattctagagacaaaagccaattaaagtccatttcagaaaaaaaaaaaaaaaaaaaaaaaaaaaaaaaaaaaaaaaaaaaaaaaaaaaaaaaaaaaaa

SEQ ID NO: 3158 - protein, 325 aa, Homo sapien
MATPLPPPSPRHLRLLRLLLSGLVLGAALRGAAAGHPDVAACPGSLDCALKRRARCPPGAHACGPCLQPFQEDQQGLCVPRMRRPPGGGRPQPRLEDEIDFLAQELARKESGHSTPPLPKDRQRLPEPATLGFSARGQGLELGLPSTPGTPTPTPHTSMGSPVSSDPVHMSPLEPRGGQGDGLALVLILAFCVAGAAALSVASLCWCRLHREIRLTQKADYATAKAPGSPAAPRISPGDQRLAQSAEMYHYQHQRQQMLCLERHKEPPKELDTASSDEENEDGDFTVYECPGLAPTGEMEVRNPLFDHAALSAPLPAPSSPPALP

SEQ ID NO: 3159 - DNA, 2584 bp, Homo sapien
tggcggcggcggcggcggttgtcccggctgtgccggttggtgtggcccgtcagcccgcgtaccacagcgcccgggccgcgtcgagcccagtacagccaagccgctgcggccgggtccggcgcgggcggcgcgcgcagacggagggcggcggccgcggccagggcggcccgtgggaccgcgggcccccggcgcagcgctgcccggctcccggccctgccggcctcctcccttggcgccgcggccatggcggccagcgcgaagcggaagcaggaggagaagcacctgaagatgctgcgggacatgaccggcctcccgcgcaaccgaaagtgcttcgactgcgaccagcgcggccccacctacgttaacatgacggtcggctccttcgtgtgtacctcctgctccggcagcctgcgaggattaaatccaccacacagggtgaaatctatctccatgacaacattcacacaacaggaaattgaattcttacaaaaacatggaaatgaagtctgtaaacagatttggctaggattatttgatgatagatcttcagcaattccagacttcagggatccacaaaaagtgaaagagtttctacaagaaaagtatgaaaagaaaagatggtatgtcccgccagaacaagccaaagtcgtggcatcagttcatgcatctatttcagggtcctctgccagtagcacaagcagcacacctgaggtcaaaccactgaaatctcttttaggggattctgcaccaacactgcacttaaataagggcacacctagtcagtccccagttgtaggtcgttctcaagggcagcagcaggagaagaagcaatttgaccttttaagtgatctcggctcagacatctttgctgctccagctcctcagtcaacagctacagccaattttgctaactttgcacatttcaacagtcatgcagctcagaattctgcaaatgcagattttgcaaactttgatgcatttggacagtctagtggttcgagtaattttggaggtttccccacagcaagtcactctccttttcagccccaaactacaggtggaagtgctgcatcagtaaatgctaattttgctcattttgataacttccccaaatcctccagtgctgattttggaaccttcaatacttcccagagtcatcaaacagcatcagctgttagtaaagtttcaacgaacaaagctggtttacagactgcagacaaatatgcagcacttgctaatttagacaatatcttcagtgccgggcaaggtggtgatcagggaagtggctttgggaccacaggtaaagctcctgttggttctgtggtttcagttcccagtcagtcaagtgcatcttcagacaagtatgcagctctggcagaactagacagcgttttcagttctgcagccacctccagtaatgcgtatacttccacaagtaatgctagcagcaatgtttttggaacagtgccagtggttgcttctgcacagacacagcctgcttcatcaagtgtgcctgctccatttggacgtacgccttccacaaatccatttgttgctgctgctggtccttctgtggcatcttctacaaacccatttcagaccaatgccagaggagcaacagcggcaacctttggcactgcatccatgagcatgcccacgggattcggcactcctgctccctacagtcttcccaccagctttagtggcagctttcagcagcctgcctttccagcccaagcagctttccctcaacagacagctttttctcaacagcccaatggtgcaggttttgcagcatttggacaaacaaagccagtagtaaccccttttggtcaagttgcagctgctggagtatctagtaatccttttatgactggtgcaccaacaggacaatttccaacaggaagctcatcaaccaatcctttcttatagccttatatagacaatttactggaacgaacttttatgtggtcacattacatctctccacctcttgcactgttgtcttgtttcactgatcttagctttaaacacaagagaagtctttaaaaagcctgcattgtgtattaaacaccaggtaatatgtgcaaaaccgagggctccagtaacaccttctaacctgtgaattggcagaaaagggtagcggtatcatgtatattaaaattggctaatattaagttattgcagataccacattcattatgctgcagtactgtacatatttttcttagaaattagctatttgtgcatatcagtatttgtaactttaacacattgttatgtgagaaatgttactggggaaatagatcagccacttttaaggtgctgtcatatatcttggaatgaatgacctaaaatcattttaaccattgctactggaaagtaacagagtcaaaattggaaggttttattcattcttgaatttttcctttctaaagagctcttctatttatacatgcctaaattcttttaaaatgtagagggatacctgtctgcataataaagctgatcatgttttgctacagtttgcaggtgaaaaaaaataaatattataaaataaaaaaaaaaaaaaagaaaaaaaaaa

SEQ ID NO: 3160 - protein, 562 aa, Homo sapien
MAASAKRKQEEKHLKMLRDMTGLPRNRKCFDCDQRGPTYVNMTVGSFVCTSCSGSLRGLNPPHRVKSISMTTFTQQEIEFLQKHGNEVCKQIWLGLFDDRSSAIPDFRDPQKVKEFLQEKYEKKRWYVPPEQAKVVASVHASISGSSASSTSSTPEVKPLKSLLGDSAPTLHLNKGTPSQSPVVGRSQGQQQEKKQFDLLSDLGSDIFAAPAPQSTATANFANFAHFNSHAAQNSANADFANFDAFGQSSGSSNFGGFPTASHSPFQPQTTGGSAASVNANFAHFDNFPKSSSADFGTFNTSQSHQTASAVSKVSTNKAGLQTADKYAALANLDNIFSAGQGGDQGSGFGTTGKAPVGSVVSVPSQSSASSDKYAALAELDSVFSSAATSSNAYTSTSNASSNVFGTVPVVASAQTQPASSSVPAPFGRTPSTNPFVAAAGPSVASSTNPFQTNARGATAATFGTASMSMPTGFGTPAPYSLPTSFSGSFQQPAFPAQAAFPQQTAFSQQPNGAGFAAFGQTKPVVTPFGQVAAAGVSSNPFMTGAPTGQFPTGSSSTNPFL

SEQ ID NO: 3161 - DNA, 3346 bp, Homo sapien
acgtactccatgcgctacctgctgcccagcgtcgtgctcctgggcacggcgcccacctacgtgttggcctggggggtctggcggctgctctccgccttcctgcccgcccgcttctaccaagcgctggacgaccggctctactgcgtctaccagagcatggtgctcttcttcttcgagaattacaccggggtccagatattgctatatggagatttgccaaaaaataaagaaaatataatatatttagcaaatcatcaaagcacagttgactggattgttgctgacatcttggccatcaggcagaatgcgctaggacatgtgcgctacgtgctgaaagaagggttaaaatggctgccattgtatgggtgttactttgctcagcatggaggaatctatgtaaagcgcagtgccaaatttaacgagaaagagatgcgaaacaaggtgcagagctacgtggacgcaggaactccaatgtatcttgtgatttttccagaaggtacaaggtataatccagagcaaacaaaagtcctttcagctagtcaggcatttgctgcccaacgtggccttgcagtattaaaacatgtgctaacaccacgaataaaggcaactcacgttgcttttgattgcatgaagaattatttagatgcaatttatgatgttacggtggtttatgaagggaaagacgatggagggcagcgaagagagtcaccgaccatgacggaatttctctgcaaagaatgtccaaaaattcatattcacattgatcgtatcgacaaaaaagatgtcccagaagaacaagaacatatgagaagatggctgcatgaacgtttcgaaatcaaagataagatgcttatagaattttatgagtcaccagatccagaaagaagaaaaagatttcctgggaaaagtgttaattccaaattaagtatcaagaagactttaccatcaatgttgatcttaagtggtttgactgcaggcatgcttatgaccgatgctggaaggaagctgtatgtgaacacctggatatatggaaccctacttggctgcctgtgggttactattaaagcatagacaagtagctgtctccagacagtgggatgtgctacattgtctatttttggcggctgcacatgacatcaaattgtttcctgaatttattaaggagtgtaaataaagccttgttgattgaagattggataatagaatttgtgacgaaagctgatatgcaatggtcttgggcaaacatacctggttgtacaactttagcatcggggctgctggaagggtaaaagctaaatggagtttctcctgctctgtccatttcctatgaactaatgacaacttgagaaggctgggaggattgtgtattttgcaagtcagatggctgcatttttgagcattaatttgcagcgtatttcactttttctgttattttcaatttattacaacttgacagctccaagctcttattactaaagtatttagtatcttgcagctagttaatatttcatcttttgcttatttctacaagtcagtgaaataaattgtatttaggaagtgtcaggatgttcaaaggaaagggtaaaaagtgttcatggggaaaaagctctgtttagcacatgattttattgtattgcgttattagctgattttactcattttatatttgcaaaataaatttctaatatttattgaaattgcttaatttgcacaccctgtacacacagaaaatggtataaaatatgagaacgaagtttaaaattgtgactctgattcattatagcagaactttaaatttcccagctttttgaagatttaagctacgctattagtacttccctttgtctgtgccataagtgcttgaaaacgttaaggttttctgttttgttttgtttttttaatatcaaaagagtcggtgtgaaccttggttggaccccaagttcacaagatttttaaggtgatgagagcctgcagacattctgcctagatttactagcgtgtgccttttgcctgcttctctttgatttcacagaatattcattcagaagtcgcgtttctgtagtgtggtggattcccactgggctctggtccttcccttggatcccgtcagtggtgctgctcagcggcttgcacgcagacttgctaggaagaaatgcagagccagcctgtgctgcccactttcagagttgaactctttaagcccttgtgagtgggcttcaccagctactgcagaggcattttgcatttgtctgtgtcaagaagttcaccttctcaagccagtgaaatacagacttaatttgtcatgactgaacgaatttgtttatttcccattaggtttagtggagctacacattaatatgtatcgccttagagcaagagctgtgttccaggaaccagatcacgatttttagccatggaacaatatatcccatgggagaagacctttcagtgtgaactgttctatttttgtgttataatttaaacttcgatttcctcatagtcctttaagttgacatttctgcttactgctactggatttttgctgcagaaatgtatcagtggcccacattaaacataccagttggatcatgataagcaaaatgaaagaaataatgattaagggaaaattaagtgactgtgttacactgcttctcccatgccagagaataaactctttcaagcatcatctttgaagagtcgtgtggtgtgaattggtttgtgtacattagaatgtatgcacacatccatggacactcaggatatagttggcctaataatcggggcatgggtaaaacttatgaaaatttcctcatgctgaattgtaattttctcttacctgtaaagtaaaatttagatcaattccatgtctttgttaagtacagggatttaatatattttgaatataatgggtatgttctaaatttgaactttgagaggcaatactgttggaattatgtggattctaactcattttaacaaggtagcctgacctgcataagatcacttgaatgttaggtttcatagaactatactaatcttctcacaaaaggtctataaaatacagtcgttgaaaaaaattttgtatcaaaatgtttggaaaattagaagcttctccttaacctgtattgatactgacttgagttattttctaaaattaagagccgtatacctacctgtaagtcttttcacatatcatttaaacttttgtttgtattattactgatttacagcttagttattaatttttctttataagaatgccgtcgatgtgcatgcttttatgttttttagaaaagggtgtgtttggatgaaagtaaaaaaaaaaataaaatctttcactgtctct

SEQ ID NO: 3162 - protein, 353 aa, Homo sapien
MRYLLPSVVLLGTAPTYVLAWGVWRLLSAFLPARFYQALDDRLYCVYQSMVLFFFENYTGVQILLYGDLPKNKENIIYLANHQSTVDWIVADILAIRQNALGHVRYVLKEGLKWLPLYGCYFAQHGGIYVKRSAKFNEKEMRNKVQSYVDAGTPMYLVIFPEGTRYNPEQTKVLSASQAFAAQRGLAVLKHVLTPRIKATHVAFDCMKNYLDAIYDVTVVYEGKDDGGQRRESPTMTEFLCKECPKIHIHIDRIDKKDVPEEQEHMRRWLHERFEIKDKMLIEFYESPDPERRKRFPGKSVNSKLSIKKTLPSMLILSGLTAGMLMTDAGRKLYVNTWIYGTLLGCLWVTIKA

SEQ ID NO: 3163 - DNA, 2168 bp, Homo sapien
ggcacgagggcaccgcgctgcgccgtgcccgtgagtccggcgcgcagaggaggaggagaaagctgaccgcttaggcccgggtagtggtcgtcgtggttttccttgtagttcgtggtctgagaccaggcctcaagtggaaacggcgtcaccatgatcgcacggcggaacccagaacccttacggtttctgccggatgaggcccggagcctgcccccgcccaagctgaccgacccgcggctcctctacatcggcttcttgggctactgctccggcctgattgataacctgatccggcggaggccgatcgcgacggctggtttgcatcgccagcttctatatattacggcctttttttttgctggatattatcttgtaaaacgtgaagactacctgtatgctgtgagggaccgtgaaatgtttggatatatgaaattacatccagaggattttcctgaagaagataagaaaacatatggtgaaatttttgaaaaattccatccaatacgttgaagtcttcaaaatgcttgctccagtttcactgatacctgctgtttctgaatttgatggaacatgtttcttatgacagttgaagcttatgctaatctgtatgttacaccttgtaattaaaatacgtaccatgagtactctgactctttattgttgtaagaaaaatagttcatcatcagagaatggtcagtttccattcacccatctgaaagattttaagatgaggttgaattctagtttagagttagcagactacccaaatctggcccactgccaataaagtctcattggaacacagccatgctcatttgtttacatgttgtttatggcgactgccatgctgcaagagcagaattgagtagttgtgatagagacctatggcctgcaaagcctaattaatatgtagccctttcagaaaaggtttgcctgcccctgtcctagtgcaaagtgaatttagagtgagccagattatggaggattctgtgactcttgccaaataattttgacttcatcctgtaggtattaagtcattaaggcgttttaaatcatacagtcaggtttgtatttctgagctgtctataatgaatgatatagaaggtggtttcgaaggaggagactccagacaaggaaaacagaaatcttatgttgccaagttgtctttgctcttaggtgggttatcctggagaaaatggactcaggagctaatactgtctacagtggagcttggtgcaattagaagcaaaagactgtacctaactggaatgaggttactttttatggcttatcaaatgcttgtcctggcccgatgcagtggctcatgcctgtaatcccagcactttgagaggctgaggcagggcagattgcatgagcccaggagttcgagaccaacttgggcaacatggtgaaacactgtctctacataaaatacaaaaattagctgggcgtggtggcacgttcctgcaatcccagctactcataaggctgaggtgggaggatctattgagccctggaattcgaggatgcaattaattgtggttgtgtcacagttcactgcagcctgggtgacactccagcctgggtgacaaaggagaccccgtcaaaaaaaaaagtacttgtcccaaaagtttttgtttcctagcttagaatttataatcagattaggttttggagataaagtatatgtggtattttttttttttttttgagacagtcttgctctgtcatcaggctggagtgcagtggcgcaatttcggctcactgcaacctccacctcctgggttcaagcaattctcctgcctcagcctcccgagtagctgggactacaggtgcatgccacgacgcccagctgatttttgtgtttttagtagagacggggtttcaccatgttggccaagatggtctcaatctcttgaccttgtgatccacctgccttggccttccaaagtgttggaattacaggcgtgagccaccgcgcctggtctatatgtgatttcaaattaggtggccttataaatataagcagatggtttctgggcaaaatcaaatgatttctgtctctattttcttgagtaccaattgtaaaaactgaaattaggttgaggaaagtgctttagaaataataaagatgtacaaataaaaaaaaaaaaaaaaaaaaaaaaaaa

SEQ ID NO: 3164 - protein, 119 aa, Homo sapien
MIARRNPEPLRFLPDEARSLPPPKLTDPRLLYIGFLGYCSGLIDNLIRRRPIATAGLHRQLLYITAFFFAGYYLVKREDYLYAVRDREMFGYMKLHPEDFPEEDKKTYGEIFEKFHPIR

SEQ ID NO: 3165 - DNA, 1375 bp, Homo sapien
cccaaagtaggctaggcctacggaagctgggtcttcttgctgtgagcgcggagtcgcggcgggtagggcggcgtcgcgtgcgtgacgtcatccagcggcgcctcgcgaggctccagtggccttgacctcccgcggcgtgggaggctgcgcggcgatgctgcagttcgtccgggccggggcgcgggcctggcttcggcctaccggcagccagggcctgagttccctggcggaagaggcagcgcgtgcgaccgagaacccggagcaggtggcgagcgagggtctcccggagcccgtgctgcgcaaagtcgagctcccggtacccactcatcgacgcccagtgcaggcctgggtcgagtccttgcggggcttcgagcaggagcgcgtgggcctggccgacctgcaccccgatgttttcgccaccgcgcccaggctggacatactgcaccaggttgctatgtggcagaagaacttcaagagaattagctatgccaagaccaagacgagagccgaggtgcggggcggtggccggaagccttggccgcagaaaggcactgggcgggcccggcatggcagcatccgctctccgctctggcgaggaggaggtgttgcccatggcccccggggccccacaagttactactacatgctgcccatgaaggtgcgggcgctgggtctcaaagtggcactgaccgtcaagctggcccaggacgacctgcacatcatggactccctagagctgcccaccggagacccacagtacctgacagagctggcgcactaccgccgctggggggactccgtactcctcgtggacttaacacacgaggagatgccacagagcatcgtggaggccacctctaggcttaagaccttcaacttgatcccggctgttggcctaaatgtgcacagcatgctcaagcaccagacgctggtcctgacgctgcccaccgtcgccttcctggaggacaagctgctctggcaggactcacgttacagacccctctaccccttcagcctgccctacagcgacttcccccgacccctaccccacgctacccagggcccagcggccaccccgtaccactgttgatgtgaagcacctcttctgagccaggccgagcccctggccgacttgggagcctcaggcccacgcccacccttcgaggaaggtgtcacctggaccccttcattccacggaggaagctgaggccacagggagcggccatcgccattgggaaggggcgactccacggaaagcccagacgggcttctgcatccattccctctttttgtttttaaaataaattgtatttttgaatcaaaaaaaaaaaaaaaaaaaaaaaaaaaaaaaaaaaaaaaaaaaaaaaaaaaaaaa

SEQ ID NO: 3166 - protein, 311 aa, Homo sapien [sequence omitted]

SEQ ID NO: 3167 - DNA, 3088 bp, Homo sapien
cgcgccagggaggttgtcgggaggggccggcgaataaaacgagcggcgaaagaaccgaaaaaaggctcgacgctaccgtgtatgaggaactttgatccttgcgggccaccattccggaagtagaatttagaggaagaaaataccggagttgcagggtataggtaaatttctcaaggttataggttggggttcttagaactttttgtggtgtgtgttggcctagagcgactcagaagcgttagtgacttcacctaaaaaagctaacctctctgctgagcgcgaccggtatgcggcgcaggatgagcctcagggcttctgttaagagtctgtctgagaaagccggtctgcgctgttcctcggtggcgaccttaattatgagatgagctaatgctttactgacttaaccatggcgcagcgggcagtgtggctcataagccacgaaccgggaactccactttgtggcaccgtgagattctccagacggtatccaactgttgaaaaacgagccagagtcttcaatggagcaagttatgtgcctgttcctgaagatggtccctttcttaaagcactgctctttgaacttagattattggatgatgataaagacttcgttgagagtcgtgatagctgttcacgcatcaataaaacatccatttatggactcctgataggaggtgaagaactctggccagttgttgcttttctgaagaatgacatgatatatgcttgtgttccactagttgaacaaactctgtcccctcgtccgccactaattagtgtcagtggagtttcacaaggctttgaatttctttttgggatacaggattttctttattcaggtcaaaaaaatgactctgagctgaatacaaaattgagccagttgcctgacttgcttctgcaggcttgtccatttggtactttattagatgccaacttacagaattcattagataataccaattttgcatctgtgactcagccacagaaacagccagcttggaaaactgggacgtacaaaggaaaaccacaagtttctatttctatcactgaaaaggtaaaatccatgcaatatgataaacagggtatagcagatacatggcaagttgttggaacagtgacttgcaagtgtgatttggaaggaatcatgccaaatgttaccatcagcttgagtctccccaccaatggatctccacttcaggatattctagttcacccttgtgtaacttctcttgactctgcaattctgacttctagtagtattgatgcaatggatgactctgcatttagtgggccttacaaatttccattcactccacctttagagtcattcaacttatgcttctacacttcccaggtccctgccccaccaattttgggtttttatcaaatgaaggaggaagaagtacaactaagaataaccattaatttaaaacttcatgaaagtgtgaaaaataattttgaattctgtgaagcccatatacctttttacaatagaggtccaattacacatttggaatacaaaactagttttggccagcttgaagtatttcgagagaaaagcttattgatctggattattggccagaagttcccaaaatcaatggaaattagtctttctggaactgtaacttttggagccaagagccatgagaagcagccatttgacccaatttgtactggagaaacagcatatttaaagcttcattttaggatcttagattacacacttactggatgttatgcagatcagcattcagttcaagtttttgcatcaggaaaaccaaaaataagtgcacaccggaaactaatttcttctgattattacatctggaattctaaagcccctgctccagtaacatatggatcattattattgtaatagtctcatgtttaaatgggattatataatgataacagtttaaagaaaatcataatcttatatttttaatgtggatgcatataacctgtgagtgaaaaatcactgaatgatttaattgtaaaagtagtcttatgtggtgtttgtagtctgatagagcttgaaaggacattttaaaagctaatgtctccaattttgtcaaccttcgattttatgccagtataattcagaacatagaaaagtaatgattcacttgggctcattttagactggtcctgggtcaccctgccacacttgtttcctagtgtttctgtggcagacattgctaatcaattacagcccttttctgtactgagccttggataaagggtcaggctcctttttagttcagagattcaggcagccactcccagtgggttgtagataatgtgcaagataaaaactattttctcttccaaatctaagtactaagctcctagtataaggtgttgttacagaataccagagaccatgttagagacaactacatctcttcaaaaaacagccaacagagacaaaggaaaagtgtttaaatagtaagctgttcttcttaatcagaactatcctattgactaataaataatctgcataattctacttaaggtgtgtaatctctgttctagagttagtttttaagtaagcttgttaatctgccactttgacattttgcttaggatgtcagtagccatattaagatgtgtagaataccttcagaagatgatcatagtgttttgtaatcatttaatgtctgcagccaaatttttaaaggtaatttagacctaatactgctcttgctgtgtcttattaagttaaaattaatgaatgaattctggtaaaaattcaaaaggcactctgtgagtagagagtatcatttaagcttattttagtcacatgtagtatatatctccttaaagctgtcactctcactttcttaccattctcttgatttcttcagaaaccatctagtcatcatctttatactctacctgcttctgcaattatatatcatattatgttttcagagcagttcattgtcaagttggactttaagtgaccattcaagaaaagatgaaatctcacgaacctcaaaacttcattcatgtctttttacaaatgagaaaaaaaaatgcattaaagattaatactcaatttgaaaaaaaaaaaaaaaaaaaa

SEQ ID NO: 3168 - protein, 490 aa, Homo sapien
MAQRAVWLISHEPGTPLCGTVRFSRRYPTVEKRARVFNGASYVPVPEDGPFLKALLFELRLLDDDKDFVESRDSCSRINKTSIYGLLIGGEELWPVVAFLKNDMIYACVPLVEQTLSPRPPLISVSGVSQGFEFLFGIQDFLYSGQKNDSELNTKLSQLPDLLLQACPFGTLLDANLQNSLDNTNFASVTQPQKQPAWKTGTYKGKPQVSISITEKVKSMQYDKQGIADTWQVVGTVTCKCDLEGIMPNVTISLSLPTNGSPLQDILVHPCVTSLDSAILTSSSIDAMDDSAFSGPYKFPFTPPLESFNLCFYTSQVPAPPILGFYQMKEEEVQLRITINLKLHESVKNNFEFCEAHIPFYNRGPITHLEYKTSFGQLEVFREKSLLIWIIGQKFPKSMEISLSGTVTFGAKSHEKQPFDPICTGETAYLKLHFRILDYTLTGCYADQHSVQVFASGKPKISAHRKLISSDYYIWNSKAPAPVTYGSLLL

SEQ ID NO: 3169 - DNA, 1668 bp, Homo sapien
ggcgaaggagatcagcaggacgctgcgcacaacatgggcaaccacctgccgctcctgcctgcagagagtgaggaagaagatgaaatggaagttgaagaccaggatagtaaagaagccaaaaaaccaaacatcataaattttgacaccagtctgccgacatcacatacatacctaggtgctgatatggaagaatttcatggcaggactttgcacgatgacgacagctgtcaggtgattccagttcttccacaagtgatgatgatcctgattcccggacagacattacctcttcagctttttcaccctcaagaagtcagtatggtgcggaatttaattcagaaagatagaacctttgctgttcttgcatacagcaatgtacaggaaagggaagcacagtttggaacaacagcagagatatatgcctatcgagaagaacaggattttggaattgagatagtgaaagtgaaagcaattggaagacaaaggttcaaagtccttgagctaagaacacagtcagatggaatccagcaagctaaagtgcaaattcttcccgaatgtgtgttgccttcaaccatgtctgcagttcaattagaatccctcaataagtgccagatatttccttcaaaacctgtctcaagagaagaccaatgttcatataaatggtggcagaaataccagaagagaaagtttcattgtgcaaatctaacttcatggcctcgctggctgtattccttatatgatgctgagaccttaatggacagaatcaagaaacagctacgtgaatgggatgaaaatctaaaagatgattctcttccttcaaatccaatagatttttcttacagagtagctgcttgtcttcctattgatgatgtattgagaattcagctccttaaaattggcagtgctatccagcgacttcgctgtgaattagacattatgaataaatgtacttccctttgctgtaaacaatgtcaagaaacagaaataacaaccaaaaatgaaatattcagtttatccttatgtgggccgatggagcttatgtgaatcctcatggatatgtgcatgagacacttactgtgtataaggcttgcaacttgaatctgataggccggccttctacagaacacagctggtttcctgggtatgcctggactgttgcccagtgtaagatctgtgcaagcccatattggatgggaagtttacggccaccaaaaaagacatgtcacctcaaaaattttggggcttaacgcgatctgctctgttgcccacgatcccagacactgaagatgaaataagtccagacaaagtaatactttgcttgtaaacagatgtgatagagataaagttatctaacaaattggttatattctaagatctgctttggaaattattgcctctgatacatacctaagtaaacataacattaatacctaagtaaacataacattacttggagggttgcagtttctaagtgaaactgtatttgaaacttttaagtatactttaggaaacaagcatgaacggcagtctagaataccagaaacatctacttgggtagcttggtgccattatcctgtggaatctgatatgtctggtagcatgtcattgatgggacatgaagacatctttggaaatgatgagattatttcctgtgttaaaaaaaaaaaa

SEQ ID NO: 3170 - protein, 336 aa, Homo sapien
MGNHLPLLPAESEEEDEMEVEDQDSKEAKKPNIINFDTSLPTSHTYLGADMEEFHGRTLHDDDSCQVIPVLPQVMMILIPGQTLPLQLFHPQEVSMVRNLIQKDRTFAVLAYSNVQEREAQFGTTAEIYAYREEQDFGIEIVKVKAIGRQRFKVLELRTQSDGIQQAKVQILPECVLPSTMSAVQLESLNKCQIFPSKPVSREDQCSYKWWQKYQKRKFHCANLTSWPRWLYSLYDAETLMDRIKKQLREWDENLKDDSLPSNPIDFSYRVAACLPIDDVLRIQLLKIGSAIQRLRCELDIMNKCTSLCCKQCQETEITTKNEIFSLSLCGPMELM

SEQ ID NO: 3171 - DNA, 2229 bp, Homo sapien
tttcacctcagcaaggccaggggatctgcacgttgtgttagacatggctaaagtagctgataccatcctgttcctccttgatccactagaaggctgggacagcaccggtgattactgtctttcctgcctctttgctcagggccttccgacctatacactagctgtccaggggatttctggcctcccactgaagaaacaaatagataccaggaagaagctaagtaaagcagtggagaagcgctttccgcatgacaaactcctcttgttagacactcaacaggaggcagggatgctgcttaggcagttggctaaccagaagcaacagcatcttgcttttcgagatcggcgggcctacctatttgcccatgctgttgattttgttcctagtgaagagaataacttggtgggcaccttgaaaatttcaggctatgttcgagggcagactctgaatgtcaataggttgctgcatatcgttggatatggtgatttccagatgaaacagatagatgcccccggagaccctttccctttaaatcctagaggaattaaaccccaaaaggacccagacatggcaatggagatttgtgctacggatgctgtagatgatatggaagaaggtcttaaagtcctaatgaaggcagacccttgtagacaggaatccttgcaagcagaggttatcccagatccaatggagggagagcaaacctggcccactgaggaggagctgagcgaggcaaaggatttcttgaaggaaagttctaaggtggtaaagaaggtccccaaaggaacatccagttaccaagctgaatggattttggatggtggcagccaaagtggtggggaaggagatgaatatgaatatgatgatatggaacatgaggattttatggaggaggaatctcaggatgagagtagtgaagaagaggaagaatatgaaactatgactattggggagtctgtgcatgatgatctgtatgataagaaagtagatgaagaagctgaggcaaaaatgttggagaaatataaacaagaaagactggaagagatgtttccagatgaagtggacacgccccgtgatgtggctgctcgaattcgatttcagaaatacagaggccttaagagcttccggacatctccatgggatcctaaggaaaaccttcctcaagattatgctcgaatatttcagtttcagaactttactaacactaggaaaagcatctttaaagaggttgaagaaaaagaggttgaaggagctgaggttggctggtatgtcacacttcatgtctctgaagtccccgtctcagtggtcgagtgcttcaggcaaggaacacccttgattgcattttctttactacctcatgaacagaagatgtcagtattgaatatggtggtgaggcgtgaccctggcaacactgaacctgtgaaagccaaggaggagctcatatttcactgtggattcaggcgcttccgagcctcacctttattctctcagcacactgcagcggacaaacataaattgcagagattcctgactgctgacatggccctggtggcgacagtctatgcgccaatcacttttcctcctgcatctgtgctgcttttcaagcagaaaagcaatggaatgcacagcctcattgctacaggccatcttatgtcagtagatccagacagaatggtcatcaagagagttgttctgagtggtcatcctttcaaaatttttactaagatggcagtagtacgttacatgttcttcaacagagaggatgtgctgtggtttaaaccagtggaactgagaacgaagtggggccggagaggacatatcaaggaacctttaggtacccatggccacatgaaatgcagctttgatgggaagctaaaatctcaagacacagtactgatgaacctgtataaacgagtcttccccaaatggacttatgatccatatgtaccagaaccagtaccctggctgaaaagtgagatttcttcaacagtgcctcaagggggcatggagtaatggattcaaagagattctgtcctaccggtgccagtcagtactccagggatgggaggcacaagttgtgattgggcaaagtttattttctatgtcagcctgtcagtccactgccccattttgcaagacttttttttagccttgacaaaatgtctcagttaagtataaaagtttttccactacttagtccaaaaaaaactattaaatcttaatgaaat

SEQ ID NO: 3172 - protein, 656 aa, Homo sapien
MAKVADTILFLLDPLEGWDSTGDYCLSCLFAQGLPTYTLAVQGISGLPLKKQIDTRKKLSKAVEKRFPHDKLLLLDTQQEAGMLLRQLANQKQQHLAFRDRRAYLFAHAVDFVPSEENNLVGTLKISGYVRGQTLNVNRLLHIVGYGDFQMKQIDAPGDPFPLNPRGIKPQKDPDMAMEICATDAVDDMEEGLKVLMKADPCRQESLQAEVIPDPMEGEQTWPTEEELSEAKDFLKESSKVVKKVPKGTSSYQAEWILDGGSQSGGEGDEYEYDDMEHEDFMEEESQDESSEEEEEYETMTIGESVHDDLYDKKVDEEAEAKMLEKYKQERLEEMFPDEVDTPRDVAARIRFQKYRGLKSFRTSPWDPKENLPQDYARIFQFQNFTNTRKSIFKEVEEKEVEGAEVGWYVTLHVSEVPVSVVECFRQGTPLIAFSLLPHEQKMSVLNMVVRRDPGNTEPVKAKEELIFHCGFRRFRASPLFSQHTAADKHKLQRFLTADMALVATVYAPITFPPASVLLFKQKSNGMHSLIATGHLMSVDPDRMVIKRVVLSGHPFKIFTKMAVVRYMFFNREDVLWFKPVELRTKWGRRGHIKEPLGTHGHMKCSFDGKLKSQDTVLMNLYKRVFPKWTYDPYVPEPVPWLKSEISSTVPQGGME

SEQ ID NO: 3173 - DNA, 2056 bp, Homo sapien
tcgcagacagctcgggggaacagtggcggcttcggccggcggtccttgcgctccccaacagcggcgcgggcgggtgagccgtcggggcacagtcccggtgctcttctgtttctcagtcttcgcgcgaccctcgtgcggtgccacacggggcgggctacgagctgctcatccagaagttcctcagcctgtacggcgaccagatcgacatgcaccgcaaattcgtggtgcagctgttcgccgaggagtggggccagtacgtggacttgcccaagggtttcgcggtgagcgagcgctgcaaggtgcgcctcgtgccgctgcagatccagctcactaccctgggaaatcttacaccttcaagcactgtgtttttctgctgtgatatgcaggaaaggttcagaccagccatcaagtattttggggatattattagcgtgggacagagattgttgcaaggggcccggattttaggaattcctgttattgtaacagaacaataccctaaaggtcttgggagcacggttcaagaaattgatttaacaggtgtaaaactggtacttccaaagaccaagttttcaatggtattaccagaagtagaagcggcattagcagagattcccggagtcaggagtgttgtattatttggagtagaaactcatgtgtgcatccaacaaactgccctggagctagttggccgaggagtcgaggttcacattgttgctgatgccacctcatcaagaagcatgatggacaggatgtttgcacgcctcacgtctcgctcgaacggggatcatagtgaccacgagtgaggctgttctgcgttcagctggtagctgataaggacgcatcgcaaaattcaaggaaattcagaatctaattaaggacgagtgctccagagtcgggtctgctttccaaagtataggacatttgaagaactggtatgctactcactggtgaaggacagtcaggtgaaggactgtaagcccacacaagctcttcttatctctactagaattaaaatgttaagtcaaaaacggctccttttttgcgcctcctagtgaaacttaaccagctagaccatttgagtaccagcatttagttacaaacgtcaaaggcttccggtgctgcttaccttccttttttgttaatgtgcttttatttattaaaaaaaattacaatgaagatgcctgttttgtctctactgtgtactctgatcgtatctttccaaagtgcagactcttgtgaagttttcttaaattgttcactttaaagaaaatgacgtaccaacaatgatttggcttttatattactgtaagatgttataatgttaatgtggatgtagtgcttttactttacagattgattggaataagattattgcatatgaatttacccacaggactctgaatcatgttacccactcccctcacaatgttgtccacttagtgagttgcattgatctatccgtaccaaatgatgttgaataattacatatctttcttgactatactgatttcttattttggtcactattactaaatctctgttaatattctctcttttaactgaaaagggatgggatagaagggtttgcaatgccatattattggtggagggctgttttaacatctttgaagtatggcttgctgaatatctttaccaacatcttgaatatatattctagtgtccacaagatttagcaaaaagataaagcttgggtggaatatcattttaaaatgttcatgttctgttctatattttcttcacctactctccaaatattgtaatgcaaaaagtctcagtaatgatttggtagtattaattttgtggtcattgtttctcttcgataaatttattttcattaaatacttgttagagggttttgaaatgtttttcaaatatgtgaaatgtgaaactgctgtcttttatattaaagtaattaaagaaaatgtattgtgattgaaattattttggcctccacaagatggctctatgagtattcttccagggattctaatatttatttaaggtaataaaatcttgacatttataatctttc

SEQ ID NO: 3174 - protein, 199 aa, Homo sapien
MHRKFVVQLFAEEWGQYVDLPKGFAVSERCKVRLVPLQIQLTTLGNLTPSSTVFFCCDMQERFRPAIKYFGDIISVGQRLLQGARILGIPVIVTEQYPKGLGSTVQEIDLTGVKLVLPKTKFSMVLPEVEAALAEIPGVRSVVLFGVETHVCIQQTALELVGRGVEVHIVADATSSRSMMDRMFARLTSRSNGDHSDHE

SEQ ID NO: 3175 - DNA, 1032 bp, Homo sapien
gttatttattgacttttgccaaggcttggtcacaacaatcatattcacgtaattttccccctttggtggcagaactgtagcaatagggggagaagacaagcagcggatgaagcgttttctcagcttttggaattgcttcgacctgacatccgttgtaaccgtttgccacttcttcagatatttttataaaaaagtaccactgagtcagtgagggccacagattggtattaatgagatacgagggttgttgctgggtgtttgtttcctgagctaagtgatcaagactgtagtggagttgcagctaacatgggttaggtttaaaccgtgggggatgcaacccctttgcgtttcatatgtaggcctactggctttgtgtagctggagtagttgggttgctttgtgttaggaggatccagatcatgttggctacagggagatgctctctttgagaggctcctgggcattgattccatttcaatctcattctggatatgtgttcattgagtaaaggaggagagaccctcatacgctatttaaatgtcacttttttgcctatgccccgttttttggtcatgtttcaattaattgtgaggaaggcgcagctcctctctgcacgtagatcattttttaaagctaatgtaagcacatctaagggaataacatgatttaaggttgaaatggctttagaatcatttgggtttgagggtgtgttattttgagtcatgaatgtacaagctctgtgaatcagaccagcttaaatacccacacctttttttcgtaggtgggcttttcctatcagagcttggctcataaccaaataaagttttttgaaggccatggcttttcacacagttattttattttatgacgttatctgaaagcagactgttaggagcagtattgagtggctgtcacactttgaggcaactaaaaaggcttcaaacgttttgatcagtttcttttcaggaaacattgtgctctaacagtatgactattctttcccccactcttaaacagtgtgatgtgtgttat

SEQ ID NO: 3176 - protein, 57 aa, Homo sapien
MCSLSKGGETLIRYLNVTFLPMPRFLVMFQLIVRKAQLLSARRSFFKANVSTSKGIT

SEQ ID NO: 3177 - DNA, 11127 bp, Homo sapien
gaaattttaatttattattcccccctttttttcctgcatctataggataatattgtaaaatagcaattgaaaccaataatcattaaataaatatcaaggaaaatccaagcaaagctttctttttgttggactagtggtgtggtgtttggagacagtctctgaatgtgaacaggaaagcacccatcagcaaaacacgatcactctctagggagacagctgggggaatctgactctggcttctgcttttgttttaagggattaacttccctgtcaagtccaagaagacttgcgtatgagaagattacctgatggacttaattctaagattagcttttttcatcaagatggaaaaagatctttaggagcagaaaaggggagtgctaactgggggagcgagaagggagacgagcaaaagaaacaaaatcttgccacgtggctctgttttgtcagcaagaggatttaagactcacccagggcaaacactgggaccactgtaagagcgctggaacattctgcctcttgagtgaaggggccttctttctagcctctatggcactgaggggtgcgccggctggtggaggagtagtccgatggagccctgcgttccccggggacacagggccaagctttgaggtggaaagtttctggttctgaaacaacaaggagagagtctgtttttcttcctaaaatttggactcttgtctgcacaaactctggtctgttttgcacggtttgtgtgcctttttttccctttatgcaatctttttcagctttagcagcagaaatttgtctagttcaggaaacatgctagagggtggcttcagaaggaagatgatcctgtgtattctgtctctgcatccgaacttttgaagagaaaaattcgagctagagggattcttaaagccttaagttacttgaaatctatgtatttgcaaccctttgtctctggaatcatattacactaaactggaatctcaggctgaatgagaataaccaagtggagtaaaaagaagaaaaccgtttcttgatcaccacttaattaacgatgctctttctccaaaggatcagcacgttcttcctctgagaacttgaaaatacaaatggaccccatgtttttttaagcattaccttttcttagaagactgccatcatcttttatagaggaattttttcactatgcattcagtggatctttataaaatactgaccttctaattagattcaggtcagtcttaattaaagggggaaaaaagcaacgcaagccaaccacaaaaacacatataccaatgaaagaaattggtttaaatttcacagcattaacattactttttaagtaaaacagttcattgaagaaagtatgtatgcagcagtggaacatgggcctgtgctttgcagtgactccaacatcctgtgcctgtcctggaaggggcgtgtccccaagagtgagaaggagaagcctgtgtgcaggagacgctactatgaggaaggctggctggccacgggcaacgggcgaggagtggttggggtgactttcacctctagtcactgtcgcagggacaggagtactccacagaggataaatttcaacctccggggccacaatagcgaggttgtgctggtgaggtggaatgagccctaccagaaactggccacgtgcgatgcggacggaggcatattcgtgtggattcagtacgagggcaggtggtctgtggagctggtcaacgaccgcggggcgcaggtgagtgatttcacgtggagccatgatggaactcaagcacttatttcctatcgagatgggtttgtcctggttgggtctgtcagtggacaaagacactggtcatccgaaatcaacttggaaagtcaaattacgtgtggcatatggactcctgacgaccaacaggtgctgtttggcacggccgatgggcaggtgattgtcatggattgccacggcagaatgctggcccacgtcctcttgcacgagtcagacggtgtcctcggcatgtcctggaactacccgatcttcctggtggaggacagcagcgagagcgacacggactcagatgactacgcccctccccaagatggtccggcagcatatcccatcccagtgcagaacatcaagcctctgctcaccgtcagcttcacctcgggagacatcagcttaatgaacaactacgatgacttgtctcccacggtcatccgctcagggctgaaagaggtggtagcccagtggtgcacacagggggacttgctggcagtcgctgggatggaacggcagacccagcttggtgagcttcccaatggtccccttctgaagagtgccatggtcaagttctacaatgttcgtggggagcacatcttcacactggacactctcgtgcagcgccccatcatctccatctgctggggtcaccgggattcgaggctgttgatggcatcaggaccagccctgtacgtggtgcgtgtggagcaccgggtgtccagcctgcagctgctgtgccagcaggccatcgccagcaccttgcgtgaggacaaggacgtcagcaagctgactctgcccccccgcctctgctcctacctctccactgccttcatccccaccatcaagcccccaattccagatccgaacaacatgagagactttgtcagctacccatcagccggcaacgagcggctgcactgcaccatgaagcgcacagaggacgacccggaggtgggcggcccgtgctacacgctctacctggagtacctgggcgggcttgtgcccatcctcaaagggcggcgcatcagcaagctgcggccagagttcgtcatcatggacccgcggacagatagcaaaccagatgaaatctatgggaacagcttgatttctactgtgatcgacagctgcaactgctcagactccagtgacattgagctgagtgatgactgggctgccaagaaatctcccaaaatctccagagctagcaaatcacccaaactcccaaggatcagcattgaggcccgcaagtcacccaagctgccccgggctgctcaggagctctcccggtccccacggttgcccctgcgcaagccctctgtgggctcgcccagcctgactcggagagagtttccttttgaagacatcactcagcacaactatcttgctcaggtcacgtctaatatctggggaaccaaatttaagattgtgggcttggctgctttcctgccaaccaacctcggtgcagtaatctataaaaccagcctcctgcatctccagccgcggcagatgaccatttatctcccagaagttcggaaaatttccatggactatattaatttacctgtcttcaacccaaatgttttcagtgaagatgaagatgatttaccagtgacaggagcatctggtgtccctgagaacagcccaccttgtaccgtgaacatccctattgcaccgatccacagctcggctcaggctatgtcccccacgcagagcatagggctggtgcagtccctactggccaatcagaatgtgcagctagatgtcctgaccaaccagacgacagctgtagggacagcagaacatgcaggtgacaggtgccacccagtaacccaggtctccaaccggtactccaatcctggacaggtgattttcggaagcgtggaaatgggccgcatcattcagaacccccctccactgtccctgcctcccccgccgcaggggcccatgcagctgtccacggtgggccatggagaccgagaccacgaacacctgcagaagtcagccaaggccctgcggccaacaccgcagctggcagctgagggggacgcagtggtctttagtgccccccaggaggtccaggtgacgaagataaaccctccacccccgtacccaggaaccatccccgctgcccccaccacagcagcacccccgccccctctgccgcccccacagcccccagtggatgtgtgcttgaagaagggcgacttctccctctaccccacgtcagtgcactaccagacccccctgggctatgagaggatcaccaccttcgacagcagtggcaacgtggaggaggtgtgccggccccgcacccggatgctgtgctcccagaacacctacaccctccccggcccgggtagctctgccaccttgaggctcacggccactgagaagaaggtccctcagccctgcagcagtgccaccctgaaccgcctgaccgtccctcgctactccatccccaccggggacccacccccgtatcctgaaattgccagccagctggcccaggggcggggggctgcccagaggtccgacaatagcctcatccacgctaccctgcggaggaacaaccgtgaggctacgctcaagatggcccagctggccgacagcccgcgggcccccctgcagcccctggccaagtccaagggcgggcccgggggggtggtgacacagctcccagcgcggcccccacctgccctgtacacctgcagtcagtgcagtggcacagggcccagctcacagcccggagcctccctggcccataccgccagcgcctccccgttggcctcccagtcctcctacagcctcctgagcccacccgacagcgcccgcgaccgcaccgactacgtcaactcggccttcacggaggacgaggccctgtcccagcactgtcagcttgagaagcccttgaggcaccctcccctgcctgaagctgctgtcaccctgaaacggccacccccttaccagtgggaccccatgctgggtgaggacgtttgggttcctcaagaaaggacagcacagacttcagggcccaaccccttaaaactgtcctctctgatgctgagtcagggccagcacctggacgtgtcccgactgcccttcatctcccccaagtctcctgccagccccactgccactttccaaacaggctatgggatgggagtgccatatccaggaagctataacaacccccctttgcctggagtgcaggctccctgctctcccaaagatgccctgtccccaacgcagtttgcacaacaggagcctgctgtggtccttcagccgctgtacccacccagcctctcctattgcaccctgccccccatgtacccaggaagcagcacgtgctctagtttacagctgccacctgtcgccttgcatccatggagttcctacagcgcctgcccgcccatgcagaacccccagggcactctccccccaaagccacacttggtggtggagaagccccttgtgtccccaccacctgccgacctccaaagccacttgggcacagaggtgatggtagagactgcagacaacttccaggaagtcctctccctgaccgaaagcccagtcccccagcggacagaaaaatttggaaagaagaaccggaagcgcctggacagccgagcagaagaaggcagcgttcaggccatcactgagggcaaagtgaagaaggaggctaggactttgagtgactttaattccctaatctccagcccacacctggggagagagaagaagaaagtgaagagtcagaaagaccaactgaagtcaaagaagttgaataagacaaacgagttccaggacagctccgagagcgagcctgagctgttcatcagcggggatgagctcatgaaccagagccagggcagcagaaagggctggaaaagcaagcgctccccacgggccgccggcgagctggaggaggccaagtgccggcgggccagtgagaaggaggacgggcggctgggcagccaaggcttcgtgtacgtgatggccaacaagcagccgctgtggaacgaggccacccaggtctaccagctggacttcggggggcgggtgacccaggagtccgccaagaacttccagattgagttagaggggcggcaggtgatgcagtttggacggattgatggcagtgcgtacattctagacttccagtatccgttctcagccgtgcaggcctttgcagttgccctggccaacgtgactcagcgcctcaaatgaagagactggtgtggggaggagagagatgcagagagcctttggaagaggtcttcggagatgccagaggagccctctaggggtccgatgcctgggaggaccagaagccaacagcaaaactggaaaagcccggcaggcccaggagagggcgctgacctgtggtcgtcatttatttggttgggttttattaccttttattgtctgttcttcttttcttctttcatttcagtggcatttggaagcaaagagtgctaggcacctgcagttctttcaggaaacagcttggctgtggtaatgctctactgggcccttcagaatgaagacagtctgccttagagcctgctattcttttagacatagggaggatgcattatcctgtattctcctccaacatcaccactagcgtaaaagcaaaaagcttttacaaaacacagccaaaaattctcaagatgcaggttcttggggaatgggatggggacagcatttgatttacactgattatgttactccccaaaaggtgacttaattaataaagggcatttgggcagacacactgtgttggaccaacaaagtaggctctttacaggggtgttctcaccaggtagaaatgcgatttgctcactgaggatgttggggaagggacgaagggtaaagaagaaactgcaccgtatacacaggttcacatcactctgcagacagcaatgtgactcagcgtgtgacttgtagcagcagtacgagggctacactcctctgctgaggatgtctacattgaaagcctccactagtttcatcgtttgtcaagttccgtagatcagtgatggtcattcagcatgactggttctgggagaaggtgagagacaaaaatggaaagatcctggcctgtggtagtggtagcagttttctcaaataatgtggtgacagtcactagatcctcacatgctgagaaacagcctctactctctctgccccttttactttttaatctggaatgcattactgtaaacatgatctttcccatgagataccatgttctatgccttcccattctaaaagtgtggacaacgcttgatttgaaaccactccttttctcctcttggctacattaaaattcagttgactacaaatgctttctatcaaattagaaatgtaaccaaaaaaatgttaagtgttcaccagggtattaaaatacagagggagtatggtcaaatcttttgacaaaattttcatgatcttctctaacaaaaaaagttgtttattaactgtacagactgtttactaaggagctaaaccactgagaaaacgttattaaaattgtaatacctaggtagttggttgatcacagtttgttaattgtataaaaaaaaattacctagaatatctcttcccacttcctcgtcctcgtgagaacctgtgggcagtattcaagccctgatgacaaaacccagtgttttttgttgttgttttttgttgttgttttttgtttttgtttttgtttttctcagtcttacctgtgatgttgtttaggatcaggcccctctcctgggcctgctgtgcaggagcacaggaactatctgctggcgttgggttccaaatttgcattttatttggaaacagacaagtagaagatgctacagaaaagtattttcaaatttaaacgttttttaatcccctgttttagttaaaaaattggaaaagaaaccgacccatttttttcccagatcaagatgacatgacatcactcccaattctctccaaaccccagagaaatactgacgaagttttctgatgtggcaaaggatatttcccatctaataccagtttctcatttatatttaacgtattggacctgatatttttagtgggtgcattcttccagaaagaattcagcaatgttatcagaattaattcttttatatgagtttatgtagcttgatatggtgtttcagtgcttattggttgtgcaataatggttatagcctgttagataatctaaatgcaattcccctgttttgtcgtttaggagataattatttatcttgcttttcatagtgttcttaggaattattttgttgttacgttttggtgagttatacccattttatttatttagaaaaatagtatctttgttaacgacttacatggtcacagtatattttgctgcaagaaataaagaggatatgatagaaggtttttttttttttttttttttttttttgagacggagtcccactcttgtcgcccaactagagtgtagtggcacaatctcggctccccacaacctctgactccagggttcaggtgattattttgcctcagcctcccaagcagctgggattatagacacccgccaacacgccaggctaatgtttttgtatttttaatagagatggggttttgccatgttggccaggctggtcttgaactcctgacctcaggtgatccgcccgcctcggcctcccaaagtgctgggattacagacgtgagccaccactcccggcccatagaaggttttttgctggataatttgtaacttttctaattgggaaaaaattcctattaatcacttaaaaatttttttttgtattttgtgttattgattatatacaaaggagactttttttttgagataacactcaaatagtattctcttcttttgaaaattttatttttatctgaaaataacagttgatctgaaataaaaaggggagacctattagaatgagagtagccaaggaaagagttactaggtaataagcttcactttttgtgttctaattgtttttgagatataaagaccctgaaaaagcccattttagaacctgtttaataagagcaaatataggggaaaatctttgaaatgaaagctacaaatacatgtgagaagaaaaaaatggatttttttagcaaataattaactaagcttctaaatgcctagctccctcccccaaaggcgctttcccccgatggaggcacaggcttctgtctcggatgtttggcgcacgtgagtttgtatgagtttgtaccggagtgaccccggcagccactgcccacctcccctctacccaggggcctgaaaagaggggctgccctcctgcgccaaggcagacacaagctgcgggctgtgcggtcctagtagtgtgacgtttcagttaatagtggtggtcttattttcaactatgctttcattcagtcagtctctgttgactaaatacgacgaaaattcatactttatgcaggagatttctaaaaatttaatgtttattaatagtttatgaatatcaagatacctcattgaatccctaaatttaaaagcagtccagtaaaaggttaactgtataaagaatctatgactttttgagggaagtgtgatatattaacaaatataaccaattctaaatttgttttagctctaacctcatcaaaccaaaggcacagatttgtgtacaatatacccattgaatgtatatcctgagaaaaattggggccaaagaagcaggaaaatctcaaagctctaatggcagcataaatcaaagaatttcacaggctagtgtttttatccatagccattgctcccttgtcaagtgtctcacaaggacatggaagaatgtgttatgttcatcttgtaatcatagcaaaaagtctgcaaaccccagggtcaagcctgctctgccacagggttggatggtgaccttgggcaagtccctggggctggctaggcctccacttgtccatctgtgaaatgaaaggatcagcctggacagccctctaaactcccttacagctctcagcctaagagcgcagcactgaacagcctcatcattccacttttcatgggaaatatatttcacaccattgcctttgtgtagagaaatatttcttttcctgtgttaatgagctatgtactgaatataaaccagtgcatttaaagtaatatcttttgtgcacctctaaatgtgtttggaattgtgtttgttctcatagaatatacaaaagtactgattctaggtaagaaggagtctccacgggtgtgccctgctcagctggatgtccatgagaacagccatgaaataagtcactacttgtccccaaaaccacaggaatatatacctaggtcacctcaaattcctgagtgtgctctgccatgttacacggtcttcaaattgaaaaggtttcttgaaaaggaaagtttggcccagcaactggagaaggagtccatggtgtcgctgtgtgcctgtatcatttggccaagtcaatggttgtaagcaaagttagtggagacaaaaatgtgtccaaaatgtcgtttgagttcctgggatttctgtaatagcacacaactcagaactcttcagcatttgtgtgattccttacctctggctgataaaactctaatgggttgtggcttactttgtttccattttctttggctttgtgcaatttttgtgtaactttacttgtacctatattttctgtttacagttctttttaaggggaggggtagggttctaagatcttgttgtttattgtagataaaaattttttcgtgttgtagaaaagcatgggttatgcgtttgactgaaaaagacactgtattatttaccaaaggggtattgtttttgcatttgtttataaatgcattattttggtactgtaaatttggacataatttctgagtttattactactggcattttctttttcccttttttttttttttaaccgtaagtgcacgatgcaggtgcataggccccagaccaaactagaccaccagcatgttcatgtccagacctcggcagtggcgtgcactgcttgtgcacctcagttcctccagtgttggtttgtttgttttttaattcagcatcctgctggttttactttccaagcaagatctgttgcgactcccaaatgcgttttaatgagctcatccttatttgcctttcttcttacgtattttgtgtattagattgtgcaggagatattctagaaggcattaatggtttgcattcaaaacgatgtggtttgtccaagttattttctgtctttattactgagacggattaatctccttatttttttcttgatgatttgaagttgtaagagttgtccagctattgcttaataaaattttgcagatcaaaaaa

SEQ ID NO: 3178 - protein, 1544 aa, Homo sapien
MYAAVEHGPVLCSDSNILCLSWKGRVPKSEKEKPVCRRRYYEEGWLATGNGRGVVGVTFTSSHCRRDRSTPQRINFNLRGHNSEVVLVRWNEPYQKLATCDADGGIFVWIQYEGRWSVELVNDRGAQVSDFTWSHDGTQALISYRDGFVLVGSVSGQRHWSSEINLESQITCGIWTPDDQQVLFGTADGQVIVMDCHGRMLAHVLLHESDGVLGMSWNYPIFLVEDSSESDTDSDDYAPPQDGPAAYPIPVQNIKPLLTVSFTSGDISLMNNYDDLSPTVIRSGLKEVVAQWCTQGDLLAVAGMERQTQLGELPNGPLLKSAMVKFYNVRGEHIFTLDTLVQRPIISICWGHRDSRLLMASGPALYVVRVEHRVSSLQLLCQQAIASTLREDKDVSKLTLPPRLCSYLSTAFIPTIKPPIPDPNNMRDFVSYPSAGNERLHCTMKRTEDDPEVGGPCYTLYLEYLGGLVPILKGRRISKLRPEFVIMDPRTDSKPDEIYGNSLISTVIDSCNCSDSSDIELSDDWAAKKSPKISRASKSPKLPRISIEARKSPKLPRAAQELSRSPRLPLRKPSVGSPSLTRREFPFEDITQHNYLAQVTSNIWGTKFKIVGLAAFLPTNLGAVIYKTSLLHLQPRQMTIYLPEVRKISMDYINLPVFNPNVFSEDEDDLPVTGASGVPENSPPCTVNIPIAPIHSSAQAMSPTQSIGLVQSLLANQNVQLDVLTNQTTAVGTAEHAGDRCHPVTQVSNRYSNPGQVIFGSVEMGRIIQNPPPLSLPPPPQGPMQLSTVGHGDRDHEHLQKSAKALRPTPQLAAEGDAVVFSAPQEVQVTKINPPPPYPGTIPAAPTTAAPPPPLPPPQPPVDVCLKKGDFSLYPTSVHYQTPLGYERITTFDSSGNVEEVCRPRTRMLCSQNTYTLPGPGSSATLRLTATEKKVPQPCSSATLNRLTVPRYSIPTGDPPPYPEIASQLAQGRGAAQRSDNSLIHATLRRNNREATLKMAQLADSPRAPLQPLAKSKGGPGGVVTQLPARPPPALYTCSQCSGTGPSSQPGASLAHTASASPLASQSSYSLLSPPDSARDRTDYVNSAFTEDEALSQHCQLEKPLRHPPLPEAAVTLKRPPPYQWDPMLGEDVWVPQERTAQTSGPNPLKLSSLMLSQGQHLDVSRLPFISPKSPASPTATFQTGYGMGVPYPGSYNNPPLPGVQAPCSPKDALSPTQFAQQEPAVVLQPLYPPSLSYCTLPPMYPGSSTCSSLQLPPVALHPWSSYSACPPMQNPQGTLPPKPHLVVEKPLVSPPPADLQSHLGTEVMVETADNFQEVLSLTESPVPQRTEKFGKKNRKRLDSRAEEGSVQAITEGKVKKEARTLSDFNSLISSPHLGREKKKVKSQKDQLKSKKLNKTNEFQDSSESEPELFISGDELMNQSQGSRKGWKSKRSPRAAGELEEAKCRRASEKEDGRLGSQGFVYVMANKQPLWNEATQVYQLDFGGRVTQESAKNFQIELEGRQVMQFGRIDGSAYILDFQYPFSAVQAFAVALANVTQRLK

SEQ ID NO: 3179 - DNA, 1977 bp, Homo sapien
gcccttcgggacgagctggaggcagagcgtgagtacaaagtgatcggcctcggccgcacgtagtagcccccctactccccggccaagtcagggcctccctcttcccgcggagtcgcaaccacgggtagctcgtgtaggtaacggcaggtccaggcctccgcatgagcggagggccccccgcgcgaccttgaatggcccgggcgcgcgcggtcgtgtgggagttgtagtcctccgtccccgtccgcgcggactccgtttcccgtggtgccccgggcggcccgcttccggcgcagttagttacgagtcggcgcacgcggcctcggtccggttgactttgcggagccatggagggcggcttcggctccgatttcgggggctccggcagcgggaagctggacccagggctcataatggagcaggtgaaagtgcagatcgccgtggccaacgcgcaggagctgctgcagaggatgacggacaagtgtttccggaagtgtatagggaaacctgggggctccctggacaactccgagcagaagtgcatcgccatgtgcatggaccgctacatggacgcctggaacaccgtgtctcgcgcctacaactcgcggctgcagcgggaacgagccaacatgtgaccggcgagcgcgggccaccccaccctgttcatttccataaacgtgctttgagaggcggggtccgcatgtacgtactgcctgcccggggcttaggagggtggcaccggtgctgggacacacgggactgtgtcctcgccaccccccgccctgccccctgccagccagtgcagcttggatctcgggggtgtggggccctgtgccttcctgaagtgctggcagcccagtggcacctccttcaggcctttggggtattcccctagtgtgcccaagtcagcctcatattctgggcggacagcttgtctggacttcggagttgggggtggtcagacaccacaggagctgtcacctcctgcggatgggcaaataaattggtggaggacggagagaaacctctttatttccctcctgaggggtctctgggaagaggtgacgcgtgtccctggaaccccagctcggagggtctcagcctcccctgggttgggagaagtccatctttccccttagtgccaccgggctgctgagtcacgaggaatgtgttgctgctgccacccctgccccaaaggctaagggggacagccttccccttgtcagggcttgctttgaccctgcttcgttccaccccgggtcctggtggagcaccaggcaggtggtcctcgctgtgacactgaggtgctgagccagtgagctagggtggaggggctgtgtttattggaacaaagggtggtaccaaaatgcatccccatgacccacagcccccccacacccgtccttgggtagggtacggtggggtggggtgttgggtggcctgctgctcctgttgctttcacgtagagtctcggcctgggcagtcacgtggtggtcactcctggatgtgctgtcctatccagcctctcacagctgccacccgggtatagacacctgggaagtggggccggccacagccatagccccagctagtgaccccagttagcacccaccgtccagagggctccctgcaggccaggggtcccccagcgtcaccctgttggggagagaagaaagggggttcagaggccggtacctcccctacagcagcccttgggtcattggcccctctaggagtgaccctagtgacttcccctgggagccgcattttcactatctggaaaatgggctcaatgcaaaggtggcagacatttatggacacccgccacgtggtcccggagtggaacggtgcctcccactgcagcctctgcctgctctgccgccgaggcccggggatgggatgcggtgggttgcccaataaacggctgtggagtggaaattcctccagagccaaaaaggcaaaaaaaaaaaaaaaaaaaaa

SEQ ID NO: 3180 - protein, 95 aa, Homo sapien
MEGGFGSDFGGSGSGKLDPGLIMEQVKVQIAVANAQELLQRMTDKCFRKCIGKPGGSLDNSEQKCIAMCMDRYMDAWNTVSRAYNSRLQRERANM

SEQ ID NO: 3181 - DNA, 8500 bp, Homo sapien
cgtcatggccgtcagcaccgcgttcccgtcctcttccgcttggccccagaaagtttcggttctgcccggcggtggacccacgagcgcgtgccaccatggagtctgaccactgctgagcagacagccaccgagggccgaaattctgagccttcctctggacccaggcaggagacatacagacaagaaaggcaaactcaccatggcctccaccaatgcagagagccagctccagagaatcatccgagacttgcaagatgctgtgacagaactaagcaaagaatttcaggaagcaggggaacccatcacggatgacagcaccagcttgcataaattttcttataaacttgagtatctcctgcaatttgatcagaaagagaaggccaccctcctgggcaacaagaaggactactgggattacttctgtgcctgcctggccaaggtgaaaggagccaatgatgggatccgatttgtcaagtctatctcagagctccgaacatccttggggaaaggaagagcatttattcgctactccttggtgcaccagaggttggcagacaccttacagcagtgcttcatgaacaccaaagtgaccagtgactggtactatgcaagaagcccctttctgcagccaaagctgagctcggacattgtgggccaactctatgagctgactgaggttcagtttgacctggcgtcgaggggctttgacttggatgctgcctggccaacatttgccaggaggacgctgaccactggctcttctgcttacctgtggaaaccccctagccgcagctccagcatgagcagcttggtgagcagctacctgcagactcaagagatggtgtccaactttgacctgaacagccccctaaacaacgaggcattggagggctttgatgagatgcgactagagctggaccagttggaggtgcgggagaagcagctacaggagcgcatgcagcagctggacagagagaaccaggagctgagggcagctgtcagccagcaaggggagcaactgcagacagagagggagagggggcgcactgcagcggaggacaacgttcgcctcacttgcttggtagctgagctccagaagcagtgggaggtcacccaggccacccagaacactgtgaaggagctgcagacatgcctgcaggccctggagctaggagcagcagagaaggaggaggactaccacacagccctgcggcggctggagtccatgctgcagcccttggcacaggagcttgaggccacacgggactcactggacaagaaaaaccagcatttagccagcttcccaggctggctagccatggctcagcagaaggcagattcggcatcagacacaaagggccggcaagaacctattcccagtgatgcggcccaggagatgcaggagctaggggagaagcttcaagccctagaaagggagagaaccaaggtcgaggaggtcaacagacagcagagtgcccaactggaacagctggtcaaggagcttcagctgaaagaggatgcccgggccagcctggagcgcctggtgaaggagatggccccactccaggaggagttgtctgggaagggacaggaggcagaccagctctggcgacggctgcaggagttgctggcccacacgagctcctgggaggaggagctagcagagttgaggcgggagaaaaaacagcaacaggaggagaaggagctgctggagcaggaggtcaggtctctgacccggcagctgcagttcctggagacccagctggcacaggtgagccaacatgtgagtgacctggaggagcagaagaagcagctcattcaggacaaagaccacctcagccagcaggtgggtatgctcgagcggcttgctgggccgcctggcccagaactgccagtggcaggtgagaagaatgaggccctggtccctgtgaactccagtctgcaagaggcctgggggaagccagaggaggagcagaggggcctgcaggaggcacagttagacgataccaaggtgcaagagggcagccaggaggaagagctccggcaggccaacagggagctggagaaggagctacagaatgtggtcgggcgtaaccagctcctggagggcaagctgcaagccctgcaggccgattaccaggctttgcagcagcgggaatcagccatccagggctccttggcctccctggaggccgagcaggccagcatccggcacttgggtgaccagatggaggcgagcttgctggctgtaaggaaggccaaggaggccatgaaagcccagatggcagagaaggaggccattctacagagcaaggagggcgagtgtcagcagctgcgggaggaggtggagcagtgccagcaactggcagaagcccggcacagagagcttagggctctcgagagccagtgccagcagcagacccagctgattgaggtcctcacagcagagaaaggccaacagggagttggcccacccactgacaatgaagcccgtgagctggctgcccagctagccctgtctcaggcgcagctggaagtccatcagggggaggtccaacggctgcaggctcaggtggtggacctccaggccaagatgcgggcagccctggatgaccaggacaaggtgcagagccagctaagcatggctgaggccgtcctgagggagcacaaaacccttgtgcagcagctgaaggagcagaatgaagcccttaacagagcccatgtccaggagctgctgcaatgctcggagcgtgaaggggcactgcaggaggagagggccgatgaggcccagcagagggaggaggagctgcgggccctgcaggaggagctgtcccaggccaaatgcagctccgaggaagcacagctggagcacgctgagctgcaagagcagctgcaccgggccaacacagacacagctgagctgggcatccaggtttgcgcactgaccgtggaaaaggagcgagtggaggaggcactggcctgtgctgtccaggagctccaggacgccaaagaggcagcctcaagggagcgagagggcctggagcgccaagtagctgggctgcagcaagagaaggagagcttgcaggagaagctgaaggcggccaaggcagcagccggctcactgcctggcctgcaggcccagctcgcccaggcagagcagcgggcccagagcctccaagaggctgcacaccaggagctcaacaccctcaagttccagctgagtgctgaaatcatggactaccagagcagacttaagaatgctggtgaagagtgcaagagcctcaggggccagcttgaggagcaaggccggcagctgcaggctgctgaggaagctgtggagaagctgaaggccacccaagcagacatgggagagaagctgagctgcactagcaaccatcttgcagagtgccaggcggccatgctgaggaaggacaaggagggggctgccctgcgtgaagacctagaaaggacccagaaggaactcgaaaaagccacaacaaaaatccaagagtattacaacaaactctgccaggaggtgacaaatcgtgagaggaatgaccagaagatgcttgctgacctggatgacctcaacagaaccaagaagtatctcgaggagcggctgatagagctgctcagggacaaggatgctctctggcagaagtcagatgccctggaattccagcagaagctcagtgctgaggagagatggctcggagacacagaggcaaaccactgcctcgactgtaagcgggagttcagctggatggtgcggcggcaccactgcaggatatgtggccgcatcttctgttactactgctgcaacaactacgtcctgagcaagcacggtggcaaaaaggagcgctgctgccgagcctgtttccagaagctcagtgaaggccctggctcccctgatagcagtggctcaggcactagccagggagagcccagccctgcactgtcaccagcctcacctgggccccaggccacaggaggccaaggagcaaatacagactacaggccaccggacgacgctgtgtttgatatcatcacagatgaggaattgtgccagatacaggagtccggctcctctttgcctgaaacacccactgaaactgattctcttgacccaaatgcggctgaacaggatactacatcaacctcgctaacgcctgaggacactgaagacatgcccgtggggcaggattcggaaatctgcctgctgaagtctggagaactgatgatcaaagtacccctcacagtggatgagatcgccagcttcggggagggtagcagggagctgtttgtgaggtccagcacctacagcctgatccccatcactgtgcccgaggcagccctcaccatcagctgggtcttctcctctgaccccaagagcatctccttcagtgtggtcttccaggaggccgaggacacaccgctggatcagtgtaaggtcctcattcccacgacccgatgcaactcccacaaggagaacatccagggccagctcaaggttcgcacacccggcatctacatgctcatcttcgacaataccttctcaaggtttgtctctaaaaaggtattttatcacttgacggttgatcggcctgtgatctacgatggaagtgatttcctgtagcttcagcacctcagtaacttcacttcatccacaggaaacactgctcttcctcacctgtcacataaagcatttttttaaaaagtcagctgctccaaaatcatcaactcagcccctgggctgcccctcagaggcggtgtctggggaggactttgtgctcagcactctgcaccggccactcttagcccccgaggcgttgaagggctcaggcaatgtttccattaagtagagactcagctgttgtcacacccaaagggatgctctgccaaaggtttaaacacccaggagaccatcagcctctcctgggagcacagttgactacaggcctcttgtggagagtttcacgggcaggggtgattccaacttctgcctgtggagagattttctgccctgccccaccagggccctgcatgttggagactgagctgggtgcactggccataccctgtgaatcctcgggctgtgacgccctcaggtactcctgggaaaaggaggtacacagccatcatgcgagtcggtgccaggggaccccccggagatcctgaccagctcctccagtcatgctcttgtccctcactgccccagtaagctggaggctgctccagaactcagcagtgttggaggggcctctaagctgcactctctttctggcccttttgtctggctgattctgtcctcaaataaagcccttcactcagccagacctctccacagctcaaagcattgccctaagaatcagaagtaaagataatccaagagcaaaacccactgtacttggggcctgcaatggctgtgtgtacactacatctaatgcccaaatgccagccagtgtggatgttgtgaccacagagcaggattgtgcattggctttagagctactcctcagctgatggcccacttttgtttatataaataagagcttctgccccacctgcagacatgtttactaatgatcatagccaggattagaaccactttcaaacattggggccttcttaacaaaagtctttgataacttaagaaccaaagtaacagagtaaacagaggcatgatggatccctgggccccactcccctcctgacaggttccccaacagcccatttgcccacttcccactgctcagcccacaccagacctccaggagacatccccccttgaggcagagagatcctgttccctattcccagacaagaattatttaatcttccctgttctctgtggtccttttcttccccaacaacagatagctcaccttggacagctcttcgtcccttgttcatggaaccagctgcctgcagtcaggccccaggttcttccatgggtgaacagagcatctgacaaaaggtcccagtttggccaggggtgagggagagagcaccagacaggctatccgagaatctgagagctgggcccggcaattcctccagctacccttgtgacctaagtccagtcacacatttcccaaagtttctctttgtcataaccctggtctggctggttttgagggcttgagaatgggtcagggactccaggccaagtccaacagagaccccaaacccaccacacaccagcagccacaacctcaccaccaacaaagaggacttttgtggggccacaagtaagaggtcatttctggaatggactcagacctttaaacaggagagttgagcacttccagtcagtttttaagcaaggcatggggaacagggaatagaacctttcaaagaggttgcccagagaaaagctgggcctcttgcattcggcttccttggagcagcctcttctggcagaaagccatcaggtgctcaatcatcttctcctggccaaggctctgaccatgcttagtactggaatagaggtggccaggcccccagcgactcttcttggcctgatgtttgtcctcacaggcatgccacgtggcctgagatgattcagaacaaatcatgctaactttgaatccatccagccacttgcaaatgataatcagaagtcagcttgttcactgttagaaagaaactaacaaaagagaacccagagcaatctagaatctttgagtgcttggctttccaaggatactgcggagactctggccaagctgatgaccttctgaagtgtcactggcaccatatgcaacaagaaccaccattcactgagtagctaatgggtttggggcctgggacattccatctgaggtccttcctgaacatgtcactccacagcagaggaccggttgcagcttacccagaaccactcctccaggagagctggatgttttgcgtgcaacaccttgagcactgactgctattgttcaaaaaaagcctttgctgcattcggaggactgccccgtgccctgaggtgacttcctaactatgtggtttcattagcgaatttattttttgggctgggtggacatttgtattttgttaggttgctgtttaagctcaagtttgctgtgctctctgcagctacaaaacatcttggcatatttaagagtggcttttataaatagctttattctgatattaatcagattcccaactttactgagaattaaggactggggtactttaaagaaatgcaaatagcaattgaagaaccactgctgcaggtggtagccctggctagactgaattacactagaaatcagccagaaggaagcgtccttgggatcccagatcactcttttttttttttttttttaaaaggggcagccccttgatggctcatctctctgaataacagttacgtcttcatatcgataccagatgccttcttcatcatgccactgaagccactcaccaccttcaagaacatgccaacctctgtcagattcacttacccacaaacaaggaggcacgtttggcacaaagtgttgtcctccaggtccaagtggactctacagagtgcttgacctcaacacactggattccaggtggactggaccaagagcaggcaaagacacgggaactgaaaaactccacagggtttggagaatagaaatgaaaagccacgtcatataactcaagaataaatggtgttttggaaattttaaaattatcatcgaaggtggtgaaactatttcaggcccaaatgaaaggaaatcgccagttggggatgaaatcacagagcctgtgttttatgatatggttggatgtccactgatgaaattttaaaggagtttcatttttaaaagtgcgcatgattctacatatgagaattctttaggccaagaaactgtccttggctcagaggtgttgggaattaaagcagagagaagccattcgtgatgcttagaaccaaggatggtcatgtacacaaagaccatcgagacggccattcttgtttacaaaacacttaccaagaaagcactttgtaggggaactttagtaagttcttctcatttcattatgtttcttccaaggaaacaggagagactgaattaataattctctctttcctcttaagcacttttaaaataataaagtacatcttgaaatttggggaggcatctctgatttaaaaaaagaaaaaggctgcttgatgtatgttatgcagagacactctgcctctggtggctgcagagcaatacccaagcctcatttggaaggctcaacatttggaattgcactttaattgattaatcctcaattcatgtggccttacgggatggtgggtctgggaccccaattcattcttatctgccaaagaattatctagaagcacatcaaataccagcaccccacctgcacaatgggggtggaaaacttttgtatccctaagcatattattttatagtgtctgccatgccatgtggaaatactttatttttaacctcaggatttaaataaagtaaacactatgacattt

SEQ ID NO: 3182 - protein, 1478 aa, Homo sapien
MASTNAESQLQRIIRDLQDAVTELSKEFQEAGEPITDDSTSLHKFSYKLEYLLQFDQKEKATLLGNKKDYWDYFCACLAKVKGANDGIRFVKSISELRTSLGKGRAFIRYSLVHQRLADTLQQCFMNTKVTSDWYYARSPFLQPKLSSDIVGQLYELTEVQFDLASRGFDLDAAWPTFARRTLTTGSSAYLWKPPSRSSSMSSLVSSYLQTQEMVSNFDLNSPLNNEALEGFDEMRLELDQLEVREKQLQERMQQLDRENQELRAAVSQQGEQLQTERERGRTAAEDNVRLTCLVAELQKQWEVTQATQNTVKELQTCLQALELGAAEKEEDYHTALRRLESMLQPLAQELEATRDSLDKKNQHLASFPGWLAMAQQKADSASDTKGRQEPIPSDAAQEMQELGEKLQALERERTKVEEVNRQQSAQLEQLVKELQLKEDARASLERLVKEMAPLQEELSGKGQEADQLWRRLQELLAHTSSWEEELAELRREKKQQQEEKELLEQEVRSLTRQLQFLETQLAQVSQHVSDLEEQKKQLIQDKDHLSQQVGMLERLAGPPGPELPVAGEKNEALVPVNSSLQEAWGKPEEEQRGLQEAQLDDTKVQEGSQEEELRQANRELEKELQNVVGRNQLLEGKLQALQADYQALQQRESAIQGSLASLEAEQASIRHLGDQMEASLLAVRKAKEAMKAQMAEKEAILQSKEGECQQLREEVEQCQQLAEARHRELRALESQCQQQTQLIEVLTAEKGQQGVGPPTDNEARELAAQLALSQAQLEVHQGEVQRLQAQVVDLQAKMRAALDDQDKVQSQLSMAEAVLREHKTLVQQLKEQNEALNRAHVQELLQCSEREGALQEERADEAQQREEELRALQEELSQAKCSSEEAQLEHAELQEQLHRANTDTAELGIQVCALTVEKERVEEALACAVQELQDAKEAASREREGLERQVAGLQQEKESLQEKLKAAKAAAGSLPGLQAQLAQAEQRAQSLQEAAHQELNTLKFQLSAEIMDYQSRLKNAGEECKSLRGQLEEQGRQLQAAEEAVEKLKATQADMGEKLSCTSNHLAECQAAMLRKDKEGAALREDLERTQKELEKATTKIQEYYNKLCQEVTNRERNDQKMLADLDDLNRTKKYLEERLIELLRDKDALWQKSDALEFQQKLSAEERWLGDTEANHCLDCKREFSWMVRRHHCRICGRIFCYYCCNNYVLSKHGGKKERCCRACFQKLSEGPGSPDSSGSGTSQGEPSPALSPASPGPQATGGQGANTDYRPPDDAVFDIITDEELCQIQESGSSLPETPTETDSLDPNAAEQDTTSTSLTPEDTEDMPVGQDSEICLLKSGELMIKVPLTVDEIASFGEGSRELFVRSSTYSLIPITVPEAALTISWVFSSDPKSISFSVVFQEAEDTPLDQCKVLIPTTRCNSHKENIQGQLKVRTPGIYMLIFDNTFSRFVSKKVFYHLTVDRPVIYDGSDFL

SEQ ID NO: 3183 - DNA, 3257 bp, Homo sapien
ccgggcgcgccacacttcctgttgatccggctcggccgggggctgggccggcgggcaggcggcggcggccactggccaggcgtggacgcgcgcggggccgccgcgggcacggagtggccgccgcgtcgcctgagcccagagccggggagtgctctcggccgccgcgtctcctgccctctgtccttccaacccagccctcggctgagccgcgccgcaccatgcccgccgtggacaagctcctgctagaggaggcgttgcaggacagcccccagactcgctctttactgagcgtgtttgaagaagatgctggcaccctcacagactataccaaccagctgctccaggcaatgcagcgcgtctatggagcccagaatgagatgtgcctggccacacaacagctttctaagcaactgctggcatatgaaaaacagaactttgctcttggcaaaggtgatgaagaagtaatttcaacactccactatttttccaaagtggtggatgagcttaatcttctccatacagagctggctaaacagttggcagacacaatggttctacctatcatacaattccgagaaaaggatctcacagaagtaagcactttaaaggatctatttggactcgctagcaatgagcatgacctctcaatggcaaaatacagcaggctgcctaagaaaaaggagaatgagaaggtgaagaccgaagtcggaaaagaggtggccgcggcccggcggaagcagcacctctcctcccttcagtactactgtgccctcaacgcgctgcagtacagaaagcaaatggccatgatggagcccatgataggctttgcccatggacagattaacttttttaagaagggagcagagatgttttccaaacgtatggacagctttttatcctccgttgcagacatggttcaaagcattcaggtagaactggaagccgaggcggaaaagatgcgggtgtcccagcaagaattactttctgttgatgaatctgtttacactccagactctgatgtggccgcaccacagatcaacaggaacctcatccagaaggctggttaccttaatcttagaaacaaaacagggctggtcaccaccacctgggagaggctttatttcttcacccaaggcgggaatctcatgtgtcagcccaggggagccgtggctggaggtttgatccaggacctggacaactgctcagtgatggccgtggattgcgaagaccggcgctactgcttccagatcaccacgcccaatggaaaatcgggaataatcctccaggctgagagcagaaaggaaaatgaagagtggatatgtgcaataaacaacatctccagacagatctacctgaccgacaaccctgaggcagtcgcgatcaagttgaatcagaccgctctgcaagcagtgactcccattacaagttttggaaaaaaacaagaaagctcatgccccagccagaacctgaaaaattcagagatggaaaatgaaaatgacaagattgttcccaaagcaacagccagtctacctgaagcagaggagctgatcgcgcctggaacgccgattcaattcgatattgtgcttcctgctacagaattccttgatcagaacagagggagcaggcgtaccaacccttttggtgaaactgaggatgaatcatttccagaagcagaagattctcttttgcagcagatgtttatagttcggtttttgggatcaatggcagttaaaacagacagcactactgaagtgatttatgaagcgatgagacaagtattggctgctcgggctattcataacatcttccgcatgacagaatcccatctgatggtcaccagtcaatctttgaggttgatagatccacagactcaagtatcaagggccaattttgaacttaccagtgtcacacaatttgctgctcatcaagaaaacaagagactggttggttttgtcatccgtgttcctgaatccactggagaagaatctctgagtacatacatttttgaaagcaactcagaaggcgaaaagatatgttatgctattaatttgggaaaagaaattattgaggttcagaaggatccagaagcactggctcaattaatgctgtccataccactaaccaatgatggaaaatatgtactgttaaacgatcaaccagatgacgatgatggaaatccaaatgaacatagaggcgcagaatccgaagcataactcacttgcgcctgtgggggaagagcaaacaggaaggagagctacctcctaagggttttaacgtctctgacatacaggcacactgacctgatttccgaaggctgacaatcgtttgtggaatgtaatcttgatgccttgatactgagacttgggagggaaactaagaaatggttgacagcgttcccacccatctacaatgttattttaggtgctttgtggtaagtcttttttcttagattgcgctaaaatttcttagattgttcagcgctcagaacaaaagtttgaaaaatgcattgttcatatgaatgtcatctcttttcagtttccagtatcctttttaaaaaatggcaaaagcctagatttacaatttgatgaacactaaatatttcttattaatataatctatttttgtattttacttaatgagctttaagtgcctgtcgttctgaaaattgtgtatttataattcagcttatctcacaattggacctaatagcatttctttgtgcagttaggtgacgagcactgctttgaggcccaagcactagtagagatgcgcgatacaggtctagtttcggtaactgttccagacatcaagcaataaaaaaatgaataccacaaaagatgtttgattttacagtggagccttactgaaccagcattcagaagtttaaggtcctcctaggtatgagtatttttagtagtggatcactgtggacagggtgcagctctaccagttcctgtttcttctgagccagaccctcttcagggaagggaccaattaattttaaaactcacttgaagcacagctggtcatggggcttggtataaagttcctatttccaccctgatacttccaattcctggaaccccagcccactcccccatccctcctccctatcaaactagtataatgattttgaatcggtacagtgtgtttaactgtaactaagttcaacagactattattatctttgtaataaattaacctagcaataaaaattattctgtttctttaaaaaaaaaaaaaaaaaaaaaaaaaaa

SEQ ID NO: 3184 - protein, 664 aa, Homo sapien
MPAVDKLLLEEALQDSPQTRSLLSVFEEDAGTLTDYTNQLLQAMQRVYGAQNEMCLATQQLSKQLLAYEKQNFALGKGDEEVISTLHYFSKVVDELNLLHTELAKQLADTMVLPIIQFREKDLTEVSTLKDLFGLASNEHDLSMAKYSRLPKKKENEKVKTEVGKEVAAARRKQHLSSLQYYCALNALQYRKQMAMMEPMIGFAHGQINFFKKGAEMFSKRMDSFLSSVADMVQSIQVELEAEAEKMRVSQQELLSVDESVYTPDSDVAAPQINRNLIQKAGYLNLRNKTGLVTTTWERLYFFTQGGNLMCQPRGAVAGGLIQDLDNCSVMAVDCEDRRYCFQITTPNGKSGIILQAESRKENEEWICAINNISRQIYLTDNPEAVAIKLNQTALQAVTPITSFGKKQESSCPSQNLKNSEMENENDKIVPKATASLPEAEELIAPGTPIQFDIVLPATEFLDQNRGSRRTNPFGETEDESFPEAEDSLLQQMFIVRFLGSMAVKTDSTTEVIYEAMRQVLAARAIHNIFRMTESHLMVTSQSLRLIDPQTQVSRANFELTSVTQFAAHQENKRLVGFVIRVPESTGEESLSTYIFESNSEGEKICYAINLGKEIIEVQKDPEALAQLMLSIPLTNDGKYVLLNDQPDDDDGNPNEHRGAESEA

SEQ ID NO: 3185 - DNA, 1377 bp, Homo sapien
ctttgttttgcttcgagatggctgcggggatgtatttggaacattatctggacagtattgaaaaccttccctttgaattacagagaaactttcagctcatgagggacctagaccaaagaacagaggacctgaaggctgaaattgacaagttggccactgagtatatgagtagtgcccgcagcctgagctccgaggaaaaattggcccttctcaaacagatccaggaagcctatggcaagtgcaaggaatttggtgacgacaaggtgcagcttgccatgcagacctatgagatggtggacaaacacattcggcggctggacacagacctggcccgttttgaggctgatctcaaggagaaacagattgagtcaagtgactatgacagctcttccagcaaaggcaaaaagaaaggccggactcaaaaggagaagaaagctgctcgtgctcgttccaaagggaaaaactcggatgaagaagcccccaagactgcccagaagaagttaaagctcgtgcgcacaagtcctgagtatgggatgccctcagtgacctttggcagtgtccacccctctgatgtgttggatatgcctgtggatcccaacgaacccacctattgcctttgtcaccaggtctcctatggagagatgattggctgtgacaaccctgattgttccattgagtggttccattttgcctgtgtggggctgacaaccaagcctcgggggaaatggttttgcccacgctgctcccaagaacggaagaagaaatagataagggccttggattccaacacagtttcttccacatcccctgacttgggctagtgggcagaggaatgcctgtgctggggccaggggttcagggaggagtggatggcacagtgctgtcatcccttctcctcccctctccccactcccggtgctgaggctgcatcagaccctggtagggaggggtgccgcagccactaacggtatgtgctctccttcagccctctccttcggagggacgtggtcttgcccactgtccttttgcctccatgctgaggtcggtgctgtatttcagagggagggtccttttcattctccttgctttgtatttaaggactggggcatagcatgggggcagtcccccagacctcttcattccccctcctgtggtgagggctaggtgtgatcaacacttttcttctccattcccttcctgcttttttcatggtggggatccaccaggtcatctagctctggccctagttgaagggcaccccttcctctgtgccaagaggattcatcctgggagagggggcaaggtggaatgcagataactcacatgtaaaaggaacttgggtaggtaaataaaagctatacatgttgaaaaaaaaaa

SEQ ID NO: 3186 - protein, 249 aa, Homo sapien
MAAGMYLEHYLDSIENLPFELQRNFQLMRDLDQRTEDLKAEIDKLATEYMSSARSLSSEEKLALLKQIQEAYGKCKEFGDDKVQLAMQTYEMVDKHIRRLDTDLARFEADLKEKQIESSDYDSSSSKGKKKGRTQKEKKAARARSKGKNSDEEAPKTAQKKLKLVRTSPEYGMPSVTFGSVHPSDVLDMPVDPNEPTYCLCHQVSYGEMIGCDNPDCSIEWFHFACVGLTTKPRGKWFCPRCSQERKKK

SEQ ID NO: 3187 - DNA, 2414 bp, Homo sapien
cccgcgtgcatacggttgccggcatggcacattacaacttcaagaaaattacggtggtgccgtccgccaaggacttcatagacctcacgttgtcgaagactcaacgaaagactccaaccgttattcataaacattaccaaatacatcgcattagacatttttacatgagaaaagtcaaatttactcaacagaattaccatgatagactttcacaaattctaacagatttccccaaattggatgatattcatccgttctatgctgatttgatgaatattctctacgacaaggatcattacaagttggctctggggcaaataaatattgccaaaaatttagtggacaatgttgctaaagattatgtgcgactgatgaagtatggcgactctctctaccgctgcaaacagctgaagcgtgcggccctgggacggatgtgcacagtgatcaagaggcagaagcagagtttggagtatttggagcaagtgcgtcagcatttatcccgtttgccaaccattgatccgaataccaggaccctgcttttgtgtgggtacccaaatgttgggaagtccagcttcatcaacaaggtgacgagagcagacgtggatgtccagccctatgcgttcacaaccaagtctctgtttgttgggcacatggattataagtatctacgttggcaggttgtagacactcctgggatcctggaccaccctctggaggataggaacaccatcgagatgcaggccatcactgccctggcccacctccgtgctgcggtcctgtatgtgatggatttgtctgagcagtgtgggcatgggctgagggagcagctagaactcttccagaacatcagacctctcttcatcaacaagcctctcatagttgtagccaacaaatgtgatgtgaagagaatagctgaactttctgaagatgatcagaaaatatttacagatttgcagtctgaaggattccctgtaatagagaccagcaccctgactgaggaaggtgttattaaagttaaaacagaggcttgcgataggcttttggctcatcgagtggaaaccaaaatgaagggaaataaagtgaatgaggtgctgaatagactgcacctggctatcccaaccaggagggacgataaggagaggccccctttcatccctgaaggagtggtggctcgcaggaagaggatggaaactgaggagtccaggaagaagagggaacgagatcttgagctggaaatgggagatgattatattttggatcttcagaagtactgggatttaatgaatttgtctgaaaaacatgataagataccagaaatctgggaaggccataatatagctgattatattgatccagccatcatgaagaaattggaagaattagaaaaagaagaagagctgagaacagctgctggagagtatgacagtgtatctgagagtgaagacgaagagatgctggaaatccgacagctggcaaagcaaattcgagagaaaaagaagttgaaaattctggagtccaaagaaaagaatacacagggacccaggatgccgcgaactgctaagaaggttcagaggacagttttggagaaggagatgcgtagtcttggtgttgacatggacgataaagacgatgcccattacgcagtccaggcaagaagatcccggagcatcactaggaaaagaaagcgggaagactctgctcccccgtcctctgtggcccggagtgggagttgctctcgaactccacgtgacgtttctggtcttagggatgtcaagatggtgaagaaagccaagactatgaagaatgctcagaagaagatgaatcggttggggaagaaaggggaggcggatagacacgtgtttgatatgaagcccaagcacttgctgtctgggaagaggaaagctggtaaaaaggacaggagatagtatccgtttggttggcgtggcttcgctagagtgttgctgtttatttcctggtttggtacagtatggtttcatgaaattggagctctgtacaaactgaaaaagacaaaataagtaaagcacttgttgctttgctgaaaactatggttaaccctatataggtgtgggaaatttttgtcactgcataatattacaaatattttgagtagacagtgtttccacatttaatggagtatcagttgcttcagattttcagaactgggaagatttactggtgtaactgggttgtttttgatggagaaaaaccttattttcttttgtaagagctgggagcaaacacgtttatgagtgtgtcggaatcccgtgcttaaaatacgctcttaaattattttctagtcttattttacaatgtctcattgtagtctgtcttcaactattttatccaaaataaacctccagaagaaactaaaaaaaaaaaaaaaaaaaaaaaaa

SEQ ID NO: 3188 - protein, 633 aa, Homo sapien
MAHYNFKKITVVPSAKDFIDLTLSKTQRKTPTVIHKHYQIHRIRHFYMRKVKFTQQNYHDRLSQILTDFPKLDDIHPFYADLMNILYDKDHYKLALGQINIAKNLVDNVAKDYVRLMKYGDSLYRCKQLKRAALGRMCTVIKRQKQSLEYLEQVRQHLSRLPTIDPNTRTLLLCGYPNVGKSSFINKVTRADVDVQPYAFTTKSLFVGHMDYKYLRWQVVDTPGILDHPLEDRNTIEMQAITALAHLRAAVLYVMDLSEQCGHGLREQLELFQNIRPLFINKPLIVVANKCDVKRIAELSEDDQKIFTDLQSEGFPVIETSTLTEEGVIKVKTEACDRLLAHRVETKMKGNKVNEVLNRLHLAIPTRRDDKERPPFIPEGVVARRKRMETEESRKKRERDLELEMGDDYILDLQKYWDLMNLSEKHDKIPEIWEGHNIADYIDPAIMKKLEELEKEEELRTAAGEYDSVSESEDEEMLEIRQLAKQIREKKKLKILESKEKNTQGPRMPRTAKKVQRTVLEKEMRSLGVDMDDKDDAHYAVQARRSRSITRKRKREDSAPPSSVARSGSCSRTPRDVSGLRDVKMVKKAKTMKNAQKKMNRLGKKGEADRHVFDMKPKHLLSGKRKAGKKDRR

SEQ ID NO: 3189 - DNA, 2414 bp, Homo sapien; identical to SEQ ID NO: 3187

SEQ ID NO: 3190 - protein, 633 aa, Homo sapien; identical to SEQ ID NO: 3188

SEQ ID NO: 3191 - DNA, 4764 bp, Homo sapien
ctgtcttggtacctgcggtagtagcctggctttgctctgacggcgatctcgcggcccgagagccttttataggttgcttttcccggggatgtgaaggatacagaaatgactgtgaatcaacccatatcatcaaggagctgataatctagtggaagagttagacgtgtgcatacttcactatgatatgaggcagtctctgagcttatattctctgtggaagatgtgacatatccaggcggaacatcatgatgcagggaaacacatgtcacagaatgtcgttccacccgggacgagggtgtccccgaggacgaggaggacatggagccagaccctcagcaccatcctttaggccccaaaatctgaggctgcttcaccctcagcagcctcctgtgcaatatcaatatgaacctccaagtgccccttccaccactttctcaaactctccagcccccaattttctccctccacgaccagactttgtacccttccccccacccatgcctccgtcagcgcaaggccctcttcccccctgcccaatcaggccgcctttccccaaccaccagatgaggcaccccttcccagttcctccttgttttcctcccatgccaccaccaatgccttgtcctaataaccccccagtccctggggcacctcctggacaaggcactttccccttcatgatgccccctccctccatgcctcatcccccgccccctccagtcatgccgcagcaggttaattatcagtaccctccgggctattctcaccacaacttcccacctcccagttttaatagtttccagaacaaccctagttctttcctgcccagtgctaataacagcagtagtcctcatttcagacatctccctccatacccactcccaaaggctcccagtgagagaaggtccccagaaaggctgaaacactatgatgaccacaggcaccgagatcacagtcatgggcgaggtgagaggcatcggtccctggatcggcgggagcgaggccgcagtcccgacaggagaagacaagacagccggtacagatctgattatgaccgagggagaacaccatctcgccaccgcagctacgaacggagcagagagcgagaacgggagagacacaggcatcgagacaaccgaagatcaccatctctggaaaggtcctacaaaaaagagtataagagatctggaaggagttacggtttatcggttgttcctgaacctgctggatgcacaccagaattacctggggagattattaaaaatacagattcttgggccccacccctggagattgtgaatcatcgctccccaagtagggagaagaagagagctcgttgggaggaagaaaaagaccgttggagtgacaaccagagttctggcaaagacaagaactatacctcaatcaaggaaaaagagcccgaggagaccatgcctgacaagaatgaggaggaagaagaagaacttcttaagcctgtgtggattcgatgcactcattcagaaaactactactccagtgaccccatggatcaggtgggagattctacagtggttggaacgagtaggcttcgtgacttatatgacaaatttgaggaggagttggggagcaggcaagaaaaggccaaagctgctcggcctccgtgggaacctccaaagacgaagctcgatgaagatttagagagttccagtgaatccgagtgtgagtctgatgaggacagcacctgttctagcagctcagactctgaagtttttgacgttattgcagaaatcaaacgcaaaaaggcccaccctgaccgacttcatgatgaactttggtacaacgatccaggccagatgaatgatggaccactctgcaaatgcagcgcaaaggcaagacgcacaggaattaggcacagcatttatcctggagaagaggccatcaagccctgtcgtcctatgaccaacaatgctggcagacttttccactaccggatcacagtctccccgcctacgaactttttaactgacaggccaactgttatagaatacgatgatcacgagtatatctttgaaggattttctatgtttgcacatgcccccctgaccaatattccactgtgtaaagtaattagattcaacatagactacacgattcatttcattgaagagatgatgccggagaatttttgtgtgaaagggcttgaactcttttcactgttcctattcagagatattttggaattatatgactggaatcttaaaggtcctttgtttgaagacagccctccctgctgcccaagatttcatttcatgccacgttttgtaagatttcttccagatggaggaaaggaagtgctgtccatgcaccagattctcctgtacttgttaaggtgcagcaaagccctggtgcctgaggaggagattgccaatatgcttcagtgggaggagctggagtggcagaaatatgcagaagaatgcaaaggcatgattgttaccaaccctgggacgaaaccaagctctgtccgtatcgatcaactggatcgtgaacagttcaaccccgatgtgattacttttccgattatcgtccactttgggatacgccctgcacagttgagttatgcaggagacccacagtaccaaaaactgtggaagagttatgtgaaacttcgccacctcctagcaaatagtcccaaagtcaaacaaactgacaaacagaagctggcacagagggaggaagccctccaaaaaatacggcagaagaatacaatgagacgagaagtaacggtggagctaagtagccaaggattctggaaaactggcatccgttctgatgtctgtcagcatgcaatgatgctacctgttctgacccatcatatccgctaccaccaatgcctaatgcatttggacaagttgataggatatactttccaagatcgttgtctgttgcagctggccatgactcatccaagtcatcatttaaattttggaatgaatcctgatcatgccaggaattcattatctaactgtggaattcggcagcccaaatacggagacagaaaagttcatcacatgcacatgcggaagaaagggattaacaccttgataaatatcatgtcacgccttggccaagatgacccaactccctcgaggattaaccacaatgaacggttggaattcctgggtgatgctgttgttgaatttctgaccagcgtccatttgtactatttgtttcctagtctggaagaaggaggattagcaacctatcggactgccattgttcagaatcagcaccttgccatgctagcaaagaaacttgaactggatccatttatgctgtatgctcacgggcctgacctttgtagagaatcggaccttcgacatgcaatggccaattgttttgaagcgttaataggagctgtttacttggagggaagcctggaggaagccaagcagttatttggacgcttgctctttaatgatccggacctgcgcgaagtctggctcaattatcctctccacccactccaactacaagagccaaatactgatcgacaacttattgaaacttctccagttctacaaaaacttactgagtttgaagaagcaattggagtaatttttactcatgttcgacttctggcaagggcattcacattgagaactgtgggatttaaccatctgaccctaggccacaatcagagaatggaattcctaggtgactccataatgcaactggtagccacagagtacttattcattcatttcccagatcatcatgaaggacacttaactttgttgcgaagctctttggtgaataatagaactcaggccaaggtagcggaggagctgggcatgcaggagtacgccataaccaacgacaagaccaagaggcctgtggcgcttcgcaccaagaccttggcggaccttttggaatcatttattgcagcgctgtacactgataaggatttggaatatgttcatactttcatgaatgtctgcttctttccacgattgaaagaattcattttgaatcaggattggaatgaccccaaatcccagcttcagcagtgttgcttgacacttaggacagaaggaaaagagccagacattcctctgtacaagactctgcagacagtgggcccatcccatgcccgaacctacactgtggctgtttatttcaagggagaaagaataggctgtgggaaaggaccaagtattcagcaagcggaaatgggagcagcaatggatgcgcttgaaaaatataattttccccagatggcccatcagaagcggttcatcgaacggaagtacagacaagagttaaaagaaatgaggtgggaaagagagcatcaagagagagagccagatgagactgaagacatcaagaaataaaggagggcatgcaagtgtggagtatttacttgctcagtaactgtgactgttgtctattgagacctagcctagttttcctgcagacaatgaacgaagtgtgctcattgaaataaaatacagagtcaaatcgctattgttgttttaatgatctgtttttagctggatggtctttattacaaagtattagatttttcttctatttaacggaaaacttgactttggtgaatgtgcattacttccttttattttgctctttaaataataaaattcaagaagcatattctatgtggaatagatcctgtttttccatctgtgtcccagattgtgaccctagactttcaattgacaagtaaaaaattgactttactagtaaaaaaaaaaaaaaaaaaaaaaa

SEQ ID NO: 3192 - protein, 1374 aa, Homo sapien
MMQGNTCHRMSFHPGRGCPRGRGGHGARPSAPSFRPQNLRLLHPQQPPVQYQYEPPSAPSTTFSNSPAPNFLPPRPDFVPFPPPMPPSAQGPLPPCPIRPPFPNHQMRHPFPVPPCFPPMPPPMPCPNNPPVPGAPPGQGTFPFMMPPPSMPHPPPPPVMPQQVNYQYPPGYSHHNFPPPSFNSFQNNPSSFLPSANNSSSPHFRHLPPYPLPKAPSERRSPERLKHYDDHRHRDHSHGRGERHRSLDRRERGRSPDRRRQDSRYRSDYDRGRTPSRHRSYERSRERERERHRHRDNRRSPSLERSYKKEYKRSGRSYGLSVVPEPAGCTPELPGEIIKNTDSWAPPLEIVNHRSPSREKKRARWEEEKDRWSDNQSSGKDKNYTSIKEKEPEETMPDKNEEEEEELLKPVWIRCTHSENYYSSDPMDQVGDSTVVGTSRLRDLYDKFEEELGSRQEKAKAARPPWEPPKTKLDEDLESSSESECESDEDSTCSSSSDSEVFDVIAEIKRKKAHPDRLHDELWYNDPGQMNDGPLCKCSAKARRTGIRHSIYPGEEAIKPCRPMTNNAGRLFHYRITVSPPTNFLTDRPTVIEYDDHEYIFEGFSMFAHAPLTNIPLCKVIRFNIDYTIHFIEEMMPENFCVKGLELFSLFLFRDILELYDWNLKGPLFEDSPPCCPRFHFMPRFVRFLPDGGKEVLSMHQILLYLLRCSKALVPEEEIANMLQWEELEWQKYAEECKGMIVTNPGTKPSSVRIDQLDREQFNPDVITFPIIVHFGIRPAQLSYAGDPQYQKLWKSYVKLRHLLANSPKVKQTDKQKLAQREEALQKIRQKNTMRREVTVELSSQGFWKTGIRSDVCQHAMMLPVLTHHIRYHQCLMHLDKLIGYTFQDRCLLQLAMTHPSHHLNFGMNPDHARNSLSNCGIRQPKYGDRKVHHMHMRKKGINTLINIMSRLGQDDPTPSRINHNERLEFLGDAVVEFLTSVHLYYLFPSLEEGGLATYRTAIVQNQHLAMLAKKLELDPFMLYAHGPDLCRESDLRHAMANCFEALIGAVYLEGSLEEAKQLFGRLLFNDPDLREVWLNYPLHPLQLQEPNTDRQLIETSPVLQKLTEFEEAIGVIFTHVRLLARAFTLRTVGFNHLTLGHNQRMEFLGDSIMQLVATEYLFIHFPDHHEGHLTLLRSSLVNNRTQAKVAEELGMQEYAITNDKTKRPVALRTKTLADLLESFIAALYTDKDLEYVHTFMNVCFFPRLKEFILNQDWNDPKSQLQQCCLTLRTEGKEPDIPLYKTLQTVGPSHARTYTVAVYFKGERIGCGKGPSIQQAEMGAAMDALEKYNFPQMAHQKRFIERKYRQELKEMRWEREHQEREPDETEDIKK

SEQ ID NO: 3193 - DNA, 1048 bp, Homo sapien
ccccgcacgaaaccgagttctggagaacgccatcagctcgctgcttaaaattaaaccacaggttccattatgggtcgacttgatgggaaagtcatcatcctgacggccgctgctcaggggattggccaagcagctgccttagcttttgcaagagaaggtgccaaagtcatagccacagacattaatgagtccaaacttcaggaactggaaaagtacccgggtattcaaactcgtgtccttgatgtcacaaagaagaaacaaattgatcagtttgccaatgaagttgagagacttgatgttctctttaatgttgctggttttgtccatcatggaactgtcctggattgtgaggagaaagactgggacttctcgatgaatctcaatgtgcgcagcatgtacctgatgatcaaggcattccttcctaaaatgcttgctcagaaatctggcaatattatcaacatgtcttctgtggcttccagcgtcaaaggagttgtgaacagatgtgtgtacagcacaaccaaggcagccgtgattggcctcacaaaatctgtggctgcagatttcatccagcagggcatcaggtgcaactgtgtgtgcccaggaacagttgatacgccatctctacaagaaagaatacaagccagaggaaatcctgaagaggcacggaatgatttcctgaagagacaaaagacgggaagattcgcaactgcagaagaaatagccatgctctgcgtgtatttggcttctgatgaatctgcttatgtaactggtaaccctgtcatcattgatggaggctggagcttgtgattttaggatctccatggtgggaaggaaggcaggcccttcctatccacagtgaacctggttacgaagaaaactcaccaatcatctccttcctgttaatcacatgttaatgaaaataagctctttttaatgatgtcactgtttgcaagagtctgattctttaagtatattaatctctttgtaatctcttctgaaatcattgtaaagaaataaaaatattgaactcataaaaaaaaaaaaaaaa

SEQ ID NO: 3194 - protein, 245 aa, Homo sapien
MGRLDGKVIILTAAAQGIGQAAALAFAREGAKVIATDINESKLQELEKYPGIQTRVLDVTKKKQIDQFANEVERLDVLFNVAGFVHHGTVLDCEEKDWDFSMNLNVRSMYLMIKAFLPKMLAQKSGNIINMSSVASSVKGVVNRCVYSTTKAAVIGLTKSVAADFIQQGIRCNCVCPGTVDTPSLQERIQARGNPEEARNDFLKRQKTGRFATAEEIAMLCVYLASDESAYVTGNPVIIDGGWSL

SEQ ID NO: 3195 - DNA, 7136 bp, Homo sapien
gcttatattttttccagctcccaaattccctttattccactttagtcccttcattttcagagatgaggaaacagattgctttgttcaaagacagctagaactagaacacaggctaatacttgctagccatgtgatatactaatgtcagccaaatacgggcatttacactttcagatgtttgccatatctgtgcacttactaattctgtttaatacaatttaaattgactcctttaaataagcttattttaaaggaaattttttgctactataaatagaaaaccattatatcctttaaatagtaactctaaataggaattcaaaacaaagcaacgttattaaaatttaatttaaaattaatttaaatttaattgttattaaatttttaattattgctgttcttcgtcagaaatgtgtcaaagcattgttttcatgtttgatgtcagttccttaattgtctaaacagaaaaagcacagctaatgcctctagttaagcttctgtataacttttttaaatgaaatgcttcttagaggggaaatgagagggcatgaatacatgtttatatactaaagtatgatttcatgtatatcagaagatcttattatatggaaccaaaattattctttggttgatttaattgttcttgaaacttcagtttttaccttgaaggttttagttagcttagcataagtttatttttctaaataaggaatctgattgcctcacaactcagatgtatcacagttatggtgaaatagcaatatattggtttctgtaaccttttaaataccgtaatgaattaaaatctcttcagcaaaagcaaatatatctagggtgacgagaggtgtttttagtgtatttgaatgatggaaatgtttttcttaaaatatttctgaagcattttttaaaataattttttgaatttattgatgatagtagttgtgtgttagtgtgaatgactggtctaaatgtgtatgtcacttccaagggattagtaggggtcagaatgatttgttttattcattgacttttcctttgacgtgttcttattcattgggctacatacattccctgttgccttctcaccaaaagtgccactacacaggctgtatttcattgtactgtagaaaaagacaagtagacctttttcattcatgagattcctatgaaatctgttggtggaggtataaaatgaggagacttttatgggctagctagtaggagttttgctgtgaaacctttgtaacaggtctatcaggaactagggagagaaataaatgcaggaaatacttgatcccattaaactgaggatgaaaaagacatgataatattttggggattatttattgtgtgattttccggctgatcagaagtgttaattttttgttatacttgtgtcaaatacatatatatatatatattttgaaatggagtcttgctctgtcacccaggctggagtgcagtggtgcgatctgggttcactgcaacctctgcctccaggttcaagtgatcctcctgcctcagcctcccgagtagctaggactacaggcacgtgccaccacgccctgctaatttttgtattcttagtggagatggggtttcaccatgttggccaggctggtcttgaactcctgacctcaagtgatcttcccaccttggcctttctgaactatttcctttacacacatttagaactacatctaactgtattatagttttcactttcaccatcagacaaaattcagaagattcaagagaaggaaagtcgattgtatttactcatatttttgctaccgtgtttttacatctcatattttaaggctctcttaattatttattttctgtttagttaatttcctctagccattctttatttatagtgggtctgctggtaacaaattctctcaatttttcctcgtctgagaatgtcttgacttcccttccatttttgtcagcacctgaaaaatactatgccactatcttctgggttctgtggtttctgatgagaactccactgtcagtctaattgtcgttataaatgcagtgttctctctctctctctgcttccaggatattttttcttttttttttttttttttttcttgagacggagtctcactctgtcgcccaggctggagtgcagtggcgcaattttggctcactgcaagctctgcctcccgggttcaagcgattactcccactttagcctcccaagtagctaggactacaaggcacaccaccatgcctggctaatttttgtatttttagtagagacggggtttcaccatgttgcccaggctggtctcgaactcctgacatcaagtgatcttcctgcctccgcttcccaaagtgctggaattacaggcgtgagccactgctcccagcctctttattttttcagctttactctttcttctgtctttttgacatgtgtgtccagtgacacacgtgttagattttgctatagtctcacgcacgggtctataaggctctgttttttgtttcattttgtttttcctattttctctctattcagatcgagtaatttccactgttcagttttatcatagctgcttttaaatctttgtcaggtaattctgtcatctaagttttggcacctattgattatcttttgcattgtttttgtttttgtttctgtttttgttttgagatggagtcttgctctgttgcccaggttggagtgcagtggcactgatctcggctcactgcaacctcctcctcccgggttcaagtggttctcctgcctcaacctccttagtagctgggattacaggcatgtgccaccacgcccggctaattttgtatttttagtagagaccaggtttatccatgttggtcaggctggtctcaaactcccaacctcaagtgatccgcctgcctcgacctcccaaagtgctgggattacaggcgtgaaccactgcacccagcctatcttttgcattgttttaaatcttgttcttgctaggatgaatgattttctgttaaaactagatattttcatattatgttcctaggctctggatattatctaaaccttctgtttccactggcttttattgacactgctttggcaaggtcatagggggtgcctcattactgccaggtggacatagaagtcaagggtccctactcagcctctactgatgcctcaggaagaggatccttcttgttattgctgggtgggggtggaagtctagctgacacctactgaggtaggtgctggggcatgcccggccatcagggtgaaagtcctggctccctagttggcctacttttacattgccctaatagggcattggagctcctcactatggtttatgagctggaagtcaaggctcctcacttagctttcgttggtgtgggtggtggtggggcaaaactgttttctgggtttggctggagtggagcagttactgtcaaaagttttctgtcttgccaggctgtccctttcttgtttctttggctagagagagcaagcttttgttgtggctctttttgtctgtgccagttggcatttccaggttgctgccttctttagctccaagtctgggatatattaggcaaaaagaaaacccagagaatttacaccaccgtgtcattccatgggtcctgaggtcccttacttagtctgccttctctccacttttcacagtcttctcatgttttgtatataatgtccagggtctttagttatacttagcagaaataaaagggaaaagtatgtctgctctatgcttctgtaagtggaagtcttcaaatttgcatttttgattcctttaaacagttttgtaaaatatataatcattattgggcaaaatgtcccataaaatgtatataccttgtgatggtttgcataatattgtgttcaagaggactgctgaaaaataacatctttatttaaactgaaacgaattgttcacattattaatgaaaacttttcccctctaggaaataatgcaaaaggtgtcccaaggctcctgaccagtgaacaaagatttgagaaagacagccaagctcatgttttctcctgatcaagaaaatcatccatctaaagcaccagtaaaatatggtgaactcattgtcttaggctataatgggtctctcccaaatggcgatagaggaaggaggaaaagtaggtttgctttgtttaaaagacctaaggcaaatggggtgaagcccagcactgtgcatattgcttgtactcctcaggctgcaaaggcaataagcaacaaagaccagcatagcatatcatatactttgtctcgggcccagactgtggtggttgaatatactcatgacagcaacacagatatgtttcagattggccggtcgactgaaagccccattgattttgtagtaactgacacggttcctggaagtcaaagtaattctgatacacagtcagtacaaagcactatatcaagatttgcctgcagaatcatatgtgaacggaatcctccctttacagcacggatttatgctgcaggatttgactcatcaaaaaacatctttcttggggagaaggctgccaaatggaagacatcagatggacagatggatggcttgaccactaatggtgttcttgtgatgcatccacgcaatgggttcacagaagactccaagcctggaatatggagagaaatatcggtgtgtggaaatgtatttagcctacgtgaaaccagatcggctcagcagagaggaaaaatggtggaaattgaaaccaatcagttacaagatggctcgttaattgacctctgtggtgcaacattgttatggcgtactgcagaaggcctttcccacactcctaccgtgaagcatttagaagctttaagacaggaaatcaatgcagcacgacctcagtgccctgtagggttcaacacactagcatttcctagtatgaagaggaaagacgttgtagatgaaaaacaaccatgggtatatctaaactgcggccatgtacatggctatcataactggggaaacaaagaagaacgtgatggaaaagatcgtgaatgtcctatgtgtaggtctgttggtccctatgttcctctgtggcttggatgtgaagctggattttatgtggacgccggccctccaacccatgcgtttagcccgtgtgggcatgtgtgttcagaaaagacaactgcctattggtcccagatcccacttcctcatggtactcatacttttcatgcagcctgtcccttttgtgcacatcagttggctggtgaacaaggctacatcagacttatttttcaaggacctctagactaacagaccattgtcttgcaggactacattataaatttataagctaagtgagttgggttttcgaacctgttgtccacgtcacagtttttctgctctggtcatttgcattaagatgaagaattttttaaaacatttataataaatagtagcaatttctgagcaaaaatctgggaaactcaagcaaaggaatttctgaaagtatcagtcttctgaattctgagttttgaaaatatattttgaggagaaaaagacatagtctaatttgatgccttccttttagtgtttttgaatcacctatcctcagtgctgaaattgttttgtataactgagggtactgttggttcaaactatgttagtttacagtttgttgcaaacattgtaaaatacagcgacatgtatattaacttttttctatttatctttattatagaaaataccttagaatgttcttgatagagtagcatggtaacgatggtgtcacacccttggtgtgaatggtagcttagtgagcaacctagctcaaggatttgcaaagttaggaagaaggacgagagagcctctctccccaccccaatctaaatatggaatttggtaaattagaatactttgtaatttgtaagaccaaattcatactaattacccgcgtgaaaggtgtttgtttttaacaacattgaagataatcaggaaagattttttcttaatgtttctctcgagcgtagtactataacaaaaacttaatgctaagaaacattttatatgctcctttggatatgcaatttaatctagattatctatttttctcccatgataactaatctgtttttagtatcagcagcatttggcaagtttattttttggatataaactgtggttcatctgttcactgtttctagaaaaaaatcattgccataagaaaaagtataaattagcaagaaaggagagtgacttgatttgcttttggaaaaagaaatgcttaattaattattctgtatttggccttattcgggcattaggaaatctagagatctaaagggttgaatgacaatagtgcccccgtttttagcagaccagccttaactctgggtttgaatcctaaggagattgccacagtgagacttaaggaaatgtttggttggcagatgagcaccaatgactgcagcgtggagtgacgcactgcatggtctgtttattctctaattccaatatgtcttttgcttccagaagcaagaaaagtttcttctctcccctccttcccacccttttttcaaaggcaccacaagtatagacagttgcactacatcaaatctttttttgacacttgtagaaaccagtacacttttagattagacagtatcttcttttaatattttgatttgttttcctttagtttgaaaagttgtataatacttaactgactgtagcaaagttttatatgtggtagcatacctttaatttatcctattacaaaactgttctgaattttcttttggtttttaaaaaacaaaacttgttgcttagaagccatgaattattttattttacttcaactgtcgaaacttccttgttttaaaaaatgatcatttgggttcactcaggaaatgcatgtcaggaaacttgtattataagtttattagttgtgatgtatcagtaactgctgttacccctttttcaaagaaatgtaattgattttgaagttttctagattgtcacatgctttgtgactaatgcaagaaagcaagtcctgtgttgtatttgttctagtcatttttattcaggctatatattgtagcttaatttttatttgcaattaatttatttaaactaagtaaatacttttcaaaata

SEQ ID NO: 3196 - protein, 418 aa, Homo sapien
MFSPDQENHPSKAPVKYGELIVLGYNGSLPNGDRGRRKSRFALFKRPKANGVKPSTVHIACTPQAAKAISNKDQHSISYTLSRAQTVVVEYTHDSNTDMFQIGRSTESPIDFVVTDTVPGSQSNSDTQSVQSTISRFACRIICERNPPFTARIYAAGFDSSKNIFLGEKAAKWKTSDGQMDGLTTNGVLVMHPRNGFTEDSKPGIWREISVCGNVFSLRETRSAQQRGKMVEIETNQLQDGSLIDLCGATLLWRTAEGLSHTPTVKHLEALRQEINAARPQCPVGFNTLAFPSMKRKDVVDEKQPWVYLNCGHVHGYHNWGNKEERDGKDRECPMCRSVGPYVPLWLGCEAGFYVDAGPPTHAFSPCGHVCSEKTTAYWSQIPLPHGTHTFHAACPFCAHQLAGEQGYIRLIFQGPLD

SEQ ID NO: 3197 - DNA, 644 bp, Homo sapien
gctccctggggaacccagcaggcggcgaagatggcggagaacagcggtcgcgccggcaagagcagcgggagcggcgcggggaagggggcggtgtccgcagagcaggtgattgctggcttcaaccgccttcggcaggaacagcgaggcctggcatccaaagcagctgagttggagatggagttgaatgagcacagcctagtgatcgatacactgaaggaggtagatgaaactcgtaagtgctaccgcatggttggaggagtgctggtggagcgaactgtcaaagaggtgctgcccgctttggagaacaacaaggagcagatacagaagatcattgagacactgacacagcagcttcaggcaaagggaaaagaactaaatgaattccgggaaaagcacaacattcgtctcatgggagaagatgagaagccagcagccaaggaaaactcagaaggggctggggctaaggccagctcagctggagtgttggtctcctagggaccaaggcctttgcatttttttctaccctgactcccacttctaatttctctttattgttattattattattttctctgctattgtaatatttttttgttaattaaatgttttggtcagaatcttaaaaaaaaaaaaaaaaaaaaaaa

SEQ ID NO: 3198 - protein, 154 aa, Homo sapien
MAENSGRAGKSSGSGAGKGAVSAEQVIAGFNRLRQEQRGLASKAAELEMELNEHSLVIDTLKEVDETRKCYRMVGGVLVERTVKEVLPALENNKEQIQKIIETLTQQLQAKGKELNEFREKHNIRLMGEDEKPAAKENSEGAGAKASSAGVLVS

SEQ ID NO: 3199 - DNA, 5214 bp, Homo sapien
gcggccgcgccaccgccggagagggaggcccgagcgcaggagcctctggtggatgggtgcagcggcggcgggaggacgcggaagaggagccccgggggtagcggcggcgcgagcaggggcgcggggaccgggctgtctgaggtgcgcgccgcgctggggctcgcgctctacctgatcgcgctgcggacgctggtgcagctctcgctgcagcagctcgtgctacgcggggccgctggacaccgcggggagttcgacgcgctccaagccagggattatcttgaacacataacctccattggccccaggactacaggaagtccagaaaatgaaattctgaccgtgcactaccttttggaacagattaaactgattgaagtgcaaagcaacagccttcataagatttcagtagatgtacaacggcccacaggctcttttagcattgatttcttgggaggttttacaagctattatgacaacatcaccaatgttgtggtaaagctggaacccagagatggagcccagcatgctgtcttggctaattgtcattttgactcagtagcaaactcaccaggtgccagtgatgatgcagttagctgctcagtgatgctggaagtccttcgcgtcttgtcaacatcttcagaagccttgcatcatgctgtcatatttctctttaatggtgctgaggaaaatgtcttgcaagccagtcatggtttcattactcagcacccctgggctagcttgattcgtgcattcattaacctagaggcagcaggtgtaggagggaaagaacttgtattccaaacaggtcctgaaaatccttggttggttcaagcttatgtttcagcagctaaacacccttttgcttctgtggtggctcaggaggtttttcagagtggaatcattccttcagatactgactttcgtatctacagggattttgggaacattccaggaatagacttagcttttattgagaatggatacatttatcacaccaagtatgacacagcggacagaattctaacagattccattcagagagcaggtgacaacattttagcagttcttaagcatctagctacatctgatatgctggctgctgcttctaagtatcgacatggaaacatggtcttctttgatgtgctgggcctgtttgtcattgcctacccctctcgtattggctcaatcataaactacatggtggtaatgggtgttgttttgtacctgggcaaaaaatttttgcagcccaaacataagactggtaactacaagaaggacttcttgtgtggacttggcatcactttgatcagctggttcactagccttgttaccgttctcattatagcagtgttcatctctcttattggacagtctctctcatggtataaccacttctatgtctccgtttgtctgtatggaactgcaactgtagccaaaataatacttatacatactcttgcgaaaagattttattacatgaatgccagtgcccagtatctgggagaagtattttttgacatttcgctgtttgtccattgctgttttcttgttaccctcacttaccaaggactttgctcggcgtttattagtgctgtctgggtagcattcccattgctcacaaagctctgtgtgcataaggacttcaagcagcatggtgcccaaggaaaatttattgctttttaccttttggggatgtttattccttatctttatgcattgtacctcatctgggcagtatttgagatgtttacccctatcctcgggagaagtggttctgaaatcccacctgatgttgtgctggcatccattttggctggctgtacaatgattctctcgtcctattttattaacttcatctaccttgccaagagcacaaaaaaaaccatgctaactttaactttggtatgtgcaattacattcctccttgtttgcagtggaacattttttccatatagctccaatcctgctaatccgaagccaaagagagtgtttcttcagcatatgactagaacattccatgacttggaaggaaatgcagttaaacgggactctggaatatggatcaatgggtttgattatactggaatttctcacataacccctcacattcctgagatcaatgatagtatccgagctcactgtgaggagaatgcacctctttgtggttttccttggtatcttccagtgcactttctgatcaggaaaaactggtatcttcctgccccagaagtttctccaagaaatcctcctcatttccgactcatatccaaagaacagacaccttgggattctataaaattgacttttgaagcaacaggaccaagccatatgtccttctatgttcgagcccacaaagggtcaacactttctcagtggtctcttggcaatggcaccccagtcacaagtaaaggaggagactactttgtcttttactcccatggactccaggcctctgcatggcagttctggatagaagtgcaggtttcagaagaacatcctgaaggaatggtcaccgtggccattgctgcccactatctgtctggggaagacaagagatcccctcaactggatgctctgaaggaaaagttcccagattggacatttccctctgcctgggtgtgcacctacgatctctttgtattttaatcttgtggatgagctctaagtacatgcccagtggatactccatgtgacatggtttatccctatgttacgtggatgtttgtaacgtaagtcaatgaattttaatgatcatatgttcaaagagctttctgggttaacgcttttcagggccaagcactataagggtttagctgtggcgcagtgatgcatggcctgttgacacttgaaaatgccagtcttttggcacttcagcacatgtgggtactgccactacacacacgtcattttatatgaccttaaggacaaagccaacaatccacttcaatagctgcccctttaggatcaagaaagatgtacactgtcagagcattgttaatgagacaaaagttgtttccaatttaagccccaaaaccatttgttgtattagtggatggtgggtaaaatatcattcactgaggtaatgattccccttgagaatataactctgtgtaggtcactggaaagtgattgccatagggctgggagagaagcattgcactcttgaggctgtagcctgtgtcaagctgtttcttcaggcagcctctcaaatgtgctttgtctctctgtgctgaggcctggaccctgtgctgagctggtgactcactgtcctgacaagtggacacacagatgcactgctgtgctgctttcctgaggtggttttctatgcctgttttcctctgaaacatgtctgttacccctctccatcttaccaagttgaaaaggggaatatttggccacatacccctctggttttcgtaggttcttttggttcagaatattgtttgtgccagtacatgaccttaacttccttcctcagagcactgagctgccatctgggctattctggggtagaaggaaggctgggagtggtgggaattttataaatatttattctcttttctttgtttcataggagtcttgtgttatacaaggttagtccttcatggtataatcttactgatgcactgggcctatctttttgttttccagccagttgaatagattagtttttctcagtaacttactatccagcagactggctttcctgagacttgaggttgtggcttatactggaatgagaccactgtacgtgtaggtggttcagatcctgcgtaatggcagcatgaggacttaaaaggtggttttcattttgaagatggctatgtagcttgtaaggtgtatcacagcagtacctctcatggctttttggttccagcagtgagggcattggtgagatcaatggtaaactgtgcaagctttctttttatcattaggaaatgtgaaacgttggacaaattttgagttttaacaaggacaaaaagttgaaagaaaaggcacagttaaaaaagggtggctagatttatcttgggtgatggaggaaatgagagaggaatgctcttgaaaggtggtctgtggatctgtctgaatagaaagagcacagtaagtatgcattgccggagaaaacgtccttgaagctgcttgtctcatgtgtatgatgtgctttttaaatcatgcccctcgttgcctgcctaatctgtgactccctaaaaactaactgggcccatgtagatggggctgcaaccagagctgaataacatgttaggctcacacatgcatcagcactgcacactggaatcattgctcttcctggactttgtagaaatcagtctcaagtgcttcaagagtctggctcctgctacttttatctgtcaggtagcacataaggtttgcagggtttatattttgtatagaatcacagttgtggagaaaaagtaataatttctcaatgaattttaaaaatgggcctattttctatccccgtggttcatctgatataattagtgttccctgtgaattccccccctctatgggaaggatgcctttactctttatcagtaataaattatgactgttttcatattgccttagggttatttccctgtgtaaaccattgtcttttgttttggttttctttagcattatgaagctttggtattgtacaaggtcagtagtaagatgctcactagtctcagggcttgtgtaatattctgggaggtcatttaaatgccagaaatggtcaagcaattatacacagtatttatgactctgttaagcataccgtttgtctgtcacattagtagattctgagattaaaaaaaatttttaaagagtgatcatttaaataatttctaaaagggtcttttcaagctctaacaaagtcactaacaaatgcattattttctacagaattagatgttagtagtacagtactgcatattcagggaaaaagtgtgaggaattgatttcaaaatagttcgttcttgtgtttgacctaagaatgattgtcgcatgaagtgtttgtttttacagtttagcatatataaacaaacatgataggattccttaagatgttaccacccagggggccacaagccagcctgctgtctcaggaagctgtagaaggagtgtttgtcaatttcttgtcactggtttgctgacttactgaggattaattgttgccttacaatgttactgaaataaactgtttaatat

SEQ ID NO: 3200 - protein, 881 aa, Homo sapien
AAAPPPEREARAQEPLVDGCSGGGRTRKRSPGGSGGASRGAGTGLSEVRAALGLALYLIALRTLVQLSLQQLVLRGAAGHRGEFDALQARDYLEHITSIGPRTTGSPENEILTVHYLLEQIKLIEVQSNSLHKISVDVQRPTGSFSIDFLGGFTSYYDNITNVVVKLEPRDGAQHAVLANCHFDSVANSPGASDDAVSCSVMLEVLRVLSTSSEALHHAVIFLFNGAEENVLQASHGFITQHPWASLIRAFINLEAAGVGGKELVFQTGPENPWLVQAYVSAAKHPFASVVAQEVFQSGIIPSDTDFRIYRDFGNIPGIDLAFIENGYIYHTKYDTADRILTDSIQRAGDNILAVLKHLATSDMLAAASKYRHGNMVFFDVLGLFVIAYPSRIGSIINYMVVMGVVLYLGKKFLQPKHKTGNYKKDFLCGLGITLISWFTSLVTVLIIAVFISLIGQSLSWYNHFYVSVCLYGTATVAKIILIHTLAKRFYYMNASAQYLGEVFFDISLFVHCCFLVTLTYQGLCSAFISAVWVAFPLLTKLCVHKDFKQHGAQGKFIAFYLLGMFIPYLYALYLIWAVFEMFTPILGRSGSEIPPDVVLASILAGCTMILSSYFINFIYLAKSTKKTMLTLTLVCAITFLLVCSGTFFPYSSNPANPKPKRVFLQHMTRTFHDLEGNAVKRDSGIWINGFDYTGISHITPHIPEINDSIRAHCEENAPLCGFPWYLPVHFLIRKNWYLPAPEVSPRNPPHFRLISKEQTPWDSIKLTFEATGPSHMSFYVRAHKGSTLSQWSLGNGTPVTSKGGDYFVFYSHGLQASAWQFWIEVQVSEEHPEGMVTVAIAAHYLSGEDKRSPQLDALKEKFPDWTFPSAWVCTYDLFVF

SEQ ID NO: 3201 - DNA, 1224 bp, Homo sapien
gttcggagcgggcgagcggagttagcagggctttactgcagagcgcgccgggcactccagcgaccgtggggatcagcgtaggtgagctgtggccttttgcgaggtgctgcagccatagctacgtgcgttcgctacgaggattgagcgtctccacccagtaagtgggcaagaggcggcaggaagtgggtacgcaggggcgcaaggcgcacagcctctagacgactcgctttccctccggccaacctctgaagccgcgtcctactttgacagctgcagggccgcggcctggtcttctgtgcttcaccatctacataatgaatcccagtatgaagcagaaacaagaagaaatcaaagagaatataaagaatagttctgtcccaagaagaactctgaagatgattcagccttctgcatctggatctcttgttggaagagaaaatgagctgtccgcaggcttgtccaaaaggaaacatcggaatgaccacttaacatctacaacttccagccctggggttattgtcccagaatctagtgaaaataaaaatcttggaggagtcacccaggagtcatttgatcttatgattaaagaaaatccatcctctcagtattggaaggaagtggcagaaaaacggagaaaggcgctgtatgaagcacttaaggaaaatgagaaacttcataaagaaattgaacaaaaggacaatgaaattgcccgcctgaaaaaggagaataaagaactggcagaagtagcagaacatgtacagtatatggcagagctaatagagagactgaatggtgaacctctggataattttgaatcactggataatcaggaatttgattctgaagaagaaactgttgaggattctctagtggaagactcagaaattggcacgtgtgctgaaggaactgtatcttcctctacggatgcaaagccatgtatatgaaatgcattaatatttgactgttgagaattttactgccgaagtttacctccactagttctttgtagcagagtacataactacataatgccaactctggaatcaaatttccttgtttgaatcctgggaccctattgcattaaagtacaaatactatgtatttttaatctatgatggtttatgtgaataggattttctcagttgtcagccatgacttatgtttattactaaataaacttcaaactcctgtggaaaaaaaaaaaaaaaaaaaaaaaaaaaaaaa

SEQ ID NO: 3202 - protein, 209 aa, Homo sapien
MNPSMKQKQEEIKENIKNSSVPRRTLKMIQPSASGSLVGRENELSAGLSKRKHRNDHLTSTTSSPGVIVPESSENKNLGGVTQESFDLMIKENPSSQYWKEVAEKRRKALYEALKENEKLHKEIEQKDNEIARLKKENKELAEVAEHVQYMAELIERLNGEPLDNFESLDNQEFDSEEETVEDSLVEDSEIGTCAEGTVSSSTDAKPCI

SEQ ID NO: 3203 - DNA, 4348 bp, Homo sapien
gggaggcccagggagaacggggaagggacatttagtttgagacggtgctgagataggatcatgaaggaagaggtgaagggaattcctgtaagagtggcgctgcgttgtcgccctctggtccccaaagagattagcgagggctgccagatgtgcctttccttcgtgcccggagagcctcaggtggtggttggtacagataaatccttcacctacgattttgtatttgatccctctactgaacaggaagaagtcttcaatacagcagtagcgccactcataaaaggtgtatttaaaggatataatgcaacggtcctggcctatgggcagactggctctggaaaaacctattcaatgggaggtgcatatactgcagagcaagagaatgaaccaacagttggggttattcctagggtaatacaactgctcttcaaagaaattgataaaaagagtgactttgaatttactctgaaagtgtcttacttagagatttacaatgaagaaattttggatcttctatgtccatctcgtgagaaagctcaaataaatatacgagaggatcctaaggaaggcataaagattgtgggactcactgagaagactgttttggttgccttggatactgtttcctgtttggaacagggcaacaactctaggactgtggcctccacggctatgaactcccagtcgtcccgatctcatgccatctttacaatctccttagagcaaggaaagaaaagtgacaagaatagcagctttcgctccaagctgcatcttgtagacctcgctggatcagaaagacagaagaaaaccaaggctgaaggggatcgtctaaaagagggtattaatattaaccgaggcctcctatgcttgggaaatgtaatcagtgctcttggagatgacaaaaagggtggctttgcgccctacagagattccaagttgactcgactgcttcaagattctctaggaggtaatagccatactcttatgatagcctgtgtgagtcctgctgactccaatctagaggaaacattaaatacccttcgctatgctgacagagcaagaaaaatcaagaacaaacctattgttaatattgatccccagacagctgaacttaatcatctaaagcaacaggtacaacagctacaagtcttgttgctacaggcccatggaggtaccctgcctggatctataactgtggaaccatcagagaatctacaatccctgatggagaagaatcagtccctggtagaggagaatgaaaaattaagtcgtggtctgagcgaggcagctggtcagacagcccagatgttggagaggatcatttggacagagcaagcgaatgaaaaaatgaacgccaagctagaagagctcaggcagcatgcggcctgcaaactggatcttcaaaagctagtggagactttggaagaccaggaattgaaagaaaatgtagagataatttgtaacctgcagcaattgattacccagttatcggatgaaactgttgcttgcatggctgcagccattgatactgcggtggagcaagaagcccaagtagaaaccagtccagagacgagcaggtcttctgacgcttttaccactcagcatgctctccgtcaagcgcagatgtctaaggagctggttgagttgaataaagcgcttgcactgaaagaggccctggctaggaagatgactcagaatgacagccaactgcagcctattcagtaccaataccaggataacataaaagagccagaattagaagtcatcaatctgcaaaaggaaaaggaagaattggttcttgaacttcagacagcaaagaaggatgccaaccaagccaagttgagtgagcgccgccgcaaacgtctccaggagctggagggtcaaattgctgatctgaagaagaaactgaatgagcagtccaaacttctgaaactaaaggaatccacagagcgtactgtctccaaactgaaccaggagatacggatgatgaaaaaccagcgggtacagttaatgcgtcaaatgaaagaagatgctgagaagtttagacagtggaagcagaaaagagacaaagaagtaatacagttaaaagaacgagaccgtaagaggcaatatgagctgctgaaacttgaaagaaacttccagaaacaatccaatgtgctcagacgtaaaacggaggaggcagcagctgccaacaagcgtctcaaggatgctctccagaaacaacgggaggttgcagataagcggaaagagactcagagccgtggaatggaaggcactgcagctcgagtgaagaattggcttggaaacgaaattgaggttatggtcagtactgaggaagccaaacgccatctgaatgacctccttgaagatagaaagatcctggctcaagatgtggctcaactcaaagaaaaaaaggaatctggggagaatccacctcctaaactccggaggcgtacattctcccttactgaagtgcgtggtcaagtttcggagtcagaagattctattacaaagcagattgaaagcctagagactgaaatggaattcaggagtgctcagattgctgacctacagcagaagctgctggatgcagaaagtgaagacagaccaaaacaacgctgggagaatattgccaccattctggaagccaagtgtgccctgaaatatttgattggagagctggtctcctccaaaatacaggtcagcaaacttgaaagcagcctgaaacagagcaagaccagctgtgctgacatgcagaagatgctgtttgaggaacgaaatcattttgccgagatagagacagagttacaagctgagctggtcagaatggagcaacagcaccaagagaaggtgctgtaccttctcagccagctgcagcaaagccaaatggcagagaagcagttagaggaatcagtcagtgaaaaggaacagcagctgctgagcacactgaagtgtcaggatgaagaacttgagaaaatgcgagaagtgtgtgagcaaaatcagcagcttctccgagagaatgaaatcatcaagcagaaactgaccctcctccaggtagccagcagacagaaacatcttcctaaggatacccttctatctccagactcttcttttgaatatgtccagcctaagccaaaaccttctcgtgttaaagaaaagttcctggagcaaagcatggacatcgaggatctaaaatattgttcagagcattctgtgaatgagcatgaggatggtgatggtgatgatgatgagggggatgacgaggaatggaagccaacaaaattagttaatgtgtccaggaagaacatccaagggtgttcctgcaagggctggtgtggaaacaagcaatgtgggtgcaggaagcaaaagtcagactgtggtgtggactgttgctgtgaccccacaaagtgtcggaaccgccagcaaggcaaggatagcttgggcactgttgaacggacccaggattcagaaagctccttcaaactggaggatcctaccgaggtgaccccaggattgagcttctttaatcccgtctgtgccacccccaatagcaagatcctgaaagagatgtgcgatgtggagcaggtgctgtcaaagaagactcccccagctccctccccttttgacctcccagagttgaaacatgtagcaacagaataccaagaaaacaaggctccagggaagaaaaagaaacgggctctggccagcaacaccagcttcttctctggctgctcccctatcgaagaagaggcccactgaagttggagtcatcatctctacccccagtctggcttgggagatgctttcaggttgcagccagaaggggttttttaaatgacttctctggatttcaggtttcttgctgttgaaaaaaggaacaaagcgttactgaaaagaaggtaacctttgttggatgtgggccttagcctccaggtccagactactactctatgttctccagaagggtgctaagtcacctactgaagagagaaccaactgactttcctattgactcatcaggaaccagtcctcagtctggtcaagttgtttcttatttgtgagcagttcaggctatctcctgatggggatgaggccaaggctttcttatcttttggttgtctctgcttaatggaggagcctggcctaggatggaggcctggcttagatctttcattccacctcaggaatgaggttgtgatctttcctgtcctgaccctctctgaattatgtttcaatagtactcttgattgtctgccatgttgttgaagcaaatgaattatttttaaatgttaagtaagtaaataaaccttagcccgtctttttttttttttttttttttttttttttt

SEQ ID NO: 3204 - protein, 1232 aa, Homo sapien
MKEEVKGIPVRVALRCRPLVPKEISEGCQMCLSFVPGEPQVVVGTDKSFTYDFVFDPSTEQEEVFNTAVAPLIKGVFKGYNATVLAYGQTGSGKTYSMGGAYTAEQENEPTVGVIPRVIQLLFKEIDKKSDFEFTLKVSYLEIYNEEILDLLCPSREKAQINIREDPKEGIKIVGLTEKTVLVALDTVSCLEQGNNSRTVASTAMNSQSSRSHAIFTISLEQGKKSDKNSSFRSKLHLVDLAGSERQKKTKAEGDRLKEGININRGLLCLGNVISALGDDKKGGFAPYRDSKLTRLLQDSLGGNSHTLMIACVSPADSNLEETLNTLRYADRARKIKNKPIVNIDPQTAELNHLKQQVQQLQVLLLQAHGGTLPGSITVEPSENLQSLMEKNQSLVEENEKLSRGLSEAAGQTAQMLERIIWTEQANEKMNAKLEELRQHAACKLDLQKLVETLEDQELKENVEIICNLQQLITQLSDETVACMAAAIDTAVEQEAQVETSPETSRSSDAFTTQHALRQAQMSKELVELNKALALKEALARKMTQNDSQLQPIQYQYQDNIKEPELEVINLQKEKEELVLELQTAKKDANQAKLSERRRKRLQELEGQIADLKKKLNEQSKLLKLKESTERTVSKLNQEIRMMKNQRVQLMRQMKEDAEKFRQWKQKRDKEVIQLKERDRKRQYELLKLERNFQKQSNVLRRKTEEAAAANKRLKDALQKQREVADKRKETQSRGMEGTAARVKNWLGNEIEVMVSTEEAKRHLNDLLEDRKILAQDVAQLKEKKESGENPPPKLRRRTFSLTEVRGQVSESEDSITKQIESLETEMEFRSAQIADLQQKLLDAESEDRPKQRWENIATILEAKCALKYLIGELVSSKIQVSKLESSLKQSKTSCADMQKMLFEERNHFAEIETELQAELVRMEQQHQEKVLYLLSQLQQSQMAEKQLEESVSEKEQQLLSTLKCQDEELEKMREVCEQNQQLLRENEIIKQKLTLLQVASRQKHLPKDTLLSPDSSFEYVQPKPKPSRVKEKFLEQSMDIEDLKYCSEHSVNEHEDGDGDDDEGDDEEWKPTKLVNVSRKNIQGCSCKGWCGNKQCGCRKQKSDCGVDCCCDPTKCRNRQQGKDSLGTVERTQDSESSFKLEDPTEVTPGLSFFNPVCATPNSKILKEMCDVEQVLSKKTPPAPSPFDLPELKHVATEYQENKAPGKKKKRALASNTSFFSGCSPIEEEAH

SEQ ID NO: 3205 - DNA, 1763 bp, Homo sapien
atcaagcaggggcagggctggcgctgcggcgggagatgctgtcgggccgcggcggcgcttggcagccaggagctctgcattgaaggcactggggtaaagtgaatgccgaagacagaagatttggatgatacaccactgactttctttgtttggaatacacgttatgaaccctttctggagcatgtctacaagctctgtacgcaaacgatctgaaggtgaagagaagacattaacaggggacgtgaaaaccagtcctccacgaactgcaccaaagaaacagctgccttctattcccaaaaatgctttgcccataactaagcctacatctcctgccccagcagcacagtcaacaaatggcacgcatgcgtcctatggacccttctacctggaatactctcttcttgcagaatttaccttggttgtgaagcagaagctaccaggcgtctatgtgcagccatcttatcgctctgcattaatgtggtttggagtaatattcatacggcatggactttaccaagatggcgtatttaagtttacagtttacatccctgataactatccagatggtgactgtccacgcttggtgttcgatattcctgtctttcacccgctagttgatcccacctcaggtgagctggatgtgaagagagcatttgcaaaatggaggcggaaccataatcatatttggcaggtattaatgtatgcaaggagagttttctacaagattgatacagcaagccccctgaacccagaggctgcagtactgtatgaaaaagatattcagctttttaaaagtaaagttgttgacagtgttaaggtgtgcactgctcgtttgtttgaccaacctaaaatagaagacccctatgcaattagcttttctccatggaatccttctgtacatgatgaagccagagaaaagatgctgactcagaaaaagcctgaagaacagcacaataaaagtgttcatgttgctggcctgtcatgggtaaagcctggctcagtacagcctttcagtaaagaagagaaaacagtggcgacttaagagatggtgaatctggtgcaccatgcactttcctgctagactctggcctagttcaagctgaccaatggcagaggactgcctgaagagtaaaactgtgtgaacaatgactgactgccagtgttttccatgtatgcataggttctaacagcagggtttggaaacctgtctctaagtaatgcattacttctgtcagaagtgtcttagggtggttatctagttcagtactccaaattattggggaccttgaggcttaagtaagtatttttctgaatataatgctaaaggtaagttgcattcatttaaactaatagagcagacagaattcagcactacttaatagtttataaatcagtggtttcagttgtatatatgttaggaaatggagaggtatagagagagcaggttccatagctcagcacttttaagtggaagatcatttgaatctcagtcttcagcctgcactgatttgtagcctgcactgtcttactgatttacaaactgaaatcactgagaaatgtctttagttcagtgagaagaaaccagaacacttgttcctagtgttgtgttgttttttttaagcaaattacttactgtatttttatggcaggagggagaaaaagtgttacaacggcttctaatgaagtccggtatttaaatgataaatgactaatgtgtttagtagagacaaaataaaccaataaatgattgttctttgccattt

SEQ ID NO: 3206 - protein, 292 aa, Homo sapien
MNPFWSMSTSSVRKRSEGEEKTLTGDVKTSPPRTAPKKQLPSIPKNALPITKPTSPAPAAQSTNGTHASYGPFYLEYSLLAEFTLVVKQKLPGVYVQPSYRSALMWFGVIFIRHGLYQDGVFKFTVYIPDNYPDGDCPRLVFDIPVFHPLVDPTSGELDVKRAFAKWRRNHNHIWQVLMYARRVFYKIDTASPLNPEAAVLYEKDIQLFKSKVVDSVKVCTARLFDQPKIEDPYAISFSPWNPSVHDEAREKMLTQKKPEEQHNKSVHVAGLSWVKPGSVQPFSKEEKTVAT

SEQ ID NO: 3207 - DNA, 3697 bp, Homo sapien
cccaagactgtccccgctggaggcggtagagggatccagaagtaatgagatgctaatgagtcgcgaataaagcccgggcggcgccccgcgcccctcgcggaagcccacactccgcgcgactccaggcgcacgccccgggccgccccgcatcccagcatccccgcccgatctcggcgtttccgcccccgcccccgcccccgccctcccacccgctcagacctggttgccagcccaacaggaagcggcccctcccggcttcggagccgccgccactcgtctctgcccagctgctgccctccccaggaggcctccatggcttcacctacctccaccaacccagcgcatgcccactttgagagcttcctgcaggcccagctgtgccaggacgtgctgagcagcttccaggagctgtgtggggccctggggctggaacccggtggggggctgccccagtaccacaagatcaaggaccagctcaactactggagcgccaagtcactgtggaccaagctggacaagcgagcaggccagcctgtctaccagcagggccgggcctgcaccagcaccaagtgcctggtggtgggtgctggaccttgcgggctgcgggtcgctgtggagctggcgctgctgggggcccgagtggtgctggtggaaaagcgcaccaagttctctcgccacaacgtgctccacctctggcccttcaccatccacgacctgcgggcactcggtgctaagaagttctacgggcgcttctgcaccggcaccctggaccacatcagcatcaggcagctccagctgcttctgctgaaggtagcattgctgctgggggtggaaattcactggggtgtcactttcactggcctccagccccctcctaggaaggggagtggctggcgtgcccagctccaacccaacccccctgcccagctggccaactatgaatttgacgtccttatctcggctgcaggaggtaaattcgtccctgaaggcttcaaagttcgagaaatgcgaggcaaactggccattggcatcacagccaactttgtgaatggacgcaccgtggaggagacacaggtgccggagatcagtggtgtagccaggatctacaaccagagcttcttccagagccttctcaaagccacaggcattgatctggagaacattgtgtactacaaggacgacacccactactttgtgatgacagccaagaagcagtgcctgctgcggctgggggtgctgcgccaggactggccagacaccaatcggctgctgggcagtgccaatgtggtgcccgaggctctgcagcgctttacccgggcagctgctgactttgccacccatggcaagctcgggaaactagagtttgcccaggatgcccatgggcagcctgatgtctctgcctttgacttcacgagcatgatgcgggcagagagttctgctcgtgtgcaagagaagcatggcgcccgcctgctgctgggactggtgggggactgcctggtggagcccttctggcccctgggcactggagtggcacggggcttcctggcagcctttgatgcagcctggatggtgaagcggtgggcagagggcgctgagtccctagaggtgttggctgagcgtgagagcctgtaccagcttctgtcacagacatccccagaaaacatgcatcgcaatgtggcccagtatgggctggacccagccacccgctaccccaacctgaacctccgggcagtgacccccaatcaggtacgagacctgtatgatgtgctagccaaggagcctgtgcagaggaacaacgacaagacagatacagggatgccagccaccgggtcggcaggcacccaggaggagctgctacgctggtgccaggagcagacagctgggtacccgggagtccacgtctccgatttgtcttcctcctgggctgatgggctagctctgtgtgccctggtgtaccggctgcagcctggcctgctggaaccctcagagctgcaggggctgggagctctggaagcaactgcttgggcactaaaggtggcagagaatgagctgggcatcacaccggtggtgtctgcacaggccgtggtagcagggagtgacccactgggcctcattgcctacctcagccacttccacagtgccttcaagagcatggcccacagcccaggccctgtcagccaggcctccccagggacctccagtgctgtattattccttagtaaacttcagaggaccctgcagcgatcccgggccaaggaaaatgcagaggatgctggtggcaagaagctgcgcttggagatggaggccgagaccccaagtactgaggtgccacctgacccagagcctggtgtacccctgacacccccatcccaacaccaggaggccggtgctggggacctgtgtgcactttgtggggaacacctctatgtcctggaacgcctctgtgtcaacggccatttcttccaccggagctgcttccgctgccatacctgtgaggccacactgtggccaggtggctatgagcagcacccaggagatggacatttctactgcctccagcacctgccccagacagaccacaaaaaggaaggcagcgatagaggccctgagagtccggagctccccacaccaagtgagaatagcatgccaccaggcctctcaactcccacagcctcgcaggagggggccggtcctgttccagatcccagccagcccacccgtcggcagatccgcctctccagcccggagcgccagcggttgtcctcccttaaccttacccctgacccggaaatggagcctccacccaagcctccccgcagctgctccgccttggcccgccacgccctggagagcagctttgtgggctggggcctgccagtccagagccctcaagctcttgtggccatggagaaggaggaaaaagagagtcccttctccagtgaagaggaagaagaagatgtgcctttggactcagatgtggaacaggccctgcagacctttgccaagacctcaggcaccatgaataactacccaacatggcgtcggactctgctgcgccgtgcgaaggaggaggagatgaagaggttctgcaaggcccagaccatccaacggcgactaaatgagattgaggctgccttgagggagctagaggccgagggcgtgaagctggagctggccttgaggcgccagagcagttccccagaacagcaaaagaaactatgggtaggacagctgctacagctcgttgacaagaaaaacagcttggtggctgaggaggccgagctcatgatcacggtgcaggaattgaatctggaggagaaacagtggcagctggaccaggagctacgaggctacatgaaccgggaagaaaacctaaagacagctgctgatcggcaggctgaggaccaggtcctgaggaagctggtggatttggtcaaccagagagatgccctcatccgcttccaggaggagcgcaggctcagcgagctggccttggggacaggggcccagggctagacgagggtgggccgtctgctttcgttcccacaaagaaagcacctcaccccagcacagtgccacccctgttcatctgggctgcctggcagagagccttgctgtttacaattaaaatgtttctgccccaaaaaaaaaaaaaaaaaaaaaaaaaaaaaaaaaaaaaaaaaaaaaaaaaaaaaaa

SEQ ID NO: 3208 - protein, 1067 aa, Homo sapien
MASPTSTNPAHAHFESFLQAQLCQDVLSSFQELCGALGLEPGGGLPQYHKIKDQLNYWSAKSLWTKLDKRAGQPVYQQGRACTSTKCLVVGAGPCGLRVAVELALLGARVVLVEKRTKFSRHNVLHLWPFTIHDLRALGAKKFYGRFCTGTLDHISIRQLQLLLLKVALLLGVEIHWGVTFTGLQPPPRKGSGWRAQLQPNPPAQLANYEFDVLISAAGGKFVPEGFKVREMRGKLAIGITANFVNGRTVEETQVPEISGVARIYNQSFFQSLLKATGIDLENIVYYKDDTHYFVMTAKKQCLLRLGVLRQDWPDTNRLLGSANVVPEALQRFTRAAADFATHGKLGKLEFAQDAHGQPDVSAFDFTSMMRAESSARVQEKHGARLLLGLVGDCLVEPFWPLGTGVARGFLAAFDAAWMVKRWAEGAESLEVLAERESLYQLLSQTSPENMHRNVAQYGLDPATRYPNLNLRAVTPNQVRDLYDVLAKEPVQRNNDKTDTGMPATGSAGTQEELLRWCQEQTAGYPGVHVSDLSSSWADGLALCALVYRLQPGLLEPSELQGLGALEATAWALKVAENELGITPVVSAQAVVAGSDPLGLIAYLSHFHSAFKSMAHSPGPVSQASPGTSSAVLFLSKLQRTLQRSRAKENAEDAGGKKLRLEMEAETPSTEVPPDPEPGVPLTPPSQHQEAGAGDLCALCGEHLYVLERLCVNGHFFHRSCFRCHTCEATLWPGGYEQHPGDGHFYCLQHLPQTDHKKEGSDRGPESPELPTPSENSMPPGLSTPTASQEGAGPVPDPSQPTRRQIRLSSPERQRLSSLNLTPDPEMEPPPKPPRSCSALARHALESSFVGWGLPVQSPQALVAMEKEEKESPFSSEEEEEDVPLDSDVEQALQTFAKTSGTMNNYPTWRRTLLRRAKEEEMKRFCKAQTIQRRLNEIEAALRELEAEGVKLELALRRQSSSPEQQKKLWVGQLLQLVDKKNSLVAEEAELMITVQELNLEEKQWQLDQELRGYMNREENLKTAADRQAEDQVLRKLVDLVNQRDALIRFQEERRLSELALGTGAQG

SEQ ID NO: 3209 - DNA, 1561 bp, Homo sapien
ggctgacccacctacccgcgatcctgcccatggctgacgggctctttcggcgcagaccctggggtctcgagcagattcgcccggaccccgagtccgaaggcctgtttgacaagcctcccccggaagaccctcccgctgcccgcgggcccaggtcggcgtcggccgcgggcaagaaggctggtcggcgcgcgggcgggagggcgcaggggggccgcgccgggcagcccccgaaggccgcatcgcaccccccgcccaagaaggaggcgcctccactggacgagggctgctatctcgaccattttccgcacctctccatcttcatctacgcagccatcgccttctccatcacctcctgcatctttacctatatccatttacagcttgcctgagtggccagcgcgggacggggtgggcgcaggaccgagcggggagggaaagggaaaacggggctcggcattttgtgttttagaacagcgctgcacccccttcatgtagctttcgatgcttgtttctttccgtctttgttgtcactatctttgtctatcagtacgaaagtacaaagtagctgccggcaatgaaataggggtgctgtttgcacctgcaggttaggggtggaggcgtttagaattttggggtgtgattgagccccgtttataattagaatgcccctggacccctaccactctgtgacgtgggggcacgcgcagggatcccatcattttgtgtttggggagctcagagtgcgcccaatcttggaatctttaagggatgagccagacccagacccgcggccttctagagagggtccggcagggagggtcggcgccctggcccgggatgggccggagccctgtgatgctgcatcgcccccaggaggagccagctgtgccccagagttggcgcggccgagagaggacaagagcgcgcagcaggcgaagctggagggcgggactcgactttgttgtcgctgcccggaggagtcgagactggtacccggaggagctgtctcaccaggagaccacgtcctggaagtgtccgggactcgcgggacctgtggctgcagaccccgccggcacgcaggcccagagctggcgcactcctgaggatgagactctgggggccctagccggggtccacgggagggctgtccttggggactctaggatggcttcgttctggcccggctcacttctggagctgtgagacccaagacaaaaggggctgagggatttctcattgacaagagttcgtgcgggaaaaccacctgacccctagggatttgtcatcttaagactcaaaaggcttaataccaggaaccaccttggcaagatatttacccaccggccatctctgtttactcatgaatgttaaatgttaaaacgcagcgctctaaccctgcatattatttacttgcaaatgtctgtaatctgtaattgtgatgcctctgatggaataaattatctttttcagtctcctctaaaaaaaaaaaaaaaaaaaaaaaaaaaaaaaaaaaaaaaaaaaaaaaaaaaaaaaaaaaaaaaaaaaaaaaaaaaaaaaaaaa

SEQ ID NO: 3210 - protein, 146 aa, Homo sapien [sequence omitted]

SEQ ID NO: 3211 - DNA, 722 bp, Homo sapien
cagggtcagccatgtcatctgagcctcccccaccaccacagccccccacccatcaagcttcagtcgggctgctggacacccctcggagccgtgagcgctcaccatcccctctgcggggcaacgtggtcccaagcccactgcccactcgccggacgaggaccttctcggcgacggtgcgggcttcacaggtccccgtctacaaaggagtctgcaaatgcttctgccggtccaagggccatggcttcattaccccagctgatggcggccccgacatcttcctgcacatctctgatgtggaaggggagtatgtcccagtggaaggcgacgaggtcacctataaaatgtgctccatcccacccaagaatgagaagctgcaggccgtggaggtcgtcatcactcacctggcaccaggcaccaagcatgagacctggtctggacatgtcatcagctcctaggagatggtggaagcaccccttgtcctgtgcttgaggagactttgcggggaggaggcagcagacactggagatgacattcttccacacgagacggggcttcagccggggatggtccctctcaagtatctcctggaggaaggggtatggggggcaggtgtggggtgtggggtgttcccggccatcagcacagcctatgaccattgcaacaacctctcaccatctgaagagcattaaaagcatttaaaaaggaaaaaaaaaaaaaaaaaa

SEQ ID NO: 3212 - protein, 147 aa, Homo sapien
MSSEPPPPPQPPTHQASVGLLDTPRSRERSPSPLRGNVVPSPLPTRRTRTFSATVRASQVPVYKGVCKCFCRSKGHGFITPADGGPDIFLHISDVEGEYVPVEGDEVTYKMCSIPPKNEKLQAVEVVITHLAPGTKHETWSGHVISS

SEQ ID NO: 3213 - DNA, 3443 bp, Homo sapien
ttgatgctctaaatgcagaattaatggagacttcaatgactgatatgtcaattcttagtttctttgaacatttccatatttctcctgtgaagttgcatttgagtttgtctttgggttccggaggtgaagaatcagacaaagaaaaacaggaaatgtttgcagttcattctgtcaacttgctgttgaagagcataggtgctactctgactgatgtggatgaccttatattcaaacttgcttattatgaaattcgatatcagttctacaagagagatcagcttatatggagtgttgttaggcattacagtgaacagttcttgaaacagatgtatgtccttgtattggggttagatgtacttggaaacccatttggattaattagaggtctgtctgaaggagttgaagctttattctatgaacccttccagggtgctgttcaaggccctgaagaatttgcagaggggttagtgattggagtgagaagcctctttggacacacagtaggtggtgcagcaggagttgtatctcgaatcaccggttctgttgggaaaggtttggcagcaattacaatggacaaggaatatcagcaaaaaagaagagaagagttgagtcgacagcccagagattttggagacagcctggccagaggaggaaagggctttctgcgaggagttgttggtggagtgactggaataataacaaaacctgtggaaggtgccaaaaaggaaggagctgctggattctttaaaggaattggaaaagggcttgtgggtgctgtggcccgtccaactggtggaatcgtagatatggccagtagtaccttccaaggcattcagagggcagcagaatcaactgaggaagtatctagcctccgtccccctcgcctgatccatgaagatggcatcattcgtccttatgacagacaggaatctgagggctctgacttacttgagaatcatatcaaaaagttggaaggagagacttaccgataccactgtgctattcctggaagcaagaagacaatccttatggttacaaataggcgagtgttgtgtataaaggaagttgaaatcctgggccttatgtgtgtagactggcaatgtccatttgaagattttgtatttcctcctagtgtcagtgaaaatgtgctaaaaatttcagttaaggaacagggtctgttccacaaaaaagacagtgccaatcaaggctgtgttcgaaaagtttacctgaaggacaccgccacagcagagagagcatgtaatgccattgaggatgcacagtcaacgagacagcagcaaaaattgatgaagcagtcatcagtgagacttctcagaccccaattgccatcttaatcacagacctcaggggctccaacagggagaaaaaacaatcactggtcttgtctataagtcactctgctttatcttgctaaagacaatttttcaagcaatcctttagttttagttttctggaatagctagtattgggttttctagttttttcaccttttagtttttactctaattttgtaaccatgtatatgctagcagtccacttctacgccaccacccaaatgggtcagacccttgaagaaacgtcacttcaaactcagaatgaaattttcattaatattaaaattgtgaagcaaaggtcaataggcttatatttaattaaagccttactgaagaataagaaatgagcttagaatgactagtgttctttgaaaggtttttttatttttgtttttttggggtttttttttttttttttgagaccgagtcttgctctgtcgcccaggctggaatgcagtggtgcgatcttggctcactgcaatctctgcctctcgggttcaagcggttctactgcctcagcctcctgagtagctaggattacaggtgtgtgccaccacgcctgggtaattttttttttttttgtatttttagtagagatgagtttcaccatgttggtcagtctagtctcgaactcctgaccttgtgatccgcatgcctcagcctcccaaagtgctgggattacaggcatgagccaccacggcccgccaaaaggctttaacccatgaacaaatgttggatcctgacattttgtttaagagtgatttgttcaataattgaactgagttaacattcttggtaaaccaggtaattgaatgaagaaaggtcactaaagggagaaatgacatgttttctattttcttttcatgaaaacactgtttttccccctaataaagcatattttactttggtgcttatttttcctccttgcagtctaataaaaaaatctggacaatcaaaccttaaaatagctacactctgccctctgtaatgtagcattcataaaaatttggaagtatttacatcctctttcaagatgagcttatatgacacaattattatttgctgatacatgaaaatactgcactttaagtttctcaagactctgaaatatgtaaaattcaatatttttatattcccagaaattgtttcttacaggttgaaagtcttttaagggcatcacaaattaacatttactcctaatgcacgcctagaatgtattttaaatacttactaagaagaatgaaaattctttggttgttttatatataaataaggcatatataatgacactgtgttctgtgagggagcaggccctgtgagaatcaattcaggacagtatttttttttgtcctttctccatccttgatcagagataaactattaaaactttaaaaaatactcaaaaatatgtaagttttttggttgaacctttagatttgctcataatgtttaacataacaacatttatttcaaatcactgaattcatggagatgtggacacgcttggtttgctctatttttgtttatgtgtgatagtggttctgtcatcatcattcatgttttttaaggcctggtcataaaactttaaattttactagtgttacttaatgtatattctaaaaagagaatgcagtaactaatgccctaaatgtttgatctctgtttgtcattactttttcaaaattatttttttctgtaaagtataatatataaaacttcttgcttaaattgaatttctatattagtggttaattgcagtttattaaagggatcattatcagtaatttcatagcaactgttctagtgttttgtgtttttaaaacagaattaggaatttgagatatctgattatatttttcatatgaatcacagctgttgacaatgtcccatatatttaagaaattatatcatactgatactatttgtaacattttgatttgatttaatctccagggacagaaataattcattggtaaagtgtaataatgcgttttttaaaaatgctttgagaggtaattacttgcatatgagagaaataaaacatttggcacattgtttacaggtgtgaaaaaaaaaaaaaaaaaaaaaaaa

SEQ ID NO: 3214 - protein, 442 aa, Homo sapien
METSMTDMSILSFFEHFHISPVKLHLSLSLGSGGEESDKEKQEMFAVHSVNLLLKSIGATLTDVDDLIFKLAYYEIRYQFYKRDQLIWSVVRHYSEQFLKQMYVLVLGLDVLGNPFGLIRGLSEGVEALFYEPFQGAVQGPEEFAEGLVIGVRSLFGHTVGGAAGVVSRITGSVGKGLAAITMDKEYQQKRREELSRQPRDFGDSLARGGKGFLRGVVGGVTGIITKPVEGAKKEGAAGFFKGIGKGLVGAVARPTGGIVDMASSTFQGIQRAAESTEEVSSLRPPRLIHEDGIIRPYDRQESEGSDLLENHIKKLEGETYRYHCAIPGSKKTILMVTNRRVLCIKEVEILGLMCVDWQCPFEDFVFPPSVSENVLKISVKEQGLFHKKDSANQGCVRKVYLKDTATAERACNAIEDAQSTRQQQKLMKQSSVRLLRPQLPS

SEQ ID NO: 3215 - DNA, 1645 bp, Homo sapien
gcgggagagcgcagcgtcgaccctttgtggacgccgagtggcggtcgctcgccccgccccgcgccgtcgggcgctccttcctcagcggcgggaagctggcggcagcggcggtggcggtggctgagcagaggacccggcgggcggcctcgcgggtcaggacacaatgtttgcacgaggactgaagaggaaatgtgttggccacgaggaagacgtggagggagccctggccggcttgaagacagtgtcctcatacagcctgcagcggcagtcgctcctggacatgtctctggtgaagttgcagctttgccacatgcttgtggagcccaatctgtgccgctcagtcctcattgccaacacggtccggcagatccaagaggagatgacgcaggatgggacgtggcgcacagtggcaccccaggctgcagagcgggcgccgctcgaccgcttggtctccacggagatcctgtgccgtgcagcgtgggggcaagagggggcacatcctgctcctggcttgggggacggccacacacagggtccagtttctgacctttgcccagtcacctcagcacaggcaccaaggcacctgcagagcagcgcctgggagatggatggccctcgagaaaacagaggaagctttcacaagtcacttgatcagatatttgaaacgctggagactaaaaaccccagctgcatggaagagctgttctcagacgtggacagcccctactacgacctggacacagtactgacaggcatgatggggggtgccaggccgggcccctgcgaagggctcgagggcttggctccggccaccccaggccctagctccagctgcaagtccgacctgggcgagctggaccacgtggtggagatcctggtggagacctgagcaggagccctgagtgctcacagccgcctctgacgcattgacactgagcatcactacagtctcagtcaacagtgtgaatgtatcatgttttactttaaatgtgtgtgtgatacttcttcattatgtcctgcgctgcagtgagacctgggtgaaaatcaggaaccgcacacagccacatcttcctagacctaagagtaaattatggaggattttatttatgtctatttatatgtaaatgtcattgaagacaaaggtcaaatatttgtctgtttgtagatcacaggcaccagttggtcttcagggacctcatagcccctcggtggtgccttctcaaggcagtgttcctggaggctcccgtcagggtcagcccatgcacctgccctgggtgaggaagtagcattgctgctggatgagaaacgcctgcgctgctctgttagactggtgctgaaacaaaaggttaaggctaggttgaagtctagaatgaaagaaatctgaatccatgtcattcataaccccttgatctgtagtgtcatgggtgctgccgcaggcagggagtgagctgggggtgcctgcagccttccactcctgccccgcctcaccccacatgctccctgtttctcatgctttctctaacttcctcaccccttaaccaaaaaggtgtgttttcttttgtgcatatagccattcttaaatatcagtgatgtaaacctcactttattaaaaaattatccagcaaacaaaaaaaaaaaaaaaaaa

SEQ ID NO: 3216 - protein, 241 aa, Homo sapien
MFARGLKRKCVGHEEDVEGALAGLKTVSSYSLQRQSLLDMSLVKLQLCHMLVEPNLCRSVLIANTVRQIQEEMTQDGTWRTVAPQAAERAPLDRLVSTEILCRAAWGQEGAHPAPGLGDGHTQGPVSDLCPVTSAQAPRHLQSSAWEMDGPRENRGSFHKSLDQIFETLETKNPSCMEELFSDVDSPYYDLDTVLTGMMGGARPGPCEGLEGLAPATPGPSSSCKSDLGELDHVVEILVET

SEQ ID NO: 3217 - DNA, 6270 bp, Homo sapien
gccctgcttccccttgcacctgcgccgggcggccatggacttgtacagcaccccggccgctgcgctggacaggttcgtggccagaaggctgcagccgcggaaggagttcgtagagaaggcgcggcgcgctctgggcgccctggccgctgccctgagggagcgcgggggccgcctcggtgctgctgccccgcgggtgctgaaaactgtcaagggaggctcctcgggccggggcacagctctcaagggtggctgtgattctgaacttgtcatcttcctcgactgcttcaagagctatgtggaccagagggcccgccgtgcagagatcctcagtgagatgcgggcatcgctggaatcctggtggcagaacccagtccctggtctgagactcacgtttcctgagcagagcgtgcctggggccctgcagttccgcctgacatccgtagatcttgaggactggatggatgttagcctggtgcctgccttcaatgtcctgggtcaggccggctccgcggtcaaacccaagccacaagtctactctaccctcctcaacagtggctgccaagggggcgagcatgcggcctgcttcacagagctgcggaggaactttgtgaacattcgcccagccaagttgaagaacctaatcttgctggtgaagcactggtaccaccaggtgtgcctacaggggttgtggaaggagacgctgcccccggtctatgccctggaattgctgaccatcttcgcctgggagcagggctgtaagaaggatgctttcagcctaggcgaaggcctccgaactgtcctgggcctgatccaacagcatcagcacctgtgtgttttctggactgtcaactatggcttcgaggaccctgcagttgggcagttcttgcagcggcacgttaagagacccaggcctgtgatcctggacccagctgaccccacatgggacctggggaatggggcagcctggcactgggatttgcatgcccaggaggcagcatcctgctatgaccacccatgctttctgagggggatgggggacccagtgcagtcttggaaggggccgggccttccacgtgctggatgctcaggtttgggccaccccatccagctagaccctaaccagaagacccctgaaaacagcaagagcctcaatgctgtgtacccaagagcagggagcaaacctccctcatgcccagctcctggccccactgcggagccagcatcgtacccctctgtgccgggaatggccttggacctgtctcagatccccaccaaggagctggaccgcttcatccaggaccacctgaagccgagcccccagttccaggagcaggtgaaaaaggccatcgacatcatcttgcgctgcctccatgagaactgtgttcacaaggcctcaagagtcagtaaagggggctcatttggccggggcacagacctaagggatggctgtgatgttgaactcatcatcttcctcaactgcttcacggactacaaggaccaggggccccgccgcgcagagatccttgatgagatgcgagcgcacgtagaatcctggtggcaggaccaggtgcccagcctgagccttcagtttcctgagcagaatgtgcctgaggctctgcagttccagctggtgtccacagccctgaagagctggacggatgttagcctgctgcctgccttcgatgctgtggggcagctcagttctggcaccaaaccaaatccccaggtctactcgaggctcctcaccagtggctgccaggagggcgagcataaggcctgcttcgcagagctgcggaggaacttcatgaacattcgccctgtcaagctgaagaacctgattctgctggtgaagcactggtaccgccaggttgcggctcagaacaaaggaaaaggaccagcccctgcctctctgcccccagcctatgccctggagctcctcaccatctttgcctgggagcagggctgcaggcaggattgtttcaacatggcccaaggcttccggacggtgctggggctcgtgcaacagcatcagcagctctgtgtctactggacggtcaactatagcactgaggacccagccatgagaatgcaccttcttggccagcttcgaaaacccagacccctggtcctggaccccgctgatcccacctggaacgtgggccacggtagctgggagctgttggcccaggaagcagcagcgctggggatgcaggcctgctttctgagtagagacgggacatctgtgcagccctgggatgtgatgccagccctcctttaccaaaccccagctggggaccttgacaagttcatcagtgaatttctccagcccaaccgccagttcctggcccaggtgaacaaggccgttgataccatctgttcatttttgaaggaaaactgcttccggaattctcccatcaaagtgatcaaggtggtcaagggtggctcttcagccaaaggcacagctctgcgaggccgctcagatgccgacctcgtggtgttcctcagctgcttcagccagttcactgagcagggcaacaagcgggccgagatcatctccgagatccgagcccagctggaggcatgtcaacaggagcggcagttcgaggtcaagtttgaagtctccaaatgggagaatccccgcgtgctgagcttctcactgacatcccagacgatgctggaccagagtgtggactttgatgtgctgccagcctttgacgccctaggccagctggtctctggctccaggcccagctctcaagtctacgtcgacctcatccacagctacagcaatgcgggcgagtactccacctgcttcacagagctacaacgggacttcatcatctctcgccctaccaagctgaagagcctgatccggctggtgaagcactggtaccagcagtgtaccaagatctccaaggggagaggctccctacccccacagcacgggctggaactcctgactgtgtatgcctgggagcagggcgggaaggactcccagttcaacatggctgagggcttccgcacggtcctggagctggtcacccagtaccgccagctctgtatctactggaccatcaactacaacgccaaggacaagactgttggagacttcctgaaacagcagcttcagaagcccaggcctatcatcctggatccggctgacccgacaggcaacctgggccacaatgcccgctgggacctgctggccaaggaagctgcagcctgcacatctgccctgtgctgcatgggacggaatggcatccccatccagccatggccagtgaaggctgctgtgtgaagttgagaaaatcagcggtcctactggatgaagagaagatggacaccagccctcagcatgaggaaattcagggtcccctaccagatgagagagattgtgtacatgtgtgtgtgagcacatgtgtgcatgtgtgtgcacacgtgtgcatgtgtgtgttttagtgaatctgctctcccagctcacacactcccctgcctcccatggcttacacactaggatccagactccatggtttgacaccagcctgcgtttgcagcttctctgtcacttccatgactctatcctcataccaccactgctgcttcccacccagctgagaatgccccctcctccctgactcctctctgcccatgcaaattagctcacatctttcctcctgctgcaatccatcccttcctcccattggcctctccttgccaaatctaaatactttatatagggatggcagagagttcccatctcatctgtcagccacagtcatttggtactggctacctggagccttatcttctgaagggttttaaagaatggccaattagctgagaagaattatctaatcaattagtgatgtctgccatggatgcagtagaggaaagtggtggtacaagtgccatgattgattagcaatgtctgcactggatatggaaaaaagaaggtgcttgcaggtttacagtgtatatgtgggctattgaagagccctctgagctcggttgctagcaggagagcatgcccatattggcttactttgtctgccacagacacagacagagggagttgggacatgcatgctatggggaccctcttgttggacacctaattggatgcctcttcatgagaggcctccttttcttcaccttttatgctgcactcctcccctagtttacacatcttgatgctgtggctcagtttgccttcctgaatttttattgggtccctgttttctctcctaacatgctgagattctgcatccccacagcctaaactgagccagtggccaaacaaccgtgctcagcctgtttctctctgccctctagagcaaggcccaccaggtccatccaggaggctctcctgacctcaagtccaacaacagtgtccacactagtcaaggttcagcccagaaaacagaaagcactctaggaatcttaggcagaaagggattttatctaaatcactggaaaggctggaggagcagaaggcagaggccaccactggactattggtttcaatattagaccactgtagccgaatcagaggccagagagcagccactgctactgctaatgccaccactacccctgccatcactgccccacatggacaaaactggagtcgagacctaggttagattcctgcaaccacaaacatccatcagggatggccagctgccagagctgcgggaagacggatcccacctccctttcttagcagaatctaaattacagccagacctctggctgcagaggagtctgagacatgtatgattgaatgggtgccaagtgccagggggcggagtccccagcagatgcatcctggccatctgttgcgtggatgagggagtgggtctatctcagaggaaggaacaggaaacaaagaaaggaagccactgaacatcccttctctgctccacaggagtgtcttagacagcctgactctccacaaaccactgttaaaacttacctgctaggaatgctagattgaatgggatgggaagagccttccctcattattgtcattcttggagagaggtgagcaaccaagggaagctcctctgattcacctagaacctgttctctgccgtctttggctcagcctacagagactagagtaggtgaagggacagaggacagggcttctaatacctgtgccatattgacagcctccatccctgtcccccatcttggtgctgaaccaacgctaagggcaccttcttagactcacctcatcgatactgcctggtaatccaaagctagaactctcaggaccccaaactccacctcttggattggccctggctgctgccacacacatatccaagagctcagggccagttctggtgggcagcagagacctgctctgccaagttgtccagcagcagagtggccctggcctgggcatcacaagccagtgatgctcctgggaagaccaggtggcaggtcgcagttgggtaccttccattcccaccacacagactctgggcctccccgcaaaatggctccagaattagagtaattatgagatggtgggaaccagagcaactcaggtgcatgatacaaggagaggttgtcatctgggtagggcagagaggagggcttgctcatctgaacaggggtgtatttcattccaggccctcagtctttggcaatggccaccctggtgttggcatattggccccactgtaacttttgggggcttcccggtctagccacaccctcggatggaaagacttgactgcataaagatgtcagttctccctgagttgattgataggcttaatggtcaccctaaaaacacccacatatgcttttcgatggaaccagataagttgacgctaaagttcttatggaaaaatacacacgcaatagctaggaaaacacagggaaagaagagttctgagcagggcctagtcttagccaatattaaaacatactatgaagcctctgatacttaaacagcatggcgctggtacgtaaatagaccaatgcagttaggtggctctttccaagactctggggaaaaaagtagtaaaaagctaaatgcaatcaatcagcaattgaaagctaagtgagagagccagagggcctccttggtggtaaaagagggttgcatttcttgcagccagaaggcagagaaagtgaagaccaagtccagaactgaatcctaagaaatgcaggactgcaaagaaattggtgtgtgtgtgtgtgtgtgtgtgtgtgtgtgtttaatttttaaaaagtttttattcggaatccgcg

SEQ ID NO: 3218 - protein, 1087 aa, Homo sapien
MDLYSTPAAALDRFVARRLQPRKEFVEKARRALGALAAALRERGGRLGAAAPRVLKTVKGGSSGRGTALKGGCDSELVIFLDCFKSYVDQRARRAEILSEMRASLESWWQNPVPGLRLTFPEQSVPGALQFRLTSVDLEDWMDVSLVPAFNVLGQAGSAVKPKPQVYSTLLNSGCQGGEHAACFTELRRNFVNIRPAKLKNLILLVKHWYHQVCLQGLWKETLPPVYALELLTIFAWEQGCKKDAFSLGEGLRTVLGLIQQHQHLCVFWTVNYGFEDPAVGQFLQRHVKRPRPVILDPADPTWDLGNGAAWHWDLHAQEAASCYDHPCFLRGMGDPVQSWKGPGLPRAGCSGLGHPIQLDPNQKTPENSKSLNAVYPRAGSKPPSCPAPGPTAEPASYPSVPGMALDLSQIPTKELDRFIQDHLKPSPQFQEQVKKAIDIILRCLHENCVHKASRVSKGGSFGRGTDLRDGCDVELIIFLNCFTDYKDQGPRRAEILDEMRAHVESWWQDQVPSLSLQFPEQNVPEALQFQLVSTALKSWTDVSLLPAFDAVGQLSSGTKPNPQVYSRLLTSGCQEGEHKACFAELRRNFMNIRPVKLKNLILLVKHWYRQVAAQNKGKGPAPASLPPAYALELLTIFAWEQGCRQDCFNMAQGFRTVLGLVQQHQQLCVYWTVNYSTEDPAMRMHLLGQLRKPRPLVLDPADPTWNVGHGSWELLAQEAAALGMQACFLSRDGTSVQPWDVMPALLYQTPAGDLDKFISEFLQPNRQFLAQVNKAVDTICSFLKENCFRNSPIKVIKVVKGGSSAKGTALRGRSDADLVVFLSCFSQFTEQGNKRAEIISEIRAQLEACQQERQFEVKFEVSKWENPRVLSFSLTSQTMLDQSVDFDVLPAFDALGQLVSGSRPSSQVYVDLIHSYSNAGEYSTCFTELQRDFIISRPTKLKSLIRLVKHWYQQCTKISKGRGSLPPQHGLELLTVYAWEQGGKDSQFNMAEGFRTVLELVTQYRQLCIYWTINYNAKDKTVGDFLKQQLQKPRPIILDPADPTGNLGHNARWDLLAKEAAACTSALCCMGRNGIPIQPWPVKAAV

SEQ ID NO: 3219 - DNA, 2591 bp, Homo sapien
gctgagcgcgggcgcggggccgctacgtgcgcggggagcgcggggagcgcggggagcgcggggctgcgctcgtgtgcgctcctgggcgctcgccgccgccgctgccgccgcgcgcctttgagtcagcaaactccgcggcccgcaagcccggctcggcccggccctgctctgttctgcccggaggagccgcccattgatcgtgtcctgtgctgaagatgtttccggaacaacagaaagaggaatttgtaagtgtctgggttcgagatcctaggattcagaaggaggacttctggcattcttacattgactatgagatatgtattcatactaatagcatgtgttttacaatgaaaacatcctgtgtacgaagaagatatagagaattcgtgtggctgaggcagagactccaaagtaatgcgttgctggtacaactgccagaacttccatctaaaaacctgtttttcaacatgaacaatcgccagcacgtggatcagcgtcgccagggtctggaagatttcctcagaaaagtcctacagaatgcacttttgctttcagatagcagccttcacctcttcttacagagccatctgaattcagaagacattgaggcgtgtgtttctgggcagactaagtactctgtggaagaagcaattcacaagtttgccttaatgaatagacgtttccctgaagaagatgaagaaggaaaaaaagaaaatgatatagattatgattcagaaagttcatcctctgggcttggacacagtagtgatgacagcagttcacatggatgtaaagtaaatacagctccgcaggaatcctgaaaaataattctaatgttactatcttaggaatagcaaattatgtccagtcatagagaagaaagcttcataataatacattcttacctaaagctcactgtcatgatgttaggtatttaaattcttaaagatgttgggttgtttattagtggtatttttatgttgtcttattttaggtaagcttctgtgtaaagctaaaaatcctgtgaatacaatactatcctttacaggcagacattattggtaaacaagatcttgccctccaatgaaatgacttacatgttttaaaaaaccgagttggttttattgaatttaaaaagataggtaactaagtagcatttaaaatcaagatagagcattccttcttgtatcagtggggcagtgttaccataaacacggtgtatatgttgttaaaccctatgaagagtaacagtgtagaccagactgcctctctcagatatgtgcctgatattttgtggatacctcccctgcactggcaaaacactatgcttttgggtgttagactgaaatattttaagagtatttaacctttccagtattctgtttcacgcttagatggaaatgtatcttatgaatagagacatattaaaataatgtttacatcttagaaaaaacatagatagtgctagtaatattacttataactgtaatatatagattcagaaatacattttcattatccaaaatcagcttcaacaaatggtttctggagacaaataatttgttttcattatcattgtataatcaggttaatgatttattttttgactaaatgtgcaatttcttatcactagataactttcagtatcagtggtggttacttattacttaaatcagaggaaggattttataaagattaataaatttaattttaccaataaatattcccataatttagaaaaggatgtcgacttgctaatttcagaaataattattcatttttaaaaagccccttttaaagcatctacttgaagattggtataattttcataaaatgtctttttttttagtgtcccaaagatatcttagataaactattttgaagttcagatttcagatgaggcaacattttcttgagataattacccaagtttcatccatgttgaatggtacaaaatatttctgtgaaactaacaggaagatattttcagataactaggataacttgttgctttgttacccagcctaattgaagagtggcagaggctactacaaaaagcaaccttttcattttcactaagagtttaaaagctattgtattattaaaaagtctttacaatgcttgtttcaaagaaccaacagaaaaaaaagctaagaaaactgagaactaacattaaaaaaattaaatttagaataagaatgatttctttaatttgtcctttttttctttggtctaaaacattattaaatttttgtaaatattttgatttaatgtgtcttagatcctcattattttaatacaggaaaagaaaagatttagtaatttcttaccatgctaatatgtaaagttcatgccatccaggcatttaagagcgatcctcatcccttcagcaatatgtatttgagttcacactatttctgttttacagcagttttgaaaaacacatactatgccaccaattgtcatattatttttagatgatgtaacatagccatcaaaattaatattatgtaatgcctaatacttagtatgtaaatgtcacgagatcatttttacattaaacgtgaaaaaaaatcaaaaaaaaaaaaaaa

SEQ ID NO: 3220 - protein, 201 aa, Homo sapien
MFPEQQKEEFVSVWVRDPRIQKEDFWHSYIDYEICIHTNSMCFTMKTSCVRRRYREFVWLRQRLQSNALLVQLPELPSKNLFFNMNNRQHVDQRRQGLEDFLRKVLQNALLLSDSSLHLFLQSHLNSEDIEACVSGQTKYSVEEAIHKFALMNRRFPEEDEEGKKENDIDYDSESSSSGLGHSSDDSSSHGCKVNTAPQES

SEQ ID NO: 3221 - DNA, 4350 bp, Homo sapien
gtcggtgcctgcagggctctccgtgcccgctcgggagaggtgctcttcgctcaggctcccccggagacttgagggggtgcgcgctggcgtgcatggggcctgttctgtccttggtttggggatgctcctaaggggggagaaagggatacctcgggtgcttggaggtcgagagacggatacgtaagtgcgcaagggccactgattagggcacgggaagggctcgctagaatgagctcttaaactggttgggtgtaagcggttttgggctagtctaaaccaaacaactgagaataaacgcggggttcctgcaggttgagagagtacctgtctgcaaatgtccagtagtgatggattgccttgtaggccccagagcaatcggggaagttagcattcttgttcaagaagctgctggttcacttagagctataaaagaatgttgtgagtttggattttcttccaaacgttcaggattgaggttagggctggtggtgagggatcatgtaaagaggtttgagtggctcagccttaggtcccggtgtggaaagcttattcttttggtgtcatcacgtggccatgggaattatttagaatgtgatctgccctcatgagaagaaaggagctctgaagccgttgcagttcttcctccctatgtggaaaatcgaatttctggaaacatcctccgtattgggagattttgcctatgtaaaggctatccttattggctagcggcactaattactttaaaagtaggatggaagtacaagtatctcaagcatcattgggtttcgagctcacttctgtggaaaagagtttaagggagtggtctagactttccagggaagttattgcctggctgtgtccctctagtcctaattttatacttaactttcccccacctccttcagcctcatctgtttcaatggtgcaactcttttcatccccttttggttaccagtcaccttcaggccattcagaggaggaaagagaggggaatatgaagtcagccaagccccaagtgaaccacagtcagcatggggaaagccagcgggccttgagccccctgcagtctactctgagttctgctgcatctccttcccaagcgtatgagacctatattgaaaatggactcatatgccttaaacacaaaattagaaacatcgagaaaaagaagctcaaactggaggattataaggatcgcctgaaaagtggagagcatcttaatccagaccagttggaagctgtagagaaatatgaagaagtgctacataatttggaatttgccaaggagcttcaaaaaaccttttctgggttgagcctagatctactaaaagcgcaaaagaaggcccagagaagggagcacatgctaaaacttgaggctgagaagaaaaagcttcgaactatacttcaagttcagtatgtattgcagaacttgacacaggagcacgtacaaaaagacttcaaagggggtttgaatggtgcagtgtatttgccttcaaaagaacttgactacctcattaagttttcaaaactgacctgccctgaaagaaatgaaagtctgagtgttgaagaccagatggagcagtcatccttgtacttttgggaccttttggaaggtagtgagaaagcagtggtaggaacgacatacaaacacttgaaggatctactgtctaaattgctgaactcaggctattttgaaagtatcccagttcccaaaaatgccaaggaaaaggaagtaccactggaggaagaaatgctaatacaatcagagaaaaaaacacaattatcgaagactgaatctgtcaaagagtcagagtctctaatggaatttgcccagccagagatacaaccacaagagtttcttaacagacgctatatgacagaagtagattattcaaacaaacaaggcgaagagcaaccttgggaagcagattatgctagaaaaccaaatctcccaaaacgttgggatatgcttactgaaccagatggtcaagagaagaaacaggagtcctttaagtcctgggaggcttctggtaagcaccaggaggtatccaagcctgcagtttccttagaacagaggaaacaagacacctcaaaactcaggtctactctgccggaagagcagaagaagcaggagatctccaaatccaagccatctcctagccagtggaagcaagatacacctaaatccaaagcagggtatgttcaagaggaacaaaagaaacaggagacaccaaagctgtggccagttcagctgcagaaagaacaagatccaaagaagcaaactccaaagtcttggacaccttccatgcagagcgaacagaacaccaccaagtcatggaccactcccatgtgtgaagaacaggattcaaaacagccagagactccaaaatcctgggaaaacaatgttgagagtcaaaaacactctttaacatcacagtcacagatttctccaaagtcctggggagtagctacagcaagcctcataccaaatgaccagctgctgcccaggaagttgaacacagaacccaaagatgtgcctaagcctgtgcatcagcctgtaggttcttcctctacccttccgaaggatccagtattgaggaaagaaaaactgcaggatctgatgactcagattcaaggaacttgtaactttatgcaagagtctgttcttgactttgacaaaccttcaagtgcaattccaacgtcacaaccgccttcagctactccaggtagccccgtagcatctaaagaacaaaatctgtccagtcaaagtgattttcttcaagagccgttacaggctacttcttctccagttacttgtagctcaaatgcttgcttggttactaccgatcaggcttcttctggatctgaaacagagtttatgacctcagagactcctgaggtatttaacgttaatgcacctctgcctccacgaaaagaacaagaaataaaagaatccccttattcacctggctacaatcaaagttttaccacagcaagtacacaaacaccaccccagtgccaactgccatctatacatgtagaacaaactgtccattctcaagagactgcaaattatcatcctgatggaactattcaagtaagcaatggtagccttgccttttacccagcacagacgaatgtatttcccagacctactcagccatttgtcaatagccggggatctgttagaggatgtactcgtggtgggagattaataaccaattcctatcggtcccctggtggttataaaggttttgatacttacagaggactcccttcaatttccaatggaaattatagccagctgcagttccaagctagagagtattctggagcaccttattcccaaagggataatttccagcagtgttataagcgaggagggacatctggtggtccacgagcaaattcgagagcagggtggagtgattcttctcaggtgagcagcccagaaagagacaacgaaacctttaacagtggtgactctggacaaggagactcccgtagcatgacccctgtggatgtgccagtgacaaatccagcagccaccatactgccagtacacgtctaccctctgcctcagcagatgcgagttgccttctcagcagccagaacctctaatctggcccctggaactttagaccaacctattgtgtttgatcttcttctgaacaacttaggagaaacttttgatcttcagcttggtagatttaattgcccagtgaatggcacttacgttttcatttttcacatgctaaagctggcagtgaatgtgccactgtatgtcaacctcatgaagaatgaagaggtcttggtatcagcctatgccaatgatggtgctccagaccatgaaactgctagcaatcatgcaattcttcagctcttccagggagaccagatatggttacgtctgcacaggggagcaatttatggaagtagctggaaatattctacgttttcaggctatcttctttatcaagattgaaagtcagtacagtattgacaataaaaggatggtgttctaattagtgggattgaaggaaaagtagtctttgccctcatgactgattggtttaggaaaatgtttttgttcctagagggaggaggtccttacttttttgttttccttcctgaggtgaaaaatcaagctgaatgacaattagcactaatctggcactttataaattgtgatgtagcctcgctagtcaagctgtgaatgtatattgtttgcacttaatccttaactgtattaacgttcagcttactaaactgactgcctcaagtccaggcaagttacaatgccttgttgtgcctcaataaaaaagttacatgcaaaaaaaaaaaaaaaaa

SEQ ID NO: 3222 - protein, 1077 aa, Homo sapien
MEVQVSQASLGFELTSVEKSLREWSRLSREVIAWLCPSSPNFILNFPPPPSASSVSMVQLFSSPFGYQSPSGHSEEEREGNMKSAKPQVNHSQHGESQRALSPLQSTLSSAASPSQAYETYIENGLICLKHKIRNIEKKKLKLEDYKDRLKSGEHLNPDQLEAVEKYEEVLHNLEFAKELQKTFSGLSLDLLKAQKKAQRREHMLKLEAEKKKLRTILQVQYVLQNLTQEHVQKDFKGGLNGAVYLPSKELDYLIKFSKLTCPERNESLSVEDQMEQSSLYFWDLLEGSEKAVVGTTYKHLKDLLSKLLNSGYFESIPVPKNAKEKEVPLEEEMLIQSEKKTQLSKTESVKESESLMEFAQPEIQPQEFLNRRYMTEVDYSNKQGEEQPWEADYARKPNLPKRWDMLTEPDGQEKKQESFKSWEASGKHQEVSKPAVSLEQRKQDTSKLRSTLPEEQKKQEISKSKPSPSQWKQDTPKSKAGYVQEEQKKQETPKLWPVQLQKEQDPKKQTPKSWTPSMQSEQNTTKSWTTPMCEEQDSKQPETPKSWENNVESQKHSLTSQSQISPKSWGVATASLIPNDQLLPRKLNTEPKDVPKPVHQPVGSSSTLPKDPVLRKEKLQDLMTQIQGTCNFMQESVLDFDKPSSAIPTSQPPSATPGSPVASKEQNLSSQSDFLQEPLQATSSPVTCSSNACLVTTDQASSGSETEFMTSETPEVFNVNAPLPPRKEQEIKESPYSPGYNQSFTTASTQTPPQCQLPSIHVEQTVHSQETANYHPDGTIQVSNGSLAFYPAQTNVFPRPTQPFVNSRGSVRGCTRGGRLITNSYRSPGGYKGFDTYRGLPSISNGNYSQLQFQAREYSGAPYSQRDNFQQCYKRGGTSGGPRANSRAGWSDSSQVSSPERDNETFNSGDSGQGDSRSMTPVDVPVTNPAATILPVHVYPLPQQMRVAFSAARTSNLAPGTLDQPIVFDLLLNNLGETFDLQLGRFNCPVNGTYVFIFHMLKLAVNVPLYVNLMKNEEVLVSAYANDGAPDHETASNHAILQLFQGDQIWLRLHRGAIYGSSWKYSTFSGYLLYQD

SEQ ID NO: 3223 - DNA, 1680 bp, Homo sapien
gcccgctgttgcgtgctgccagcgggaactgtgtaggggtagattttcgctgcagtgttccccgagcctgttagacgcagcgcgccgggagactgagagaggaaaggatagaggaagtgctgccctaggctgcatgagtcgaagcaagcgtgtttccttcccgccaggcaagtgcccttagaaaccgggccccgcccccttcctggcctgcattcccatcccctctcccggggcggaggtgaggacctctttggttcctttggttctgtcagtgagccccttccttggccatgaagctcgtgaggaagaacatcgagaaggacaatgcgggccaggtgaccctggtccccgaggagcctgaggacatgtggcacacttacaacctcgtgcaggtgggcgacagcctgcgcgcctccaccatccgcaaggtacagacagagtcctccacgggcagcgtgggcagcaaccgggtccgcactaccctcactctctgcgtggaggccatcgacttcgactctcaagcctgccagctgcgggttaaggggaccaacatccaagagaatgagtatgtcaagatgggggcttaccacaccatcgagctggagcccaaccgccagttcaccctggccaagaagcagtgggatagtgtggtactggagcgcatcgagcaggcctgtgacccagcctggagcgctgatgtggcggctgtggtcatgcaggaaggcctcgcccatatctgcttagtcactcccagcatgaccctcactcgggccaaggtggaggtgaacatccctaggaaaaggaaaggcaattgctctcagcatgaccgggccttggagcggttctatgaacaggtggtccaggctatccagcgccacatacactttgatgttgtaaagtgcatcctggtggccagcccaggatttgtgagggagcagttctgcgactacatgtttcaacaagcagtgaagaccgacaacaaactgctcctggaaaaccggtccaaatttcttcaggtacatgcctcctccggacacaagtactccctgaaagaggccctttgtgaccctactgtggctagccgcctttcagacactaaagctgctggggaagtcaaagccttggatgacttctataaaatgttacagcatgaaccggatcgagctttctatggactcaagcaggtggagaaggccaatgaagccatggcaattgacacattgctcatcagcgatgagctcttcaggcatcaggatgtagccacacggagccggtatgtgaggctggtggacagtgtgaaagagaatgcaggcaccgttaggatattctctagtcttcacgtttctggggaacagctcagccagttgactggggtagctgccattctccgcttccctgttcccgaactttctgaccaagagggtgattccagttctgaagaggattaatgattgaaacttaaaattgagacaatcttgtgtttcctaaactgttacagtacatttctcagcatccttgtgacagaaagctgcaagaagggcactttttgattcatacagggatttcttatgtctttggctacactagatattttgtgattggcaagacatgtatttaaacataaactaaaaggaaataaaaaaaaaaaaaaaaaaaaaaaaaaaaaaaaaaaaaaaaaaa

SEQ ID NO: 3224 - protein, 385 aa, Homo sapien
MKLVRKNIEKDNAGQVTLVPEEPEDMWHTYNLVQVGDSLRASTIRKVQTESSTGSVGSNRVRTTLTLCVEAIDFDSQACQLRVKGTNIQENEYVKMGAYHTIELEPNRQFTLAKKQWDSVVLERIEQACDPAWSADVAAVVMQEGLAHICLVTPSMTLTRAKVEVNIPRKRKGNCSQHDRALERFYEQVVQAIQRHIHFDVVKCILVASPGFVREQFCDYMFQQAVKTDNKLLLENRSKFLQVHASSGHKYSLKEALCDPTVASRLSDTKAAGEVKALDDFYKMLQHEPDRAFYGLKQVEKANEAMAIDTLLISDELFRHQDVATRSRYVRLVDSVKENAGTVRIFSSLHVSGEQLSQLTGVAAILRFPVPELSDQEGDSSSEED

SEQ ID NO: 3225 - DNA, 3334 bp, Homo sapien
gcacgagccccgggctgccggcgcgggcgccgcggcacgtccacaggctgggtcgcgaggtggcgatcgctgagaggcaggagggccgaggcgggcctgggaggcggcccggaggtggggcgccgctggggccggcccgcacgggcttcatctgagggcgcacggcccgcgaccgagcgtgcggactggcctcccaagcgtggggcgacaagctgccggagctgcaatgggccgcggctggggattcttgtttggcctcctgggcgccgtgtggctgctcagctcgggccacggagaggagcagcccccggagacagcggcacagaggtgcttctgccaggttagtggttacttggatgattgtacctgtgatgttgaaaccattgatagatttaataactacaggcttttcccaagactacaaaaacttcttgaaagtgactactttaggtattacaaggtaaacctgaagaggccgtgtcctttctggaatgacatcagccagtgtggaagaagggactgtgctgtcaaaccatgtcaatctgatgaagttcctgatggaattaaatctgcgagctacaagtattctgaagaagccaataatctcattgaagaatgtgaacaagctgaacgacttggagcagtggatgaatctctgagtgaggaaacacagaaggctgttcttcagtggaccaagcatgatgattcttcagataacttctgtgaagctgatgacattcagtcccctgaagctgaatatgtagatttgcttcttaatcctgagcgctacactggttacaagggaccagatgcttggaaaatatggaatgtcatctacgaagaaaactgttttaagccacagacaattaaaagacctttaaatcctttggcttctggtcaagggacaagtgaagagaacactttttacagttggctagaaggtctctgtgtagaaaaaagagcattctacagacttatatctggcctacatgcaagcattaatgtgcatttgagtgcaagatatcttttacaagagacctggttagaaaagaaatggggacacaacattacagaatttcaacagcgatttgatggaattttgactgaaggagaaggtccaagaaggcttaagaacttgtattttctctacttaatagaactaagggctttatccaaagtgttaccattcttcgagcgcccagattttcaactctttactggaaataaaattcaggatgaggaaaacaaaatgttacttctggaaatacttcatgaaatcaagtcatttcctttgcattttgatgagaattcattttttgctggggataaaaaagaagcacacaaactaaaggaggactttcgactgcattttagaaatatttcaagaattatggattgtgttggttgttttaaatgtcgtctgtggggaaagcttcagactcagggtttgggcactgctctgaagatcttattttctgagaaattgatagcaaatatgccagaaagtggacctagttatgaattccatctaaccagacaagaaatagtatcattattcaacgcatttggaagaatttctacaagtgtgaaagaattagaaaacttcaggaacttgttacagaatattcattaaagaaaacaagctgatatgtgcctgtttctggacaatggaggcgaaagagtggaatttcattcaaaggcataatagcaatgacagtcttaagccaaacattttatataaagttgcttttgtaaaggagaattatattgttttaagtaaacacatttttaaaaattgtgttaagtctatgtataatactactgtgagtaaaagtaatactttaataatgtggtacaaattttaaagtttaatattgaataaaaggaggattatcaaattcatatatgataaaagtgaatgttctaagtctctcaaactagcgttttatgtaataatatgtaatataaataaaactatggtaaatgtgacaagcatttaataggaaaatgctaaggaggcctcataaatgacccataattaccaacgtagaatttttcagtacatttagggttgctggatttagcaaataaaaataaagattgcccagttagatttgaatttcagataaacaattagttttttaatattttacatggaatatttggaaaatacttatactaaaaaattatttgtttgaaattcacatttaactgggagtcttgtattttatctggcaatcctaaaatacattggtatgaaacaaatcacttttagaagtatattgctattttgattgggttgtttttgtgtgtagaaacgtacaataacaactcaaaggcacaggagatttctaaacattgtgaaaagttgaatagattatatatttattctcataatactttcactaatactaaataaaatttggggaacactttttatttttatataatttccaatttacagaaaagtttcaaaaatagtacaaagagctctcttacccagattcactaattgttcatacgtgctttatctttcatgctttctctgtacacacacacacacacacaaatttttcctcaatcatttgaaagtcagttataggcatcatgccccttaaaccctaaatacttcagtgtgtaatactgaataattactaaaaatgattttctcagaaaaaaaaactcccacaattctggaactataatactgtaagccttagaataaataatactttcaagttccaatctaaagttctttttgagttttgttgcccgttttatgcttgatgtgtatagtaatagggtaggctatttattttattaaaattttttttagagacaaggttttgctgtgttgcccaagctggaacttgaacgactgggctgaagtgatcttcccacctcagcctcccaagtagctgggaatacaggtgtctgccaccatacccagtttcatttttgttttttatacccgaagttcatttcctttgtctccctaaaactgaactgtaattttgggaggttttcattagtggaagctcttcatttataaagctatttgaaggggtttaggaatttatatcacatggtaattgtagagaaaaagaagctatatacctcaaaatcgtgccctctttacatatgtcttatcaggtataacatgttgaaatgtcacattagtagtaaagtggggtttatttatatagtggttaagaaatgtcagtttacactgctgtatacttcttcttctgtgtccctaaggcctggtacagtgccaagcacatacttggtatccaataaatatttgttggatgaaaaaaaaaaaaaaaaaaaa

SEQ ID NO: 3226 - protein, 468 aa, Homo sapien
MGRGWGFLFGLLGAVWLLSSGHGEEQPPETAAQRCFCQVSGYLDDCTCDVETIDRFNNYRLFPRLQKLLESDYFRYYKVNLKRPCPFWNDISQCGRRDCAVKPCQSDEVPDGIKSASYKYSEEANNLIEECEQAERLGAVDESLSEETQKAVLQWTKHDDSSDNFCEADDIQSPEAEYVDLLLNPERYTGYKGPDAWKIWNVIYEENCFKPQTIKRPLNPLASGQGTSEENTFYSWLEGLCVEKRAFYRLISGLHASINVHLSARYLLQETWLEKKWGHNITEFQQRFDGILTEGEGPRRLKNLYFLYLIELRALSKVLPFFERPDFQLFTGNKIQDEENKMLLLEILHEIKSFPLHFDENSFFAGDKKEAHKLKEDFRLHFRNISRIMDCVGCFKCRLWGKLQTQGLGTALKILFSEKLIANMPESGPSYEFHLTRQEIVSLFNAFGRISTSVKELENFRNLLQNIH

SEQ ID NO: 3227 - DNA, 1372 bp, Homo sapien
gcacgagggcgcttttgtctccggtgagttttgtggcgggaagcttctgcgctggtgcttagtaaccgactttcctccggactcctgcacgacctgctcctacagccggcgatccactcccggctgttcccccggagggtccagaggcctttcagaaggagaaggcagctctgtttctctgcagaggagtagggtcctttcagccatgaagcatgtgttgaacctctacctgttaggtgtggtactgaccctactctccatcttcgttagagtgatggagtccctagaaggcttactagagagcccatcgcctgggacctcctggaccaccagaagccaactagccaacacagagcccaccaagggccttccagaccatccatccagaagcatgtgataagacctccttccatactggccatattttggaacactgacctagacatgtccagatgggagtcccattcctagcagacaagctgagcaccgttgtaaccagagaactattactaggccttgaagaacctgtctaactggatgctcattgcctgggcaaggcctgtttaggccggttgcggtggctcatgcctgtaatcctagcactttgggaggctgaggtgggtggatcacctgaggtcaggagttcgagaccagcctcgccaacatggcgaaaccccatctctactaaaaatacaaaagttagctgggtgtggtggcagaggcctgtaatcccagttccttgggaggctgaggcgggagaattgcttgaacccggggacggaggttgcagtgaaccgagatcgcactgctgtacccagcctgggccacagtgcaagactccatctcaaaaaaaaaaagaaaagaaaaagcctgtttaatgcacaggtgtgagtggattgcttatggctatgagataggttgatctcgcccttaccccggggtctggtgtatgctgtgctttcctcagcagtatggctctgacatctcttagatgtcccaacttcagctgttgggagatggtgatattttcaaccctacttcctaaacatctgtctggggttcctttagtcttgaatgtcttatgctcaattatttggtgttgagcctctcttccacaagagctcctccatgtttggatagcagttgaagaggttgtgtgggtgggctgttgggagtgaggatggagtgttcagtgcccatttctcattttacattttaaagtcgttcctccaacatagtgtgtattggtctgaagggggtggtgggatgccaaagcctgctcaagttatggacattgtggccaccatgtggcttaaatgattttttctaactaataaagtggaatatatatttcaaaaaaaaaaaaaaaaaa

SEQ ID NO: 3228 - protein, 63 aa, Homo sapien
MKHVLNLYLLGVVLTLLSIFVRVMESLEGLLESPSPGTSWTTRSQLANTEPTKGLPDHPSRSM

SEQ ID NO: 3229 - DNA, 1240 bp, Homo sapien
tgcgcgtgcgcagggataagagagcggtctggacagcgcgtggccggcgccgctgtggggacagcatgagcggcggttggatggcgcaggttggagcgtggcgaacaggggctctgggcctggcgctgctgctgctgctcggcctcggactaggcctggaggccgccgcgagcccgctttccaccccgacctctgcccaggccgcaggccccagctcaggctcgtgcccacccaccaagttccagtgccgcaccagtggcttatgcgtgcccctcacctggcgctgcgacagggacttggactgcagcgatggcagcgatgaggaggagtgcaggattgagccatgtacccagaaagggcaatgcccaccgccccctggcctcccctgcccctgcaccggcgtcagtgactgctctgggggaactgacaagaaactgcgcaactgcagccgcctggcctgcctagcaggcgagctccgttgcacgctgagcgatgactgcattccactcacgtggcgctgcgacggccacccagactgtcccgactccagcgacgagctcggctgtggaaccaatgagatcctcccggaaggggatgccacaaccatggggccccctgtgaccctggagagtgtcacctctctcaggaatgccacaaccatggggccccctgtgaccctggagagtgtcccctctgtcgggaatgccacatcctcctctgccggagaccagtctggaagcccaactgcctatggggttattgcagctgctgcggtgctcagtgcaagcctggtcaccgccaccctcctccttttgtcctggctccgagcccaggagcgcctccgcccactggggttactggtggccatgaaggagtccctgctgctgtcagaacagaagacctcgctgccctgaggacaagcacttgccaccaccgtcactcagccctgggcgtagccggacaggaggagagcagtgatgcggatgggtacccgggcacaccagccctcagagacctgagctcttctggccacgtggaacctcgaacccgagctcctgcagaagtggccctggagattgagggtccctggacactccctatggagatccggggagctaggatggggaacctgccacagccagaactgaggggctggccccaggcagctcccagggggtagaacggccctgtgcttaagacactcctgctgccccgtctgagggtggcgattaaagttgct

SEQ ID NO: 3230 - protein, 282 aa, Homo sapien
MSGGWMAQVGAWRTGALGLALLLLLGLGLGLEAAASPLSTPTSAQAAGPSSGSCPPTKFQCRTSGLCVPLTWRCDRDLDCSDGSDEEECRIEPCTQKGQCPPPPGLPCPCTGVSDCSGGTDKKLRNCSRLACLAGELRCTLSDDCIPLTWRCDGHPDCPDSSDELGCGTNEILPEGDATTMGPPVTLESVTSLRNATTMGPPVTLESVPSVGNATSSSAGDQSGSPTAYGVIAAAAVLSASLVTATLLLLSWLRAQERLRPLGLLVAMKESLLLSEQKTSLP

SEQ ID NO: 3231 - DNA, 2644 bp, Homo sapien
ggcacgaggggccgacgcgagcgccgcgcttcgcttcagctgctagctggcccaagggaggcgaccgcggagggtggcgaggggcggccaggacccgcagccccggggccgggccggtccggaccgccagggagggcaggtcagtgggcagatcgcgtccgcgggattcaatctctgcccgctctgataacagtccttttccctggcgctcacttcgtgcctggcacccggctgggcgcctcaagaccgttgtctcttcgatcgcttctttggacttggcgaccatttcagagatgtcttccagaagtaccaaagatttaattaaaagtaagtggggatcgaagcctagtaactccaaatccgaaactacattagaaaaattaaagggagaaattgcacacttaaagacatcagtggatgaaatcacaagtgggaaaggaaagctgactgataaagagagacacagacttttggagaaaattcgagtccttgaggctgagaaggagaagaatgcttatcaactcacagagaaggacaaagaaatacagcgactgagagaccaactgaaggccagatatagtactaccgcattgcttgaacagctggaagagacaacgagagaaggagaaaggagggagcaggtgttgaaagccttatctgaagagaaagacgtattgaaacaacagttgtctgctgcaacctcacgaattgctgaacttgaaagcaaaaccaatacactccgtttatcacagactgtggctccaaactgcttcaactcatcaataaataatattcatgaaatggaaatacagctgaaagatgctctggagaaaaatcagcagtggctcgtgtatgatcagcagcgggaagtctatgtaaaaggacttttagcaaagatctttgagttggaaaagaaaacggaaacagctgctcattcactcccacagcagacaaaaaagcctgaatcagaaggttatcttcaagaagagaagcagaaatgttacaacgatctcttggcaagtgcaaaaaaagatcttgaggttgaacgacaaaccataactcagctgagttttgaactgagtgaatttcgaagaaaatatgaagaaacccaaaaagaagttcacaatttaaatcagctgttgtattcacaaagaagggcagatgtgcaacatctggaagatgataggcataaaacagagaagatacaaaaactcagggaagagaatgatattgctaggggaaaacttgaagaagagaagaagagatccgaagagctcttatctcaggtccagtttctttacacatctctgctaaagcagcaagaagaacaaacaagggtagctctgttggaacaacagatgcaggcatgtactttagactttgaaaatgaaaaactcgaccgtcaacatgtgcagcatcaattgcttgtaattcttaaggagctccgaaaagcaagaaatcaaataacacagttggaatccttgaaacagcttcatgagtttgccatcacagagccattagtcactttccaaggagagactgaaaacagagaaaaagttgccgcctcaccaaaaagtcccactgctgcactcaatgaaagcctggtggaatgtcccaagtgcaatatacagtatccagccactgagcatcgcgatctgcttgtccatgtggaatactgttcaaagtagcaaaataagtatttgttttgatattaaaagattcaatactgtattttctgttagcttgtgggcattttgaattatatatttcacattttgcataaaactgcctatctacctttgacactccagcatgctagtgaatcatgtatcttttaggctgctgtgcatttctcttggcagtgatacctccctgacatggttcatcatcaggctgcaatgacagaatgtggtgagcagcgtctactgagactactaacattttgcactgtcaaaatacttggtgaggaaaagatagctcaggttattgctaatgggttaatgcaccagcaagcaaaatattttatgttttgggggtttgaaaaatcaaagataattaaccaaggatcttaactgtgttcgcattttttatccaagcacttagaaaacctacaatcctaattttgatgtccattgttaagaggtggtgatagatactattttttttttcatattgtatagcggttattagaaaagttggggattttcttgatctttattgctgcttaccattgaaacttaacccagctgtgttccccaactctgttctgcgcacgaaacagtatctgtttgaggcataatcttaagtggccacacacaatgttttctcttatgttatctggcagtaactgtaacttgaattacattagcacattctgcttagctaaaattgttaaaataaactttaataaacccatgtagccctctcatttgattgacagtattttagttatttttggcattcttaaagctgggcaatgtaatgatcagatctttgtttgtctgaacaggtatttttatacatgctttttgtaaaccaaaaacttttaaatttcttcaggttttctaacatgcttaccactgggctactgtaaatgagaaaagaataaaattatttaatgttttaaaaaaaaaaaaaaaaaaaa

SEQ ID NO: 3232 - protein, 464 aa, Homo sapien
MSSRSTKDLIKSKWGSKPSNSKSETTLEKLKGEIAHLKTSVDEITSGKGKLTDKERHRLLEKIRVLEAEKEKNAYQLTEKDKEIQRLRDQLKARYSTTALLEQLEETTREGERREQVLKALSEEKDVLKQQLSAATSRIAELESKTNTLRLSQTVAPNCFNSSINNIHEMEIQLKDALEKNQQWLVYDQQREVYVKGLLAKIFELEKKTETAAHSLPQQTKKPESEGYLQEEKQKCYNDLLASAKKDLEVERQTITQLSFELSEFRRKYEETQKEVHNLNQLLYSQRRADVQHLEDDRHKTEKIQKLREENDIARGKLEEEKKRSEELLSQVQFLYTSLLKQQEEQTRVALLEQQMQACTLDFENEKLDRQHVQHQLLVILKELRKARNQITQLESLKQLHEFAITEPLVTFQGETENREKVAASPKSPTAALNESLVECPKCNIQYPATEHRDLLVHVEYCSK

SEQ ID NO: 3233 - DNA, 3471 bp, Homo sapien
gtgagccgtctacgaagcccgggcttggcctgggcgacactgagcggctttaaccggcggcgtccagccggctccgccagcgctgccgccgccctcgaggctccctctgactgaaggcgcgctgagcatcgcggcattaggggctcctggtccctcaaacatccagggaagccattttcagggactaggtactgacccccgcgagccgccacagccacagcccgcgctccgggccgaacgcccgagctcaagagctcccgagcttccgtcgggcggcggcctcacagctgggggccctgaggcggaaggcgcagccgctcagctgcggaccgggggcgtggcgagggcgcacaggttctgtttttcgccggcccggggccgctttcggtttcgtttcccgccggcgtctccaccctgcgagagccgcccgccagccagcgtccgccgccgtccgcgtcgcgccacccgcggtccgacgggagcaggcccagcggccatggcccaggccggcgtcgtcggtgaggtcacccaggtgctgtgcgcggccgggggcgccctggagttgcccgagctgcggcgccgcttgcggatgggcttgagcgccgacgcgctggagcggctgctgcggcagcgtgggcgcttcgtggtggcggtgcgggcgggcggcgcagccgcggccccggagcgcgtggtgctggccgcctcgccgctgcgcctgtgtcgcgcgcaccagggctccaagccgggctgcgtggggctctgcgcgcagctccacctctgcaggttcatggtctacggcgcctgcaagttcctgagagccgggaagaactgtaggaatagtcacagcttgacaaccgaacacaacctgagtgtgctgagaactcatggcgttgaccacctgagctataatgagctatgccaactcttgtttcagaacgacccctggcttttgccagaaatttgccaacattacaacaaaggagatggaccccacggctcttgtgcctttcaaaagcagtgcatcaagctccatatctgccagtattttttacagggggaatgcaagtttggcactagctgtaagagatcccatgatttctctaattctgagaatctggaaaaattggagaagttgggtatgagctcagacctggtgagcaggctgcctaccatttatagaaatgcacatgacatcaagaataagagctctgcccccagcagagtgcctcctctttttgtcccacaggggacttctgaaagaaaagacagttcaggttctgtgtccccaaacactcttagccaggaggagggtgatcagatctgtttgtaccatatccggaaaagttgtagctttcaagataagtgccatagagttcatttccatttgccgtatcgatggcaattcttggatagaggcaaatgggaggatttggacaacatggaacttattgaagaggcatattgcaatcccaaaatagaaaggatcctgtgctctgagtcagccagtacctttcactctcattgtctgaactttaacgccatgacttacggtgctacccaggctcgccgcctctccacggcctcctctgtcaccaaacctccacacttcatcctcaccactgactggatttggtactggagtgatgagtttggttcttggcaggaatatggaagacagggcacggtgcaccctgtgaccactgtcagcagtagcgacgtggagaaggcctacctggcctactgtacaccggggtctgacggccaggcagccaccttgaagttccaggccggaaagcacaactacgagttagatttcaaagccttcgttcagaaaaacctggtctatggcacaactaaaaaggtttgccgcagacccaaatacgtgtctccccaggatgtgacgaccatgcaaacctgcaataccaagtttccaggcccgaagagcatcccagactattgggactcctctgccctgccagacccaggctttcagaagatcacccttagttcttcctcggaagagtatcagaaggtctggaacctctttaaccgcacgctgcctttttactttgttcagaagattgagcgagtacagaacctggccctctgggaagtctaccagtggcaaaaaggacagatgcagaagcagaacggagggaaggccgtggacgagcggcagctgttccacggcaccagcgccatttttgtggacgccatctgccagcagaactttgactggcgggtctgtggtgttcatggcacttcctacggcaaggggagctactttgcccgagatgctgcatattcccaccactacagcaaatccgacacgcagacccacacgatgttcctggcccgggtgctggtgggcgagttcgtcaggggcaatgcctcctttgtccgtccaccggccaaggagggctggagcaacgccttctatgatagctgcgtgaacagtgtgtccgacccctccatctttgtgatctttgagaaacaccaggtctacccagagtatgtcatccagtacaccacctcctccaagccctcggtcacaccctccatcctgctggccttgggctccctgttcagcagccgacagtgagtgcacaggagtgttccaggcctttcacctgctctgccttgaaatggctatttgggcctttccttttctttttaaacagaaacttttaatgaactgttctcttaacattgacctctcaatgaagttatgttcttaatctcttgctaataatgatttttacttttaagtcacttttgggttcactagtggactaaccagaagtgattgtagttgagtccagttttgctttttaataatgtgttgaagttttagtttttactctttgttgactttgctgcttattggcaccagggacagagtttctagatacaattttatggattggttttaatttttatgagtttgtctctgcagtgattcggtttctcagagtctcatggcatcatagtttttccagaatgacacagtagccaccggtggatgacagcccacgggcggcacagtcacttctgcctgttgctctgacaccaacccaggcagctctgctgtggcttctcctgggctctggcattagttggtctgtgtcacattgtcagaacaggtggctgctgtgtggtgccatcgagtccctgctggttccccttgtcctgggagggtcacccattgcccaaggaagtgcatccacctggcaggtgacctggaggagtagcttccccgaggacccccaggcttggcctgtgattgcgcaaacccacatttcctaagcacactggacacccttcgagtgtgggttttaacatccctgtgagattgaatacttgtgccacacatgtcacaaaagagtatggaaataaaagaaaatttatccgaaaaaaaaaaaaaaaaaaaaaaaaaaaaaaaaaaaaaaaaaaaaaaaaaaaaaaaaaaaa

SEQ ID NO: 3234 - protein, 701 aa, Homo sapien
MAQAGVVGEVTQVLCAAGGALELPELRRRLRMGLSADALERLLRQRGRFVVAVRAGGAAAAPERVVLAASPLRLCRAHQGSKPGCVGLCAQLHLCRFMVYGACKFLRAGKNCRNSHSLTTEHNLSVLRTHGVDHLSYNELCQLLFQNDPWLLPEICQHYNKGDGPHGSCAFQKQCIKLHICQYFLQGECKFGTSCKRSHDFSNSENLEKLEKLGMSSDLVSRLPTIYRNAHDIKNKSSAPSRVPPLFVPQGTSERKDSSGSVSPNTLSQEEGDQICLYHIRKSCSFQDKCHRVHFHLPYRWQFLDRGKWEDLDNMELIEEAYCNPKIERILCSESASTFHSHCLNFNAMTYGATQARRLSTASSVTKPPHFILTTDWIWYWSDEFGSWQEYGRQGTVHPVTTVSSSDVEKAYLAYCTPGSDGQAATLKFQAGKHNYELDFKAFVQKNLVYGTTKKVCRRPKYVSPQDVTTMQTCNTKFPGPKSIPDYWDSSALPDPGFQKITLSSSSEEYQKVWNLFNRTLPFYFVQKIERVQNLALWEVYQWQKGQMQKQNGGKAVDERQLFHGTSAIFVDAICQQNFDWRVCGVHGTSYGKGSYFARDAAYSHHYSKSDTQTHTMFLARVLVGEFVRGNASFVRPPAKEGWSNAFYDSCVNSVSDPSIFVIFEKHQVYPEYVIQYTTSSKPSVTPSILLALGSLFSSRQ

SEQ ID NO: 3235 - DNA, 1126 bp, Homo sapien
agccgagacggtgcagggccggagaagcaccttcactcccagcctgcgccccgatgctgcgcgttctgtgcctcctgcgcccctggaggccccttcgggcccgcggctgcgcttccgacggggcggccgggggctcagagatccaagtgcgcgccctggcgggtccggaccaagggatcactgagattctgatgaacagaccttctgcccgcaatgccttggggaatgtcttcgtcagtgagctgctggaaactctggcccagctgcgggaggaccggcaagtgcgtgtcctgctcttcagaagtggagtgaagggcgcgttctgtgcaggtgcagacctgaaggagcgggaacagatgagtgaagcagaggtgggggtgtttgtccagcgactccggggcctgatgaatgacatcgcttcctcggcagtcatgggactgattgagaccacgcgagggctcctcccgggggcaggagggactcagaggctgccccgttgtctgggggtggccctggcgaaggagctcatcttcacgggccgacgactgagtggaactgaggcccacgtactggggctggtgaatcacgctgtggcccagaacgaggagggggacgccgcctaccagcgggcacgagcactggcccaggagatcctgccccaggcccccattgccgtgcggctgggcaaagtagccattaaccgaggaacggaggtggacattgcatctgggatggccattgaagggatgtgctatgcccagaatattccaacccgggaccggctagagggcatggcagccttcagggagaagcggactcccaaatttgttggcaaatgacccccattttaaccttcagcatgggagatgcatgccctgaagagcaggatccagaaggaagatttgtggccagattgccttcatcatttcacctctccagacttccatttcttcacaaggatgatgatggaaataaaatgactggcgtgatgcctggaaccaaggtgctgatcctaccacctactgctaccttccttagcttcaccctggctagaaataatcacgagggttgggtttgctttggaaaatgcctgtctctctacttgaatgataaagaattaaattag

SEQ ID NO: 3236 - protein, 261 aa, Homo sapien
MLRVLCLLRPWRPLRARGCASDGAAGGSEIQVRALAGPDQGITEILMNRPSARNALGNVFVSELLETLAQLREDRQVRVLLFRSGVKGAFCAGADLKEREQMSEAEVGVFVQRLRGLMNDIASSAVMGLIETTRGLLPGAGGTQRLPRCLGVALAKELIFTGRRLSGTEAHVLGLVNHAVAQNEEGDAAYQRARALAQEILPQAPIAVRLGKVAINRGTEVDIASGMAIEGMCYAQNIPTRDRLEGMAAFREKRTPKFVGK

SEQ ID NO: 3237 - DNA, 1113 bp, Homo sapien
ttctcaccgctgctatggaggcgctggccatgggttcccgggcgctgcggctctggctggtcgcacccggtggcgggatcaaatggagatttatagcaacatcgccagcttctcagctgtcaccgacagaattgacagaaatgcggaatgatctctttaataaagagaaagccaggcagttatcattaactccccgaactgagaagatagaagttaagcatgttgggaaaactgaccccggtactgtcttcgtgatgaataaaaacatttcaactccctacagttgtgccatgcatttaagcgagtggtattgcaggaagtccattctggctctggtggatggacagccttgggacatgtataagcctttaacaaagtcctgtgaaattaaatttcttactttcaaagattgtgatccaggagaagtgaataaggcatattggcgttcctgtgctatgatgatgggctgtgtgatagagagggcattcaaagatgaatatatggtcaatttggtcagagctccagaagttcctgtaatttctggtgccttctgttatgacgtagttttggatagcaaacttgatgagtggatgccaacaaaagagaacttacgttccttcacaaaggatgctcatgctttaatttataaagatcttccatttgaaactctggaagttgaagcaaaagtggcattggaaatatttcaacacagcaagtacaaagtagatttcatagaagagaaggcatctcagaaccctgagagaatagtcaagctacacagaataggtgacttcattgatgtgagtgagggccctcttattccaagaacaagtatttgtttccagtatgaagtgtcagcagttcacaatcttcaacccacccagccaagtctcatacgaagattccagggtgtgtctttacctgttcacttaagagcacattttacaatatgggataagctattggaaagatctcggaaaatggtaactgaagatcaaagtaaagcaacagaggaatgtacatctacctaataactttctaaaatttaaatatgtataataaaataaatgttttaaatataaaaaaaaaaaaaaaaaaaaaaaaaaaaaaaaa

SEQ ID NO: 3238 - protein, 258 aa, Homo sapien [sequence omitted]

SEQ ID NO: 3239 - DNA, 2058 bp, Homo sapien
cggtgctagcgacacgggagtggcaaacgcatcctcttgccgttcccggtgtttgggccttgcctgtgacggtgggaaaagaaaatggccttgctgtgctacaaccggggctgcggtcagcgcttcgatcctgagaccaattccgacgatgcttgcacataccacccaggtgttccggtctttcacgatgcattaaagggttggtcttgctgtaagagaagaacaactgatttttctgatttcttaagcattgtaggctgtacaaaaggtagacataatagtgagaagccacctgagccagtcaaacctgaagtcaagactactgagaagaaggagctatgtgaattaaaacccaaatttcaggaacacatcattcaagcccctaagccagtagaagcaataaaaagaccaagcccagatgaaccaatgacaaatttggaattaaaaatatctgcctccctaaaacaagcacttgataaacttaaactgtcatcagggaatgaagaaaataagaaagaagaagacaatgatgaaattaagattgggacctcatgtaagaatggagggtgttcaaagacataccagggtctagagagtctagaagaagtctgtgtatatcattctggagtacctattttccatgaggggatgaaatactggagctgttgtagaagaaaaacttctgattttaatacattcttagcccaagagggctgtacaaaagggaaacacatgtggactaaaaaagatgctgggaaaaaagttgttccatgtagacatgacttgcatcagactggaggtgaagttaccatttcagtatatgctaaaaactcacttccagaacttagccgagtagaagcaaatagcacattgttaaatgtcattattgtatttgaaggagagaaggaatttgatcaaaatgtgaaattatggggtgtgattgatgtaaagcgaagttatgtaactatgactgcaacaaagattgaaatcactatgagaaaagctgaaccgatgcagtgggcaagccttgaactgcctgcagctaaaaagcaggaaaaacaaaaagatgacacaacagattgagtgggagatggaaggaaggctattacattatttccgaatttttaatactgtgtgaagtggtggcttgctgctgtaatcttttgttttgttgttgtgttactgaatgtggcatttcagggttaacattaggttcttaaaagccaaagtcagtttgtctttttgtgcctctcatctttcttttgtgttatgtaagattgattattcatttctccctactggtaggaaccatagttgtgtcctatacttgaagaggctggaaagtagcccataaccataattgcagtatttctttgtatttctctgttaagcaaagaaatattaaggaacattttttttatgtttttgtattattccataattagtaaagcaagatgaaatgtcaaattttaatcagttttttcatggatttgtgttcttacagtacttgaaaatatttaaggaagagatgaagctctgcagttttttctatgtgggatgattacttttttaaggaggattaattctgaggtagtatagtaactaaaggggaatatatgaattgtttaacaaattagaatttgtttacaactacttgaatttttaaattatgtcaaaacttacattacttgccaagcagtatgatgttataggaaacataaataagattacagaggtatcaatttggttaaaattcaccattttataagactaagcaataatcttaacaacctctttcctgaatatttaaatgtgtttgtatggtgttatgactaattgttactgatttagagactaagccctcttaaaacctttagttaaatataaaaagaaattatatatatcttgcctccctgatggaaaactatataaaattgtagacttaaaaggtttgtggaaatacattaggatatcagaaaactaaatatatggagttgctttatgactattacatgttaaataaaaatagcttaattgttaaaaaaaaaaaaaaaaaaa

SEQ ID NO: 3240 - protein, 332 aa, Homo sapien
MALLCYNRGCGQRFDPETNSDDACTYHPGVPVFHDALKGWSCCKRRTTDFSDFLSIVGCTKGRHNSEKPPEPVKPEVKTTEKKELCELKPKFQEHIIQAPKPVEAIKRPSPDEPMTNLELKISASLKQALDKLKLSSGNEENKKEEDNDEIKIGTSCKNGGCSKTYQGLESLEEVCVYHSGVPIFHEGMKYWSCCRRKTSDFNTFLAQEGCTKGKHMWTKKDAGKKVVPCRHDLHQTGGEVTISVYAKNSLPELSRVEANSTLLNVIIVFEGEKEFDQNVKLWGVIDVKRSYVTMTATKIEITMRKAEPMQWASLELPAAKKQEKQKDDTTD

SEQ ID NO: 3241 - DNA, 2794 bp, Homo sapien
gaccagccgtgcaaatctctagaagatgacggtgttctttaaaacgcttcgaaatcactggaagaaaactacagctgggctctgcctgctgacctggggaggccattggctctatggaaaacactgtgataacctcctaaggagagcagcctgtcaagaagctcaggtgtttggcaatcaactcattcctcccaatgcacaagtgaagaaggccactgtttttctcaatcctgcagcttgcaaaggaaaagctaggactctatttgaaaaaaatgctgccccgattttacatttatctggcatggatgtgactattgttaagacagattatgagggacaagccaagaaactcctggaactgatggaaaacacggatgtgatcattgttgcaggaggagatgggacactgcaggaggttgttactggtgttcttcgacgaacagatgaggctaccttcagtaagattcccattggatttatcccactgggagagaccagtagtttgagtcataccctctttgccgaaagtggaaacaaagtccaacatattactgatgccacacttgccattgtgaaaggagagacagttccacttgatgtcttgcagatcaagggtgaaaaggaacagcctgtatttgcaatgaccggccttcgatggggatctttcagagatgctggcgtcaaagttagcaagtactggtatcttgggcctctaaaaatcaaagcagcccactttttcagcactcttaaggagtggcctcagactcatcaagcctctatctcatacacgggacctacagagagacctcccaatgaaccagaggagacccctgtacaaaggccttctttgtacaggagaatattacgaaggcttgcgtcctactgggcacaaccacaggatgccctttcccaagaggtgagcccggaggtctggaaagatgtgcagctgtccaccattgaactgtccatcacaacacggaataatcagcttgacccgacaagcaaagaagattttctgaatatctgcattgaacctgacaccatcagcaaaggagactttataactataggaagtcgaaaggtgagaaaccccaagctgcacgtggagggcacggagtgtctccaagccagccagtgcactttgcttatcccggagggagcagggggctcttttagcattgacagtgaggagtatgaagcgatgcctgtggaggtgaaactgctccccaggaagctgcagttcttctgtgatcctaggaagagagaacagatgctcacaagccccacccagtgagcagcagaagacaagcactctgagaccacactttaggccaccggtgggaccaaaagggaacaggtgcctcagccatcccaacagtgtcgtcagagggtccccagggcattttcatggcaagtacccctctgcccccactccagcagtgcttcccaaagtgtgctctgtcacctgctttgcaatcggcttccattagcgcatgttttattttggtgtgacggttggccctcctaaacacggactttcctcaggctggttcaagacggaaaaggactttcttctgttttcttccaaagtgcaaccacagtggagagcccacggtgggcttagcctgcctaggcccttccatttctcttctttgaccgtgctaggaattccaggaaagtgcattcctgccctggtgaccttttcctatgtctaggctcctccacaggtgctgctattttgtgagctccggctcctgtttagcttttatttcagttctaacctcagtccagaaacatatgtgaggttgtttccctcttcagccacggctacaataccggaaaatgctagtttttatttatttttttaagtagtgcttcctaaatggtttgcatgagagccacctggggtacatgttgaaaacttatttggggtctaccccaaacctaataacccaaatttggggatggggcccaggaatatgcatttttaaaaagtcatctgcccttcccaggtgattctgtaagttgtccctcaactgtacttggagaaatcgtgttttaaagcagtagtccacaaagtattctgctcatgtgcccccaaaagtattttgaaaaatcatgtataccctcacccatctaagttgatatctaaaattttatctaagttggtatctaaaatttttcatgggaagttaaatagttgacaaagtatgtatttgctggtgtcgtgtaaatattggtattttaaaataaaaactgttacatcactattttaaacatatccagtacaatttaaatatcacaacaatttgacacccttcattcatttataaaaataaatgagctagttctttagtagttaaacatttcaaattggcttttctccttctgtatttccataccacttttcagccaagaatcctatcataatgtaatctattatgcccgacatcttttaatcattcaccccattacttcttgtcaacaaaaaatataaatggaaattttttttttagctcttgctttaagtgtttgtttgttatctcagtccagaaccaatattatcgtaattaattattggtatataatgaaaacggtattaattcttggatgattaaaagtttttttattagaatgttctttatcctaattagttcatttatccaagaatacatgaatgtgatttacagctgagatggggttcaacctcagctgtattccttgtttctgtatagatgtaagcacataaattcgatggaatagaattacgttaacaatgaaaaaaaaaaaaaaa

SEQ ID NO: 3242 - protein, 422 aa, Homo sapien
MTVFFKTLRNHWKKTTAGLCLLTWGGHWLYGKHCDNLLRRAACQEAQVFGNQLIPPNAQVKKATVFLNPAACKGKARTLFEKNAAPILHLSGMDVTIVKTDYEGQAKKLLELMENTDVIIVAGGDGTLQEVVTGVLRRTDEATFSKIPIGFIPLGETSSLSHTLFAESGNKVQHITDATLAIVKGETVPLDVLQIKGEKEQPVFAMTGLRWGSFRDAGVKVSKYWYLGPLKIKAAHFFSTLKEWPQTHQASISYTGPTERPPNEPEETPVQRPSLYRRILRRLASYWAQPQDALSQEVSPEVWKDVQLSTIELSITTRNNQLDPTSKEDFLNICIEPDTISKGDFITIGSRKVRNPKLHVEGTECLQASQCTLLIPEGAGGSFSIDSEEYEAMPVEVKLLPRKLQFFCDPRKREQMLTSPTQ

SEQ ID NO: 3243 - DNA, 4221 bp, Homo sapien
cgataacgatttgtgttgtgagaggcgcaagctgcgatttctgctgaacttggaggcatttctacgacttttctctcagctgaggcttttcctccgaccctgatgctcttcaattcggtgctccgccagccccagcttggcgtcctgagaaatggatggtcttcacaataccctcttcaatcccttctgactggttatcagtgcagtggtaatgatgaacacacttcttatggagaaacaggagtcccagttcctccttttggatgtaccttctcttctgctcccaatatggaacatgtactagcagttgccaatgaagaaggctttgttcgattgtataacacagaatcacaaagtttcagaaagaagtgcttcaaagaatggatggctcactggaatgccgtctttgacctggcctgggttcctggtgaacttaaacttgttacagcagcaggtgatcaaacagccaaattttgggacgtaaaagctggtgagctgattggaacatgcaaaggtcatcaatgcagcctcaagtcagttgccttttctaagtttgagaaagctgtattctgtacgggtggaagagatggcaacattatggtctgggataccaggtgcaacaaaaaagatgggttttataggcaagtgaatcaaatcagtggagctcacaatacctcagacaagcaaaccccttcaaaacccaagaagaaacagaattcaaaaggacttgctccttctgtggatttccagcaaagtgttactgtggtcctctttcaagacgagaataccttagtctcagcaggagctgtggatgggataatcaaagtatgggatttacgtaagaattatactgcttatcgacaagaacccatagcatccaagtctttcctgtacccaggtagcagcactcgaaaacttggatattcaagtctgattttggattccactggctctactttatttgctaattgcacagacgataacatctacatgtttaatatgactgggttgaagacttctccagtggctattttcaatggacaccagaactctaccttttatgtaaaatccagccttagtccagatgaccagtttttagtcagtggctcaagtgatgaagctgcctacatatggaaggtctccacaccctggcaacctcctactgtgctcctgggtcattctcaagaggtcacgtctgtgtgctggtgtccatctgacttcacaaagattgctacctgttctgatgacaatacactaaaaatctggcgcttgaatagaggcttagaggagaaaccaggaggtgataaactttccacggtgggttgggcctctcagaagaaaaaagagtcaagacctggcctagtaacagtaacgagtagccagagtactcctgccaaagcccccagggtaaagtgcaatccatccaattcttccccgtcatccgcagcttgtgccccaagctgtgctggagacctccctcttccttcaaatactcctacgttctctattaaaacctctcctgccaaggcccggtctcccatcaacagaagaggctctgtctcctccgtctctcccaagccaccttcatctttcaagatgtcgattagaaactgggtgacccgaacaccttcctcatcaccacccatcactccacctgcttcggagaccaagatcatgtctccgagaaaagcccttattcctgtgagccagaagtcatcccaagcagaggcttgctctgagtctagaaatagagtaaagaggaggctagactcaagctgtctggagagtgtgaaacaaaagtgtgtgaagagttgtaactgtgtgactgagcttgatggccaagttgaaaatcttcatttggatctgtgctgccttgctggtaaccaggaagaccttagtaaggactctctaggtcctaccaaatcaagcaaaattgaaggagctggtaccagtatctcagagcctccgtctcctatcagtccgtatgcttcagaaagctgtggaacgctacctcttcctttgagaccttgtggagaagggtctgaaatggtaggcaaagagaatagttccccagagaataaaaactggttgttggccatggcagccaaacggaaggctgagaatccatctccacgaagtccgtcatcccagacacccaattccaggagacagagcggaaagacattgccaagcccggtcaccatcacgcccagctccatgaggaaaatctgcacatacttccatagaaagtcccaggaggacttctgtggtcctgaacactcaacagaattatagattctaatctgagtgagttactgagctttggtccactaaaacaagctgagctttggtccactaaaacaagatgaaaaatacaagagtgactctataactctggtctttaagaaagctgccttttcatttttagacaaaatcttttcaacgctgaaatgtacctaatctggttctactaccataatgtatatgcagcttcccgaggatgaatgctgtgtttaaatttcataaagtaaatttgtcactctagcattttgaatgaatagtcttcactttttaaattattcatcttctctataataatgacatcccagttcatggaggcaaaaaacaagtttcttgttatcctgaaactttctatgctcagtggaaagtatctgccagccacagcatgaggcctgtgaaggctgactgagaaatcctctgctgaagacccctggttctgttctgcctccaacatgtataattttatttgaaatacataatcttttcactatgcttttgtggggttttttttaagtatgtgtaaaaatgtgatgctcagataagtacatttatatcagttcagtgttaaaatgcagtctcttgagttaaagtcatctttattttaaatgcagtgataaatgtcaactcttcggagaaactaggagaacaacaacagaaagctgtgtttgtcttttttctctcaaatatatctcccgtatgagatttcaggtccccatgttttcaccaagcaatctgctatgtcagccaacccaacatcactttctacaggaggttatgatttttgccatttactagaggaagatgttttatgaaatcaatttggggtttgaattcaggtgcagtcatcagttctttaggggctgcaatgttttaaaaaaaataagtcatcagattttaagaaaaaagtgatgatttcttattgatatttttgtaacagaatatagctcttaactgaaaatccagaaccagaaacataaatcttgagtttcttttcatgtacataaaaagcaatagccttttagtatagatagccctgagccaaaaagtaatagaattttctctagatatttaatacagagagtgtatagactgactctaagttaataatgtgcaaaatatcttaaacatccctccccttattcaacaattatgtatcagtgatcttgaaccattgttttatatttttcacctttgtaacctcatggaaagaggctttacatactttctatgtactatttacttagaagggagcccccttccagtcatgaaacttcatttgttttatccatatccctgaggactgtgtagactttatgtcagttctgtgtagactttatgtcagtttttgtcattatttgaaaatctattctgacaactttttaattcctttgatcttataagttaaagctgtaacaactgaaattgcatggatcaagtaagcatagttttatccagggagaaaaataaaaggaagccatagaattgctctggtcaaaaccaagcacaccatagccttaactgaatatttaggaaatctgcctaatctgcttatatttggtgtttgttttttgactgttgggctttgggaagatgttatttatgaccaatatctgccagtaacgctgtttatctcacttgctttgaaagccaatgggggaaaaaaatccatgaaaaaaaaaagattgataaagtagatgattttgtttgtatccctacccatctcctggcagccctactgagtgaaattgggatacatttggctgtcagaaattataccgagtctactgggtataacatgtctcacttggaaagctagtacttttaaatgggtgccaaaggtcaactgtaatgagataattatccctgcctgtgtccatgtcagactttgagctgatcctgaataataaagccttttacctt

SEQ ID NO: 3244 - protein, 730 aa, Homo sapien
MLFNSVLRQPQLGVLRNGWSSQYPLQSLLTGYQCSGNDEHTSYGETGVPVPPFGCTFSSAPNMEHVLAVANEEGFVRLYNTESQSFRKKCFKEWMAHWNAVFDLAWVPGELKLVTAAGDQTAKFWDVKAGELIGTCKGHQCSLKSVAFSKFEKAVFCTGGRDGNIMVWDTRCNKKDGFYRQVNQISGAHNTSDKQTPSKPKKKQNSKGLAPSVDFQQSVTVVLFQDENTLVSAGAVDGIIKVWDLRKNYTAYRQEPIASKSFLYPGSSTRKLGYSSLILDSTGSTLFANCTDDNIYMFNMTGLKTSPVAIFNGHQNSTFYVKSSLSPDDQFLVSGSSDEAAYIWKVSTPWQPPTVLLGHSQEVTSVCWCPSDFTKIATCSDDNTLKIWRLNRGLEEKPGGDKLSTVGWASQKKKESRPGLVTVTSSQSTPAKAPRVKCNPSNSSPSSAACAPSCAGDLPLPSNTPTFSIKTSPAKARSPINRRGSVSSVSPKPPSSFKMSIRNWVTRTPSSSPPITPPASETKIMSPRKALIPVSQKSSQAEACSESRNRVKRRLDSSCLESVKQKCVKSCNCVTELDGQVENLHLDLCCLAGNQEDLSKDSLGPTKSSKIEGAGTSISEPPSPISPYASESCGTLPLPLRPCGEGSEMVGKENSSPENKNWLLAMAAKRKAENPSPRSPSSQTPNSRRQSGKTLPSPVTITPSSMRKICTYFHRKSQEDFCGPEHSTEL

SEQ ID NO: 3245 - DNA, 1118 bp, Homo sapien
ctgatgaaagtgcttccaaactgaaaattggacgtgcctttacgatggtaagcgttaacagctcccactgcttctataatgactcctttaagtacactttgtatgggtgcatgttcagcatggtgtttgtgcttgggttagtatccaattgtgttgccatatacattttcatctgcgtcctcaaagtccgaaatgaaactacaacttacatgattaacttggcaatgtcagacttgctttttgtttttactttacccttcaggattttttacttcacaacacggaattggccatttggagatttactttgtaagatttctgtgatgctgttttataccaacatgtacggaagcattctgttcttaacctgtattagtgtagatcgatttctggcaattgtctacccatttaagtcaaagactctaagaaccaaaagaaatgcaaagattgtttgcactggcgtgtggttaactgtgatcggaggaagtgcacccgccgtttttgttcagtctacccactctcagggtaacaatgcctcagaagcctgctttgaaaattttccagaagccacatggaaaacatatctctcaaggattgtaattttcatcgaaatagtgggattttttattcctctaattttaaatgtaacttgttctagtatggtgctaaaaactttaaccaaaccagttacattaagtagaagcaaaataaacaaaactaaggttttaaaaatgatttttgtacatttgatcatattctgtttctgttttgttccttacaatatcaatcttattttatattctcttgtgagaacacaaacatttgttaattgctcagtagtggcagcagtaaggacaatgtacccaatcactctctgtattgctgtttccaactgttgttttgaccctatagtttactactttacatcggacacaattcagaattcaataaaaatgaaaaactggtctgtcaggagaagtgacttcagattctctgaagttcatggtgcagagaattttattcagcataacctacagaccttaaaaagtaagatatttgacaatgaatctgctgcctgaaataaaaccattaggactcactgggacagaactttcaag

SEQ ID NO: 3246 - protein, 344 aa, Homo sapien
MVSVNSSHCFYNDSFKYTLYGCMFSMVFVLGLVSNCVAIYIFICVLKVRNETTTYMINLAMSDLLFVFTLPFRIFYFTTRNWPFGDLLCKISVMLFYTNMYGSILFLTCISVDRFLAIVYPFKSKTLRTKRNAKIVCTGVWLTVIGGSAPAVFVQSTHSQGNNASEACFENFPEATWKTYLSRIVIFIEIVGFFIPLILNVTCSSMVLKTLTKPVTLSRSKINKTKVLKMIFVHLIIFCFCFVPYNINLILYSLVRTQTFVNCSVVAAVRTMYPITLCIAVSNCCFDPIVYYFTSDTIQNSIKMKNWSVRRSDFRFSEVHGAENFIQHNLQTLKSKIFDNESAA

SEQ ID NO: 3247 - DNA, 1795 bp, Homo sapien
cggcgacggccggatggctgcgtggggctgtgtggctgcgctcggcgcggcgcgtgggctttgctggcgggcggcgcgcgcggctgcggggctccagggccgccccgcccgcaggtgctatgctgtgggccccgctcagagcccacccacctttgggttcctgttggacatcgatggagtgcttgtgcggggccacagagtgatccctgctgctctgaaagccttccgaaggctggtgaactcccaggggcagctgcgggtgcccgtggtttttgttacaaatgctgggaacatcttacaacacagcaaagcccaggagctgtcagccctgctggggtgcgaggtggatgcagaccaagttatcctctctcacagccccatgaagctcttctccgagtaccatgagaagcggatgctggtgtctggacaggggcccgtgatggaaaatgcccagggactgggcttccgaaatgtcgtcaccgtggatgagctgcggatggcctttcctctgcttgacatggtggacctggagcggcggctaaagaccacgcccctcccgaggaatgacttcccccgcattgaaggggtgctcctcctaggggagccggtccgctgggagaccagcctgcagctgatcatggatgtcctcctcagcaatgggagccctggggctggcctggcaacacccccctacccccacctccccgtcctagccagcaacatggatctcctgtggatggctgaagccaagatgcccaggtttggacatggcacctttctgctgtgcctggaaaccatttaccagaaagtgacgggcaaggagctgagatacgagggcctgatgggcaaacccagcatcctcacttaccagtatgccgaggacctgatcaggcgacaggcggagaggcggggctgggccgcccccatccggaagctctatgctgtgggtgataaccctatgtctgacgtatacggcgccaacctgttccaccagtacctgcagaaggcaacgcatgatggggcgccagaactaggggccgggggcacacggcagcaacagccctcagcaagccagagctgcatctccatcctggtgtgtacaggcgtctacaatcccaggaacccacagtccacggagcctgtccttggaggaggggagcctccattccacgggcaccgagacttatgcttcagtccagggctcatggaggcctcccacgtggtgaatgacgtgaatgaggctgtgcagctggtcttccgcaaggagggctgggctttggagtgagggcagtgcggtggaggtgagggggtgagcctggacctgtgggcgagtcccattggctgggctctggcctgatcactgggctcaggtcagggcttggttcccttgccacccttcttgctgccccatgagtgtggcattactggtcacttggaagaagacagtgactctttttccctgctgggtagcattttgtatggaacggttggaattttctgggcccagttcccacgtgcctttcgtggcagtctaacctcaggccattctcttcccctgtgtgcctcagtgtccttctcatttcagtagggacttctgaaatgggggaggcagtgtggaatactgtggatgtctgtgcagagcctttgccggcactgaaggcatgcagcctgtcggcagagtgtcttaacaccagatgctactttttactgtattgtagtttattgcccggagatgtggggctttttttttaaataaaataatcataataaatgttcatgatgctgactcttgtga

SEQ ID NO: 3248 - protein, 423 aa, Homo sapien
MAAWGCVAALGAARGLCWRAARAAAGLQGRPARRCYAVGPAQSPPTFGFLLDIDGVLVRGHRVIPAALKAFRRLVNSQGQLRVPVVFVTNAGNILQHSKAQELSALLGCEVDADQVILSHSPMKLFSEYHEKRMLVSGQGPVMENAQGLGFRNVVTVDELRMAFPLLDMVDLERRLKTTPLPRNDFPRIEGVLLLGEPVRWETSLQLIMDVLLSNGSPGAGLATPPYPHLPVLASNMDLLWMAEAKMPRFGHGTFLLCLETIYQKVTGKELRYEGLMGKPSILTYQYAEDLIRRQAERRGWAAPIRKLYAVGDNPMSDVYGANLFHQYLQKATHDGAPELGAGGTRQQQPSASQSCISILVCTGVYNPRNPQSTEPVLGGGEPPFHGHRDLCFSPGLMEASHVVNDVNEAVQLVFRKEGWALE

SEQ ID NO: 3249 - DNA, 636 bp, Homo sapien
gatcgcggagtcggtgctttagtacgccgctggcacctttactctcgccggccgcgcgaacccgtttgagctcggtatcctagtgcacacgcctttgcaagcgacggcgccatgagtctgacttccagttccagcgtacgagttgaatggatcgcagcagttaccattgctgctgggacagctgcaattggttatctagcttacaaaagattttatgttaaagatcatcgaaataaagctatgataaaccttcacatccagaaagacaaccccaagatagtacatgcttttgacatggaggatttgggagataaagctgtgtactgccgttgttggaggtccaaaaagttcccattctgtgatggggctcacacaaaacataacgaagagactggagacaatgtgggccctctgatcatcaagaaaaaagaaacttaaatggacacttttgatgctgcaaatcagcttgtcgtgaagttacctgattgtttaattagaatgactaccacctctgtctgattcaccttcgctggattctaaatgtggtatattgcaaactgcagctttcacatttatggcatttgtcttgttgaaacatcgtggtgcacatttgtttaaacaaaaaaaaaaaaaaaa

SEQ ID NO: 3250 - protein, 108 aa, Homo sapien
MSLTSSSSVRVEWIAAVTIAAGTAAIGYLAYKRFYVKDHRNKAMINLHIQKDNPKIVHAFDMEDLGDKAVYCRCWRSKKFPFCDGAHTKHNEETGDNVGPLIIKKKET

SEQ ID NO: 3251 - DNA, 5634 bp, Homo sapien
gccttttccctccggctcgggagcgtctcgcttgcgccccgggcccgcggcgcccgcgcggctgcgagcctcgggtggccgcgtgccggctccaggaagccggagagggcgcggcggccaggatggcgcggcacgggccgtgcggctagacgggagccgagggaaccgccggctcgcgccctccgttctttcccggagccggcttcacgcagggccgggaacggccgtgcctctgggatccgccttcgctgacgccgggcacctacctggacgcgagcgagcgagatgcccaaccccaaaaacagcaaaggcggccgcaaaaacaagcgcgccaacagcagcggcgacgagcaggaaaatggagccggggccctggcagcggcgggcgcggcgggagcggcggccgggggggccctggcggcggcggccggttgcggggcggcggcggcgggcgcgccgggcgccggaggcgcggcgggcgccggaggcgcggggactggcgccgcgaacgctgcggccgccgcgggggctgcggccgcgggcgatgccaaaaacgaagccccatgtgccactcccctgatctgcagcttcggtaggccggtggacctggagaaggacgactaccagaaggtggtgtgcaacaacgagcactgcccctgcagcacctggatgcacctgcagtgcttctacgagtgggagagcagcatcctcgtccagttcaactgcatcggccgcgcgcgcagctggaacgagaagcaatgccgccagaacatgtggacaaagaagggctacgacctggccttccgcttctgctcttgccgctgtggccagggccacttgaagaaggacacagactggtatcaggtgaagcggatgcaggacgagaaaaagaagaagtctggctccgagaagaacacagggaggcctcctggtgaggcggcggaggaggcaaaaaagtgcaggcccccaaataagccccagaaaggcccaagccacgacctcccccgccggcattccatggaccggcagaactcccaggagaaggcagtgggtgccgcagcctacggtgcccgttcccccggtggctccccgggccagtccccacccacgggctactccatcctctctcctgcccacttcagcggcccccgctcctccagatacctcggggagttcttaaagaacgccatccatctggagcctcacaagaaggccatggctgggggccatgtgttcagaaatgcccactttgattacagccctgcggggttggcagttcacagggggggacacttcgacacccccgtgcagttccttcggcggctggacctctccgaactcctcactcacatccccaggcataagctgaacactttccacgtgcgcatggaagacgatgcccaagtgggccagggggaagacttgcggaagttcattctggccgcgctcagtgccagccacagaaacgtggtaaactgtgccctgtgccaccgggcgctcccggtgttcgaacagttcccactggtggatggaactttgttcctaagcccgtcgagacatgatgagatcgaatatgatgttccttgtcaccttcaagggagactcatgcatctgtatgccgtgtgcgtggactgcctggaaggggttcacaagatcatctgcatcaagtgtaagtcacggtgggatggcagctggcaccagctgggcactatgtacacctacgacatcctggctgcctctccatgttgtcaggcccgcctgaactgtaagcactgtgggaagccggtgatcgacgtgaggatcgggatgcagtacttctccgaatatagcaacgtccagcagtgtccacactgtgggaacctggactaccacttcgtgaagccattttcctccttcaaagttctcgaagcttattgatgaaagctttgctttagtaatagctattttattgatattattactttattacatatcttttatagggaaacattctgtgacattaatttcctttctaatttaaaggagagttactttgttgtatgtgtgccactaaaataggggctgcccttgccctgtcttgattcccgagtgttaatctgtggttttgaccagagcccagatgggtaatcctgtgcatttgggttggggttcactcttaccaagaatctttgatgcagctttaagatggtggggaggatggggtgaatttaggaaaggaatttgtggttataaactaagagcttgataggagttggaaggaaactcttactaaaatgttaactttctaaaaaccttcttttagatcttccttgggcctttggaaaaatatgtgacaagtgaatgtaagtctgtgcctggagagctaatagtgcattagtctatctcagcctagtgttctgcagcacacatgggcaggcagtttactcacactgacaggtgacctgaaagtggcacaagtgctgtttctatcactattgtaatttgccagttcatttttcatgctgaaagtaatatccaaattgtaagacatatgaaagatattagtgttgcaaatatgtttaggtaaactgacctataacagaatatgtgaaatgaatttggaaataatgcaagaaggcagaactcaatcatttaaattgtgtctttgaagttggtaatatagcttttaaggagaacccatgaataacctgatttgggcagtgatgatttattacaggttgcactgttgaagtgtcatttggtgtcaggttcttctcacaggtaaatctttcagccacagaatctaactggtgagcttcagaaccaataattgccacatttattgtcctcaaaattgcttatggccatgtttaaccaattaattctgagtttccaaaatcaaagatttgaccttaagagggaagggaaaaaagtgtgaaaggatgatgaagaaaataattttactatttcttttaaaagtatgttttggaaaatcaatgattttaatgcatagcagtatgtttgaaaaatagaccattctaaaaagcccatgataccttactgttgatgaaaaaggatgatcatatatatagaacttgattagtcagagcattgggcattccaaaatacagcctttggttcagtagattttaatgctttaaatagactgacgtcgcatacccttatagaattggaatatgatttctcaaaaattaatttgataatttcatgtatgatgtgcatatatgctaaaagaatgcagaaaatcattttatgaatagccaaatttggggttgatgtgaacattttatgttactcatttggtttatacttttttttttttttttttaactgtgtggtttttcttttcagaagtatttaggcaatattgcacgtgagtttcagttctttttttcttttttttgagatggagtctcactcttgtcacccaggctggagtgcagtagtgcgatctcagctcactgcaacctctgcctcctggattcaagcgattctcctgtcccagcctcccaggtagctgggactataggcacgtgccaccacacccggctaattttttgtatttttagtagagacagcgtttcaccatgttagctaggatggtctagatctcctgaccttgtgatctgcctgcctcggcctcccaaagtgctgggattacaggcgtgagtcactgcgcctggccaagtttcagttctatatgaagtatttgatgttttgtttgaaacaatacagcattaaagaaccaatgttattcactaatatcattcatctttcagtttggatgatttggtttgctgcatctaggtcggtgtttgatcatctgaaaaaacatttcagtgggaagaaatgcataaaatgcctataagaagtagaaagtcattgaactgacagtgtttgatgcaactaaaagaggattgtaagcatagctttctgcaaacttgtctttaatgcacaaagctgtagtggtgaattaactatctccttattgattctctcctgtacccagatgcaaaaagtgctaagtttctcttgtcctcgtaataccatttggattttatttctgaatttaaatagtaaaatatttatgatgctgatctttaacccacctaaaattttatagtgaaacctgctttatattgttgttctgaagcttacaattgacctatacattgcattcagcaagctcctgaatttagaactgccgtcagtgtagtgtatgctgtgttccatgttgcctttttagatggctttctaccccctgaacaataaataggatgaggttttactgtaattgggtaaagtttactcttggacattatttcgatgctaaagtaaggattctgtggatgttacttaaagagaaaagcataagagcatgaagcatatctgggaatatcttttgcctttaagacgattcattcttgtctagagggaaaatctggctgatttgggaataaaatataatcgaatattcaacaccatgaagataaatcttattttggaaatctactgaccttaataccccaagcttgccctgaatactttgattggaattggaatatatcaaaaaaggttagtatttttgttgtagttaggatactaaaaggatattagttacccaagagatccaatttgtttttctgatgaatagtgttcagtaaaatgaagcagtcttaagagtgactaataatttcaaagtgatttttcgtctattcttaatattttttaattatttatttttaagagttttataccttgagcagatacaatgatctgctttagtgagaggacaatttctgattgattgttttctcttcaggccatctcacctcttcattctcttgttacatttgaagcagttgatataatgggtttatactttaaaagatagacatggtgccatgaagttggggagttgggtgaattatcccattctagttacagaggagctttccttaaatgccctttaacttctaggttttgttcaagaagttcattttctgagtaaaagttattttcatatatgttgggggaaaattaactcatctaaaaagaatcttattaggtatttgaactctaaaactaacagataagacagatatgtaccttattagagcaccagaactaatttgctaagtcttttgtttagtcctgcaagactgatgcttaatacacagtctgttctcctgtgtctaggtcaggaactccagtttgcttttctgttttgtgtcctggtagcagctgttgagtaactttcattggaggttgggaaggaagtgaggagaaagtgttcttgtttagtgttttatttcctataataggatgctgcctaacccagttcatctctatgtcctgttcactgaatattccgggtaattgaaagaaaatataatggatgggctccattaaaaccagctcaaaaataaattcttgtcagtaaagatttcttgtcaagatgtcttggattgcacttttgttgaggaaagacagtgtaaatagttaaagaatgttgataaaattgaaacatttggttgtggaattgtgtgtggttttagagggtttctgtttgtgaaatgtatgtattaaaaataataaaattccagaaactaaaaaaaaaaaaaaaaaaaaaaa

SEQ ID NO: 3252 - protein, 543 aa, Homo sapien
MPNPKNSKGGRKNKRANSSGDEQENGAGALAAAGAAGAAAGGALAAAAGCGAAAAGAPGAGGAAGAGGAGTGAANAAAAAGAAAAGDAKNEAPCATPLICSFGRPVDLEKDDYQKVVCNNEHCPCSTWMHLQCFYEWESSILVQFNCIGRARSWNEKQCRQNMWTKKGYDLAFRFCSCRCGQGHLKKDTDWYQVKRMQDEKKKKSGSEKNTGRPPGEAAEEAKKCRPPNKPQKGPSHDLPRRHSMDRQNSQEKAVGAAAYGARSPGGSPGQSPPTGYSILSPAHFSGPRSSRYLGEFLKNAIHLEPHKKAMAGGHVFRNAHFDYSPAGLAVHRGGHFDTPVQFLRRLDLSELLTHIPRHKLNTFHVRMEDDAQVGQGEDLRKFILAALSASHRNVVNCALCHRALPVFEQFPLVDGTLFLSPSRHDEIEYDVPCHLQGRLMHLYAVCVDCLEGVHKIICIKCKSRWDGSWHQLGTMYTYDILAASPCCQARLNCKHCGKPVIDVRIGMQYFSEYSNVQQCPHCGNLDYHFVKPFSSFKVLEAY

SEQ ID NO: 3253 - DNA, 6894 bp, Homo sapien
tgacccggtccgtgtgggccagcgggaaggaagccagttgagggaagttctccatgaatgtacgtcacaatgatgatgaccgaccaaatccctctggaactgccaccattgctgaacggagaggtagccatgatgccccacttggtgaatggagatgcagctcagcaggttattctcgttcaagttaatccaggtgagactttcacaataagagcagaggatggaacacttcagtgcattcaaggacctgctgaagttcccatgatgtcacccaatggatccattcctcccattcatgtgcctccaggttatatctcacaggtgattgaagatagtactggagtccgccgggtggtggtcacaccccagtctcctgagtgttatcccccaagctacccctcagccatgtctccaacccatcatctccctccctatctgactcaccatccacattttattcataactcacacacggcttactacccacctgttaccggacctggagatatgccgcctcagttttttccccagcatcatcttccccacacaatatatggtgagcaagaaattataccattttatggaatgtcaagctacatcacccgagaagaccagtacagcaagcctccgcacaaaaaactgaaagaccgccagatcgatcgccagaaccgactcaacagacctccttctgctatctacaaaagcagctgcacaacagtatacaatggctatgggaagggccatagtggtggaagtggcggaggcggcagcggtagtggtcccggaattaagaaaacagagcgacgagcaagaagcagcccaaagtcgaatgattcagacttgcaagaatatgagttggaagtaaagagggtgcaagacattctttcgggaatagagaaaccacaggtttctaatattcaggcaagagcagttgtgttgtcctgggctccccctgttggactttcctgtggaccccacagtggtctttccttcccctacagttacgaggtggccttatcagacaaaggacgagatggaaaatacaagataatttacagtggagaagaattagaatgtaacctgaaagatcttagaccagcaacagattatcatgtgagggtgtatgccatgtacaattccgtaaagggatcctgctccgagcctgttagcttcaccacccacagctgtgcacccgagtgtcctttcccccctaagctggcacataggagcaaaagttcactaaccctgcagtggaaggcaccaattgacaacggttcaaaaatcaccaactaccttttagagtgggatgagggaaaaagaaatagtggtttcagacagtgcttcttcgggagccagaagcactgcaagttgacaaagctttgtccggcaatggggtacacattcaggctggccgctcgaaacgacattggtaccagtggttatagccaagaggtggtgtgctacacattaggaaatatccctcagatgccttctgcaccaaggctggttcgagctggcatcacatgggtcacgttgcagtggagtaagccagaaggctgttcacccgaggaagtgatcacctacaccttggaaattcaggaggatgaaaatgataaccttttccacccaaaatacactggagaggatttaacctgtactgtgaaaaatctcaaaagaagcacacagtatacattcaggctgactgcttctaatacggaaggaaaaagctgtccaagcgaagttcttgtttgtacgacgagtcctgacaggcctggacctcctaccagaccgcttgtcaaaggcccagttacatctcatggctttagtgtcaaatgggatccccctaaggacaatggtggttcagaaatcctcaagtacttgctagagattactgatggaaattctgaagcgaatcagtgggaagtggcctacagtgggtcggctaccgaatacaccttcacccacttgaaaccaggcactttgtacaaactccgagcatgctgcatcagtaccggcggacacagccagtgttctgaaagtctccctgttcgcacactaagcattgcaccaggtcaatgtcgaccaccgagggttttgggtagaccaaagcacaaagaagtccacttagagtgggatgttcctgcatcggaaagtggctgtgaggtctcagagtacagcgtggagatgacggagcccgaagacgtagcctcggaagtgtaccatggcccagagctggagtgcaccgtcggcaacctgcttcctggaaccgtgtatcgcttccgggtgagggctctgaatgatggagggtatggtccctattctgatgtctcagaaattaccactgctgcagggcctcctggacaatgcaaagcaccttgtatttcttgtacacctgatggatgtgtcttagtgggttgggagagtcctgatagttctggtgctgacatctcagagtacaggttggaatggggagaagatgaagaatccttagaactcatttatcatgggacagacacccgttttgaaataagagacctgttgcctgctgcacagtattgctgtagactacaggccttcaatcaagcaggggcagggccgtacagtgaacttgtcctttgccagacgccagcgtctgcccctgaccccgtctccactctctgtgtcctggaggaggagccccttgatgcctaccctgattcaccttctgcgtgccttgtactgaactgggaagagccgtgcaataacggatctgaaatccttgcttacaccattgatctaggagacactagcattaccgtgggcaacaccaccatgcatgttatgaaagatctccttccagaaaccacctaccggatcagaattcaggctataaatgaaattggagctggaccatttagtcagttcattaaagcaaaaactcggccattaccacccttgcctcctaggctagaatgtgctgctgctggtcctcagagcctgaagctaaaatggggagacagtaactccaagacacatgctgctgaggacattgtgtacacactacagctggaggacagaaacaagaggtttatttcaatctacagaggacccagccacacctacaaggtccagagactgacggaattcacatgctactccttcagaatccaggcagcaagcgaggctggagaagggcccttctcagaaacctataccttcagcacaaccaaaagtgtcccccccaccatcaaagcacctcgagtaacacagttagaaggaaattcatgtgaaattttatgggagacggtaccatcaatgaaaggtgaccctgttaactacattctgcaggtattggttggaagagaatctgagtacaaacaggtgtacaagggagaagaagccacattccaaatctcaggcctccagaccaacacagactacaggttccgcgtatgtgcgtgtcgtcgctgtttagacacctctcaggagctaagcggagccttcagcccctctgcggcttttgtattacaacgaagtgaggtcatgcttacaggggacatggggagcttagatgatcccaaaatgaagagcatgatgcctactgatgaacagtttgcagccatcattgtgcttggctttgcaactttgtccattttatttgcctttatattacagtacttcttaatgaagtaaacccaacaaaactagaggtatgaattaatgctacacattttaatacacacatttattcagatactcccctttttaaagcccttttgttttttgatttatatactctgttttacagatttagctagaaaaaaaatgtcagtgttttggtgcacctttttgaaatgcaaaactaggaaaaggttaaactggatttttttttttaaaaaaaagaaaaaaaaagaagaaaagtataccagataccaaaagctagctttcttatgttttcctttaaattttcagatttaccttcattctgttttcactgatgtcttttgcaagcctttgatttttttttttttgttacagtttagtaatttatattcaccagtcacttcatatgtcttgaacatctgtatctgtaaacatgaatcaccgtgtgtgtacttacagggctaggatttcagtgttgtcagagtattaccacacagcaacagcaacatacagaagatatgttcactcagataagactgccctaaacaaccattttgtcactcagttatttaactgtgtttagctcatttaaatcaaaatgtgtactttaatctaaaatgttttaataatctgtatttcttataattttaacactatgagctgcctgtataagaaatcaagtaaccagaatgcacctataaattatggagcattgtagattttaccacatcaattcatagcagtaactttaagagggcattgtgcaatagttagttgttttcttgttcagctattttaaaggctgctttaacttgtttgtttgtctttgtatataactacttctaatctaatcactagagttattatattctgttatgtttgaccagaattatatgacaagaactggtgacagtttagtgcctctgcccattgtccatgatttacactaattgtgagcagtcttcttatgtgtcagctcattatttttgaaacatttgcctttaggctgttctttgaggtatcaatgaagtgattgaatttcaataccttaattcagtgcacataatactaatgtaacagcagatgaaaattgataaaacccaaaagagagtcatctaaatttgtagttcctatttctgtgggtttgcctggccatggttggagagggaatggtgtttgatggtaaacacagggtgtttggggatcaaggagcctagattctctccctggatctgtcactaacttgctgcgtgacctgaacacgtcactttacctctctgtgcctcagttttcccatgcatgaaaaataaaataaaataaaacggggattctaatgtttgtaagtgctttgagatctttgaccaacaggtgctattggagtgcaaagtgttactcttacgtgtttattttgagtcatgagataatcaattttaacccaaagtcattggattatttatatgaagtccataatgttcgagtacctcagggacatttaagagttggaggtgcaaatatattccaaaagggtgcaacagacacagtgtatccccctgcttctgtttttgtatatttttgctacttggtttttcttgatcatagctattttgtgcttgatctttattgtctaagatgcagtatcctgtactagcttataatattcccataccaaagtcatggggaaacaaacattattttgtttttggtttatttatactatattctgcatacagtactttaaatgccaattacagtgcaatctttatttattgtaaaattttttaagtgtacttatgtactaattttcccttgtagcatgttatatttttgtgttttatacttttgtaattttaggtcagtcttgttccttggcaacatctgtagtattattaatcttctgacattttcttatgtttttaaaaagataagagcatctagtgcattaaatgccaaaaaaaaaatacattatcagtgattgaaacgtttacatgtacccaaaaaccataatcatctcttggaagaaaatgctgagatcaatgaattattctgtgtgcctatattgacgtagtgagtactagagagttctgtattttattattgactataataattagtttaattagctttgcaaactgatggcatcaaggtaaatatatttttgccaaagttctggccttccaaaactcacccccttatttaaatgtgtgctatgacccactatgaccacagcatctgcattttctaaaaaattccatgcaggtgttttggggagaggtattttttaagcaatgaaaattcaactgagtacaaagccccctcttggggggttggggaagtctcttttttgaaacacttcagaactgctgctataaagaaattctctaattggttgaattttttttttaagtaaatagtactttaggccaaaatttatatgaatatttgatcttcttgagattttcatactatcatttaaccaccaggaagctgaagtgtgtgaagtacaaagctgacagcactttattttattgctctccattatttggtattcattatattccttcagtcagaaaattattactctctatggcactgttttttatcacaaatatgtatatgtgatattgatatataactatatatattgccatcacacacgaacaataaaataaagtgttctattaacctgatctctttgcccttttgctatgtgaggagtgaatgagtggccttctgatgctctgactcttctctgtatgtcaaactcatccctggcacaagaaattccagtcatgtgaagcaaactgccctttgtcctcaaagaaattgttgaaaaagaaaactttttaaagagattttttgcatattctctgccttgttcttatcaacttgaaatgttggcattttctaaccttgttttgttggctacaataattcagtattcatgtcaaaattgagaagtgccctaattgaatgtgtttgaatgttatccttgcacaattctttaaattgaaagataaaatgttttacctcactgttggacatacattccaagcttttcaactctaggagaaaaagaaaatcatgttttcctgtattgtaaattttagactatttcatatacattgtattaaaactgccatatcaattttaatgtatagattttgcaaatattatgctatatgtaatacctaactgtatctgtagtgtatatgtaatatatttatgcccaataaatgttttaattctttctga

SEQ ID NO: 3254 - protein, 1204 aa, Homo sapien
MYVTMMMTDQIPLELPPLLNGEVAMMPHLVNGDAAQQVILVQVNPGETFTIRAEDGTLQCIQGPAEVPMMSPNGSIPPIHVPPGYISQVIEDSTGVRRVVVTPQSPECYPPSYPSAMSPTHHLPPYLTHHPHFIHNSHTAYYPPVTGPGDMPPQFFPQHHLPHTIYGEQEIIPFYGMSSYITREDQYSKPPHKKLKDRQIDRQNRLNRPPSAIYKSSCTTVYNGYGKGHSGGSGGGGSGSGPGIKKTERRARSSPKSNDSDLQEYELEVKRVQDILSGIEKPQVSNIQARAVVLSWAPPVGLSCGPHSGLSFPYSYEVALSDKGRDGKYKIIYSGEELECNLKDLRPATDYHVRVYAMYNSVKGSCSEPVSFTTHSCAPECPFPPKLAHRSKSSLTLQWKAPIDNGSKITNYLLEWDEGKRNSGFRQCFFGSQKHCKLTKLCPAMGYTFRLAARNDIGTSGYSQEVVCYTLGNIPQMPSAPRLVRAGITWVTLQWSKPEGCSPEEVITYTLEIQEDENDNLFHPKYTGEDLTCTVKNLKRSTQYTFRLTASNTEGKSCPSEVLVCTTSPDRPGPPTRPLVKGPVTSHGFSVKWDPPKDNGGSEILKYLLEITDGNSEANQWEVAYSGSATEYTFTHLKPGTLYKLRACCISTGGHSQCSESLPVRTLSIAPGQCRPPRVLGRPKHKEVHLEWDVPASESGCEVSEYSVEMTEPEDVASEVYHGPELECTVGNLLPGTVYRFRVRALNDGGYGPYSDVSEITTAAGPPGQCKAPCISCTPDGCVLVGWESPDSSGADISEYRLEWGEDEESLELIYHGTDTRFEIRDLLPAAQYCCRLQAFNQAGAGPYSELVLCQTPASAPDPVSTLCVLEEEPLDAYPDSPSACLVLNWEEPCNNGSEILAYTIDLGDTSITVGNTTMHVMKDLLPETTYRIRIQAINEIGAGPFSQFIKAKTRPLPPLPPRLECAAAGPQSLKLKWGDSNSKTHAAEDIVYTLQLEDRNKRFISIYRGPSHTYKVQRLTEFTCYSFRIQAASEAGEGPFSETYTFSTTKSVPPTIKAPRVTQLEGNSCEILWETVPSMKGDPVNYILQVLVGRESEYKQVYKGEEATFQISGLQTNTDYRFRVCACRRCLDTSQELSGAFSPSAAFVLQRSEVMLTGDMGSLDDPKMKSMMPTDEQFAAIIVLGFATLSILFAFILQYFLMK

SEQ ID NO: 3255 - DNA, 5737 bp, Homo sapien
ggcacgagcagcctttcaggcagggtggcaaccaactatatctgaggaccagagccattttggggcaccagagcttgtgacctctccatctccacccagctgggtccaggggccactctcagcactcacctcagcagctgacatcataaagcagacttgggaacctggaagcactctggagaacctttccctgagacatggagctttggggccgaatgctgtgggccctcctgtctggcccagggaggaggggaagtacccggggctgggccttcagctcatggcaaccccaaccacctctggctgggttatccagtgccatagaactggtcagccactggactggggtctttgagaagaggggtatccctgaggcccgggaatccagtgagtacatcgtggctcatgtccttggagccaaaacatttcagagcctgaggccggcactttggacccagcccttgacctctcagcaactacagtgtatccgggagctgagtagccgtcgattgcagaggatgccggtgcagtacatccttggagagtgggacttccaggggctcagcctaaggatggtgcccccagtgtttattccgcggccagaaacagaggaactggttgagtgggtgctggaagaggtggcccagaggtcccatgctgtgggatccccaggcagccccctcattctggaggtgggctgcggatcaggagccatctccctcagcctgctgagccagctcccccagagccgagtcattgctgtggataagcgggaagctgctatctctctgacccatgagaatgctcagaggcttcggttgcaggacaggatttggatcatccacctcgacatgacctcagaaaggagctggacacacctgccctggggccccatggacctgattgtcagcaaccctccctacgtcttccaccaggacatggagcagctggcccctgagatccgcagctatgaagaccccgcggccctggatggtggggaggagggcatggacatcattacccacattctggccttggcaccccggctcctgaaagactctggtagtatcttcttagaagtggacccaaggcacccggagcttgtcagcagctggcttcagagccggcctgacctgtaccttaatcttgtggctgtgcgcagggacttctgtgggaggccccggttcctgcatatccggaggtctgggccatagcatggctgccctgtggatgccttgtcagtgccgccagcctgaccagaggggaggtggatggcactttccagagcccaggttcttatggcatttcccagggttctgtgatttccccatgctctgcatttctaggatatttctaggacacctggattggctccatcacatcagagtggctgagggcagttgctctgtgttggtgaaattgctgtgggggtatcgggggatatggccagtaaagtattgagagactaacaaatggtgacctaatgttttgtccatgacttgcaggtcccctgacccccttactcccaggtagcactggggcaagggtttccttctgccccagcagggctggcccgtcagtcccctgcttggtagtggtgtgggggtgcagtgtggaggaaggcacgtgagtcctcactcctggccttggataccatgggtcctggcataagcagctcactcccagtgattgattagtcctccactgccctgggtgcatgcgtacacaattccctggccaagcctggctcgagcacaggaagctcatctgcgttttggctcaaggatgactgcctgctttctggaggggagggtctggaggtctttgctgcacagttcctggtcgcacatccacgttcatttaactgaaggcttgagccagtgaggggtgtttcctttttatccccatagcttttagctaaaacatccctcccgagttgaccccctggggtttcaaataacccatgtgtccctggttggggctggggagagtgagaagctgagatactgggcacagggttgtggcctccaccccagctctggtctgtgcagactcatggccaccaggaggcctgcagatccagccttcctgtcaacagcgacaggaaatctctaggttggtgagtgctggtgatgtgagcctacatcagggtgggtcctaagaaacatggcaaaccaggctgtctcattccactaactgccccctgccaccctggcacttcccagggcctggcagtatggtctgatgggcagtatggtccaataggcagcatcctctgctgcagctgggagagctgagttccagggctgtgtcctgcagtgggaccttgggcaactcctttccctatgagaagctggctcttctgagtccagggccaacgccaactggcaacctctttactcttagtcaagtggaatgtgcatgctggcatctgaatgtccattcgccaggcatggagagcaagagaaggtatgtactgcctgaggtcacatgacagtgaccaagtggagacagtaagttagatccctccctttggggagcctatattgctggagtcatacccagcctaagtgttgccctgcactatggctggaggacatttggtagaggtcacactgcagctcccagtgccccagtgtcctgccctgtgcccagccccagctgcatggactctgagctgcccctggcttcctttaaggaggctgctccagaaggaacctgggtggggagggcgaagggggtgcacaaccagggcaaggctccccacttccttagtcccccatgctcacagacctttgcctgctaaggtcctcaccagtattgccctttctgtctttctccttgtgccctttggctcttgctgtcttcagcagcatctcagggtagctgccctgacctcggagcagtctgtcgcccccctacacctcagccagtcctggcttccctgatggtctctccctcctggcctcaggcccattcctgaggaagggccttggcgagcttgtggatgttgcaccagaagagagtgcagtgttggagagtgacactgtcggggcagctggggccacaagcaggagccggcctcgggcacaactttctgcccagaaaaatgtgcagcttgactctgctgaggaaaaggtccaagccaagaggactggcaggcggggcctcaagcctgcagccactggcttgattgggccctggacgttgagcccagatgttggagccacaccagcctggatttcaatcccagaatctgcccctcaccaggatgtgaccttgggcagatgacttcacctcactcagccttggcttctaaggctgagaaatgggacttaatgcttttttattttataggatgcatgtgaggagcccatggaatgtgcctggcttggcacattgtggcatttttccttgccttcctcggagggcagacacagggaggaaggacccagtgccctcaggcgtccatctgatgcatgggaccaacataaggcaggcagggatacaaggcagtctggaaagaagggaaggcaggagtttcagtcttgggctcttgactcctcgctgttgtctagagatggagccagcaggctggtagcctggcagcctacatctcccctcagcctctcctcactatggccccagtgccttgaggcccaggccagggcagccagtggctctagctcagggaaagccaggcccacctgccctatcccctcccttgctcctgaggccaaagccagagactcgaacagcctccccaccaccaccagcatatgtcaaggagcacttgcaggcagaatgggaggaggacatggagctgatggagtccaggctgtgcaagcccctgaggtcttgagagatgtgcccactgcccgtgcagcctccttcagccagagcccagagcatagacaggagtgtaggagtccctgtttgatgtactctgggagagtaattctatctcctcttctgatagttggggaaactgaggccttgtctcacagttggatgcttttcccagttgtcagtgggtttctccatgggtctcatacagctgccttattgaaataggccccgaaccccctaaatgcaaaaaatactcttttttgctcctttacccccacctggaccctgggctattggctgctcccaatccttgccccaaacacttagctggctccccatgacttaagtgtgttctcttgtgtcctatggaatccagttctgaagaggtgggggaggacaactgtgggaaaagccctgggggcccctcccaaggccccatcagtgctctgagtaggctgtcatcagaacaaaagggctccactgctgacaaggtttgagaactgctggcttgaggtgagaacccctttaacctctgcgggacagcatgtctttccctatccaccttcgattcttttctcttttttttcttcattggctccttcttagtggattctcttctctactgccctgggcttcagcctttgtgcagtactctcgatgccctgaacacacaccttccctttgcccaggcggtgcaaacaatccacttcttcaagctccaacacaaatgctgcctcctttaggatgcctgctctgtgctctccctgcctcccctagcccatacctctgctggcaccttctgtaccatgccttcagaaaccttcttatccccctcatctctggggccccctgtggatctggcatacccaagttcagtaaatgtctatcagtaagctgatggtacatgcattttctagaatagagctgggacttcccatgtggcccacatctgacctggcagcccatgtattccggtcattagggatgggaagccatgaggacctggccttctgcccgacccaggcagccattcaagttgagcaatggccacttcgaagactcaagtgcacctgatccctgcgcaacagccacaccaggagaacaggctgtccttggcggcagtaggagcaggcgccaggtttcctggagctcttggcttcagccagcccccagccagagtcctggctaggacagtgacctgatctcctcctcatgaccttctgccctggacaagccccctgaactggatttgggactgtcaaagcaactctacccctgctctggtaggctgaacagtgaccccccaaaatggcagtgtcttaatcacctaaaccttaacatgtgactatattaccttcacatagcaaaatggactttgcagatgtgattaaggatcttgagatggaaggagtatcctggatttttcaggtaaactgagtataatcacaagggcctctgtaaaggaggcaggagtgtcagagtgacggaagaaaatgtatgtaacaatggaagcagaggtcagagtgatgcaattgctggaggaagagccatgagccgaggaatgcagacagcctcttctcctctggggcctcaagaagaatgcagtcctgccaataccttgattttaagccctgtgaaactgatttcagattgctgacctccagaacagtaagatcataaatttgtgttgttttcacatgtgtgaaaacacatgtgtgataatttgttacagcagccacgggaaacgaatatagattgtggtgcccaaattagagtgctgctgtaacacacgcctactgattgaagtggctttggaattgcaacgtggaaatgggcagaggctggaagaattttgagagtcatgataaattgccttaaccaccaaaaa

SEQ ID NO: 3256 - protein, 338 aa, Homo sapien
MELWGRMLWALLSGPGRRGSTRGWAFSSWQPQPPLAGLSSAIELVSHWTGVFEKRGIPEARESSEYIVAHVLGAKTFQSLRPALWTQPLTSQQLQCIRELSSRRLQRMPVQYILGEWDFQGLSLRMVPPVFIPRPETEELVEWVLEEVAQRSHAVGSPGSPLILEVGCGSGAISLSLLSQLPQSRVIAVDKREAAISLTHENAQRLRLQDRIWIIHLDMTSERSWTHLPWGPMDLIVSNPPYVFHQDMEQLAPEIRSYEDPAALDGGEEGMDIITHILALAPRLLKDSGSIFLEVDPRHPELVSSWLQSRPDLYLNLVAVRRDFCGRPRFLHIRRSGP

SEQ ID NO: 3257 - DNA, 1589 bp, Homo sapien
gtctcttcctcgctccctctctttctctcctccctctgccttcccagtgcataaagtctctgtcgctcccggaacttgttggcaatgcctattttttggctttcccccgcgttctctaaactaactatttaaaggtctgcggtcgcaaatggtttgactaaacgtaggatgggacttaagttgaacggcagatatatttcactgatcctcgcggtgcaaatagcgtatctggtgcaggccgtgagagcagcgggcaagtgcgatgcggtcttcaagggcttttcggactgtttgctcaagctgggcgacagcatggccaactacccgcagggcctggacgacaagacgaacatcaagaccgtgtgcacatactgggaggatttccacagctgcacggtcacagcccttacggattgccaggaaggggcgaaagatatgtgggataaactgagaaaagaatccaaaaacctcaacatccaaggcagcttattcgaactctgcggcagcggcaacggggcggcggggtccctgctcccggcgttcccggtgctcctggtgtctctctcggcagctttagcgacctggctttccttctgagcgtggggccagctccccccgcgcgcccacccacactcactccatgctcccggaaatcgagaggaagatccattagttctttggggacgttgtgattctctgtgatgctgaaaacactcatataggattgtgggaaatcctgattctcttttttatttcgtttgatttcttgtgttttatttgccaaatgttaccaatcagtgagcaagcaagcacagccaaaatcggacctcagctttagtccgtcttcacacacaaataagaaaacggcaaacccaccccattttttaattttattattattaattttttttgttggcaaaagaatctcaggaacggccctgggccacctactatattaatcatgctagtaacatgaaaaatgatgggctcctcctaataggaaggcgaggagaggagaaggccaggggaatgaattcaagagagatgtccacggccgaaacatacggtgaataattcacgctcacgtcgttcttccacagtatcttgttttgatcatttccactgcacatttctcctcaagaaaagcgaaaggacagactgttggctttgtgtttggaggataggagggagagagggaaggggctgaggaaatctctggggtaagagtaaaggcttccagaagacatgctgctatggtcactgaggggttagctttatctgctgttgttgatgcatccgtccaagttcactgcctttattttccctcctccctcttgttttagctgttacacacacagtaatacctgaatatccaacggtatagatcacaagggggggatgttaaatgttaatctaaaatatagctaaaaaaagattttgacataaaagagccttgattttaaaaaaaaaagagagagagatgtaatttaaaaagtttattataaattaaattcagcaaaaaaagatttgctacaaagtatagagaagtataaaataaaagttattgtttgaaaaaaaaaaaaaaaaaa

SEQ ID NO: 3258 - protein, 142 aa, Homo sapien
MGLKLNGRYISLILAVQIAYLVQAVRAAGKCDAVFKGFSDCLLKLGDSMANYPQGLDDKTNIKTVCTYWEDFHSCTVTALTDCQEGAKDMWDKLRKESKNLNIQGSLFELCGSGNGAAGSLLPAFPVLLVSLSAALATWLSF

SEQ ID NO: 3259 - DNA, 2568 bp, Homo sapien
aactacgaagatggcggttgcgcgcttggcagctgtggcggcctgggtaccttgtcggagctggggctgggcagccgtccccttcggtccccaccgtggcctcagcgtgctgcttgcacggatacctcagcgggcgccacggtggctcccagcttgtagacaaaagacgtcactctcattccttaatcgaccagaccttccaaacctggcttataagaagctaaaaggcaaaagtccaggaattatcttcatccctggctatctttcttatatgaatggtacaaaagcgttggcgattgaggagttttgcaaatctctaggtcacgcctgcataaggtttgattactcaggagttggaagttcagatggtaactcagaggaaagcacactggggaaatggagaaaagatgttctttctataattgatgacttagctgatgggccacagattcttgttggatctagcctcggagggtggcttatgcttcatgctgcaattgcacgaccagagaaggtcgtggctcttattggtgtagctacagctgcagataccttagtgacaaagtttaatcagcttcctgttgagctaaaaaaggaagtagagatgaaaggtgtgtggagcatgccatcaaaatactctgaagaaggagtttataacgttcagtacagtttcattaaagaagctgaacatcactgcttgttacatagcccaattcctgtgaactgccccataagattgctccatggcatgaaggatgacattgtaccttggcatacatcaatgcaggttgccgatcgagtactcagcacagatgtggatgtcatcctccgaaaacacagtgatcaccgaatgagggaaaaagcagacattcaacttcttgtttacactattgatgacttaattgataagctctcaactatagttaactagtatcacatgtttagttggtatgtaaactaatgtatccagaagattggaagagggataagaaatgaaagatcctgatactttaggcttttccctttcctctattttgtaaatataagatgagtattatttaatgatgtatttgcataagtaatgcaaattgtgaagaaggaccagctgctgtttagaaaattttctccttccttctgtccttgattttttttcattaaagtatttcctttttttaattcaagaaaagtttacctttcttatgcttatgttagctatgccagctcttaattgcatccttttctaattaggattattaataaagcgtgaatattttgttttttattatagacagaaatttgtaacattacttctgatttgaaaatgcaattcacaaaatatagggaaatttttattgaataaatttgaaatgatggagaaatttcagaagcataataaagttcacaataaggataatactttatataatgtataaagtatatataatataatatatatgttatataaactgcacattatattcaaacttaaaattgagctttttttttaaaggcccaaaattgtacagtgatacaaggagctatttctaaaatttggcttatgtataatatatttaaatggggaatttcatctaaagcaatgatgtagtatttttaatattctgattggtaaaattaaagaggaaattaatctttatatattatttcttgcagaaacattcattattttattaatattgccctaagtacaactaggcaagtgattgccacctaaatcagaagacgttctaaagtcagtaagaaagtgtgaaatgctagtataaaggttattttttttctttcctaaataactaaagtgaggtgtagattgagccttgatattatttagttaatgttttttattaattaattttggctggactttatttagcttgattaggttattatctgtcaaaccttttaagttgacaacatgactcatatatatacatgtgtataagatgagcatgtgtcaaagacttattcgactcattaatgaggaaaccagcagatagtaaacctggttcaaagtacaattcaagaaactgagtatttatgggcattgaagaaaaaatgttgagataaaattgctgtgcagaaaaaagtgttaatgaagccgacctgactacttaaccttagagacctgctttacaaggttggcccttgattggcatctgggaacttggagttcagggggcttccaccattcccagaactgatcaaagtagcttactatatctaaactgtaaaacaatatagtttctcctgaacacctgctttccttctgggagtctggaattttggtatgtgccaggcagagactacctttgtgaccagctcccagtaaaaaccccaggcactcagtctctaacaagcttttctggttgacagtgtttcacaagtgctgttacaactggttgctgggagaattaagctcatcctctgtgattccactggcggaggattcttggaagcttgcacttagtttcccctgacttcaccccatgtgtcttttttcctttgctgattttgttttgtatcctttcactgtaataaatcatggccgtgagc

SEQ ID NO: 3260 - protein, 306 aa, Homo sapien
MAVARLAAVAAWVPCRSWGWAAVPFGPHRGLSVLLARIPQRAPRWLPACRQKTSLSFLNRPDLPNLAYKKLKGKSPGIIFIPGYLSYMNGTKALAIEEFCKSLGHACIRFDYSGVGSSDGNSEESTLGKWRKDVLSIIDDLADGPQILVGSSLGGWLMLHAAIARPEKVVALIGVATAADTLVTKFNQLPVELKKEVEMKGVWSMPSKYSEEGVYNVQYSFIKEAEHHCLLHSPIPVNCPIRLLHGMKDDIVPWHTSMQVADRVLSTDVDVILRKHSDHRMREKADIQLLVYTIDDLIDKLSTIVN

SEQ ID NO: 3261 - DNA, 2739 bp, Homo sapien
cgcacgcgcagtcgtatccgtgtgatgggcgggctgttgacggcgctgcgatggctgcctgcgagggcaggagaagcggagctctcggttcctctcagtcggacttcctgacgccgccagtgggcggggccccttgggccgtcgccaccactgtagtcatgtacccaccgccgccgccgccgcctcatcgggacttcatctcggtgacgctgagctttggcgagagctatgacaacagcaagagttggcggcggcgctcgtgctggaggaaatggaagcaactgtcgagattgcagcggaatatgattctcttcctccttgcctttctgcttttctgtggactcctcttctacatcaacttggctgaccattggaaagctctggctttcaggctagaggaagagcagaagatgaggccagaaattgctgggttaaaaccagcaaatccacccgtcttaccagctcctcagaaggcggacaccgaccctgagaacttacctgagatttcgtcacagaagacacaaagacacatccagcggggaccacctcacctgcagattagacccccaagccaagacctgaaggatgggacccaggaggaggccacaaaaaggcaagaagcccctgtggatccccgcccggaaggagatccgcagaggacagtcatcagctggaggggagcggtgatcgagcctgagcagggcaccgagctcccttcaagaagagcagaagtgcccaccaagcctcccctgccaccggccaggacacagggcacaccagtgcatctgaactatcgccagaagggcgtgattgacgtcttcctgcatgcatggaaaggataccgcaagtttgcatggggccatgacgagctgaagcctgtgtccaggtccttcagtgagtggtttggcctcggtctcacactgatcgacgcgctggacaccatgtggatcttgggtctgaggaaagaatttgaggaagccaggaagtgggtgtcgaagaagttacactttgaaaaggacgtggacgtcaacctgtttgagagcacgatccgcatcctgggggggctcctgagtgcctaccacctgtctggggacagcctcttcctgaggaaagctgaggattttggaaatcggctaatgcctgccttcagaacaccatccaagattccttactcggatgtgaacatcggtactggagttgcccacccgccacggtggacctccgacagcactgtggccgaggtgaccagcattcagctggagttccgggagctctcccgtctcacaggggataagaagtttcaggaggcagtggagaaggtgacacagcacatccacggcctgtctgggaagaaggatgggctggtgcccatgttcatcaatacccacagtggcctcttcacccacctgggcgtattcacgctgggcgccagggccgacagctactatgagtacctgctgaagcagtggatccagggcgggaagcaggagacacagctgctggaagactacgtggaagccatcgagggtgtcagaacgcacctgctgcggcactccgagcccagtaagctcacctttgtgggggagcttgcccacggccgcttcagtgccaagatggaccacctggtgtgcttcctgccagggacgctggctctgggcgtctaccacggcctgcccgccagccacatggagctggcccaggagctcatggagacttgttaccagatgaaccggcagatggagacggggctgagtcccgagatcgtgcacttcaacctttacccccagccgggccgtcgggacgtggaggtcaagccagcagacaggcacaacctgctgcggccagagaccgtggagagcctgttctacctgtaccgcgtcacaggggaccgcaaataccaggactggggctgggagattctgcagagcttcagccgattcacacgggtcccctcgggtggctattcttccatcaacaatgtccaggatcctcagaagcccgagcctagggacaagatggagagcttcttcctgggggagacgctcaagtatctgttcttgctcttctccgatgacccaaacctgctcagcctggacgcctacgtgttcaacaccgaagcccaccctctgcctatctggacccctgcctagggtggatggctgctggtgtggggacttcgggtgggcagaggcaccttgctgggtctgtggcattttccaaggcccacgtagcaccggcaaccgccaagtggcccaggctctgaactggctctgggctcctcctcgtctctgctttaatcaggacaccgtgaggacaagtgaggccgtcagtcttggtgtgatgcggggtgggctgggccgctggagcctccgcctgcttcctccagaagacacgaatcatgactcacgattgctgaagcctgagcaggtctctgtgggccgaccagaggggggcttcgaggtggtccctggtactggggtgaccgagtggacagcccagggtgcagctctgcccgggctcgtgaagcctcagrtgtccccaatccaagggtctggaggggctgccgtgactccagaggcctgaggctccagggctggctctggtgtttacaagctggactcagggatcctcctggccgccccgcagggggcttggagggctggacggcaagtccgtctagctcacgggcccctccagtggaatgggtcttttcggtggagataaaagttgatttgctct

SEQ ID NO: 3262 - protein, 699 aa, Homo sapien
MAACEGRRSGALGSSQSDFLTPPVGGAPWAVATTVVMYPPPPPPPHRDFISVTLSFGESYDNSKSWRRRSCWRKWKQLSRLQRNMILFLLAFLLFCGLLFYINLADHWKALAFRLEEEQKMRPEIAGLKPANPPVLPAPQKADTDPENLPEISSQKTQRHIQRGPPHLQIRPPSQDLKDGTQEEATKRQEAPVDPRPEGDPQRTVISWRGAVIEPEQGTELPSRRAEVPTKPPLPPARTQGTPVHLNYRQKGVIDVFLHAWKGYRKFAWGHDELKPVSRSFSEWFGLGLTLIDALDTMWILGLRKEFEEARKWVSKKLHFEKDVDVNLFESTIRILGGLLSAYHLSGDSLFLRKAEDFGNRLMPAFRTPSKIPYSDVNIGTGVAHPPRWTSDSTVAEVTSIQLEFRELSRLTGDKKFQEAVEKVTQHIHGLSGKKDGLVPMFINTHSGLFTHLGVFTLGARADSYYEYLLKQWIQGGKQETQLLEDYVEAIEGVRTHLLRHSEPSKLTFVGELAHGRFSAKMDHLVCFLPGTLALGVYHGLPASHMELAQELMETCYQMNRQMETGLSPEIVHFNLYPQPGRRDVEVKPADRHNLLRPETVESLFYLYRVTGDRKYQDWGWEILQSFSRFTRVPSGGYSSINNVQDPQKPEPRDKMESFFLGETLKYLFLLFSDDPNLLSLDAYVFNTEAHPLPIWTPA

SEQ ID NO: 3263 - DNA, 4431 bp, Homo sapien
tctgttaaatgttccgaagccactgccaaaacaactgtgggagaccaaggagattcagtccctgtcaggacgccctcgatcctgtgatgttggaggtggcaatgcttttccacataatggtcaaaacctaggcctctcacccttcttggggaccttgaacactggagggtcattgccagatctaaccaacctccactactcgacacccctgccagcctccctggacaccaccgaccaccactttggcagtatgagtgtggggaatagtgtgaacaacatcccagctgctatgacccacctgggtataagaagctcctctggtctccagagttctcggagtaacccctccatccaagccacgctcaataagactgtgctttcctcttccttaaataaccacccacagacatctgttcccaacgcatctgctcttcacccttcgctccgtctgttttcccttagcaacccatctctttccaccacaaacctgagcggcccgtctcggcgtcggcagcctcccgtcagccctctcacgctttctcctggccctgaagcacatcaaggtttcagcagacagctgtcttcaaccagcccactggccccatatcctacctcccagatggtgtcctcagaccgaagccaactttcctttctgcccacagaagctcaagcccaggtgtcgccgccacccccttaccctgcaccccaggagctcacccagcccctcctgcagcagccccgcgcccctgaggcccctgcccagcagccccaggcagcctcctcactgccacagtcagactttcagcttctcccggcccagggctcatctttgaccaacttcttcccagatgtgggttttgaccagcagtccatgaggccaggccctgcctttcctcaacaggtgcctctggtgcaacaaggttcccgagaactgcaggactcttttcatttgagaccaagcccgtattccaactgcgggagtctctcgaacaccatcctgccagactccagcaccagcctgttcaaagacctcaacagtgcgctggcaggcctgcctgaggtcagcctgaacgtggacactccatttccactggaagaggagctgcagattgaacccctgagcctggacggactcaacatgttaagtgactccagcatgggcctgctggacccctctgttgaagagacgtttcgagctgacagactgtgaacagaaggcagtggaacagaagaatgtttttctgcaacagccaaaatagaatggaatagaatgaagccagctgataccacgggctttcgttatcttgacatagaaggaagcaatgccacggctccagggtttcagatgagatcccatctcagacactgtggcttcctccagatcacacagctttgtactgcctctcccgcctgtggccaaagtcgtgttgcagcaggcaggctgcttggagcttcccatgaactggaaagctcacctccactgcatctttttactggccatccagtcagccgatgtgtaagagtaggaaatactgtgtcactggaggcctccgtagcattgtgtagtgtgctcagaaccactgatctccgtccgcaccgaaggcgggcccggagtgggaggctcggcctggggcggcggcaccggagagggcacctcgatgcctgctctgacctgacccagagggcgaggccctccagcgggggacattcccaggctgagtggaccccacggctctctcccacgcctggattacgacatgaagtttttaccacaagcccgagggcaggcttgagttaggcagactgaaggctaattttcattttctcccagctggtttctgctgcttcagaaaagtacaccttttccttatggaccagaggaagaggaagaccattttatcagtcactgaaaagagtcccctggcactgatgagcctgaagagaactgtgctcctcctcgggggctggggaaggaagacagggactgcaggtgtctcatactcagtggcctccagacaaactccagacaagcacagacctccccactaagagcagccagagggagctggtgaggccctaaccccacccaccgagcaactgagcttccccatccctccccagagctgtgtctctgtgggctgggagtctaatgtcacccccctagaccgtaagctccttgagggcagggacagtgccttatcattgttgaacccgtagcacctaacacgtgcgtggcagcacagtcgtgtgctggagtgagtgctgcagaaccgtgcgtgcagcgcatgatgaatgagtgcgtccgccatgccgtaaggcaggctcacctgtagctatccccttccctgccagatcttctcagagctttagcttttctagcactcgtgcctatggtgaagcatgcactttaatatgcttttaacactaggtgaccaaatcacagtgaagccggacactgcattctccttgggctgtgctccacgcgggtgggtgggagctgtcttctgagtacatccggaagggctgagcaggtgagtgccctgagcatcctggctgggccccacccaggaagatcttccttctcagatccacgtttggctctaaattgcttcaagtagagattcattctttgaggttgaaaaaatagtttatagtaaaacgaaggcctaattcatggaagcatcattagtcatcaataccttctcataaaatagatgggccagatttccaccaccgcctgcctcctctaacttgggtgatgccagtaggtttgaagggggcagagcactgcagggggaggggggggtctaggctgtgagaggacagggtggagaggaggagaaccctgaaggagagacggaagatgccaggacctttgcttggacagccattgcccttccaggagaccctggagtgtactgagggttgctggactgttccacccagaggagcaaggctgtacaatgagggtctggatctggcacacctgtcccttatgtaaaaggagtcgtggtcacaagaccctgggctggttagcctctcccgacctcattccatttctatcttctgaccttgcctctcatctttaaaataaccctcatggggtgcccctccaccttcctctggaatccaagtattcctgtttcacatttgccccaaatctttgctgtggaattgggaaatcaaaccagagtcctcctcgcctgatttccagctcaggaagggcctgctggcctgccctgttcccagttacactttcagatccctttgtgctcaagatctcagagggggtggctttttgttaaagagccttcagtcgcaatgctacccagcaccccatgtgccaaaagaaaccagctcctgtgtcaaagggcttccaaacctgatctcactctcaacaggcgatggtgctgatgtttcaagaattgtgtttttataaaacagaggtctcagcatagtcactcttcacatagtgccttacccatgggtatcgtcatatccgggtcccagttcagtttgtctgcacagcagccaccctgcctggcaacagagaccccaagacctacacagtgaaccctactgccccaaaggcgttctccaggtgacttgtgaaaacagacctccggggaagtgatttattgggggtgtacactgggggcaatatggtttagcactgaattcaatttgtccttaggtctatgagtgagtccgatcttttcttgtgaaaggttttgggcatcgtacaacccactctgcctagaaggtgtggaggactcaccacgggcagggtcgccctggcccacagcacgtgagcctgcactcactgcggcctttgtaacaaaaccagttgtggtcctcagcatttgaagcagctgcatacttcagagtaaactatttttcattatttagttttgtcacaagaaatcgaccattgtactactctcacttacagcagttaaacagcatagaactaaaaacctgtctgcatttccattttttctttctgtatggttgtgggttttaggacatagggggttaggagaaggggtttcttgatcatgtcatgaattctcctttgtcctgtttctcctgtttcatttctcctccgcctgctgtatattacctgagctggtgttgtatcttcaagtccatatgcgtatttgcagacctttcctgttcccactcttgttggctcttctgatttatgcacagatggttcccagcatgtgtccagtgcttcatggatgggaccatcccagcaactaatcagacttcctgccagtgtcctaacccccagggcaccctgttcaaccatatttaaaaattggaatttgtataaagttgcttccaagttttataatgcatcattttacatcttttgtaattaaaagcatcacaatgaggttgtctctgcaaaaaaaaaaaaaaaaa

SEQ ID NO: 3264 - protein, 319 aa, Homo sapien
MSVGNSVNNIPAAMTHLGIRSSSGLQSSRSNPSIQATLNKTVLSSSLNNHPQTSVPNASALHPSLRLFSLSNPSLSTTNLSGPSRRRQPPVSPLTLSPGPEAHQGFSRQLSSTSPLAPYPTSQMVSSDRSQLSFLPTEAQAQVSPPPPYPAPQELTQPLLQQPRAPEAPAQQPQAASSLPQSDFQLLPAQGSSLTNFFPDVGFDQQSMRPGPAFPQQVPLVQQGSRELQDSFHLRPSPYSNCGSLSNTILPDSSTSLFKDLNSALAGLPEVSLNVDTPFPLEEELQIEPLSLDGLNMLSDSSMGLLDPSVEETFRADRL

SEQ ID NO: 3265 - DNA, 3325 bp, Homo sapien
cttacggcagtctcgcgggatttccccctctcgcgggaattatttgaacgttcgagcggtaaatactccctggggctgtcatagaagactcctcggagagcgctgcctctgggttggcgggctggcaggctgtagccgagcgcgggcaggactcgtcccggcagggttccagagccatgggagcggaaaggaggctgctgtcgattaaggaggcctttcggctggcgcagcagccgcaccagaaccaggcgaagctggtggtggcgctgagccgcacctaccgcacgatggatgataagacagtttttcatgaggagttcattcattaccttaaatatgttatggtggtctataaacgtgaaccagctgtggagagggtaatagaatttgcagcaaagtttgttacctcatttcaccaatcagatatggaagatgatgaggaagaggaagatggtggccttttaaattatttgtttacttttctcttaaagtctcatgaagcaaacagcaatgcagtgagatttagagtgtgcctgctcataaacaagcttttgggaagtatgccagaaaatgctcagattgatgatgatgtgtttgataaaattaataaagccatgcttattagattgaaagataagattccaaatgtgagaatacaggcagttctggcgctttcacgacttcaggatcccaaggatgatgaatgcccagtggttaatgcatatgctactttgattgaaaatgattcaaatccagaagttagacgggcagtgttatcatgtattgcaccatcagcaaagactttgccaaaaattgtagggcgcaccaaggatgtgaaagaggctgtcagaaagctggcttatcaggttttagctgaaaaggttcatatgagagctatgtccattgctcagagagtaatgctccttcaacaaggtcttaatgacagatcagatgctgtgaaacaagctatgcagaagcatcttcttcaaggctggttacggttctctgaaggaaatatcttagagttgctccatcggttggatgtagaaaattcttctgaagtggcagtctctgttctcaatgccttgttttcaataactcctctcagtgaactggtgggactctgtaaaaacaatgatggcaggaaattgattccagtggaaacattaactcctgaaattgctttgtattggtgtgccctttgtgaatatttgaaatcaaaaggagatgaaggtgaagaatttttagagcagattttgccagagcctgtagtatatgcagactatttattgagttacatccagagcattccagttgttaatgaagaacacagaggtgatttttcctatattggaaatttgatgacaaaagaattcataggtcaacaattgattctaattattaagtctttggataccagtgaagaaggaggaagaaaaaaactgctggctgttttacaggagattcttattttacccacaatcccaatatccctggtttcttttcttgttgaaagactactccacatcattatagatgataataagagaacacaaattgttacagaaattatctcagagattcgggcgcccattgttactgttggtgttaataacgatccagctgatgtaagaaagaaagaactcaagatggctgaaataaaagttaagcttatcgaagccaaagaagctttggaaaattgcattaccttacaggattttaatcgggcatcagaattaaaagaagaaataaaagcattagaagatgccagaataaaccttttgaaagagacagagcaacttgaaattaaagaagtccacatagagaagaatgatgctgaaacattgcagaaatgtcttattttatgctatgaactgttgaagcagatgtccatttcaacaggcttaagtgcaaccatgaatggaatcatcgaatctttgattcttcctggaataataagtattcatcctgttgtaagaaacctggctgttttatgcttgggatgctgtggactacagaatcaggattttgcaaggaaacacttcgtattactattgcaggttttgcaaattgatgatgtcacaataaaaataagtgctttaaaggcaatctttgaccaactgatgacgttcgggattgaaccatttaaaactaaaaaaatcaaaacacttcattgtgaaggtacagaaataaacagtgatgatgagcaagaatcaaaagaagttgaagagactgctacagctaagaatgttctgaaactcctttctgatttcttagatagtgaggtatctgaacttaggactggagctgcagaaggactagccaagctgatgttctctgggcttttggtcagcagcaggattctttctcgtcttattttgttatggtacaatcctgtgactgaagaggatgttcaacttcgacattgcctaggcgtgttcttccccgtgtttgcttatgcaagcaggactaatcaggaatgctttgaagaagcttttcttccaaccctgcaaacactggccaatgcccctgcatcttctcctttagctgaaattgatatcacaaatgttgctgagttacttgtagatttgacaagaccaagtggattaaatcctcaggccaagacttcccaagattatcaggccttaacagtacatgacaatttggctatgaaaatttgcaatgagatcttaacaagtccgtgctcgccagaaattcgagtctatacaaaagccttgagttctttagaactcagtagccatcttgcaaaagatcttctggttctattgaatgagattctggagcaagtaaaagataggacatgtctgagagctttggagaaaatcaagattcagttagaaaaaggaaataaagaatttggtgaccaagctgaagcagcacaggatgccaccttgactacaactactttccaaaatgaagatgaaaagaataaagaagtatatatgactccactcaggggtgtaaaagcaacccaagcatcaaagtctactcagctaaagactaacagaggacagagaaaagtgacagtttcagctaggacgaacaggaggtgtcagactgctgaagccgactctgaaagtgatcatgaagttccagaaccagaatcagaaatgaagatgagactaccaagacgagccaaaaccgcagcactagaaaaaagtaaacttaaccttgcccaatttctcaatgaagatctaagttaggaaagacgatggaggtggaatcctttaagattatgtccagttatttgctttaataaagaagaagttacccttgtcaaaatcagagaaaaaaaaaaaaaaaa

SEQ ID NO: 3266 - protein, 1015 aa, Homo sapien
MGAERRLLSIKEAFRLAQQPHQNQAKLVVALSRTYRTMDDKTVFHEEFIHYLKYVMVVYKREPAVERVIEFAAKFVTSFHQSDMEDDEEEEDGGLLNYLFTFLLKSHEANSNAVRFRVCLLINKLLGSMPENAQIDDDVFDKINKAMLIRLKDKIPNVRIQAVLALSRLQDPKDDECPVVNAYATLIENDSNPEVRRAVLSCIAPSAKTLPKIVGRTKDVKEAVRKLAYQVLAEKVHMRAMSIAQRVMLLQQGLNDRSDAVKQAMQKHLLQGWLRFSEGNILELLHRLDVENSSEVAVSVLNALFSITPLSELVGLCKNNDGRKLIPVETLTPEIALYWCALCEYLKSKGDEGEEFLEQILPEPVVYADYLLSYIQSIPVVNEEHRGDFSYIGNLMTKEFIGQQLILIIKSLDTSEEGGRKKLLAVLQEILILPTIPISLVSFLVERLLHIIIDDNKRTQIVTEIISEIRAPIVTVGVNNDPADVRKKELKMAEIKVKLIEAKEALENCITLQDFNRASELKEEIKALEDARINLLKETEQLEIKEVHIEKNDAETLQKCLILCYELLKQMSISTGLSATMNGIIESLILPGIISIHPVVRNLAVLCLGCCGLQNQDFARKHFVLLLQVLQIDDVTIKISALKAIFDQLMTFGIEPFKTKKIKTLHCEGTEINSDDEQESKEVEETATAKNVLKLLSDFLDSEVSELRTGAAEGLAKLMFSGLLVSSRILSRLILLWYNPVTEEDVQLRHCLGVFFPVFAYASRTNQECFEEAFLPTLQTLANAPASSPLAEIDITNVAELLVDLTRPSGLNPQAKTSQDYQALTVHDNLAMKICNEILTSPCSPEIRVYTKALSSLELSSHLAKDLLVLLNEILEQVKDRTCLRALEKIKIQLEKGNKEFGDQAEAAQDATLTTTTFQNEDEKNKEVYMTPLRGVKATQASKSTQLKTNRGQRKVTVSARTNRRCQTAEADSESDHEVPEPESEMKMRLPRRAKTAALEKSKLNLAQFLNEDLS

SEQ ID NO: 3267 - DNA, 1812 bp, Homo sapien
ggcacgagggagaggtcaggggtcagcaggagtgaggctggggcgtccaggtccgagaggtcaggggtcagctggagaggggctggggcgccggtttcccggaggtcaggggtcagaaggaacagggctgcagcgtcagggtccgagaggttaggggtcggcagaggcggagctggggcactgggggtcaggggtcggggatcagggcggggtcgggtgcactggtagcctgcgcatgggcctccagcttcgcgcgctgttgggagccttcggacggtggaccctgcgcctgggaccgcgtccgtcctgctcgccgcgcatggccgggaacgcggagccgccgcccgccggagccgcatgcccccaggaccggaggtcctgcagcggccgggccgggggcgaccgcgtctgggaggacggagaacatccggcgaagaagctcaagagcggtggcgacgaggagcggcgcgagaagccgcccaagcggaagatcgtgctgctcatggcctattcgggcaagggctaccacggcatgcagaggaatgtcgggtcctcacaattcaaaacaattgaagatgacttggtgtccgccctcgtccggtcaggctgtattcctgaaaatcatggtgaggacatgaggaaaatgtccttccagcgctgcgcccggacagacaagggtgtgtccgcagccggccaggtggtatccctgaaggtgtggctgattgacgacattctagaaaagatcaacagccaccttccctctcacattcggattctgggactgaagcgggtcacgggcgggtttaactccaagaacagatgtgatgccaggacctattgctacctgctgcccacgtttgcctttgcgcacaaggaccgggacgttcaggatgagacctaccgcctgagcgccgagacgctgcagcaggtcaacaggctcctggcctgctacaagggcacgcacaacttccacaatttcacctcgcagaaggggccgcaggatcccagtgcctgccgctacatcctggagatgtactgcgaggaaccctttgtgcgggagggcctggagtttgcggtgatcagggtgaagggccagagcttcatgatgcatcagatccggaagatggtcggcctggtggtggccattgtgaagggttatgcccctgagagcgtgctggagcgcagctggggcacagagaaggtggacgtgcccaaggcgcccggactcggcctggtcctggagagggtgcacttcgagaagtacaaccagcgctttggcaacgatgggctgcatgagccgctggactgggcgcaggaggaaggaaaggtcgcagccttcaaggaggagcacatctaccccaccatcatcggcaccgagcgggacgaacgctccatggcccagtggctgagcaccttgcccatccacaacttcagtgccaccgctctcacggcaggtggcacgggcgccaaggtgcccagtcccctggaaggcagtgaaggggacggagacactgactgaggcgatgggagctgcccaccagagtgcctctgagcagctcacagtgtgtgcccagatgtgccacccctgtgggcagcaagaagctgggatcgctgcagccatgttttcccggccatgccggcgttgtaacctcaggaccttcccttgtaggaacagcctttctcgaatctgttttcagctcttgcattgcatagatgaacctcagcatgtaaagaactatttttttaaagaagtgattttcttattaaacaagtacaaattttgcttagtcaaaaaaaaaaaaaaaaaaaaaa

SEQ ID NO: 3268 - protein, 399 aa, Homo sapien
MAGNAEPPPAGAACPQDRRSCSGRAGGDRVWEDGEHPAKKLKSGGDEERREKPPKRKIVLLMAYSGKGYHGMQRNVGSSQFKTIEDDLVSALVRSGCIPENHGEDMRKMSFQRCARTDKGVSAAGQVVSLKVWLIDDILEKINSHLPSHIRILGLKRVTGGFNSKNRCDARTYCYLLPTFAFAHKDRDVQDETYRLSAETLQQVNRLLACYKGTHNFHNFTSQKGPQDPSACRYILEMYCEEPFVREGLEFAVIRVKGQSFMMHQIRKMVGLVVAIVKGYAPESVLERSWGTEKVDVPKAPGLGLVLERVHFEKYNQRFGNDGLHEPLDWAQEEGKVAAFKEEHIYPTIIGTERDERSMAQWLSTLPIHNFSATALTAGGTGAKVPSPLEGSEGDGDTD

SEQ ID NO: 3269 - DNA, 1932 bp, Homo sapien
ccggactgcggaaggatggagctggccgccggaagcttctcggaggagcagttctgggaggcctgcgccgagctccagcagcccgctctggccggggccgactggcagctcctagtggagacctcgggcatcagcatctaccggctgctggacaagaagactggacttcatgagtataaagtctttggtgttctggaggactgctcaccaactctactggcagacatctatatggactcagattacagaaaacaatgggaccagtatgttaaagaactctatgaacaagaatgcaacggagagactgtggtctactgggaagtgaagtacccttttcccatgtccaacagagactatgtctaccttcggcagcggcgagacctggacatggaagggaggaagatccatgtgatcctggcccggagcacctccatgcctcagcttggcgagaggtctggggtgatccgggtgaagcaatacaagcagagcctggcgattgagagtgacggcaagaaggggagcaaagttttcatgtattacttcgataacccgggtggccaaattccgtcctggctcattaactgggccgccaagaatggagttcctaacttcttgaaagacatggcaagagcctgtcagaactacctcaagaaaacctaagaaagagaactgggaacattgcatccatgggttgatgtctctggaagtgcaaccacccaatgtctctggaagtgccacctggaagtgccacctggaagtgtctctggaagagcacccaccactgttcagccttcccctgctgtttctgtcttcagaggcctacacactaccacatcctttctaagcatgtttgcctgacatccagctcactcgtctgcttcctttctcgctccccccatcctgggctgggctgccttcttctacagttcaatatggggcagactagggaaacctttgcttgcttactattaggaggggaagtcttcagtagggaacacgatcattccattgtgcaattttacggggatgggtgggcggagggacacaacaaaatttaagaatgactatttgggcgggctggctcttttgcagcttgtgatttcttccagcttgggaggggctgctggaagtggcatttcgttcagagctgactttcagtgcacccaaactggatgacgtgccaatgtccatttgccttatgctttgtggagctgattaggctgggatttgaggtgataatccagtaagtctttcctcgttcctacttgtggaggatcagtagctgttatgatgccagaccatttggagaagtatcagaggcctgaccggacacataatacgacaaccacatttttcctcatcatccatgaggaaatggatgatttctcttttccatatgtcactgggggaaaggctgcctgtacctctcaagctttgcattttactggaaactgaggcgtcaagatggctgtggcagctagcaaaagcaaagatgctttgtgcatagccttgtgaaaaagtatctttctatgcaataagatgaattttcctcccagaatatttagaaatgtagaagggataacagttcacagccaggtaaaatttaactggtggcttaatgactctgcacctttttctcaggaattctgcctaagttgtctgccttttctaccaccaaaaagacttttagttttctatgctttctcctgaattttggtagggtaagtatttctatgtcaaaggcacagccttgatgatctcagggaaaaattttaatcactgtgtataatgatactgaaccttgattaataacagaaattcaggatgtaaagccacagaatgggatttattaatgtgggatacctcagactgtttgttttctttctgggaagaaaagtgtgttctataatgaataaatatagagtggttttt

SEQ ID NO: 3270 - protein, 214 aa, Homo sapien
MELAAGSFSEEQFWEACAELQQPALAGADWQLLVETSGISIYRLLDKKTGLHEYKVFGVLEDCSPTLLADIYMDSDYRKQWDQYVKELYEQECNGETVVYWEVKYPFPMSNRDYVYLRQRRDLDMEGRKIHVILARSTSMPQLGERSGVIRVKQYKQSLAIESDGKKGSKVFMYYFDNPGGQIPSWLINWAAKNGVPNFLKDMARACQNYLKKT

SEQ ID NO: 3271 - DNA, 2927 bp, Homo sapien
cttcgcgcacctcatggaatcccttctgcagcacctggatcgcttttccgagcttctggcggtctcaagcactacctacgtcagcacctgggaccccgccaccgtgcgccgggccttgcagtgggcgcgctacctgcgccacatccatcggcgctttggtcggcatggccccattcgcacggctctggagcggcggctgcacaaccagtggaggcaagagggcggctttgggcggggtccagttccgggattagcgaacttccaggccctcggtcactgtgacgtcctgctctctctgcgcctgctggagaaccgggccctcggggatgcagctcgttaccacctggtgcagcaactctttcccggcccgggcgtccgggacgccgatgaggagacactccaagagagcctggcccgccttgcccgccggcggtctgcggtgcacatgctgcgcttcaatggctatagagagaacccaaatctccaggaggactctctgatgaagacccaggcggagctgctgctggagcgtctgcaggaggtggggaaggccgaagcggagcgtcccgccaggtttctcagcagcctgtgggagcgcttgcctcagaacaacttcctgaaggtgatagcggtggcgctgttgcagccgcctttgtctcgtcggccccaagaagagttggaacccggcatccacaaatcacctggagaggggagccaagtgctagtccactggcttctggggaattcggaagtctttgctgccttttgtcgcgccctcccagccgggcttttgactttagtgactagccgccacccagcgctgtctcctgtctatctgggtctgctaacagactggggtcaacgtttgcactatgaccttcagaaaggcatttgggttggaactgagtcccaagatgtgccctgggaggagttgcacaataggtttcaaagcctctgtcaggcccctccacctctgaaagataaagttctaactgccctggagacctgtaaagcgcaggatggagattttgaagtacctggtcttagcatctggacagacctcttattagctcttcgtagtggtgcatttaggaaaagacaagttttgggtctcagcgcaggcctcagttctgtataggcaatgctgtgttattacttgaatatagaatatatagtttacaaaatgaaaattacaatgttctcaccaaatatatgccttcgtgtgtccaaagtataattattttagatgctaattttgaatagtttattaaacagttataaatatgcaaagtagctggcatgtagtgtcacggattttctggatagaggaagtgattggaagtattccacttaaagccatggaattagcaatagtttgctttttaatagaaggcccatttgtaagaatgttgaaaatatgtgtaccgtttaaagaaaaagcagctttaaagtgacaaacaaaataccctttttcttttagtatggtttatttttctaggttttctgtccctccctcagtagtgaagagttttctttattcctggcagtgtcaggaatattggtttgaaaagctgttggcctatctggagtttggccttgttaacctagtattctaaccagttaaccagccttagtatgcattaaaattgtattgttcagaaagtttgtttctcattttctgcaaattcttactttgaaaatgaatcaccacatagtatgtccctttaaagcattgacgcacagacaaatgtttaaagcacagtaaatacaaatatatgcctttggatactaaattaatgcttgatgataaaagaatcaaacttttttttttttgagatggagtctcgctctgtcacccagtctggagtgcagtggtgtgatcactgctcagtgcaacctctgcctcccaggatcaagcaattctgactcagcctcccaagtagctgggattacaggtgcaggccaccatgcccggctaattttttgtatttttagtagagacggggtttcaccatgctggccaggctggtctcaaacacctgaccttgtgatccgtccgccttggcctcccaaagtgctgggattacaggcgtgagccaccgcgcctggccaaaacaacattttaagtagaagatccaggttttagtgcagcttctgccgttaactaggttaataaatcacaaccttggggccacagttgccttatatgtaaatgaagtgtttagaataaaatagttaaatttccttatttttcccttggtggctgccctgtggaaacagtttagaatatttgttttgtgtgtaggaacctagttgtgttagtttacctgggtgttccacagctgatagtgattgccttgaataaattcaagggcaatttattcatttttactagggagatagacctttacagcaatcaagatatttttgtccatatccaggttagctggtaagaggatttttttggagaaaaaaaatgatatttagaaagttaatttctaattccggaatggaataaaaacaatatgagtagtgtaatcttgtagaaaaagagttgtataatcttgtagaatttctcattctgtggtacaacccaggggtaaactattattccagtagtcagtacacttttctagataaatcttgagtgaaaaccagcaatttctttttccttgtggtctgattcctttttctaatccatgaaggccatcttgtagattacatttatcattaatgcaagaataaagacaattcctcctgtcagttgcgtgaattttttttaagaaacaacccagtgaagagttctaccatagcaaggcctaatgttagctttagctttagaaaataacagtttgtgaacttacttccctatatttgcagctgtatctcacactatgatttacaataaaattgtaaagattgacaat

SEQ ID NO: 3272 - protein, 374 aa, Homo sapien
MESLLQHLDRFSELLAVSSTTYVSTWDPATVRRALQWARYLRHIHRRFGRHGPIRTALERRLHNQWRQEGGFGRGPVPGLANFQALGHCDVLLSLRLLENRALGDAARYHLVQQLFPGPGVRDADEETLQESLARLARRRSAVHMLRFNGYRENPNLQEDSLMKTQAELLLERLQEVGKAEAERPARFLSSLWERLPQNNFLKVIAVALLQPPLSRRPQEELEPGIHKSPGEGSQVLVHWLLGNSEVFAAFCRALPAGLLTLVTSRHPALSPVYLGLLTDWGQRLHYDLQKGIWVGTESQDVPWEELHNRFQSLCQAPPPLKDKVLTALETCKAQDGDFEVPGLSIWTDLLLALRSGAFRKRQVLGLSAGLSSV

SEQ ID NO: 3273 - DNA, 1226 bp, Homo sapien
gctgccgcatcccaggctaagcgccgcgccgaaagccgtgcggagattggaggccgcgcgggtccctggtctgggccatgtctggctgtgatgctggggagggagactgttgttcccggagatgcggcgcgcaggacaaggagcatccaagatacctgatcccagaactttgcaaacagttttaccatttaggctgggtcactgggactggaggaggaattagcttgaagcatggcgatgaaatctacattgctccttcaggagtgcaaaaggaacgaattcagcctgaagacatgtttgtttgtgatataaatgaaaaggacataagtggaccttcgccatcgaagaagctaaaaaaaagccagtgtactcctcttttcatgaatgcttacacaatgagaggagcaggtgcagtgattcatacccactctaaagctgctgtgatggccacacttctctttccaggacgggagtttaaaattacacatcaagagatgataaaaggaataaagaaatgtacttccggagggtattatagatatgatgatatgttagtggtacccattattgagaatacacctgaggagaagaccctcaaagatagaatggctcatgcaatgaatgaatacccagactcctgtgcagtactggtcagacgtcatggagtatatgtgtggggggaaacatgggagaaggccaaaaccatgtgtgagtgttatgactatttatttgatattgccgtatcaatgaagaaagtaggacttgatccttcacagctcccagttggagaaaatggaattgtctaagccaaaagaaagtctaattatatacagagataaagctaaacgtaattattatttaaatgaaagctatttttttaaatgaattgaaatttttcatgatgctactaatttgccactaaatactgcaaatggtcaccctgaatctcttctgacattggatgttatttgcttatattcttataattttaaatgagggcacagtgaaatgaaaattttatactctatgtttctgtttatttttaaatccttaacagcaaaatatttgcctttaatttcttttttatatatactctcgagagaattcctcttaatttttaaagatgctggtgataataaaattcattagaaaatttcctcattgtggaatgagcattctcttgttttaatgttggtgtcagaaaataaatatgaaacattaagtcc

SEQ ID NO: 3274 - protein, 242 aa, Homo sapien
MSGCDAGEGDCCSRRCGAQDKEHPRYLIPELCKQFYHLGWVTGTGGGISLKHGDEIYIAPSGVQKERIQPEDMFVCDINEKDISGPSPSKKLKKSQCTPLFMNAYTMRGAGAVIHTHSKAAVMATLLFPGREFKITHQEMIKGIKKCTSGGYYRYDDMLVVPIIENTPEEKTLKDRMAHAMNEYPDSCAVLVRRHGVYVWGETWEKAKTMCECYDYLFDIAVSMKKVGLDPSQLPVGENGIV

SEQ ID NO: 3275 - DNA, 2376 bp, Homo sapien
gagactgtgggcgcgtggtgcagtccctggagggttctcacgctttggctgtctggacttttaagtttttccgctttttcaggaaggcgaccggcagcctcgggcaggggagacaggactgtatgtcagagaagagacggcgcttggacgccaggaatcctctgaagcaggagactgccctatccagaagatgactcaagaccggcctctgcttgccgtgcaggaggcgctgaagaagtgcttccccgtggtggaggagcagcagggcctgtggcagagtgccctgcgggactgccagcccctcctgtcctccctcagcaacctggcggaacagctgcaggccgcacagaacctgcggtttgaggatgtgccggcgcttcgggccttcccagatttaaaagagcggctgaggcgtaagcagctggtggctggtgacatcgtcctggacaagctaggggaaaggctagccatcctcctcaaggtgcgagacatggtcagcagccatgtggagcgagtgtttcagatctatgagcaacacgcagacacagttggcattgatgctgtcctgcagccttcagcagtgagcccctctgtggctgacatgttggaatggttgcaggatattgagagacattatcgaaagtcgtacctgaagagaaagtatcttctttcgtctatccagtggggagacttggcaaacatacaagctttgcccaaggcctgggaccgaatttcaaaagacgaacaccaggatcttgtacaagatatcctattgaatgtttccttcttcctggaagagtaaggaagctatgcgtatctggagaccacgggcaccacagttgaagactgacattctgaaccctgatgtttctaaagaaacgtcagtatttcagtctgacatatttgaaacatcagtgccttgaaccttaggactgggtcttggggaggattagcgcctagatgtctgattttggagctgcagcatgccaggccgtggctgagggtatgtgagccatgccttgcccttttctgaggctcagggaagtggatggagctagagagacaacaggaaagacggtgctgaagaacatagtgtctttcctctattgtggacctaaagaggtggggaagcaaggacaagaggcaaagagccacactgcccttggcatcatccaaagcattgtctggttgacaccaggtcctggttttgtgtcttttgtcaatacctgaatccttgacaaaagaaaaagtggttttgatgatttaaagaaataagggtgattttgacagaaaatatattttaaaaattttgaccaattgcaatagttatcctcaagccaatttccagaacctgccaccagggggaggtgatgcagcatgaatcattctgaatgctttgtctttgaagtgctcccctattgctgttaccatctcagaggaagtaactgggcatggtgagactcctaaaatgacaggagtttttttggccaaagctggcatctgacttgccacattcctctgagtctggagtagccgcaggggtgggagaatgccagcccagagtcagtccatcggggttacatttccaaggtctgctgccttcatctatgtaatggccgtgttactttcagatctttcagcttcccagagtgttgtgggaatcttggtcattgaatgtaaagggacttagtaaagggtatagatatttttcaaaaatgaaaataactttttttcttataagtgataagcttttataaagatcataggaaaactagaaaaaatgtaaaatgtagaaaattgtaaaacaaacttcattagagatattttgatagataccttttcagtgtctatttacaaattttttcttttaatatagatagggtctcactatattgcccagctcactcctgagctcaagggatcctcccaccatagcctcccaaaatattggaaatacaggcatgagccactgctcctgaccaattcacaaatttttttaaagaacaaacgtgctatcatcgatacatactgttaggttgtctttttttaaaaaacctaatgtaatttgttcatctttttatatctgtaaatatagctcaacacagttatattctttttgtgaatgtattatatctacaatttaccttttttcttagattttacatgcattttcccaaatctttgtgtttgcctatctgtaaaggtaatacattctgattacaaaaaatgaaaatgttacatagaaatgtaccgttatccatctaccagataactattattaataatgtgtatttatttttccaggaattaaaaaacatctatcatataagtattgcaaataaaacttaaaaagcaaaaaaaaaaaaaaaaaaaaaa

SEQ ID NO: 3276 - protein, 203 aa, Homo sapien
MTQDRPLLAVQEALKKCFPVVEEQQGLWQSALRDCQPLLSSLSNLAEQLQAAQNLRFEDVPALRAFPDLKERLRRKQLVAGDIVLDKLGERLAILLKVRDMVSSHVERVFQIYEQHADTVGIDAVLQPSAVSPSVADMLEWLQDIERHYRKSYLKRKYLLSSIQWGDLANIQALPKAWDRISKDEHQDLVQDILLNVSFFLEE

SEQ ID NO: 3277 - DNA, 895 bp, Homo sapien
gcggccgcgtcgaccggcgcggctggagcgcagcgccgaagggactggcagggctgaagtgtgcgggacagcaagcccccgaatagccccggctgccacctcgcaggacccaaggccacgcgcgccgggcccagctgagccgcctcatgaagccgcccgcggaggacctgtcggacgcgctgtgcgagtttgacgcggtgctggccgacttcgcgtcgcccttccacgagcgccacttccactacgaggagcacctggagcgcatgaagcggcgcagcagcgccagtgtcagcgacagcagcggcttcagcgactcggagagtgcagattcactttataggaacagcttcagcttcagtgatgaaaaactgaattctccaacagactctaccccagctcttctctctgccactgtcactcctcagaaagctaaattaggagacacaaaagagctagaagccttcattgctgatcttgacaaaactttagcaagtatgtgaaacaagaagttctgggtcctttcatcataagggagaagcttcagaaagttccgaggacctgctaaaatcagctactagaatctgctgccagaggggacaaagacgtgcactcaaccttctaccaggccactctcaggctcaccttaaaatcagcccttgatcccatttctgggcaatttagacagtgaaactgactttgtttacctgcttgcagcatattagaacagacgatccatgctaatattgtattttctcttaaaacatagctttcctgtaatttaaagtgcttttatgaaaatatttgtaattaattatatatagttggaaatagcagtaagctttcccattataatatatttttgtatacaaataaaatttgaactgaacctcgtgcc

SEQ ID NO: 3278 - protein, 117 aa, Homo sapien
MKPPAEDLSDALCEFDAVLADFASPFHERHFHYEEHLERMKRRSSASVSDSSGFSDSESADSLYRNSFSFSDEKLNSPTDSTPALLSATVTPQKAKLGDTKELEAFIADLDKTLASM

SEQ ID NO: 3279 - DNA, 2461 bp, Homo sapien
atgctgggtacgctgcgcgccatggagggcgaggacgtggaagacgaccagctgctgcagaagctcagggccagtcgccgccgcttccagaggcgcatgcagcggctgatagagaagtacaaccagcccttcgaggacaccccggtggtgcaaatggccacgctgacctacgagacgccacagggattgagaatttggggtggaagactaataaaggaaagaaacaaaggagagatccaggactcctccatgaagcccgcggacaggacagatggctccgtgcaagctgcagcctggggtcctgagcttccctcgcaccgcacagtcctgggagccgattcaaaaagcggtgaggtcgatgccacgtcagaccaggaagagtcagttgcttgggccttagcacctgcagtgcctcaaagccctttgaaaaatgaattaagaaggaaatacttgacccaagtggatatactgctacaaggtgcagagtattttgagtgtgcaggtaacagagctggaagggatgtacgtgtgactccgctgccttcactggcctcacctgccgtgcctgcccccggatactgcagtcgtatctccggaaagagtcctggtgacccagcgaaaccagcttcatctcccagagaatgggatcctttgcatccttcctccacagacatggccttagtacctagaaatgacagcctctccctacaagagaccagtagcagcagcttcttaagcagccagccctttgaagatgatgacatttgcaatgtgaccatcagtgacctgtacgcagggatgctgcactccatgagccggctgttgagcacaaagccatcaagcatcatctccaccaaaacgttcatcatgcaaaactggaactgcaggaggaggcacagatataagagcaggatgaacaaaacatattgcaaaggagccagacgttctcagaggagctccaaggagaacttcataccctgctctgagcctgtgaaagggacaggggcattaagagattgcaagaacgtattagatgtttcttgccgtaagacaggtttaaaattggaaaaagcttttcttgaagtcaacagaccccaaatccataagttagatccaagttggaaggagcgcaaagtgacaccctcgaagtattcttccttgatttacttcgactccagtgcaacatataatcttgatgaggaaaatagatttaggacattaaaatggttaatttctcctgtaaaaatagtttccagaccaacaatacgacagggccatggagagaaccgtcagagggagattgaaatccgatttgatcagcttcatcgggaatattgcctgagtcccaggaaccagcctcgccggatgtgcctcccggactcctgggccatgaacatgtacagagggggtcctgcgagtcctggtggccttcagggcttagaaacccgcaggctgagtttaccttccagcaaagcaaaagcaaaaagtttaagtgaggcttttgaaaacctaggcaaaagatctctggaagcaggtaggtgcctgcccaagagcgattcatcttcatcacttccaaagaccaaccccacacacagcgcaactcgcccgcagcagacatctgaccttcacgttcagggaaatagttctggaatatttagaaagtcagtgtcacccagcaaaactctttcagtcccagataaagaagtgccaggccacggaaggaatcgttacgatgaaattaaagaagaatttgacaagcttcatcaaaagtattgcctcaaatctcctgggcagatgacagtgcctttatgtattggagtgtctacagataaagcaagtatggaagttcgatatcaaacagaaggcttcttaggaaaattaaatccagaccctcacttccagggtttccagaagttgccatcatcacccctggggtgcagaaaaagtctactgggctcaactgcaattgaggctccttcatctacatgtgttgctcgtgccatcacgagggatggcacgagggaccatcagttccctgcaaaaagacccaggctatcagaaccccagggctccggacgccagggcaattccctgggtgcctcagatggggtggacaacaccgtcagaccgggagaccagggcagctcttcacagcccaactcagaagagagaggagagaacacgtcttacaggatggaagagaaaagtgatttcatgctagaaaaattggaaactaaaagtgtgtagctaggttatttcggagtgttatttatcttcccacttgctctctgtttgtatttttgttttgtttttgattcttgagactgtgaggacttggttgacttctctgcccttaaagtaaatattagtgaaattggttccatcagagataacctcgagttcttggtgtagaaattatgtgaataaagttgctcaattagaaaaaaaaaaaaaaaaaaaa

SEQ ID NO: 3280 - protein, 482 aa, Homo sapien
MLHSMSRLLSTKPSSIISTKTFIMQNWNCRRRHRYKSRMNKTYCKGARRSQRSSKENFIPCSEPVKGTGALRDCKNVLDVSCRKTGLKLEKAFLEVNRPQIHKLDPSWKERKVTPSKYSSLIYFDSSATYNLDEENRFRTLKWLISPVKIVSRPTIRQGHGENRQREIEIRFDQLHREYCLSPRNQPRRMCLPDSWAMNMYRGGPASPGGLQGLETRRLSLPSSKAKAKSLSEAFENLGKRSLEAGRCLPKSDSSSSLPKTNPTHSATRPQQTSDLHVQGNSSGIFRKSVSPSKTLSVPDKEVPGHGRNRYDEIKEEFDKLHQKYCLKSPGQMTVPLCIGVSTDKASMEVRYQTEGFLGKLNPDPHFQGFQKLPSSPLGCRKSLLGSTAIEAPSSTCVARAITRDGTRDHQFPAKRPRLSEPQGSGRQGNSLGASDGVDNTVRPGDQGSSSQPNSEERGENTSYRMEEKSDFMLEKLETKSV

SEQ ID NO: 3281 - DNA, 2972 bp, Homo sapien
tcttcggacctaggctgccctgccgtcatgtcgcaagggatcctttctccgccagcgggcttgctgtccgatgacgatgtcgtagtttctcccatgtttgagtccacagctgcagatttggggtctgtggtacgcaagaacctgctatcagactgctctgtcgtctctacctccctagaggacaagcagcaggttccatctgaggacagtatggagaaggtgaaagtatacttgagggttaggcccttgttaccttcagagttggaacgacaggaagatcagggttgtgtccgtattgagaatgtggagacccttgttctacaagcacccaaggactcgtttgccctgaagagcaatgaacggggaattggccaagccacacacaggttcaccttttcccagatctttgggccagaagtgggacaggcatccttcttcaacctaactgtgaaggagatggtaaaggatgtactcaaagggcagaactggctcatctatacatatggagtcactaactcagggaaaacccacacgattcaaggtaccatcaaggatggagggattctcccccggtccctggcgctgatcttcaatagcctccaaggccaacttcatccaacacctgatctgaagcccttgctctccaatgaggtaatctggctagacagcaagcagatccgacaggaggaaatgaagaagctgtccctgctaaatggaggcctccaagaggaggagctgtccacttccttgaagaggagtgtctacatcgaaagtcggataggtaccagcaccagcttcgacagtggcattgctgggctctcttctatcagtcagtgtaccagcagtagccagctggatgaaacaagtcatcgatgggcacagccagacactgccccactacctgtcccggcaaacattcgcttctccatctggatctcattctttgagatctacaacgaactgctttatgacctattagaaccgcctagccaacagcgcaagaggcagactttgcggctatgcgaggatcaaaatggcaatccctatgtgaaagatctcaactggattcatgtgcaagatgctgaggaggcctggaagctcctaaaagtgggtcgtaagaaccagagctttgccagcacccacctcaaccagaactccagccgcagtcacagcatcttctcaatcaggatcctacaccttcagggggaaggagatatagtccccaagatcagcgagctgtcactctgtgatctggctggctcagagcgctgcaaagatcagaagagtggtgaacggttgaaggaagcaggaaacattaacacctctctacacaccctgggccgctgtattgctgcccttcgtcaaaaccagcagaaccggtcaaagcagaacctggttcccttccgtgacagcaagttgactcgagtgttccaaggtttcttcacaggccgaggccgttcctgcatgattgtcaatgtgaatccctgtgcatctacctatgatgaaactcttcatgtggccaagttctcagccattgctagccagcttgtgcatgccccacctatgcaactgggattcccatccctgcactcgttcatcaaggaacatagtcttcaggtatcccccagcttagagaaaggggctaaggcagacacaggccttgatgatgatattgaaaatgaagctgacatctccatgtatggcaaagaggagctcctacaagttgtggaagccatgaagacactgcttttgaaggaacgacaggaaaagctacagctggagatgcatctccgagatgaaatttgcaatgagatggtagaacagatgcaacagcgggaacagtggtgcagtgaacatttggacacccaaaaggaactattggaggaaatgtatgaagaaaaactaaatatcctcaaggagtcactgacaagtttttaccaagaagagattcaggagcgggatgaaaagattgaagagctagaagctctcttgcaggaagccagacaacagtcagtggcccatcagcaatcagggtctgaattggccctacggcggtcacaaaggttggcagcttctgcctccacccagcagcttcaggaggttaaagctaaattacagcagtgcaaagcagagctaaactctaccactgaagagttgcataagtatcagaaaatgttagaaccaccaccctcagccaagcccttcaccattgatgtggacaagaagttagaagagggccagaagaatataaggctgttgcggacagagcttcagaaacttggtgagtctctccaatcagcagagagagcttgttgccacagcactggggcaggaaaacttcgtcaagccttgaccacttgtgatgacatcttaatcaaacaggaccagactctggctgaactgcagaacaacatggtgctagtgaaactggaccttcggaagaaggcagcatgtattgctgagcagtatcatactgtgttgaaactccaaggccaggtttctgccaaaaagcgccttggtaccaaccaggaaaatcagcaaccaaaccaacaaccaccagggaagaaaccattccttcgaaatttacttccccgaacaccaacctgccaaagctcaacagactgcagcccttatgcccggatcctacgctcacggcgttcccctttactcaaatctgggccttttggcaaaaagtactaaggctgtggggaaagagaagagcagtcatggccctgaggtgggtcagctactctcctgaagaaataggtctcttttatgctttaccatatatcaggaattatatccaggatgcaatactcagacactagcttttttctcacttttgtattataaccacctatgtaatctcatgttgttgtttttttttatttacttatatgatttctatgcacacaaaaacagttatattaaagatattattgttcacattttttattgaaaaaaaaaaaaaa

SEQ ID NO: 3282 - protein, 890 aa, Homo sapien
MSQGILSPPAGLLSDDDVVVSPMFESTAADLGSVVRKNLLSDCSVVSTSLEDKQQVPSEDSMEKVKVYLRVRPLLPSELERQEDQGCVRIENVETLVLQAPKDSFALKSNERGIGQATHRFTFSQIFGPEVGQASFFNLTVKEMVKDVLKGQNWLIYTYGVTNSGKTHTIQGTIKDGGILPRSLALIFNSLQGQLHPTPDLKPLLSNEVIWLDSKQIRQEEMKKLSLLNGGLQEEELSTSLKRSVYIESRIGTSTSFDSGIAGLSSISQCTSSSQLDETSHRWAQPDTAPLPVPANIRFSIWISFFEIYNELLYDLLEPPSQQRKRQTLRLCEDQNGNPYVKDLNWIHVQDAEEAWKLLKVGRKNQSFASTHLNQNSSRSHSIFSIRILHLQGEGDIVPKISELSLCDLAGSERCKDQKSGERLKEAGNINTSLHTLGRCIAALRQNQQNRSKQNLVPFRDSKLTRVFQGFFTGRGRSCMIVNVNPCASTYDETLHVAKFSAIASQLVHAPPMQLGFPSLHSFIKEHSLQVSPSLEKGAKADTGLDDDIENEADISMYGKEELLQVVEAMKTLLLKERQEKLQLEMHLRDEICNEMVEQMQQREQWCSEHLDTQKELLEEMYEEKLNILKESLTSFYQEEIQERDEKIEELEALLQEARQQSVAHQQSGSELALRRSQRLAASASTQQLQEVKAKLQQCKAELNSTTEELHKYQKMLEPPPSAKPFTIDVDKKLEEGQKNIRLLRTELQKLGESLQSAERACCHSTGAGKLRQALTTCDDILIKQDQTLAELQNNMVLVKLDLRKKAACIAEQYHTVLKLQGQVSAKKRLGTNQENQQPNQQPPGKKPFLRNLLPRTPTCQSSTDCSPYARILRSRRSPLLKSGPFGKKY

SEQ ID NO: 3283 - DNA, 4916 bp, Homo sapien
agaattcggagcgcggaagagccagagctgcgagcgcctggagctggatctctctccggtcgcgcacgccgaggccagtagggagagaagatggtggttctccgcagcagcttggagctgcacaaccactccgcggcctcggccacgggctccttggacctgtccagtgacttcctcagtctggagcacatcggccggaggcggctccgctcggccggcgcggcgcagaagaaacccgcggcgaccacagccaaagcgggcgatgggtcatcagttaaggaagttgaaacctaccaccggacacgtgctttaagatctttgagaaaagatgcacagaattcttcagattctagttttgagaagaatgtggaaataacggagcaacttgctaatggcaggcattttacaaggcagttggccagacagcaggctgataaaaaaaaagaagagcacagagaagacaaagtgattccagttactcggtcattgagggctagaaacatcgttcaaagtacagaacacttacatgaagataatggtgatgttgaagtgcgtcgaagttgtaggattagaagtcgttatagtggtgtaaaccagtccatgctgtttgacaaacttataactaacactgctgaagctgtacttcaaaaaatggatgacatgaagaagatgcgtagacagcgaatgagagaacttgaagacttgggagtgtttaatgaaacagaagaaagcaatcttaatatgtacacaagaggaaaacagaaagatattcaaagaactgatgaagaaacaactgataatcaagaaggcagtgtggagtcatctgaagagggtgaagaccaagaacatgaagatgatggtgaagatgaagatgatgaagatgatgatgatgatgacgatgatgatgatgatgatgatgatgaagatgatgaagatgaagaagatggagaagaagagaatcagaagcgatattatcttagacagagaaaagctactgtttactatcaggctccattggaaaaacctcgtcaccagagaaagcccaacatattttatagtggcccagcttctcctgcaagaccaagataccgattatcttccgcaggaccaagaagtccttactgtaaacgaatgaacaggcgaaggcatgcaatccacagtagtgactcgacttcatcttcctcctctgaagatgaacagcactttgagaggcggaggaaaaggagtcgtaatagggctatcaataggtgcctcccactaaattttcggaaagatgaattaaaaggcatttataaagatcgaatgaaaattggagcaagccttgccgatgttgatccaatgcaactagattcttcagtacgatttgatagtgttggtggcctgtctaatcatatagcagctctaaaagagatggtggtgtttccattactttatccagaagtctttgaaaaatttaaaattcaacccccaagaggttgtttgttttatgggccacctggaactggaaagactctggttgccagagcacttgccaatgagtgcagtcaaggggataaaagagtagcatttttcatgaggaaaggtgctgattgtctaagtaaatgggtaggagaatctgaaagacagctacgattgctgtttgatcaggcctatcagatgcgcccatcaattattttttttgacgaaattgatggtctggctccagtacggtcaagcaggcaagatcagattcacagttctattgtttccaccctgctagctcttatggatggattggacagcagaggggaaattgtggtcattggtgctacgaacaggctagattctatagatcctgctttacgaaggcctggtcgctttgatagagaattcctctttagcctgcctgataaagaggctcgaaaagagattctaaagattcacaccagggattggaatcccaaaccactggacacatttttagaagagctagcagaaaactgtgttggatactgtggagcagatattaaatcaatatgtgctgaagctgctttatgtgctttacgacgacgctacccacagatctataccactagtgagaaactgcagttggatctctcttcaattaatatctcagctaaggatttcgaggtagctatgcaaaagatgataccagcctcccaaagagctgtgacatcacctgggcaggcactgtccaccgttgtgaaaccactcctgcaaaacactgttgacaagattttagaagccctgcagagagtatttccacatgcagaattcagaacaaataaaacattagactcagatatttcttgtcctctgctagaaagtgacttggcttacagtgatgatgatgttccatcagtttatgaaaatggactttctcagaaatcttctcataaggcaaaagacaattttaattttcttcatttgaatagaaatgcttgttaccaacctatgtcttttcgaccaagaatattgatagtaggagaaccaggatttgggcaaggttctcacttggcaccagctgtcattcatgctttggaaaagtttactgtatatacattagacattcctgttctttttggagttagtactacatcccctgaagaaacatgtgcccaggtgattcgtgaagctaagagaacagcaccaagtatagtgtatgttcctcatatccacgtgtggtgggaaatagttggaccgacacttaaagccacatttaccacattattacagaatattccttcatttgctccagttttactacttgcaacttctgacaaaccccattccgctttgccagaagaggtgcaagaattgtttatccgtgattatggagagatttttaatgtccagttaccggataaagaagaacggacaaaattttttgaagatttaattctaaaacaagctgctaagcctcctatatcaaaaaagaaagcagttttgcaggctttggaggtactcccagtagcaccaccacctgagccaagatcactgacagcagaagaagtgaaacgactagaagaacaagaagaagatacatttagagaactgaggattttcttaagaaatgttacacataggcttgctattgacaagcgattccgagtgtttactaagcctgttgaccctgatgaggttcctgattatgtcactgtaataaagcaaccaatggacctttcatctgtaatcagtaaaattgatctacacaagtatctgactgtgaaagactatttgagagatattgatctaatctgtagtaatgccttagaatacaatccagatagagatcctggagatcgtcttattaggcatagagcctgtgctttaagagatactgcctatgccataattaaagaagaacttgatgaagactttgagcagctctgtgaagaaattcaggaatctagaaagaaaagaggttgtagctcctccaaatatgccccgtcttactaccatgtgatgccaaagcaaaattccactcttgttggtgataaaagatcagacccagagcagaatgaaaagctaaagacaccgagtactcctgtggcttgcagcactcctgctcagttgaagaggaaaattcgcaaaaagtcaaactggtacttaggcaccataaaaaagcgaaggaagatttcacaggcaaaggatgatagccagaatgccatagatcacaaaattgagagtgatacagaggaaactcaagacacaagtgtagatcataatgagaccggaaacacaggagagtcttcggtggaagaaaatgaaaaacagcaaaatgcctctgaaagcaaactggaattgagaaataattcaaatacttgtaatatagagaatgagcttgaagactctaggaagactacagcatgtacagaattgagagacaagattgcttgtaatggagatgcttctagctctcagataatacatatttctgatgaaaatgaaggaaaagaaatgtgtgttctgcgaatgactcgagctagacgttcccaggtagaacagcagcagctcatcactgttgaaaaggctttggcaattctttctcagcctacaccctcacttgttgtggatcatgagcgattaaaaaatcttttgaagactgttgttaaaaaaagtcaaaactacaacatatttcagttggaaaatttgtatgcagtaatcagccaatgtatttatcggcatcgcaaggaccatgataaaacatcacttattcagaaaatggagcaagaggtagaaaacttcagttgttccagatgatgatgtcatggtatcgagtattctttatattcagttcctatttaagtcatttttgtcatgtccgcctaattgatgtagtatgaaaccctgcatctttaaggaaaagattaaaatagtaaaataaaagtatttaaactttcctgatatttatgtacatattaagataaatgtcatgtgtaagataactgataaatattggaactttgctagaacaagaccctgtagtaatagtaataatagttgaagtttggccaactcttaataaagttattttggtaactaatgttttatggcacttaagaataattagcagcgttaaattttgtttgtattaagcacttttaattttatccttcctaaaaatagtttattgtatctgacaagaaacttacttaaccattgtgtccttcccatcttttttgtcatctttgttttcttcaaatgccctcctcccatctgccttgagattcccttgtcttcacttaaaagccagagtgcaagtcatgatttgcgggagggctcttgaaccacttctggctgcaccacaattctgtacttgagtatcacagtcattgtttttgagacaaacatttttataattctaatttgggttaataaagattttaaatatttaaaaaaaaaaaaaaaaaaaa

SEQ ID NO: 3284 - protein, 1390 aa, Homo sapien
MVVLRSSLELHNHSAASATGSLDLSSDFLSLEHIGRRRLRSAGAAQKKPAATTAKAGDGSSVKEVETYHRTRALRSLRKDAQNSSDSSFEKNVEITEQLANGRHFTRQLARQQADKKKEEHREDKVIPVTRSLRARNIVQSTEHLHEDNGDVEVRRSCRIRSRYSGVNQSMLFDKLITNTAEAVLQKMDDMKKMRRQRMRELEDLGVFNETEESNLNMYTRGKQKDIQRTDEETTDNQEGSVESSEEGEDQEHEDDGEDEDDEDDDDDDDDDDDDDDEDDEDEEDGEEENQKRYYLRQRKATVYYQAPLEKPRHQRKPNIFYSGPASPARPRYRLSSAGPRSPYCKRMNRRRHAIHSSDSTSSSSSEDEQHFERRRKRSRNRAINRCLPLNFRKDELKGIYKDRMKIGASLADVDPMQLDSSVRFDSVGGLSNHIAALKEMVVFPLLYPEVFEKFKIQPPRGCLFYGPPGTGKTLVARALANECSQGDKRVAFFMRKGADCLSKWVGESERQLRLLFDQAYQMRPSIIFFDEIDGLAPVRSSRQDQIHSSIVSTLLALMDGLDSRGEIVVIGATNRLDSIDPALRRPGRFDREFLFSLPDKEARKEILKIHTRDWNPKPLDTFLEELAENCVGYCGADIKSICAEAALCALRRRYPQIYTTSEKLQLDLSSINISAKDFEVAMQKMIPASQRAVTSPGQALSTVVKPLLQNTVDKILEALQRVFPHAEFRTNKTLDSDISCPLLESDLAYSDDDVPSVYENGLSQKSSHKAKDNFNFLHLNRNACYQPMSFRPRILIVGEPGFGQGSHLAPAVIHALEKFTVYTLDIPVLFGVSTTSPEETCAQVIREAKRTAPSIVYVPHIHVWWEIVGPTLKATFTTLLQNIPSFAPVLLLATSDKPHSALPEEVQELFIRDYGEIFNVQLPDKEERTKFFEDLILKQAAKPPISKKKAVLQALEVLPVAPPPEPRSLTAEEVKRLEEQEEDTFRELRIFLRNVTHRLAIDKRFRVFTKPVDPDEVPDYVTVIKQPMDLSSVISKIDLHKYLTVKDYLRDIDLICSNALEYNPDRDPGDRLIRHRACALRDTAYAIIKEELDEDFEQLCEEIQESRKKRGCSSSKYAPSYYHVMPKQNSTLVGDKRSDPEQNEKLKTPSTPVACSTPAQLKRKIRKKSNWYLGTIKKRRKISQAKDDSQNAIDHKIESDTEETQDTSVDHNETGNTGESSVEENEKQQNASESKLELRNNSNTCNIENELEDSRKTTACTELRDKIACNGDASSSQIIHISDENEGKEMCVLRMTRARRSQVEQQQLITVEKALAILSQPTPSLVVDHERLKNLLKTVVKKSQNYNIFQLENLYAVISQCIYRHRKDHDKTSLIQKMEQEVENFSCSR

SEQ ID NO: 3285 - DNA, 2085 bp, Homo sapien
ggctgcagttacagagtgctgccatcaccaagtatgtggcggacgtcctgccggggaagaatcaaagagcagagagcatggccagtgcagcgagggaactggttatccagcggttgagtctggtgaggagtctttgcgagagcgaggagcagcggttactggaacaggtgcatggcgaagaggagcgggcccaccagagcatcctgacacagcgggtgcactgggccgaggcgctgcagaaacttgacaccatccgcactggcctggtgggcatgcttactcacctggatgacctccagctgattcagaaggagcaagagattttcgagaggaccgaagaagcagagggcattttggatccccaggagtcggaaatgttaaactttaatgagaagtgcactcggagcccactactgacccaactctgggcaacggcggttcttgggtctctctcaggcacagaggacatacggatcgatgagaggacagtcagccccttcctgcaattgtcagatgatcgaaagaccctgaccttcagcaccaagaagtcaaaggcctgtgcagatggcccggagcgcttcgaccactggcccaatgccctggctgccacctccttccagaatgggctccatgcctggatggtgaatgtccagaacagttgtgcctataaggtgggcgtggcttcaggccacctgccccgcaagggttctggcagtgactgccgtctgggccacaatgccttctcctgggtcttctctcgctatgatcaggagtttcgtttctcacacaatgggcagcacgagcccctggggctgctgcggggcccagcccagctgggtgtagtgctggacttgcaggttcaggagctgctcttctatgagccagcctccggcatagtgctctgtgcccatcatgtgtccttcccggggcccctcttcccagtctttgctgtggccgatcagaccatttctatcgtccgctgacctctggccacaggaagccaggtccaccgcccaccaccctttcaggccatgtttctactcagtgtgcttttcccaaatgatgtgtgtggtgtttctaagagaaacagggcccataaccagtgggcagctttaggagggatggggatctgtttcagatctaggcataacctgtaaatcacaggtgtccaaacttttggcttccctgggccacatttgaagaagaattttcttgggccacataaaatacactaacgatagctgatgagctaaaaaaaaaaaaaaaagtctgtgtataatttttgtgatatctgccaccacagataagcaaaaaagtccttgcattcaaagggttggagattgctgctttgagtgctgggtacctgtggggaacctactactccctgggccttagtctcccaaatccaccatgcatctgcccctctgagggtgtcttcactttgtctctggcatctagcatggtgcctggtgcatagtgagcatgcaataaatatttggcaggtgagtggatggatagatggataggtgaatgtaggtggacaggtgactgggtggatgttgtggtctctggagaagcactgccattcagcctcctgctccagctgttcacatgcagaaatgctctcttcacaggcagagaagcctgtggctaaagtttccacatcccattaactcagtgcttttgtctttttcatgacatggcacatagagaaaatatttttttctagcacacaagagcaacctgaaaggctgctcctggctaggggactctgtcccgggggaccgtgtcctcccccatgtcctgcctaggccctcagaggaccaggggatcatgtctccaggtaacccgactgtagcccctgctggctgagctccagcctgtgcccactgataatagcagggacggcctttctcttagagcagctgataagtttccctacctgatggccccctctgacataaactgcacacctggggtgatggcttaaagccagaaagagctgagggagttaagagggccaaccttagggcacgtgggcattattaaaggtcttaaaagcattaaaaaaaaaaaaaaaaaaaa

SEQ ID NO: 3286 - protein, 301 aa, Homo sapien
MASAARELVIQRLSLVRSLCESEEQRLLEQVHGEEERAHQSILTQRVHWAEALQKLDTIRTGLVGMLTHLDDLQLIQKEQEIFERTEEAEGILDPQESEMLNFNEKCTRSPLLTQLWATAVLGSLSGTEDIRIDERTVSPFLQLSDDRKTLTFSTKKSKACADGPERFDHWPNALAATSFQNGLHAWMVNVQNSCAYKVGVASGHLPRKGSGSDCRLGHNAFSWVFSRYDQEFRFSHNGQHEPLGLLRGPAQLGVVLDLQVQELLFYEPASGIVLCAHHVSFPGPLFPVFAVADQTISIVR

SEQ ID NO: 3287 - DNA, 1812 bp, Homo sapien
gttcccaatcagtttccagccaacaccagggtgtcctagtccgcagaggtgtgggggacacactccataatctctacttttctttttgtgcagctgagtcatggagctttcagccccagcacatggctcctccttaactgcgtctgctcaacctccctcagccctgtgaacagcatccccgcacacagacgcagagcaggactctctctgctgccacttcaccttcctgagagaggaccagcggccagagcctcagtgactgccaccctggaggacagggcacaacaaccgtttctggagagaatgggaggattccagaggggcaaatatggaactatggctgaaggtagatcagaagataacttgtctgcaacaccaccggcattgaggattatcctagtgggcaaaacaggctgcgggaaaagtgccacagggaacagcatccttggccagcccgtgtttgagtccaagctgagggcccagtcagtgaccaggacgtgccaggtgaaaacaggaacatggaacgggaggaaagtcctggtggttgacacgccctccatctttgagtcacaggccgatacccaagagctgtacaagaacatcggggactgctacctgctctctgccccggggccccacgtcctgcttctggtgatccagctggggcgtttcactgctcaggacacagtggccatcaggaaggtgaaagaggtctttgggacaggggccatgagacatgtggtcatcctcttcacccacaaagaggacttagggggccaggccctggatgactatgtagcaaacacggacaactgcagcctgaaagacctggtgcgggagtgtgagagaaggtactgtgccttcaacaactggggctctgtggaggagcagaggcagcagcaggcagagctcctggctgtgattgagaggctggggagggagcgagagggctccttccacagcaatgacctcttcttggatgcccagctgctccaaagaactggagctggggcctgccaggaagactacaggcagtaccaggccaaagtggaatggcaggtggagaagcacaagcaagagctgagggagaacgagagtaactgggcatacaaggcgctcctcagagtcaaacacttgatgcttttgcattatgagatttttgtttttctattgttgtgcagcatactttttttcattatttttctgttcatctttcattacatttaaatctctggaccctggagcacttctaatgtatcaccccatggagtcattgttctaataatcaccaattcagactcagatcctcgtggtctatggagcatgctgcttgctgtctgtgcagctcccatttccccttcttcctgatagacttggagctgtgtgcctccactccaaggctgcctgcctgctgtaaacactattccactctgtctgccaacaactgcttcaggaatgggcctgagatcccatgcaggtccctgagaagtgagtaaaagtccgcagaggtggggatggaagatctctccttagatagaacctgtcttcctccctggcattgtggggtctgggcgtgacactgggactctcagcagctttgtgctgccaacctgagattgaaggcagtgcctcagagcagcacagagagttggggccccctgagccctgagccaccagccctgcagcctgccctatctccgcatttccagttgtattagccaatagatttcctacttatttaagctatttgagctccgggtctcttctacctgcattctaaaacattcaaagtaataaaaatttctccacatt

SEQ ID NO: 3288 - protein, 307 aa, Homo sapien
MGGFQRGKYGTMAEGRSEDNLSATPPALRIILVGKTGCGKSATGNSILGQPVFESKLRAQSVTRTCQVKTGTWNGRKVLVVDTPSIFESQADTQELYKNIGDCYLLSAPGPHVLLLVIQLGRFTAQDTVAIRKVKEVFGTGAMRHVVILFTHKEDLGGQALDDYVANTDNCSLKDLVRECERRYCAFNNWGSVEEQRQQQAELLAVIERLGREREGSFHSNDLFLDAQLLQRTGAGACQEDYRQYQAKVEWQVEKHKQELRENESNWAYKALLRVKHLMLLHYEIFVFLLLCSILFFIIFLFIFHYI

SEQ ID NO: 3289 - DNA, 2764 bp, Homo sapien
agacgcgcaagggcgccgatggaggcagactcgccagcgggccccggcgccccagagcccctcgcggagggagcggcggccgagttctccagcctgctgcgcaggataaaaggcaaactcttcacctggaatattttgaaaacaattgccctgggtcagacgttgtccttgtgtatatgtgggacagccatcaccagccagtatttggcagaaagatacaaagtgaacacccccatgcttcagagctttatcaattattgcttgctgttcctaatttatacagtgatgctggcatttcgatcaggcagtgataaccttttagtaatcttgaaaagaaaatggtggaagtacatcctgctgggactagcagatgtggaagctaattatgtgatcgtcagagcctaccagtacacaactctaaccagtgtccagcttttggattgctttgggattcctgtgttgatggctctgtcatggtttattcttcatgcaagatacagagtgatccacttcatcgccgtggctgtctgtctgttgggtgtaggaaccatggttggtgcagacatactagcagggagggaagacaattcagggagtgatgtattgattggtgacatcttggtccttcttggggcttccctctatgccatttcaaatgtttgtgaggaatacatcgtgaagaagctgagcagacaggagtttttaggaatggtgggcctgtttggaacaattatcagtggtatacagctattgattgtggaatataaggatattgccagcattcattgggactggaaaattgccctgctgttcgtggcatttgccctgtgtatgttttgcctgtacagcttcatgccattggtgattaaagtcactagtgccacttccgtcaacctgggcatcctgacagcggacctctacagcctttttgttggactctttctgtttggctataagttttcaggactctacatcctgtccttcactgtcatcatggtggggtttatcctgtactgctccacccctactcgcacggccgagccggctgaaagcagcgtgcctccagtcaccagcattgggattgacaacctggggctgaagctggaggagaacctccaggagacccactctgctgtcttgtagctggagaagatggcgcacccatcccccaccaggataaagcagagcctgctgcctgctgaggggacacttggggaaatagcagactcagaatggacactctacaaccctgggttggatccagtggttaggttttagaaaggaacactgaacaaagttcaaaagtagaaataccaaaatagagcagaaaccaagctaagagtgtgtttctgtgtttgaggaccaatatctgttcgtgttgaggagatgaggtgcagactccacactggggtcttagaggcaccggtgggaaagcaggactggggagagatccaggactgagccagcctcaggccagggcgggaaagcaggctgtccaggctgggcttggtggtcaggaacaggggcagctcacggtggctctggagtacgtttcctctgtcagatgcttcaaggtttttttttttttttttttttgctgaggcagttattgtccacaggcctttgggtacagatgaggcctcggggctgactgcatgtggcagaaaacgggtgggtcagcccttgaaaagtcttgagatataagtgtgagtactatacaagcattaaactggagtgcagtaaacctaggaaccttcccacaattgtttttttgtttgtttgagatgcagagtctagagtgcagtggtgcaagctcagcttactgtaacctctgcctcctggattcaagtgttagtagctgggattacaaaagcatgtggccccacgcccagctaagttttgtatttttagtagacatggggtttcaccatgttgcccaggctggtcttgacctcccgacctcaagtgatctgcctgccccgacctcccaaagtgctgggattacaggcttgagccaccgtgccaggcctgttttgtttgtttttgtagagagatggggtttcgccatgttgcccaggctaatctcaaattcctgagctaaagcgatctgcccacctcggcctccgaaagtgctaggattacagatgtgaaccactgtgcctggcctgtttgtttgtttgtttaaaacatttctccatcactcattccaggtcccagagcaaactctctctgctctcggagcctgtgacactggctatgtgctccacagtttcagtcccaggtcatactctccaacagttttcagagctccatatatatgtagatgccatcctttctaaaaacttctcacgacctcctggaatattcctattgatctcattttatttagcatcagctcaagaaactaagtcttagtgcacagtatcacaacaaagaaaaagctttgtttttataactggtaaaaacaagaaaagattctcatcaaaatgaaaatataaaattaatcatttctcaccaaagagtatgcctgggagcctccagctgttaaaagacaatgctattactacttcttatcaaaaatctgtaatgccctgtgatttttatgatacttcttcaatacaaagtgttaatatgtgtcatcagtataataacaaccaacaaaatgccactttcagaaaactgtatgtaaattttttgtaacaatgtaaaaaagaaatggggagtaagtgttcacatcattaaaaggctttgaattcatggaaat

SEQ ID NO: 3290 - protein, 374 aa, Homo sapien
MEADSPAGPGAPEPLAEGAAAEFSSLLRRIKGKLFTWNILKTIALGQTLSLCICGTAITSQYLAERYKVNTPMLQSFINYCLLFLIYTVMLAFRSGSDNLLVILKRKWWKYILLGLADVEANYVIVRAYQYTTLTSVQLLDCFGIPVLMALSWFILHARYRVIHFIAVAVCLLGVGTMVGADILAGREDNSGSDVLIGDILVLLGASLYAISNVCEEYIVKKLSRQEFLGMVGLFGTIISGIQLLIVEYKDIASIHWDWKIALLFVAFALCMFCLYSFMPLVIKVTSATSVNLGILTADLYSLFVGLFLFGYKFSGLYILSFTVIMVGFILYCSTPTRTAEPAESSVPPVTSIGIDNLGLKLEENLQETHSAVL

SEQ ID NO: 3291 - DNA, 3082 bp, Homo sapien
catttgccttctcgttttggcctaaggatagagtaatgataaaccgcttagacaacatctgtgaagcagtgttgaaaggcaaatggccagtaaataggcgccagatgtttgatttccaaggcctcatcccaggttacacacccaccacagtggacagccccttgcagaagaggagctttgctgagctctccatggtcggccaagccagcattagtgggagtgaggacatcactacgtctcctcagttgtcaaaggaagatgccctcaacctctctgtccctcgccagcggaggaggaggaggagaaaaatcgaaattgaggccgaaagagctgccaagaggcgaaatctcatggagatggttgcccagcttcgagagtctcaggtggtctcagaaaatggacaagaaaaagttgtagatttatcaaaggcctcaagagaggcaacaagctctacctcaaatttttcatctctttcttcaaagtttatcttgcctaatgtctcaacaccagtgtctgatgcctttaagactcaaatggaactgctccaagcaggcctttcgcgcacacccacaaggcatctccttaatggctccctagtggatggagagcctcccatgaagaggaggcggggaaggaggaaaaatgtggagggacttgatctgcttttcatgagccacaaacggacgtcattgagtgcagaggatgctgaggtgaccaaagcttttgaagaagatatagagaccccaccaacaagaaacattccttctcccggacagctggacccagacacacggatccctgttatcaatcttgaagatgggactaggctggtgggggaagatgctcctaaaaataaggatttagttgaatggctgaagctgcaccctacttacactgttgatatgccaagttatgtaccaaagaatgcagatgtgctgttttcctcatttcagaaaccgaaacagaaacgacatagatgtcgaaaccctaataaattggatataaacactttgacaggagaagaaagggtgcctgttgtcaataaacgaaatgggaagaagatgggtggagctatggcgcctccaatgaaggatctacccaggtggctggaagaaaatcctgaatttgcagttgctccagactggactgatatagttaagcagtctggttttgttcctgagtcgatgtttgaccgccttctcactgggcctgtagtgcggggagagggagcgagcagaagaggaagaaggcccaaaagtgagatcgccagagcagccgcggccgccgctgctgtggcctccacgtcagggatcaaccctttgctggtgaacagcctgtttgctggaatggacctgacgagccttcagaatctccagaatctccagtcgctccagctggcaggcctcatgggcttccctccaggactggcaacagctgccaccgccggaggcgatgcgaagaaccctgctgctgtgctgcccctgatgctgccaggaatggcgggcctgcccaacgtgtttggcttgggcgggctgttgaataaccctctgtcagctgctactggaaacaccactactgcttctagtcaaggagaaccggaagacagcacttcaaaaggagaggagaaaggaaatgagaatgaagacgagaacaaagactctgagaaaagcacagatgctgtttcggctgctgactctgcgaatggatctgttggtgctgctactgccccggctggattgccctcaaacccgctagccttcaaccctttcctcctgtccacaatggccccgggcctcttctacccatccatgtttctacctccaggactggggggattgacgctgcctgggttcccagcattggcaggacttcagaatgccgtgggctccagcgaagaaaaggctgctgacaaggctgagggaggaccctttaaagatggagagacccttgaaggcagcgatgccgaggagagcctggataagactgcagagtcctccctcttagaagacgaaatagcacagggtgaagagctagactcacttgatgggggggatgaaatagaaaacaatgaaaatgatgaataaccagtaccagttccagttcaagtgtttaaaacttttgacaagtggtagtcctactgtttacactcacagttaatgttcatacctagttttataagctgttctgtaacatagtgtagcaaaaaaaaaagttcaagtcatgttatacaggtgtgtcaaaaggtatcttggtcattaagtattgtgcagtgcattatttattatccctaggagagatgaaatttgagaggtgatcatgtctttttaaggaaacttacataatgctctgctttttttttttctcttggtaccattggtattataataaagagcaatttgtaactgagtggcactaatggaagaaagtgctgctcaaaggaagtatgaagttatatatttaattttttaattttaatttttaatttttttgctgtgaaggtcaagctgaaatttaccatacatatcatacttgctcatttgtttccctttttgactgtatgggggttcccacactcgtgcatacacacacatccatacactctgacaatctccacgctagtgtgaacgcctctgtcccgaggcgcagcaataataaggcagctgttgaatgtgaagggtccctttggaaaattaacctactgggagggttcttgccagacagaactacagttccattgtctcgtggtcttgtaatgcactggtaaaaacaaaataaatagatgaataaataaagagtgagagaagagagaatcaggtaccttttttaaattaaaggactttgttactttagccacaaagctaaaacagcattacctcagctctaaactagccttgaagtttacagacatgactttgtaaatgtattgtttttctttgttgtgatgtccttttatttttttctctgaaaactgctatcatgtaagataaaatgtaaattgctgccaactgtagtaatgatgcttttaataaaagtgacccatgatatgcagagatgtaaaaaaaaaaaaaaaaaaaaaaaaaaa

SEQ ID NO: 3292 - protein, 682 aa, Homo sapien
MINRLDNICEAVLKGKWPVNRRQMFDFQGLIPGYTPTTVDSPLQKRSFAELSMVGQASISGSEDITTSPQLSKEDALNLSVPRQRRRRRRKIEIEAERAAKRRNLMEMVAQLRESQVVSENGQEKVVDLSKASREATSSTSNFSSLSSKFILPNVSTPVSDAFKTQMELLQAGLSRTPTRHLLNGSLVDGEPPMKRRRGRRKNVEGLDLLFMSHKRTSLSAEDAEVTKAFEEDIETPPTRNIPSPGQLDPDTRIPVINLEDGTRLVGEDAPKNKDLVEWLKLHPTYTVDMPSYVPKNADVLFSSFQKPKQKRHRCRNPNKLDINTLTGEERVPVVNKRNGKKMGGAMAPPMKDLPRWLEENPEFAVAPDWTDIVKQSGFVPESMFDRLLTGPVVRGEGASRRGRRPKSEIARAAAAAAAVASTSGINPLLVNSLFAGMDLTSLQNLQNLQSLQLAGLMGFPPGLATAATAGGDAKNPAAVLPLMLPGMAGLPNVFGLGGLLNNPLSAATGNTTTASSQGEPEDSTSKGEEKGNENEDENKDSEKSTDAVSAADSANGSVGAATAPAGLPSNPLAFNPFLLSTMAPGLFYPSMFLPPGLGGLTLPGFPALAGLQNAVGSSEEKAADKAEGGPFKDGETLEGSDAEESLDKTAESSLLEDEIAQGEELDSLDGGDEIENNENDE

SEQ ID NO: 3293 - DNA, 1520 bp, Homo sapien
ggcacgaggccgagcctagtgcctcccacgcccggcggccgcgagccggggtccgcgagggcggagtggggcgcggcagccaggaacccgactacgaatcccagggtgcgggcgggcggagcgaggagggacgctgggcctgcccggtgcgcacgggggcggggaccggcaaggcgggaccatttcccggcataggctccggtgcccctgcccggctcccgccgggaagttctaggccgccgcacagaaagccctgccctccacgccgggtctctggagcgccctgggttgcccggccggtccctgccgctgacttgttgacactgcgagcactcagtccctcccgcgcgcctcctccccgcccgccccgccgctcctcctccctgtaacatgccatagtgcgcctgcgaccacacggccggggcgctagcgttcgccttcagccaccatggggaatgggatgaacaagatcctgcccggcctgtacatcggcaacttcaaagatgccagagacgcggaacaattgagcaagaacaaggtgacacatattctgtctgtccatgatagtgccaggcctatgttggagggagttaaatacctgtgcatcccagcagcggattcaccatctcaaaacctgacaagacatttcaaagaaagtattaaattcattcacgagtgccggctccgcggtgagagctgccttgtacactgcctggccggggtctccaggagcgtgacactggtgatcgcatacatcatgaccgtcactgactttggctgggaggatgccctgcacaccgtgcgtgctgggagatcctgtgccaaccccaacgtgggcttccagagacagctccaggagtttgagaagcatgaggtccatcagtatcggcagtggctgaaggaagaatatggagagagccctttgcaggatgcagaagaagccaaaaacattctggccgctccaggaattctgaagttctgggcctttctcagaagactgtaatgtacctgaagtttctgaaatattgcaaacccacagagtttaggctggtgctgccaaaaagaaaagcaacatagagtttaagtatccagtagtgatttgtaaacttgtttttcatttgaagctgaatatatacgtagtcatgtttatgttgagaactaaggatattctttagcaagagaaaatattttccccttatccccactgctgtggaggtttctgtacctcgcttggatgcctgtaaggatcccgggagccttgccgcactgccttgtgggtggcttggcgctcgtgattgcttcctgtgaacgcctcccaaggacgagcccagtgtagttgtgtggcgtgaactctgcccgtgtgttctcaaattccccagcttgggaaatagcccttggtgtgggttttatctctggtttgtgttctccgtggtggaattgaccgaaagctctatgttttcgttaataaagggcaacttagccaagtttaaaaaaaaaaaaaaaaaaaaaaaaaaaaaaaa

SEQ ID NO: 3294 - protein, 184 aa, Homo sapien
MGNGMNKILPGLYIGNFKDARDAEQLSKNKVTHILSVHDSARPMLEGVKYLCIPAADSPSQNLTRHFKESIKFIHECRLRGESCLVHCLAGVSRSVTLVIAYIMTVTDFGWEDALHTVRAGRSCANPNVGFQRQLQEFEKHEVHQYRQWLKEEYGESPLQDAEEAKNILAAPGILKFWAFLRRL

SEQ ID NO: 3295 - DNA, 5227 bp, Homo sapien
gctgttggctgggctcgggagggaacgctccaggtaaagcgctgggggaggaagcgacgccgaggagctacggtttcctccagaggtctccgcccctctgcccctatattcccagagctcgagtctgatccgggccttgccgggcaccctggaaaggcgggggtgatagtacagatggagacgcaactgcagagcattttcgaagaggtggtgaaaacggaagttatagaagaggcttttcctggcatgtttatggatactcctgaagatgagaaaacaaaactaattagctgtttgggggccttcagacagttttggggtggtctttctcaggagtctcatgaacagtgtatccagtggattgttaagtttattcatggtcagcatagtcctaaaagaatttcttttctttatgactgcttagcaatggcagttgagactggtctccttccacccaggctggtttgtgaatccctgataaactctgacactcttgagtgggaaagaacacagctttgggccttaacatttaaactggttcggaaaataattgggggagtggattacaagggtgttcgagatctcttaaaagtgattttggagaagattttgacaattcctaatacagtgagctctgctgttgtacagcagcttctggcagcaagagaggttatagcatatatcttggaaagaaatgcctgcttattaccagcctattttgcagtcactgagatcaggaaactgtatcctgaaggcaaacttccacactggttacttggaaacctagtatcagactttgtggataccttcaggcccacagcaaggataaactccatttgtggtcgctgtagtcttctgccagttgtaaataattcgggtgccatttgtaattcatggaaactggatcctgctactcttcgttttcctttgaaaggccttttgccatatgataaggatctgtttgaaccacagactgctttgttgagatatgtattggagcagccttattccagggatatggtctgcaatatgctaggtttaaataagcagcacaagcagcgctgccctgtgctggaggaccagttggtggatctggttgtttatgccatggagcgatctgagaccgaggagaagtttgacgatgggggaacaagccaactcctgtggcagcatctctcaagtcagctcattttctttgtgcttttccagtttgcaagttttccacatatggtgctttctcttcatcagaagttagcagggcgaggactgattaaaggcagagatcatcttatgtgggttctcctgcaattcatttctggaagtattcagaaaaatgcactagctgattttctccctgtgatgaagctcttcgacttgctatacccagaaaaagaatatatcccagttcctgatattaacaaaccccagtcaacccatgcctttgcaatgacctgtatttggattcatctcaatagaaaagctcaaaatgacaactccaagctacagattccaatacctcattccctaagacttcaccatgagttcctgcagcagagtctaagaaataaaagtttacagatgaatgactataagattgctctattgtgtaatgcatactctacaaattcagaatgttttacattacccatgggagctctggtagaaactatttatggaaatggaattatgaggatacctctccctggaacaaactgtatggcttcaggatctattacccccttacctatgaacctcctggattcactgacagttcatgccaaaatgagccttattcacagcattgcaaccagggtgataaaacttgctcatgcaaagtccagtgtggccttggctccagccctagtggaaacttacagtcgtttattggtctatatggaaatagagtctttgggcatcaaaggatttatcagtcagcttttgccaactgttttcaaatcacatgcatgggggatcttacacacactccttgagatgtttagctaccggatgcatcatattcagcctcattacagagttcagctcctgagtcatcttcatactttggctgcagttgcacaaacaaaccagaaccagctccatctttgtgtcgagagcactgctctcaggcttataacagcattaggtagctcagaggtacaaccgcagtttacacgcttccttagtgatcccaaaacagtgctctcagcagaatctgaagaactgaaccgagccttgatattgaccttggctagagcaactcatgtaacagatttttttacaggctctgattcaattcagggaacttggtgtaaagacatacttcagaccatcatgagtttcactcctcataattgggcttcacacaccctgagctgttttccaggcccactacaggcattcttcaaacaaaataatgtgcctcaggaaagccgttttaatctgaaaaaaaatgtggaggaggagtataggaagtggaagtcaatgagcaacgaaaacgacattattacccacttctctatgcagggctcccctcctctctttctttgtcttctctggaaaatgctcttggaaacagatcatattaatcagattggctatagagtattagagagaattggagccagggccttggtagcccatgtgaggacatttgcagatttcctggtatatgagttttctacatcagcagggggtcagcaactcaataaatgcattgaaattcttaatgacatggtatggaagtataacattgttacactggacagattaattctctgcctggccatgcgtagtcacgaaggaaatgaagcccaggtttgttatttcataattcagttgctgttactcaaaccaaacgattttagaaatcgagtaagtgactttgtgaaggaaaattccccagagcactggttacagaatgactggcacaccaagcacatgaattatcacaagaaatatccagagaagttgtattttgagggcctcgcggaacaggtggatcctcctgtacagatccagtctccctatctgcccatctattttgggaatgtgtgtcttcgattccttccagtatttgatatagtaatccacagatttttagagttgcttccggtatccaaatcactggagactctactggatcatctaggaggcttatataaatttcatgatcgtccagtgacttatctgtataacactctgcactattatgaaatgcacctgagagaccgcgcatttctcaaacgaaaactcgtccatgcgatcattggctctctgaaggataatcgaccgcagggctggtgtctaagtgacacttacctgaaatgcgctatgaatgcacgagaggaaaatccttgggttccagatgacacctactattgcagattgattggcagactagtcgatacgatggctggcaaatctcctggtccctttccaaactgtgactggagattcaatgagtttcccaacccagctgcccatgctctccatgttacttgtgtggagctcatggccttggcagtttcaggcaaagaagttgggaatgcccttctaaatgttgtcctaaaaagtcagcctttagtgccaagagagaacattacagcatggatgaatgcaattggtttgatcatcactgccctaccagagccatattggattgttcttcatgatcgaattgtgagtgtcatcagcagccccagcttgacgtctgaaacagagtgggttggctatccattccgcctctttgatttcactgcctgtcatcagtcctactctgagatgagttgtagctatacgttagctcttgcacatgctgtgtggcaccattctagcatcggacaactttctctcattccaaagtttcttactgaagtacttcttcctatagtgaagaccgaattccagttgctttatgtataccatcttgttggaccatttttacaaagatttcagcaagagagaactcgttgtatgatagagattggtgtggcgttttatgacatgctgctgaatgttgaccagtgtagcacccatttaaattacatggatcccatctgtgacttcctctatcacatgaagtatatgtttactggtgacagcgtgaaagagcaagtagagaagattatctgtaacttaaaaccagctttaaaacttcgtcttcgattcatcacacacattagcaagatggagccagctgcagtgcctccacaagccatgaacagtgggtctccagcacctcagtctaatcaggtgcccgtgtctttaccagtaactcagtgaagccagactgtactgtggagaaagtagaaatatatccgtctttgagagtggactcaaaccttttaaatctgaatgcgatcacactgtagtgatatagtagaagcagtgatgatattcagattgttttattttgattcaaatgatgaatctgttgacaccttataactcccatctccctatctatatttttgtctctaagagatcaagtaagatacatgttgttcatattcataacaacttattagagctatgtaggaacatagaggtatctgtgatcaaatgacttgtcattggcactttcagtctttcctattctagccgttgtttttgtttgtattttttattattaatgacatatttagtcttcagatatattattttaaaggcaccacacatgtaaaacagttattacaaatattttatacataaatctcttggtagattttcagaataatagagatttatatcaagaaaaggaatctagattttgttgcattgtaggagcaaacaaggcttcatattctttttaaaatgacttgaaattttattataaatttccatagtttctatcaaggtcaactggcagttttattacctttgctatggacttgaacttactgtataaaattagttggaagccatgtaagaaaataacatctgaaaattcttgaacttaaaatcatgcttaaatggttgattctccaatttctttttttaaaaataagttaattgcttttgcaggttgacactctcacctgacagatgatgtaattcttcaatttttataatcttaaaatttttaaattttatatttgtaaatacagtacacattttatttcttggattttgagagacattgttaattttgggggaattggcattgcgaaagacttgaaaactaatgagtaaagtctgctgaatgaataaaccgtgtgattgtttcccg

SEQ ID NO: 3296 - protein, 1368 aa, Homo sapien
METQLQSIFEEVVKTEVIEEAFPGMFMDTPEDEKTKLISCLGAFRQFWGGLSQESHEQCIQWIVKFIHGQHSPKRISFLYDCLAMAVETGLLPPRLVCESLINSDTLEWERTQLWALTFKLVRKIIGGVDYKGVRDLLKVILEKILTIPNTVSSAVVQQLLAAREVIAYILERNACLLPAYFAVTEIRKLYPEGKLPHWLLGNLVSDFVDTFRPTARINSICGRCSLLPVVNNSGAICNSWKLDPATLRFPLKGLLPYDKDLFEPQTALLRYVLEQPYSRDMVCNMLGLNKQHKQRCPVLEDQLVDLVVYAMERSETEEKFDDGGTSQLLWQHLSSQLIFFVLFQFASFPHMVLSLHQKLAGRGLIKGRDHLMWVLLQFISGSIQKNALADFLPVMKLFDLLYPEKEYIPVPDINKPQSTHAFAMTCIWIHLNRKAQNDNSKLQIPIPHSLRLHHEFLQQSLRNKSLQMNDYKIALLCNAYSTNSECFTLPMGALVETIYGNGIMRIPLPGTNCMASGSITPLPMNLLDSLTVHAKMSLIHSIATRVIKLAHAKSSVALAPALVETYSRLLVYMEIESLGIKGFISQLLPTVFKSHAWGILHTLLEMFSYRMHHIQPHYRVQLLSHLHTLAAVAQTNQNQLHLCVESTALRLITALGSSEVQPQFTRFLSDPKTVLSAESEELNRALILTLARATHVTDFFTGSDSIQGTWCKDILQTIMSFTPHNWASHTLSCFPGPLQAFFKQNNVPQESRFNLKKNVEEEYRKWKSMSNENDIITHFSMQGSPPLFLCLLWKMLLETDHINQIGYRVLERIGARALVAHVRTFADFLVYEFSTSAGGQQLNKCIEILNDMVWKYNIVTLDRLILCLAMRSHEGNEAQVCYFIIQLLLLKPNDFRNRVSDFVKENSPEHWLQNDWHTKHMNYHKKYPEKLYFEGLAEQVDPPVQIQSPYLPIYFGNVCLRFLPVFDIVIHRFLELLPVSKSLETLLDHLGGLYKFHDRPVTYLYNTLHYYEMHLRDRAFLKRKLVHAIIGSLKDNRPQGWCLSDTYLKCAMNAREENPWVPDDTYYCRLIGRLVDTMAGKSPGPFPNCDWRFNEFPNPAAHALHVTCVELMALAVSGKEVGNALLNVVLKSQPLVPRENITAWMNAIGLIITALPEPYWIVLHDRIVSVISSPSLTSETEWVGYPFRLFDFTACHQSYSEMSCSYTLALAHAVWHHSSIGQLSLIPKFLTEVLLPIVKTEFQLLYVYHLVGPFLQRFQQERTRCMIEIGVAFYDMLLNVDQCSTHLNYMDPICDFLYHMKYMFTGDSVKEQVEKIICNLKPALKLRLRFITHISKMEPAAVPPQAMNSGSPAPQSNQVPVSLPVTQ

SEQ ID NO: 3297 - DNA, 3216 bp, Homo sapien
gcggacggtgagtggggatggactggagttgaagagctcgagatgaagggcttgagggcgtgtgttatttgttttcttcaagcatttggtcgagattaagaattaaaaatgtcatccaaacaagaaataatgagtgaccagcggtttagacgggttgcaaaggacccgagattttgggaaatgccagaaaaggatcgaaaagtcaaaattgacaagagatttcgagccatgtttcatgacaagaagttcaagttgaactatgccgtggataaaagagggcgccccattagccatagcactacagaggatttgaagcgtttttacgacctttcagattctgattccaatctctctggtgaagatagcaaagcattgagtcaaaagaaaataaagaagaaaaaaacccagactaaaaaagaaatcgattcaaaaaatctagttgagaaaaagaaagaaaccaagaaggctaatcacaagggttctgaaaataaaactgatttagataattctataggaattaaaaaaatgaaaacctcatgtaaatttaagatagattcaaacataagtccgaagaaggatagcaaagaatttacacaaaaaaataagaaagagaaaaaaaacattgttcaacatactacagactcttctctcgaagaaaaacaaaggacattagactcaggcacctctgaaattgtgaaatctcccagaatcgagtgttctaagacaagaagagaaatgcaatcagtggttcaactcataatgacaagagacagtgatggttatgaaaactcaacagatggtgaaatgtgtgacaaagatgctctggaggaagattcagaaagcgttagtgaaataggaagtgatgaggaatctgaaaatgaaattacaagtgttggtagagcttcaggtgatgacgatggaagtgaagatgatgaagaggaggatgaagatgaagaggaggatgaagatgaggatagtgaggatgatgataaaagtgacagtggccctgatcttgcaaggggtaaaggaaatatagaaactagttctgaagatgaagatgatacggcagatttgtttccagaagaatctggttttgagcatgcttggagagaattagataaagatgctcctcgtgctgatgagattacacgtcgattagcagtttgtaacatggactgggatagattaaaggcaaaagatttgctggctctgttcaattcatttaaacccaaaggaggtgtaatattttccgtcaagatatatccttcagaatttggaaaggagaggatgaaggaagagcaagttcaaggaccagtagagctattaagtattcctgaagatgccccagaaaaagactggacgtctagagaaaaattgagagattatcaattcaaacgactgaagtactattatgcagtagtagactgtgattctccggaaacagctagtaaaatttatgaggattgtgatggcctggaatttgaaagtagttgttctttcatagatctaaggtttataccagatgatattacttttgatgatgagcctaaggatgtagcctcagaagtgaatttaacagcatataaaccaaaatatttcacttctgctgcaatgggaacatcaacggtggaaatcacttgggatgagactgatcatgaaagaattacaatgctcaacaggaagtttaaaaaggaagagcttttggacatggattttcaagcctacttagcttcctctagtgaagatgaagaggagatagaagaggagctacaaggtgatgatggagtcaatgtagaagaagatgggaaaacaaagaaaagtcagaaggatgatgaagaacaaattgctaaatacaggcagctcttgcaggttattcaagaaaaagaaaagaaaggcaaagaaaatgatatggaaatggaaattaaatgggttccaggtcttaaagaaagtgcagaagagatggtcaaaaacaaattggaaggaaaggataaactgaccccttgggaacaatttttagagaagaagaaagagaaaaaaagactgaaaaggaaacagaaggctcttgctgaagaggccagtgaagaggaacttccctctgatgttgatttgaatgacccatactttgctgaagaagttaaacaaataggtataaataaaaaatcggtaaaatctgcaaaagatggcacatctccagaagaagaaattgaaatagaaagacaaaaggctgaaatggctttgcttatgatggatgaggacgaggacagtaagaaacacttcaattacaacaagattgtggagcaccagaatctgagcaaaaagaagaaaaagcagctcatgaaaaagaaggaattaatagaggatgactttgaggtaaatgttaacgatgcacggtttcaggcaatgtacacttcccacttgttcaatttggacccctcagatcccaatttcaagaaaacaaaagctatggaaaaaatccttgaggagaaggcccggcaaagagaacggaaagaacaagaacttactcaggcaataaagaaaaaagagagtgagattgaaaaggaatcacaaaggaagtccattgatcctgctttgtcaatgttgattaaatctataaaaaccaaaacagagcagtttcaagcaagaaaaaagcaaaaagtcaaataactggatgttacttatttttgaactgaatacatcttttcctaaaatgtacaaaaataataggagggaatatttattgggaacaaagctatctttcaagaacatgaataaaatctttttctggacatagtaaaatttttctccataaataattgtacttaattgtggatgactgacaaatttttattgtatattcctacagatcagtcataattaaattacctgcattatagggtttataaaatttttatattttacaatgttcagttctaactagtggaaagttactctagctttttaaaaggctgtttacaattctgtgtaaaaatagagcagtatctactcaagtttgtgtaaatgttagggataatttgaaaaatatatatatttaatacattaatttctctggaagcaggaggcatgtttaaataactattaaaataatttatttttctagccataaaggatggaagtcaagaactttttgttgtttagtcatgttaagtatagtttatgaaattaacttgtaaataaaagtgtaaaatattttcatta

SEQ ID NO: 3298 - protein, 851 aa, Homo sapien
MSSKQEIMSDQRFRRVAKDPRFWEMPEKDRKVKIDKRFRAMFHDKKFKLNYAVDKRGRPISHSTTEDLKRFYDLSDSDSNLSGEDSKALSQKKIKKKKTQTKKEIDSKNLVEKKKETKKANHKGSENKTDLDNSIGIKKMKTSCKFKIDSNISPKKDSKEFTQKNKKEKKNIVQHTTDSSLEEKQRTLDSGTSEIVKSPRIECSKTRREMQSVVQLIMTRDSDGYENSTDGEMCDKDALEEDSESVSEIGSDEESENEITSVGRASGDDDGSEDDEEEDEDEEEDEDEDSEDDDKSDSGPDLARGKGNIETSSEDEDDTADLFPEESGFEHAWRELDKDAPRADEITRRLAVCNMDWDRLKAKDLLALFNSFKPKGGVIFSVKIYPSEFGKERMKEEQVQGPVELLSIPEDAPEKDWTSREKLRDYQFKRLKYYYAVVDCDSPETASKIYEDCDGLEFESSCSFIDLRFIPDDITFDDEPKDVASEVNLTAYKPKYFTSAAMGTSTVEITWDETDHERITMLNRKFKKEELLDMDFQAYLASSSEDEEEIEEELQGDDGVNVEEDGKTKKSQKDDEEQIAKYRQLLQVIQEKEKKGKENDMEMEIKWVPGLKESAEEMVKNKLEGKDKLTPWEQFLEKKKEKKRLKRKQKALAEEASEEELPSDVDLNDPYFAEEVKQIGINKKSVKSAKDGTSPEEEIEIERQKAEMALLMMDEDEDSKKHFNYNKIVEHQNLSKKKKKQLMKKKELIEDDFEVNVNDARFQAMYTSHLFNLDPSDPNFKKTKAMEKILEEKARQRERKEQELTQAIKKKESEIEKESQRKSIDPALSMLIKSIKTKTEQFQARKKQKVK

SEQ ID NO: 3299 - DNA, 796 bp, Homo sapien
gggagctgccgggagttggagcctgcggagttcgagaccatgctgctgttctgccccggctgcgggaacgggctgatcgtggaggagggacaacgctgccaccgcttcgcctgcaacacgtgcccctacgtgcacaacatcacccgcaaggtaacaaatcggaagtacccaaaactgaaagaagtggatgatgtgcttggtggagcagctgcctgggagaatgttgactctactgcagagtcgtgtcccaaatgcgaacatcctcgtgcttacttcatgcagcttcagacccgctctgcagatgagccgatgaccaccttctacaagtgctgcaatgctcagtgtggacaccgctggagggattagggccaggatggcccagctgccctagtgtgtgcttgccttgtccctcggggtagatgcttagctggcagtatgagttgtgtgtcctgagggtctttgctagtgtggtggaaagataaaccttttgaggtgaagagccagggggtcaggaaatatggcctatctgccaggcagggtggatgaagtcatgaatgtctgggagtttttctgtgtggggaggagacagagacccataactaaatatgctctgtgtaaagtcctattctttcatcttccactttattggcagttgacattcccttactcccaatcaacactcttaaatatttgtactgtttgtaaaacttagtacatgtccctaaatatttaactgttacttgtaaacttgtgtaatttattatttattttaatcaaaattctgaatatttcattt

SEQ ID NO: 3300 - protein, 108 aa, Homo sapien
MLLFCPGCGNGLIVEEGQRCHRFACNTCPYVHNITRKVTNRKYPKLKEVDDVLGGAAAWENVDSTAESCPKCEHPRAYFMQLQTRSADEPMTTFYKCCNAQCGHRWRD

SEQ ID NO: 3301 - DNA, 1706 bp, Homo sapien
cgtttttgttgaaagagtcattaacggagttaggagttgatggcagtttcaataacaggtcattgccgagaaaaggatagcactataatatgcagaaatctacaaattctgatacttccgtggaaacactgaattctacccgccaaggcacaggagctgtgcaaatgagaatcaaaaatgccaacagccaccatgacaggctcagccaaagtaaatccatgatcctcaccgatgtcgggaaggtcactgaacctatatccagacacagaaggaatcattcacagcatatcttgaaagatgtcattcctccattggaacaactgatggttgaaaaagaaggttatctgcaaaaagctaaaattgcagatggaggaaagaaactaaggaaaaactggtctacttcctggattgttctttctagtcgaagaattgaattttacaaagaatccaagcaacaggctctgtccaatatgaaaactgggcacaaaccagaaagtgtggatttgtgtggagcacacattgaatgggccaaggaaaaatcgagcagaaagaatgtctttcagatcacaacagtatcaggaaatgagttccttctacagtcagatattgacttcatcatattggattggttccacgctatcaaaaatgcaattgacagattgccaaaggattcaagttgtccatcaagaaacctggaattattcaaaatccaaagatcctctagcactgaattgctaagtcactatgacagtgatataaaagaacagaaaccagagcacagaaaatctttaatgttcagactgcatcacagtgcttccgatacaagcgacaaaaatcgagttaaaagcagattaaagaagtttattacccgaagaccttccctgaaaactctgcaagaaaaaggacttattaaagatcaaatttttggctctcatctgcacaaagtgtgtgaacgtgaaaattccacagttccgtggtttgtaaagcaatgcattgaagctgttgagaaaagaggtctagatgtggatgcaatatatcgagttagtggcaatctgcaaacaatacagaagttaagatttattgtcaaccaagaagagaagctgaatttggacgacagccagtgggaggacatccacgttgtcaccggagcactgaagatgtttttccgggagctgcctgagccgctcttcccttacagtttctttgagcagtttgtggaagcgatcaaaaagcaagacaacaacacaagaattgaagctgtaaaatctcttgtacaaaaactccctccgccaaatcgtgacaccatgaaagtcctctttggacatctaactaagatagtggccaaagcctccaagaacctcatgtccacgcaaagcttggggattgtatttggacctacccttctgcgagctgaaaatgaaacaggaaacatggcgatccacatggtctaccagaaccagatagctgagctcatgctgagtgagtacagtaagatcttcggctcagaggaagactgacagacaagacaagctactgaatacgttcacatctgtcttgatgcctaatatttttacatttctgtaaacatatttctgaaatattttttgcctttcaagcgacagatgcctcattttgtgaaaacttaatgatgattttgtgtttaagttccaaacatttgaataaaataattgacaataaaaaaaaaa

SEQ ID NO: 3302 - protein, 475 aa, Homo sapien
MQKSTNSDTSVETLNSTRQGTGAVQMRIKNANSHHDRLSQSKSMILTDVGKVTEPISRHRRNHSQHILKDVIPPLEQLMVEKEGYLQKAKIADGGKKLRKNWSTSWIVLSSRRIEFYKESKQQALSNMKTGHKPESVDLCGAHIEWAKEKSSRKNVFQITTVSGNEFLLQSDIDFIILDWFHAIKNAIDRLPKDSSCPSRNLELFKIQRSSSTELLSHYDSDIKEQKPEHRKSLMFRLHHSASDTSDKNRVKSRLKKFITRRPSLKTLQEKGLIKDQIFGSHLHKVCERENSTVPWFVKQCIEAVEKRGLDVDAIYRVSGNLQTIQKLRFIVNQEEKLNLDDSQWEDIHVVTGALKMFFRELPEPLFPYSFFEQFVEAIKKQDNNTRIEAVKSLVQKLPPPNRDTMKVLFGHLTKIVAKASKNLMSTQSLGIVFGPTLLRAENETGNMAIHMVYQNQIAELMLSEYSKIFGSEED

SEQ ID NO: 3303 - DNA, 2082 bp, Homo sapien
gacaggtctgtgaagcaggcaggttgctcagctgcccccggagcggttcctccacctgaggcagactccacgtcggctggcatgagccggcgcccctgcagctgcgccctacggccaccccgctgctcctgcagcgccagccccagcgcagtgacagccgccgggcgccctcgaccctcggatagttgtaaagaagaaagttctaccctttctgtcaaaatgaagtgtgattttaattgtaaccatgttcattccggacttaaactggtaaaacctgatgacattggaagactagtttcctacacccctgcatatttggaaggttcctgtaaagactgcattaaagactatgaaaggctgtcatgtattgggtcaccgattgtgagccctaggattgtacaacttgaaactgaaagcaagcgcttgcataacaaggaaaatcaacatgtgcaacagacacttaatagtacaaatgaaatagaagcactagagaccagtagactttatgaagacagtggctattcctcattttctctacaaagtggcctcagtgaacatgaagaaggtagcctcctggaggagaatttcggtgacagtctacaatcctgcctgctacaaatacaaagcccagaccaatatcccaacaaaaacttgctgccagttcttcattttgaaaaagtggtttgttcaacattaaaaaagaatgcaaaacgaaatcctaaagtagatcgggagatgctgaaggaaattatagccagaggaaattttagactgcagaatataattggcagaaaaatgggcctagaatgtgtagatattctcagcgaactctttcgaaggggactcagacatgtcttagcaactattttagcacaactcagtgacatggacttaatcaatgtgtctaaagtgagcacaacttggaagaagatcctagaagatgataagggggcattccagttgtacagtaaagcaatacaaagagttaccgaaaacaacaataaattttcacctcatgcttcaaccagagaatatgttatgttcagaaccccactggcttctgttcagaaatcagcagcccagacttctctcaaaaaagatgctcaaaccaagttatccaatcaaggtgatcagaaaggttctacttatagtcgacacaatgaattctctgaggttgccaagacattgaaaaagaacgaaagcctcaaagcctgtattcgctgtaattcacctgcaaaatatgattgctatttacaacgggcaacctgcaaacgagaaggctgtggatttgattattgtacgaagtgtctctgtaattatcatactactaaagactgttcagatggcaagctcctcaaagccagttgtaaaataggtcccctgcctggtacaaagaaaagcaaaaagaatttacgaagattgtgatctcttattaaatcaattgttactgatcatgaatgttagttagaaaatgttaggttttaacttaaaaaaaattgtattgtgattttcaattttatgttgaaatcggtgtagtatcctgaggtttttttccccccagaagataaagaggatagacaacctcttaaaatatttttacaatttaatgagaaaaagtttaaaattctcaatacaaatcaaacaatttaaatattttaagaaaaaaggaaaagtagatagtgatactgagggtaaaaaaaaaattgattcaattttatggtaaaggaaacccatgcaattttacctagacagtcttaaatatgtctggttttccatctgttagcatttcagacattttatgttcctcttactcaattgataccaacagaaatatcaacttctggagtctattaaatgtgttgtcacctttctaaagctttttttcattgtgtgtatttcccaagaaagtatcctttgtaaaaacttgcttgttttccttatttctgaaatctgttttaatatttttgtatacatgtaaatatttctgtattttttatatgtcaaagaatatgtctcttgtatgtacatataaaaataaattttgctcaataaaattgtaagcttaaaaaaaaaaaaaaaaaa

SEQ ID NO: 3304 - protein, 447 aa, Homo sapien
MSRRPCSCALRPPRCSCSASPSAVTAAGRPRPSDSCKEESSTLSVKMKCDFNCNHVHSGLKLVKPDDIGRLVSYTPAYLEGSCKDCIKDYERLSCIGSPIVSPRIVQLETESKRLHNKENQHVQQTLNSTNEIEALETSRLYEDSGYSSFSLQSGLSEHEEGSLLEENFGDSLQSCLLQIQSPDQYPNKNLLPVLHFEKVVCSTLKKNAKRNPKVDREMLKEIIARGNFRLQNIIGRKMGLECVDILSELFRRGLRHVLATILAQLSDMDLINVSKVSTTWKKILEDDKGAFQLYSKAIQRVTENNNKFSPHASTREYVMFRTPLASVQKSAAQTSLKKDAQTKLSNQGDQKGSTYSRHNEFSEVAKTLKKNESLKACIRCNSPAKYDCYLQRATCKREGCGFDYCTKCLCNYHTTKDCSDGKLLKASCKIGPLPGTKKSKKNLRRL

SEQ ID NO: 3305 - DNA, 1780 bp, Homo sapien
ggcgctcgcagagccggaaagaagtgctgtaagggacgctcgggggacgctgttcctgaggtgtcgccgcctccctgtcctcgccctccgcggtgggggagaaacccaggagcgaagcccagagcccgcggcgcggccggcggacgaacgagcgcgcagcagccggtgcgcggccgcggcgagggcgggggaagaaaaacaccctgtttcctctccggcccccaccgcggatcatgtaccaggattatcccgggaactttgacacctcgtcccggggcagcagcggctctcctgcgcacgccgagtcctactccagcggcggcggcggccagcagaaattccgggtagatatgcctggctcaggcagtgcattcatccccaccatcaacgccatcacgaccagccaggacctgcagtggatggtgcagcccacagtgatcacctccatgtccaacccataccctcgctcgcacccctacagccccctgccgggcctggcctctgtccctggacacatggccctcccaagacctggcgtgatcaagaccattggcaccaccgtgggccgcaggaggagagatgagcagctgtctcctgaagaggaggagaagcgtcgcatccggcgggagaggaacaagctggctgcagccaagtgccggaaccgacgccgggagctgacagagaagctgcaggcggagacagaggagctggaggaggagaagtcaggcctgcagaaggagattgctgagctgcagaaggagaaggagaagctggagttcatgttggtggctcacggcccagtgtgcaagattagccccgaggagcgccgatcgcccccagcccctgggctgcagcccatgcgcagtgggggtggctcggtgggcgctgtagtggtgaaacaggagcccctggaagaggacagcccctcgtcctcgtcggcggggctggacaaggcccagcgctctgtcatcaagcccatcagcattgctgggggcttctacggtgaggagcccctgcacacccccatcgtggtgacctccacacctgctgtcactccgggcacctcgaacctcgtcttcacctatcctagcgtcctggagcaggagtcacccgcatctccctccgaatcctgctccaaggctcaccgcagaagcagtagcagcggggaccaatcatcagactccttgaactcccccactctgctggctctgtaacccagtgcacctccctccccagctccggagggggtcctcctcgctcctccttcccagggaccagcaccttcaagcgctccagggccgtgagggcaagagggggacctgccaccagggagcttcctggctctgggggacccaggtgggacttagcagtgagtattggaagacttgggttgatctcttagaagccatgggacctcctccctcattcatcttgcaagcaaatcccatttcttgaaaagccttggagaactcggtttggtagacttggacatctctctggcttctgaagagcctgaagctggcctggaccattcctgtccctttgttaccatactgtctctggagtgatggtgtccttccctgccccaccacgcatgctcagtgccttttggtttcaccttccctcgacttgaccctttcctcccccagcgtcagtttcactccctcttggtttttatcaaatttgccatgacatttcatctgggtggtctgaatattaaagctcttcatttctggaaaaaaaaaaaaaaaaaaaaaaaaaaaaaaaaaaaaaaaaaaaa

SEQ ID NO: 3306 - protein, 326 aa, Homo sapien
MYQDYPGNFDTSSRGSSGSPAHAESYSSGGGGQQKFRVDMPGSGSAFIPTINAITTSQDLQWMVQPTVITSMSNPYPRSHPYSPLPGLASVPGHMALPRPGVIKTIGTTVGRRRRDEQLSPEEEEKRRIRRERNKLAAAKCRNRRRELTEKLQAETEELEEEKSGLQKEIAELQKEKEKLEFMLVAHGPVCKISPEERRSPPAPGLQPMRSGGGSVGAVVVKQEPLEEDSPSSSSAGLDKAQRSVIKPISIAGGFYGEEPLHTPIVVTSTPAVTPGTSNLVFTYPSVLEQESPASPSESCSKAHRRSSSSGDQSSDSLNSPTLLAL

SEQ ID NO: 3307 - DNA, 1820 bp, Homo sapien
tgacatttcatctgggtggtctgaatattaaagctcttcatttctggagatggggcagcaggtggctcttctgctggggctgacttgtccagaaggggacaaagtgcaatacagagccttccctaccctgacgcctcccagtcatcatctccagaactcccagcggggctccctgagctctcaaggagatgctgccatcactgggaggctcagaggacccttcctgcccaccttcggagacggcttctggaggaacggcttggccagaagacagggtgtgagtgagacagtggggcacaggttgggtttgccaaacgcctaattaccaggccaggaagcatgccaacaaagccacacgggtgtcctagccagcttcccttcacctggtgtcttgagtagggcgtctcctgtaattactgccttgccattctgcccctggacccttctctccggaccagggaggcgtccctccctatgagccacacattatactccaagtccctgccgggctccgcctttcccccaccctggctctcagggtgacgccacccacagagatttaatgagcgtgggcctggaccttccccagatgctgccaggcagcccctccccaagcctcaaagaagcatttgctgaggatggagaggcaggggagggaggcgggaggccgtcactggagtggcgtctgcagcagctgctgccccagcacccgctcagcctgtcctggctgctcacctccccgcagggcaccgggcctttcctgccctctgtggtcatctgccacctgctggatcaagtgctttctcttttacactcccctgtccccaccccagtgcactcttctggcccaggcagcaagcaagctgtgaacagctggcctgagctgtcgctgtggcttgtggctcatgcgccattcctggttgtctgttgaatctttctggctgctggaattggagataggatgttttgcttcccactgcaggagagctgccccctttcacggggttggggaagggtccccctggcctccagcaggagcacagctcagcagggtccctgctgcccacccctctgagccttttctccccagggtatggctcctgctgagtttcttgtccagcagggccttgacaggaatccagggagtagctcctggccagaaccagcctctgcggggcttgtgctctgcaaagactctgctgctggggattcagctctagaggtcacagtatcctcgtttgaaagataattaagatcccccgtggagaaagcagtgacacattcacacagctgttccctcgcatgttatttcatgaacatgacctgttttcgtgcactagacacacagagtggaacagccgtatgcttaaagtacatgggccagtgggactggaagtgacctgtacaagtgatgcagaaaggagggtttcaaagaaaaaggattttgtttaaaatactttaaaaatgttatttcctgcatcccttggctgtgatgcccctctcccgatttcccaggggctctgggagggacccttctaagaagattgggcagttgggtttctggcttgagatgaatccaagcagcagaatgagccaggagtagcaggagatgggcaaagaaaactggggtgcactcagctctcacaggggtaatcatctcaagtggtatttgtagccaagtgggagctattttcttttttgtgcatatagatatttcttaaatgaaaaaaaaaaaaaaaaaaaaaaaaaaaaaaaaaaaaaaaaaaaaaaaaaaaaaaaaaaaaaaaaaaaaaaaaaaaaaaaaaaaaaaaaaaaaaaaa

SEQ ID NO: 3308 - protein, 122 aa, Homo sapien
MSVGLDLPQMLPGSPSPSLKEAFAEDGEAGEGGGRPSLEWRLQQLLPQHPLSLSWLLTSPQGTGPFLPSVVICHLLDQVLSLLHSPVPTPVHSSGPGSKQAVNSWPELSLWLVAHAPFLVVC

SEQ ID NO: 3309 - DNA, 1554 bp, Homo sapien
aattatatatttttactctatgtttctctacatgtttttttctttccgttgctggcggaagaggcacgtgcgctgctgaatggagctggtcgctggttgctacgagcaggtcctctttgggttcgctgtacacccggagcccaaggcttgcggcgaccacgagcaatggactcttgtggctgacttcactcaccatgctcacactgcctccttgtcagcagtagctgtaaatagtcgttttgtggtcactgggagcaaagatgaaacaattcacatttatgacatgaaaaagaagattgagcatggggctctagtgcatcacagtggtacaataacttgcctgaaattctatggcaacaggcatttaatcagtggagcggaagatggactcatctgtatctgggatgcaaagaaatgggaatgcctgaagtcaattaaagctcacaaaggacaggtgaccttcctttctattcacccatctggcaagttggccctgtcggttggtacagataaaactttaagaacgtggaatcttgtagaaggaagatcagcattcataaaaaatataaaacaaaatgctcacatagtagaatggtccccaagaggagagcagtatgtagttatcatacagaataaaatagacatctatcagcttgacactgcatccattagtggcaccatcacaaatgaaaagagaatttcctctgttaaatttctttcagagtctgtccttgcagtggctggagatgaagaagttataaggttttttgactgtgattcactagtgtgcctctgcgaatttaaagctcatgaaaacagggtaaaggacatgttcagttttgaaattccagagcatcatgttattgtttcagcatcgagtgatggtttcatcaaaatgtggaagcttaagcaggataagaaagttcccccatctttactctgtgaaataaacactaatgccaggctgacgtgtcttggagtgtggctagacaaagtggcagacatgaaaagccttcctccagctgcagagccttctcctgtaagtaaagaacagtccaaaattggcaaaaaggagcctggtgacacagtgcacaaagaagaaaagcggtcaaaacctaacacaaagaaacgcggtttaacaggtgacagtaagaaagcaacaaaagaaagtggcctgatatcaaccaagaagaggaaaatggtagaaatgttggaaaagaagaggaaaaagaagaaaataaaaacaatgcagtgaatcacagatgtctcctgaaagaactcttttagatgaaatcattctactcaaatgtaccttaatttttttttttccctgagtaaaagcaagaaatttcttcctttggaaaaaatatatatattaaaaaaccacttttagatggttttttttaaaaaaaaaaaaaaaactggtaaaattacttttggcagacagtgttttatgaattatgtatcatgttgatatataatatgttaatgtgtcatgtaatttttactttgtacaaagcaaataaagatctttctcaaaaaaaaaaaaaaaaa

SEQ ID NO: 3310 - protein, 391 aa, Homo sapien
MELVAGCYEQVLFGFAVHPEPKACGDHEQWTLVADFTHHAHTASLSAVAVNSRFVVTGSKDETIHIYDMKKKIEHGALVHHSGTITCLKFYGNRHLISGAEDGLICIWDAKKWECLKSIKAHKGQVTFLSIHPSGKLALSVGTDKTLRTWNLVEGRSAFIKNIKQNAHIVEWSPRGEQYVVIIQNKIDIYQLDTASISGTITNEKRISSVKFLSESVLAVAGDEEVIRFFDCDSLVCLCEFKAHENRVKDMFSFEIPEHHVIVSASSDGFIKMWKLKQDKKVPPSLLCEINTNARLTCLGVWLDKVADMKSLPPAAEPSPVSKEQSKIGKKEPGDTVHKEEKRSKPNTKKRGLTGDSKKATKESGLISTKKRKMVEMLEKKRKKKKIKTMQ

SEQ ID NO: 3311 - DNA, 3653 bp, Homo sapien
acgcggcgctcgcgctccctccttaaatgagcctgggcgccccgcgcccgccacttcagtggatcccgcgccggggccgcgggcggagctgcctgccggtcccgcgccgcgcgtccgcactcctcggccctcgggcggtcgatgggacggggcgccgcggagcaggaggcggcgcccgtcggggtgctcgggccgcgcgggagcccactgtggggctcgggcatggcgggccgcaggacctgagctctcctcaggggagcggggaggcagctgctggccggcgatggggacggagtggggccgtcgccgccgcgccgagccgtgagcgccgagccaccgccgccgctacctcagcccttcgcgaagcgccgggcagctcgggaacatggccctggagcggctctgctcggtcctcaaagtgttgttaataacagtactggtagtggaagggattgccgtggcccaaaaaacccaagatggacaaaatattggaatcaagcatattcctgcaacccagtgtggcatttgggttcgaaccagcaatggaggtcattttgcttcgccaaattatcctgactcatatccaccaaacaaggagtgtatctacattttggaagctgctccacgtcaaagaatagagttgacctttgatgaacattattatatagaaccatcatttgagtgtcggtttgatcacttggaagttcgagatgggccatttggtttctctcctcttatagatcgttactgtggcgtgaaaagccctccattaattagatcaacagggagattcatgtggattaagtttagttctgatgaagagcttgaaggactgggatttcgagcaaaatattcatttattccagatccagactttacttacctaggaggtattttaaatcccattccagattgtcagttcgagctctcgggagctgatggaatagtgcgctctagtcaggtagaacaagaggagaaaacaaaaccaggccaagccgttgattgcatctggaccattaaagccactccaaaagctaagatttatttgaggttcctagattatcaaatggagcactcaaatgaatgcaagagaaacttcgttgcagtctatgatggaagcagttctattgaaaacctgaaggccaagttttgcagcactgtggccaatgatgtaatgcttaaaacaggaattggagtgattcgaatgtgggcagatgaaggtagtcggcttagcaggtttcgaatgctctttacttcctttgtggagcctccctgcacaagcagcactttcttttgccatagcaacatgtgcatcaataattctttagtctgtaatggtgtccaaaattgtgcatacccttgggatgaaaatcattgtaaagaaaagaaaaaagcaggagtatttgaacaaatcactaagactcatggaacaattattggcattacttcagggattgtcttggtccttctcattatttctattttagtacaagtgaaacagcctcgaaaaaaggtcatggcttgcaaaaccgcttttaataaaaccgggttccaagaagtgtttgatcctcctcattatgaactgttttcactaagggacaaagagatttctgcagacctggcagacttgtcggaagaattggacaactaccagaagatgcggcgctcctccaccgcctcccgctgcatccacgaccaccactgtgggtcgcaggcctccagcgtcaaacaaagcaggaccaacctcagttccatggaacttcctttccgaaatgactttgcacaaccacagccaatgaaaacatttaatagcaccttcaagaaaagtagttacactttcaaacagggacatgagtgccctgagcaggccctggaagaccgagtaatggaggagattccctgtgaaatttatgtcagggggcgagaagattctgcacaagcatccatatccattgacttctaatcttctgctaatggtgatgtgaattcttagggtgtgtacgtacgcagcctccagggcaccatactgtttccagcagccaacccttttctcccatcacaactacgaagaccttgatttaccgttaacctattgtatggtgatgtttttattctctcaggcagtctatatatgttaaaccaatcaaggaacttactctattcagtggaaacaataatcatctctattgcttggtgtcatttataggaagcactgccagttaaagagcattagaagaggtggttggatggagccaggctcaggctgcctcttcgttttagcaacaagaagactgctcttgactgataacagctctgtcaatattttgatgccacaataaacttgatttttctttacattccttttatttttcctttctctaaatttaatttgttttataagcctatcgttttaccatttcattttcttacataagtacaagtggttaatgtaccacatacttcagtataggcatttgttcttgagtgtgtcaaaatacagctagttactgtgccaattaagacccagttgtatttcacccatctgtttcttcttggctaatctctgtacttctgccttttaattactgggcccttattccttattttctgtgagaaataatagatgatatgatttattacctttcaattatatttttctcagttatactagaaaatttcataatcctgggatatatgtaccattgtcagctatgactaaaaatttgaaaaagataaaaatttctagcaagcctttgaagtttaccaagtatagtcacattcagtgacagcccattcattccagtaaagaatcatttcattcactttgggagaggcctataattacatttatttgcaatgtttctcttcgctagattgttacatagctcccattctgttggttttgcttacagcatatggtaaccaaggttagatgccagttaaaattccttagaaattggatgagccttgagattgcttcttaactgggacatgacatttttctagctcttatcaagaataacaacttccacttttttttaaactgcacttttgactttttttatggtataaaaacaataatttataaacataaaagctcattgtgttttttagacttttgatattatttgatactgtacaaactttattaaatcaagatgaaagacctacaggacagattcctttcagtgttcacatcagtggctttgtatgcaaatatgctgtgttggacctggacgctataacttattgtaaagaccttggaaatgtggacataagctctttctttccttttgttactgtatttagtttgtgataaatttttcactgtgtgatatttatgctctaaatcactacacaaatcccatattaaaatatacattgtacctgaccctttaatcatgttatttatgccaccaaggttgtggatcttaaggtatgtatggaaaggaactcatttatcaaattgtaagtaatacagacatgccatttaaaagaggtaaattcttgttttctatattttgttagtaaattctcaatgaaataagttgaagtttcactggatttcattaacttttaaatattacatatatgtgttttctcagattagtgaaaattgtgaccttaaatttaatacacatatactgcctcag

SEQ ID NO: 3312 - protein, 525 aa, Homo sapien
MALERLCSVLKVLLITVLVVEGIAVAQKTQDGQNIGIKHIPATQCGIWVRTSNGGHFASPNYPDSYPPNKECIYILEAAPRQRIELTFDEHYYIEPSFECRFDHLEVRDGPFGFSPLIDRYCGVKSPPLIRSTGRFMWIKFSSDEELEGLGFRAKYSFIPDPDFTYLGGILNPIPDCQFELSGADGIVRSSQVEQEEKTKPGQAVDCIWTIKATPKAKIYLRFLDYQMEHSNECKRNFVAVYDGSSSIENLKAKFCSTVANDVMLKTGIGVIRMWADEGSRLSRFRMLFTSFVEPPCTSSTFFCHSNMCINNSLVCNGVQNCAYPWDENHCKEKKKAGVFEQITKTHGTIIGITSGIVLVLLIISILVQVKQPRKKVMACKTAFNKTGFQEVFDPPHYELFSLRDKEISADLADLSEELDNYQKMRRSSTASRCIHDHHCGSQASSVKQSRTNLSSMELPFRNDFAQPQPMKTFNSTFKKSSYTFKQGHECPEQALEDRVMEEIPCEIYVRGREDSAQASISIDF

SEQ ID NO: 3313 - DNA, 2111 bp, Homo sapien
ccagagatgttaaaaacatttttatgcctaagaatcaaggaagtagaagtgaaaaaagatacagaagacattaataaaccaaaaaaatttatgactttcaaagaaaagagaaaatctctatcaagaatgcagagaaagtggaagaaagcagaagagaaactagagcgagagcttcgagaggcagaagcttcagagagtactgagaaaaaacttaaactgcacacagagactctgaatattgtgtttgtaacctacttcagaatattgaagaaggcccagaggtcacctctcctgccagcagttctagaaggtcttgccaagtttgctcaccttataaatgtggaattttttgatgatctgttagtagttcttcatactctcattgagtctggtgacctaagctatcaagaaagtcttcactgtgtccagactgcttttcatattctttctggacaaggtgatgttctgaatattgatccattgaaattctacacacatctctacaaaacactgttcaaattacatgcaggtgctaccaatgaaggtgttgagattgtactccagtgccttgatgtcatgctaactaagcgcagaaagcaagtttctcagcagcgagctcttgccttcatcaaacgcctttgtacccttgctcttcatgttcttccaaattcaagtattggcattttagcaactaccagaatattaatgcatactttccccaaaacagatctactgcttgacagtgaatctcagggaagtggagttttccttcctgaactggatgagcctgagtactgcaatgctcagaacactgctctgtgggaactgcatgctctgcggaggcattatcatcccatagtgcagagatttgcagcccacctgatcgctggagcaccttctgaaggctctggagcactcaaaccagagttgagtcgaagatctgctactgaactttttgaggcatatagcatggcagaaatgacattcaatcctcctgttgaatcttcaaaccccaaaataaagggtaaatttttacaaggggattcatttttgaatgaagatttaaatcagctaatcaaaagatactccagtgaagttgctactgaatcgcctctggatttcacgaaatatttgaaaacatcactacactagtagaggaatgaagtcagtggactttcttgtatatttgtgtgtgcagatgtacataaagatgagttgttaacttaggatcttttctttttatacaaggaaagcttcctaagaatgtctaggaagaagaggaagaatgaccctttgcatggcacagggttctgcccctattctgaatatgtcattccatcaaggagatcaaaagcctttttttctccccagtatttggaaattactttcttgatgatgctgccttttaaaagcttcacgtacattatagttttttaaaaaaatctttggactggatcttactgaagtgcagttgctatattaaaattagggcatagagcacagaaaaatcaagaccatgagaagacattttaccatttagctactttttataactaaatactctttaaatatttttatttcaatactgtggatggaaatgagaagcattctaaatttgagttaatatatttttatgaagatatttgagaaaagaaaaaaatagcttgtattcaggttcattggcttttgctggatgatccacctaaagaagttacctaatttggccttttaaaaaaggtgttagtgtttattatagctactttcaaggaaagtttgaatatgattctagtctctaaagttcttcacgttttctgacattccctggagggtgactggggaagaattgctccagggtagaagaaccaggcccaagactttaccattctgatctagagacaaaggatactcaatgaggagcttttttcccctcttggaacaggtaaaatgctttttcttattaatataattataaaacagtattttatgtaacagctattcccatattctaggagtggcctaagaaatgcgtgtttcagtgactagattataaatattctctattgtgaatagttgaataaaacagctgtttttttctgcaaaaaaaaaaaaaa

SEQ ID NO: 3314 - protein, 381 aa, Homo sapien
MLKTFLCLRIKEVEVKKDTEDINKPKKFMTFKEKRKSLSRMQRKWKKAEEKLERELREAEASESTEKKLKLHTETLNIVFVTYFRILKKAQRSPLLPAVLEGLAKFAHLINVEFFDDLLVVLHTLIESGDLSYQESLHCVQTAFHILSGQGDVLNIDPLKFYTHLYKTLFKLHAGATNEGVEIVLQCLDVMLTKRRKQVSQQRALAFIKRLCTLALHVLPNSSIGILATTRILMHTFPKTDLLLDSESQGSGVFLPELDEPEYCNAQNTALWELHALRRHYHPIVQRFAAHLIAGAPSEGSGALKPELSRRSATELFEAYSMAEMTFNPPVESSNPKIKGKFLQGDSFLNEDLNQLIKRYSSEVATESPLDFTKYLKTSLH

SEQ ID NO: 3315 - DNA, 2912 bp, Homo sapien
aaggcgcgggccccggcgcggcggggagggctcggccggaggggaggctgcggcgcgcggccggtcgctgcgggcccgggccccaagccgtgccgctccgctcgcccgggcccagccgaggccgctgcgcccccgcctcctcgcgggaggactcgctccaaactccctgaacttcggggacagtcccccgaagcggcgaaactctcagggttggcaaccctgcccagggacccccatcccgggcggcgctccggacgccctcccctcaccgcgcccccgcagacacgtgcctggactccgagggcttctggagccaccggccgggccacgatgctcatgaggaaagtgcccggcttcgtcccggcctccccgtgggggctgcggctgccgcagaagttcctcttcctcctcttcctctcgggcctggtcaccctgtgcttcggggccctcttcctgctgccccactcctctcgcctcaagcgcctcttcctggccccccggacccagcagcctggtctggaagtggtggctgaaatcgccggccatgccccggcccgcgagcaggagccgcctcccaacccggcccccgccgcgccggccccgggcgaggatgaccccagcagctgggccagtccccgccgcaggaaaggggggctgcggcgcacccgccccactggaccccgcgaggaggccacggcggcccggggcaatagcatcccggcctccaggcccggggacgagggcgtccctttccgctttgacttcaacgcattccggagccgtctccgccacccggtcctgggaacgagggccgatgagagtcaggagccccagagccaagtgcgagcccagcgggagaaaatcaaggagatgatgcagtttgcttggcagagctataagcgttatgcaatggggaaaaacgaactccgtccactaacaaaagatggctacgagggtaacatgttcggaggcctcagcggggcaacagtcattgactccctcgataccctctacctcatggagctgaaggaggagttccaggaggccaaggcctgggtgggagagagcttccacctgaacgtgagcggagaagcatccttgtttgaggtgaacatccgctacatcgggggactcctctcagccttctacctgacaggagaagaggtgttccgaataaaggccatcaggctgggagagaagctcctgccggcgttcaacacccccacgggaatcccaaagggcgtggtgagcttcaaaagtgggaactggggctgggccacagccggcagcagcagcatcttggcggagtttggatccctgcacttggaattcttacacctcactgaactctctggcaaccaggtcttcgctgaaaaggtcaggaacatccgcaaggtcctcaggaagatcgaaaagccctttggcctctaccccaacttcctcagcccagtgagtgggaactgggtgcaacaccatgtctcagttggaggactcggggacagtttttatgaatatttgatcaaatcctggttgatgtcgggcaagacagatatggaggctaaaaatatgtactacgaagccttggaggcgatagagacctacttgctgaatgtctctcccggggggctgacctacattgccgagtggcgaggggggattctggaccacaagatggggcacctggcctgtttctccgggggcatgatcgcccttggcgccgaggatgccaaggaagaaaagagggcccactaccgagagctcgcagcccagatcaccaagacgtgtcacgagtcatacgcccgctcagacaccaaacttgggcctgaggccttctggtttaactccggcagagaggccgtggccacccagctgagcgagagctactacatcctccggccagaggtggtggagagctacatgtacctgtggcgacagacccacaaccccatctacagggagtggggctgggaggtggtgctggccttggagaaatactgtcggacagaagccggtttctctgggatccaagacgtgtacagtagcacccccaaccacgacaacaagcagcagagcttctttctagcggagacactaaagtatctctatcttctgttctctgaagatgacttgctctccctggaagactgggtgttcaacaccgaggcccacccactcccggtgaaccactcagacagctccggcagagcctggggcagacactgaccccatctcctgccgccgccctggggccgccgcagggatgccttgccttttcaggatttgagactgttctcaaagggattgggaacgaaggccccatctcgggcagacccccagcagatgtgtcggacaagcaacttcttttcctctgtgaggagacaagacttggagactcagcgatgtcaggccagggccatggccacactggcccacacattcctttctacagagaatttctatgaagcccactcacttgccattccagggccaaaggaccggaggtttgcatatccgccccttgtatttgatttgcttccttttggtttcttggtttttgtttttgcttgattttgtcttttctctacagtttagttttgtcacaattacacatatagttttcaaaatcatgcactttctaaaatggtgtcatcctgaaaaacaaaacccagtgtttgcacacacacaaaatcttgaccccgttatctatattttaaatgctttttgcccaacactgaccctatgttcaactttgtgtcatttaccttataatttgaggaggggtttccctttgggcctcagtgttacaaattactagtgctattttcattattattgtaatggaaaaatctgtggactagaataaaagagtttattgaataagaaaaaaaaaaaaaaaaaaaaaaaaaaaaaaa

SEQ ID NO: 3316 - protein, 630 aa, Homo sapien
MLMRKVPGFVPASPWGLRLPQKFLFLLFLSGLVTLCFGALFLLPHSSRLKRLFLAPRTQQPGLEVVAEIAGHAPAREQEPPPNPAPAAPAPGEDDPSSWASPRRRKGGLRRTRPTGPREEATAARGNSIPASRPGDEGVPFRFDFNAFRSRLRHPVLGTRADESQEPQSQVRAQREKIKEMMQFAWQSYKRYAMGKNELRPLTKDGYEGNMFGGLSGATVIDSLDTLYLMELKEEFQEAKAWVGESFHLNVSGEASLFEVNIRYIGGLLSAFYLTGEEVFRIKAIRLGEKLLPAFNTPTGIPKGVVSFKSGNWGWATAGSSSILAEFGSLHLEFLHLTELSGNQVFAEKVRNIRKVLRKIEKPFGLYPNFLSPVSGNWVQHHVSVGGLGDSFYEYLIKSWLMSGKTDMEAKNMYYEALEAIETYLLNVSPGGLTYIAEWRGGILDHKMGHLACFSGGMIALGAEDAKEEKRAHYRELAAQITKTCHESYARSDTKLGPEAFWFNSGREAVATQLSESYYILRPEVVESYMYLWRQTHNPIYREWGWEVVLALEKYCRTEAGFSGIQDVYSSTPNHDNKQQSFFLAETLKYLYLLFSEDDLLSLEDWVFNTEAHPLPVNHSDSSGRAWGRH

SEQ ID NO: 3317 - DNA, 1695 bp, Homo sapien
gttgccgctgcgcacctggctcaggtgagctgccccgcccccgcccggcgcgagccccaggtcctggcagcagcccctgacctgtccaggtgccctgtccagctgactgcaaggacagagaggagtcctgcccagctcttggatcagtctgctggccgaggagcccggtggagccaggggtgaccctggagcccagcctgccccgaggaggccccggctcagagccatgccaggtgtctgtgatagggcccctgacttcctctccccgtctgaagaccaggtgctgaggcctgccttgggcagctcagtggctctgaactgcacggcttgggtagtctctgggccccactgctccctgccttcagtccagtggctgaaagacgggcttccattgggaattgggggccactacagcctccacgagtactcctgggtcaaggccaacctgtcagaggtgcttgtgtccagtgtcctgggggtcaacgtgaccagcactgaagtctatggggccttcacctgctccatccagaacatcagcttctcctccttcactcttcagagagctggccctacaagccacgtggctgcggtgctggcctccctcctggtcctgctggccctgctgctggccgccctgctctatgtcaagtgccgtctcaacgtgctgctctggtaccaggacgcgtatggggaggtggagataaacgacgggaagctctacgacgcctacgtctcctacagcgactgccccgaggaccgcaagttcgtgaacttcatcctaaagccgcagctggagcggcgtcggggctacaagctcttcctggacgaccgcgacctcctgccgcgcgctgagccctccgccgacctcttggtgaacctgagccgctgccgacgcctcatcgtggtgctttcggacgccttcctgagccgggcctggtgcagccacagcttccgggagggcctgtgccggctgctggagctcacccgcagacccatcttcatcaccttcgagggccagaggcgcgaccccgcgcacccggcgctccgcctgctgcgccagcaccgccacctggtgaccttgctgctctggaggcccggctccgtgactccttcctccgatttttggaaagaagtgcagctggcgctgccgcggaaggtgcggtacaggccggtggaaggagacccccagacgcagctgcaggacgacaaggaccccatgctgattcttcgaggccgagtccctgagggccgggccctggactcagaggtggacccggaccctgagggcgacctgggtgtccgggggcctgtttttggagagccatcagctccaccgcacaccagtggggtctcgctgggagagagccggagcagcgaagtggacgtctcggatctcggctcgcgaaactacagtgcccgcacagacttctactgcctggtgtccaaggatgatatgtagctcccaccccagagtgcaggatcatagggacagcgggggccagggcagcggcgtcgctcctctgctcaacaggaccacaacccctgccagcagccctgggaccctgccagcagccctgggaaaaggctgtggcctcagggcgcctcccagtgccagaaaataaagtccttttggattctgaaaaaaaaaaaaaaaaaaaaaaaaaaaaaaaaaaaaaaaaaaaaaaaaaaaaaaaa

SEQ ID NO: 3318 - protein, 410 aa, Homo sapien
MPGVCDRAPDFLSPSEDQVLRPALGSSVALNCTAWVVSGPHCSLPSVQWLKDGLPLGIGGHYSLHEYSWVKANLSEVLVSSVLGVNVTSTEVYGAFTCSIQNISFSSFTLQRAGPTSHVAAVLASLLVLLALLLAALLYVKCRLNVLLWYQDAYGEVEINDGKLYDAYVSYSDCPEDRKFVNFILKPQLERRRGYKLFLDDRDLLPRAEPSADLLVNLSRCRRLIVVLSDAFLSRAWCSHSFREGLCRLLELTRRPIFITFEGQRRDPAHPALRLLRQHRHLVTLLLWRPGSVTPSSDFWKEVQLALPRKVRYRPVEGDPQTQLQDDKDPMLILRGRVPEGRALDSEVDPDPEGDLGVRGPVFGEPSAPPHTSGVSLGESRSSEVDVSDLGSRNYSARTDFYCLVSKDDM

SEQ ID NO: 3319 - DNA, 1066 bp, Homo sapien
ggcagttagtcggctgcaatggcgccggtgaggcggtccgcgaagtggcggcctggtggtattgaggcgcgtggtgaaggggtttccactgtcgggtacaggaataagaatgtgagacagaagacatggcggcctaaccacccgcaagccttcgtggggagcgttcgcgagggacaaggctttgcttttcgaagaaaactgaaaatacagcaaagttacaagaaattgctacggaaggaaaagaaggctcaaacgtcactggaatctcaattcacagatcgatacccagataatctgaaacatctctatttagctgaagaggaaagacataggaagcaagcaagaaaagtcgaccatcctttgtcagaacaagttcaccagccgttgcttgaagaacagtgtagcattgacgagcctttatttgaagatcagtgtagctttgaccagcctcagccagaagaacaatgtattaaaacagtaaactcctttacaatttcaaagaaaaataaaaagaaaacatcaaatcaaaaagcacaagaagaatatgaacagatacaagccaaacgtgctgctaagaaacaagaattcgagaggagaaaacaggagagagaagaagcccaaaggcagtacaaaaagaagaaaatggaagtgtttaaaatactgaacaaaaagactaaaaagggccaaccaaacttgaatgtacaaatggagtaccttcttcaaaaaatacaagaaaaatgttaaacattttgttcctacaggttaaaatatctgctgcctattaggttcttctgtgacatgtgcctcccagcagtgaactaaatttgtcgacataaactggattgctaaactatgctaaatataagatgttcacatatttttattatggtaaaaaattttctaaatatgttctacatgtttcttatttatttgcctctgaaggaaggttggcctgaagaactgaaagaacctcttattttgcaagacaggcccaagcatgtaatacttttgtaccatatgagatttatatgaaataaattttttaaaaataaggaaaaaaaaaaaa

SEQ ID NO: 3320 - protein, 241 aa, Homo sapien
MAPVRRSAKWRPGGIEARGEGVSTVGYRNKNVRQKTWRPNHPQAFVGSVREGQGFAFRRKLKIQQSYKKLLRKEKKAQTSLESQFTDRYPDNLKHLYLAEEERHRKQARKVDHPLSEQVHQPLLEEQCSIDEPLFEDQCSFDQPQPEEQCIKTVNSFTISKKNKKKTSNQKAQEEYEQIQAKRAAKKQEFERRKQEREEAQRQYKKKKMEVFKILNKKTKKGQPNLNVQMEYLLQKIQEKC

SEQ ID NO: 3321 - DNA, 4372 bp, Homo sapien
tagttattaaagttcctatgcagctccgcctcgcgtccggcctcatttcctcggaaaatccctgctttccccgctcgccacgccctcctcctacccggctttaaagctagtgaggcacagcctgcggggaacgtagctagctgcaagcagaggccggcatgaccaccgagcagcgacgcagcctgcaagccttccaggattatatccggaagaccctggaccctacctacatcctgagctacatggccccctggtttagggaggaagaggtgcagtatattcaggctgagaaaaacaacaagggcccaatggaggctgccacactttttctcaagttcctgttggagctccaggaggaaggctggttccgtggctttttggatgccctagaccatgcaggttattctggactttatgaagccattgaaagttgggatttcaaaaaaattgaaaagttggaggagtatagattacttttaaaacgtttacaaccagaatttaaaaccagaattatcccaaccgatatcatttctgatctgtctgaatgtttaattaatcaggaatgtgaagaaattctacagatttgctctactaaggggatgatggcaggtgcagagaaattggtggaatgccttctcagatcagacaaggaaaactggcccaaaactttgaaacttgctttggagaaagaaaggaacaagttcagtgaactgtggattgtagagaaaggtataaaagatgttgaaacagaagatcttgaggataagatggaaacttctgacatacagattttctaccaagaagatccagaatgccagaatcttagtgagaattcatgtccaccttcagaagtgtctgatacaaacttgtacagcccatttaaaccaagaaattaccaattagagcttgctttgcctgctatgaaaggaaaaaacacaataatatgtgctcctacaggttgtggaaaaacctttgtttcactgcttatatgtgaacatcatcttaaaaaattcccacaaggacaaaaggggaaagttgtcttttttgcgaatcagatcccagtgtatgaacagcagaaatctgtattctcaaaatactttgaaagacatgggtatagagttacaggcatttctggagcaacagctgagaatgtcccagtggaacagattgttgagaacaatgacatcatcattttaactccacagattcttgtgaacaaccttaaaaagggaacgattccatcactatccatctttactttgatgatatttgatgaatgccacaacactagtaaacaacacccgtacaatatgatcatgtttaattatctagatcagaaacttggaggatcttcaggcccactgccccaggtcattgggctgactgcctcggttggtgttggggatgccaaaaacacagatgaagccttggattatatctgcaagctgtgtgcttctcttgatgcgtcagtgatagcaacagtcaaacacaatctggaggaactggagcaagttgtttataagccccagaagtttttcaggaaagtggaatcacggattagcgacaaatttaaatacatcatagctcagctgatgagggacacagagagtctggcaaagagaatctgcaaagacctcgaaaacttatctcaaattcaaaatagggaatttggaacacagaaatatgaacaatggattgttacagttcagaaagcatgcatggtgttccagatgccagacaaagatgaagagagcaggatttgtaaagccctgtttttatacacttcacatttgcggaaatataatgatgccctcattatcagtgagcatgcacgaatgaaagatgctctggattacttgaaagacttcttcagcaatgtccgagcagcaggattcgatgagattgagcaagatcttactcagagatttgaagaaaagctgcaggaactagaaagtgtttccagggatcccagcaatgagaatcctaaacttgaagacctctgcttcatcttacaagaagagtaccacttaaacccagagacaataacaattctctttgtgaaaaccagagcacttgtggacgctttaaaaaattggattgaaggaaatcctaaactcagttttctaaaacctggcatattgactggacgtggcaaaacaaatcagaacacaggaatgaccctcccggcacagaagtgtatattggatgcattcaaagccagtggagatcacaatattctgattgccacctcagttgctgatgaaggcattgacattgcacagtgcaatcttgtcatcctttatgagtatgtgggcaatgtcatcaaaatgatccaaaccagaggcagaggaagagcaagaggtagcaagtgcttccttctgactagtaatgctggtgtaattgaaaaagaacaaataaacatgtacaaagaaaaaatgatgaatgactctattttacgccttcagacatgggacgaagcagtatttagggaaaagattctgcatatacagactcatgaaaaattcatcagagatagtcaagaaaaaccaaaacctgtacctgataaggaaaataaaaaactgctctgcagaaagtgcaaagccttggcatgttacacagctgacgtaagagtgatagaggaatgccattacactgtgcttggagatgcttttaaggaatgctttgtgagtagaccacatcccaagccaaagcagttttcaagttttgaaaaaagagcaaagatattctgtgcccgacagaactgcagccatgactggggaatccatgtgaagtacaagacatttgagattccagttataaaaattgaaagttttgtggtggaggatattgcaactggagttcagacactgtactcgaagtggaaggactttcattttgagaagataccatttgatccagcagaaatgtccaaatgatatcaggtcctcaatcttcagctacagggaatgagtaactttgagtggagaagaaacaaacatagtgggtataatcatggatcgcttgtacccctgtgaaaatatattttttaaaaatatctttagcagtttgtactatattatatatgcaaagcacaaatgagtgaatcacagcactgagtattttgtaggccaacagagctcatagtacttgggaaaaattaaaaagcctcatttctagccttctttttagagtcaactgccaacaaacacacagtaatcactctgtacacactgggatagatgaatgaatggaatgttgggaatttttatctccctttgtctccttaacctactgtaaactggcttttgcccttaacaatctactgaaattgttcttttgaaggttaccagtgactctggttgccaaatccactgggcacttcttaaccttctatttgacctctgcgcatttggccctgttgagcactcttcttgaagctctccctgggcttctctctcttctagttctattctagtctttttttattgagtcctcctctttgctgatcccttccaagggttcaatatatatacatgtatatactgtacatatgtatatgtaactaatatacatacatacaggtatgtatatgtaatggttatatgtactcatgttcctggtgtagcaacgtgtggtatggctacacagagaacatgagaacataaagccatttttatgcttactactaaaagctgtccactgtagagttgctgtatgtagcaatgtgtatccactctacagtggtcagcttttagtagagagcataaaaatgataaaatacttcttgaaaacttagtttactatacatcttgccctattaatatgttctcttaacgtgtgccattgttctctttgaccattttcctataatgatgttgatgttcaacacctggactgaatgtctgttctcagatcccttggatgttacagatgaggcagtctgactgtcctttctacttgaaagattagaatatgtatccaaatggcattcacgtgtcacttagcaaggtttgctgatgcttcaaagagcttagtttgcggtttcctggacgtggaaacaagtatctgagttccctggagatcaacgggatgaggtgttacagctgcctccctcttcatgcaatctggtgagcagtggtgcaggcggggagccagagaaacttgccagttatataacttctctttggcttttcttcatctgtaaaacaaggataatactgaactgtaagggttagtggagagtttttaattaaaagaatgtgtgaaaagtacatgacacagtagttgcttgataatagttactagtagtagtattcttactaagacccaatacaaatggattatttaaaccaaaaaaaaaaaaaaaaaaaaa

SEQ ID NO: 3322 - protein, 925 aa, Homo sapien [sequence omitted]

SEQ ID NO: 3323 - DNA, 1203 bp, Homo sapien
catctggtgtattgactgtggccagtcttaaagctagtttttgctatgtggaacatgctgctctaattcagatttaaagagtttcttcctgttaattcgaagctcactgtgcctcttgtttccgagggaagaaggactgattaagtcatctaaatggatgcaatactgaattacaggtcagaagatactgaagattactacacattactgggatgtgatgaactatcttcggttgaacaaatcctggcagaatttaaagtcagagctctggaatgtcacccagacaagcatcctgaaaaccccaaagctgtggagacttttcagaaactgcagaaggcaaaggagattctgaccaatgaagagagtcgagcccgctatgaccactggcgaaggagccagatgtcgatgccattccagcagtgggaagctttgaatgactcagtgaagacgtcaatgcactgggttgtcagaggtaaaaaagacctgatgctggaagaatctgacaagactcataccaccaagatggaaaatgaggaatgtaatgagcaaagagaaagaaagaaagaggagctggcttcaaccgcagagaaaacggagcagaaagaacccaagcccctagagaagtcagtctccccgcaaaattcagattcttcaggttttgcagatgtgaatggttggcaccttcgtttccgctggtccaaggatgctccctcagaactcctgaggaagttcagaaactatgaaatatgaaatatctctgcttcaaaaaatgaggaagagcaagactgtcccctatgctgccaacatgcagtctttgtttatgtcttaaaaatgtcatgtttatgtcatgtctgtgaattgctgagtactaattgattcctccatccttgaatcagttctcataatgctttttaaataagaaaaattcagaagatgaatttcttccaatatttgaataaattaaagctcttagatacagagtagattgtattatatgctttttcctattaatactacttatagaaatccattaaaaagcaatctctgtacagtgtatttaaatatttcattgacatactgtgatctctattagtgatggatgtacaaaaaatgttttcttacccttgacttacaatgaaatgtgaaattacttgtctgaaccccgtggggagaaataaataattttcccaaagttcaaaaaaa

SEQ ID NO: 3324 - protein, 198 aa, Homo sapien
MDAILNYRSEDTEDYYTLLGCDELSSVEQILAEFKVRALECHPDKHPENPKAVETFQKLQKAKEILTNEESRARYDHWRRSQMSMPFQQWEALNDSVKTSMHWVVRGKKDLMLEESDKTHTTKMENEECNEQRERKKEELASTAEKTEQKEPKPLEKSVSPQNSDSSGFADVNGWHLRFRWSKDAPSELLRKFRNYEI

SEQ ID NO: 3325 - DNA, 600 bp, Homo sapien
agtcttggcggaggtgaccaaagccacgtaatgtccgtagttcgctcatccgtccatgccagatggattgtggggaaggtgattgggacaaaaatgcaaaagactgctaaagtgagagtgaccaggcttgttctggatccctatttattaaagtattttaataagcggaaaacctactttgctcacgatgcccttcagcagtgcacagttggggatattgtgcttctcagagctttacctgttccacgagcaaagcatgtgaaacatgaactggctgagatcgttttcaaagttggaaaagtcatagatccagtgacaggaaagccctgtgctggaactacctacctggagagtccgttgagttcggaaaccacccagctaagcaaaaatctggaagaactcaatatctcttcagcacagtgaagcgggagtggaagaaggatctaaagggaaaaactgacatgtttatgttatggaaaaagaaatttttctaagtttcatcacaaactgtgtccagtttctctgtggtgtttatgaaatagctaaaagcaaatgaagtaaagggcatactatggtttttcacaaaaaaaaaaaaaaaaa

SEQ ID NO: 3326 - protein, 130 aa, Homo sapien
MSVVRSSVHARWIVGKVIGTKMQKTAKVRVTRLVLDPYLLKYFNKRKTYFAHDALQQCTVGDIVLLRALPVPRAKHVKHELAEIVFKVGKVIDPVTGKPCAGTTYLESPLSSETTQLSKNLEELNISSAQ

SEQ ID NO: 3327 - DNA, 6036 bp, Homo sapien
agcgggctgggtcctaggccaggtctggggtaacctggaacttccacctgggctctgcgctaggtctctgtttcactccctccccgcggggcgcgcagctcgcgggtctttggacaccaccggtcctgagtccgcggactgccattttcattaagaactgccacttagaggtaccaaaataaagggtatttgctacctttaatacttgccagttcaggttggaggcacaggcagcagcaagaatggaaagaaatgttcttacaacattttcacaggaaatgtcccagttaattttgaatgaaatgccaaaagctgaatattccagtttattcaatgattttgttgaatctgaattttttttgattgatggggattcattacttatcacatgtatctgtgagatatcatttaagcctgggcagaacctccatttcttctatctggttgaacgctatcttgtggatcttattagcaaaggaggacaattcaccatagttttcttcaaggatgccgagtatgcgtatttcaacttccctgaacttctttctttgagaactgctttaattcttcatcttcagaagaataccaccattgatgttcgaacaacattttcgagatgcttatcaaaagagtggggaagtttcttggaagagagttacccatatttcctgatagttgcagacgaaggcctgaacgatctacaaacacagcttttcaactttttaatcattcattcttgggcaaggaaggtcaacgttgtactttcctcagggcaagaatctgatgttctttgcctttatgcataccttcttccaagcatgtacagacaccagattttttcctggaagaataagcagaacattaaagatgcttatacaaccctgcttaaccagttggaaagatttaagctttcagcattagcacctctttttggaagtttaaaatggaataatattacggaagaggcacacaagactgtatctctgcttacacaagtctggccagaaggatctgacattcggcgtgtcttttgtgttacttcatgctcattatctttgagaatgtaccatcgctttttaggaaacagagagccctcctctggtcaggaaactgagatccaacaggtgaacagtaattgcttaaccctgcaggagatggaagatttgtgtaaactgcattgtctcactgtggtttttctactccatctgcctctttctcaaagagcttgtgctagagtcatcacttcacattgggctgaggacatgaagcctttattacaaatgaaaaagtggtgtgaatatttcatcttaagaaatatacatacttttgaattttggaatctgaatttaattcacctttctgacttaaatgatgagcttttgttgaagaatattgctttttactatgaaaatgaaaatgtaaaaggcctacatttgaatttgggagataccattatgaaagattatgaatatctctggaataccgtatcaaagttggtcagagactttgaggttggacagccatttcctctgagaacaacaaaagtttgttttcttggaaagaaaccatcaccaatcaaagacagctccaatgaaatggtgcccaatttgggttttattccaacgtcatcttttgtggttgataaatttgctggagatattttgaaagatttgccttttctaaagagtgatgatcctattgttacttcactggttaaacaaaaggaatttgatgaacttgtgcactggcattctcataaacccctgagtgatgattatgacaggtccaggtgtcagtttgatgaaaaatctagagaccctcgtgttcttagatctgtgcaaaagtatcatgttttccaacggttttatgggaattcattagaaacagtctcttcgaaaatcatcgtgactcaaactattaagtcaaagaaggattttagtgggcccaagagcaaaaaggcacacgagaccaaggctgaaataattgctagagagaataagaaaaggttatttgccagggaagaacaaaaggaagagcaaaagtggaatgctttgtcattttctattgaagagcaattgaaagaaaatttacactctggaataaagagcctggaagattttttgaaatcctgtaaaagtagctgtgtgaaacttcaggttgaaatggtggggttaactgcttgcttgaaagcctggaaagaacattgccgaagtgaagaaggtaaaaccacgaaagatttaagtatagctgttcaggtgatgaaaaggatccactccttgatggaaaaatactcagaacttttacaagaagatgatcggcaactcatagccagatgccttaagtatttaggatttgatgagttggcaagttctttacatccagcccaggatgcagaaaatgatgtaaaagtgaagaaaaggaataaatattcaattggcattgggccagctcggttccaactgcaatacatgggccattatttgatacgagatgagagaaaagacccagatcccagggtccaggattttattcccgacacatggcagcgagagctccttgatgttgtggataagaatgagtcagcagtgattgttgccccaacgtcctcaggcaaaacatatgcctcctactactgtatggagaaagtgctgaaggagagcgacgacggggtggtcgtgtacgttgcacccacaaaggcccttgttaatcaagtggcagcaactgttcagaatcgttttacgaaaaatctgccaagtggtgaagttctctgtggtgttttcaccagggagtatcgtcatgatgccttaaactgtcaggtacttattacagtgcctgcctgctttgaaattctgctgcttgctcctcatcgccaaaactgggtgaaaaagatcagatatgttatatttgatgaggttcattgtcttggtggagaaattggagcagaaatctgggaacatctccttgtcatgatccgatgtccctttttggctctttcagctaccataagtaatcctgaacatctcaccgagtggctacaatcggtaaaatggtactggaaacaagaagacaaaataattgaaaataataccgcttctaaaagacatgtgggtcgtcaggccggctttcccaaagactacttgcaagtaaaacaatcgtataaagttagacttgtgctctatggagagaggtataatgatctagagaagcatgtatgttcaataaaacatggtgacattcattttgatcattttcacccatgtgctgcactaacaacagatcatattgaaaggtatggattccctcctgatcttaccctttcacctcgagaaagcatccagctgtatgatgccatgtttcaaatttggaaaagttggcctcgggcccaggaactgtgcccagaaaacttcattcattttaacaataaattagtcattaaaaagatggatgctaggaaatatgaagagagtctaaaggcagaattaacaagttggattaaaaatggcaacgtagagcaggccagaatggtacttcagaatcttagtcctgaagcagatttgagtccagaaaacatgatcaccatgtttccacttctagttgaaaaactaaggaaaatggagaagttacctgcactattttttttattcaagttaggagctgtagaaaacgcagctgaaagtgtgagcactttcctaaagaaaaagcaggagacaaaaaggcctcccaaagctgataaagaagcccatgtcatggctaacaaacttcgaaaagttaaaaaatccatagagaaacaaaagatcatagatgaaaagagccagaaaaaaaccagaaatgtggatcaaagcctaatacatgaagctgaacatgataatctagtgaagtgtctagagaagaacctggaaatcccacaggactgcacatatgctgatcaaaaagcagtggacactgagactttgcagaaggtatttggtcgagtaaaatttgaaagaaaaggtgaagaattgaaagccttggcagaaaggggtattggatatcatcacagtgctatgagtttcaaagaaaaacaattagttgaaatcctctttagaaaaggatatcttagggtggtgacagctactggaacacttgctttaggtgtcaacatgccttgtaaatctgtggtttttgctcaaaactcagtctatctggatgcgttgaattatagacagatgtctggccgtgctggaagaagaggtcaagacctgatgggagatgtatatttctttgatattccattccccaaaataggaaaactcataaaatccaatgttcctgagctgagaggacacttccctctcagcataaccctggtcctgcgactcatgctgctggcttccaagggagatgacccagaggataccaaggcaaaggtgctatcagtgctaaagcattcattgctgtccttcaagcaacccagagtcatggacatgttaaaactttacttcctgttttctttgcagttcctggtgaaagagggctatttagatcaagaaggtaatcctatggggtttgctggacttgtatcacatttgcattatcatgaaccttctaatcttgtttttgtcagttttcttgtaaatggactcttccatgatctctgtcagccaaccaggaaaggctcaaaacatttttctcaagacgttatggaaaagctagtattagtattggcacatctctttggaagaagatattttccaccaaagttccaagatgcacacttcgagttttatcaatcaaaggtgttccttgatgatctccctgaggattttagtgatgctttagatgaatataacatgaaaattatggaggactttaccactttcctacgaattgtttccaaactggctgatatgaatcaggaatatcaactcccattgtcaaaaatcaaattcacaggtaaagaatgtgaagactctcaactcgtatctcatttgatgagctgcaaggaaggaagagtagcaatttcaccatttgtttgtctgtctgggaactttgatgatgatttgcttcgactagaaactccaaaccatgttactctaggcacaatcggtgtcaatcgctctcaggctccagtgctgttgtcacagaaatttgataaccgaggaaggaaaatgtcgcttaatgcctatgcactggatttctacaaacatggttccttgataggattagtccaggataacaggatgaatgaaggagatgcttattatttgttgaaggattttgcactcaccattaaatctatcagtgtttccttgcgtgagctatgtgaaaatgaagacgacaacgttgtcttagcctttgaacaactgagtacaactttttgggaaaagttaaacaaagtctaaaaacaaagtctatgcaaaccacttaaaaataattccatagtagtttttcaggtcacgtttttgattcttatgcttcttgccagaaatacattatgataaagtggaaatacattacgatgaagtggaaagagcaaacactttggaatcaaacagagttgcaatcaaacctgcaatgttctgtcatgaatactcacaaattatttagtatacctgaatcttggtttctttttataactgagtaataatggttacatctcaggtagtttgaggattgactaaaaaaatgcgagaatgttgtatgtgactgaataacaatttttactctgcgaagccaaagtaaatataatattatcagtaactttatccccagtgtcagtatttataaaatgtttattaaggctagaaaaaatgaatacaatatcctgaaggtgaaatatattctcttcaattagcataaatatgatttacataagttagctatacagctattgagatagtactttctagtaaacttaaactactttttaaacatacattttgtgatgatttaacaaaaatatagagaatgatttgctttattgtaattgtatataagtgactggaaaagcacaaagaaataaagtgggttcgatctgttaaataaaaaaaaaaaaaa

SEQ ID NO: 3328 - protein, 391 aa, Homo sapien
MSGRAGRRGQDLMGDVYFFDIPFPKIGKLIKSNVPELRGHFPLSITLVLRLMLLASKGDDPEDAKAKVLSVLKHSLLSFKQPRVMDMLKLYFLFSLQFLVKEGYLDQEGNPMGFAGLVSHLHYHEPSNLVFVSFLVNGLFHDLCQPTRKGSKHFSQDVMEKLVLVLAHLFGRRYFPPKFQDAHFEFYQSKVFLDDLPEDFSDALDEYNMKIMEDFTTFLRIVSKLADMNQEYQLPLSKIKFTGKECEDSQLVSHLMSCKEGRVAISPFVCLSGNFDDDLLRLETPNHVTLGTIGVNRSQAPVLLSQKFDNRGRKMSLNAYALDFYKHGSLIGLVQDNRMNEGDAYYLLKDFALTIKSISVSLRELCENEDDNVVLAFEQLSTTFWEKLNKV

SEQ ID NO: 3329 - DNA, 2952 bp, Homo sapien
aactgatcgcggcctagtcccgacgcgtgtgtgctagtgagccggagccggcgacggcggcagtggcggcccggcctgcaggagcccgacggggtctctgccatgggggagtgacgcgcctgcacccgctgttccgcggcagcggcgagacatgaggagaccccgcgacaggggcagcggcggcggctcgtgagccccgggatggaggagaaatacggcggggacgtgctggccggccccggcggcggcggcggccttgggccggtggacgtacccagcgctcgattaacaaaatatattgtgttactatgtttcactaaatttttgaaggctgtgggacttttcgaatcatatgatctcctaaaagctgttcacattgttcagttcatttttatattaaaacttgggactgcattttttatggttttgtttcaaaagccattttcttctgggaaaactattaccaaacaccagtggatcaaaatatttaaacatgcagttgctgggtgtattatttcactcttgtggttttttggcctcactctttgtggaccactaaggactttgctgctatttgagcacagtgatattgttgtcatttcactactcagtgttttgttcaccagttctggaggaggaccagcaaagacaaggggagctgcttttttcattattgctgtgatctgtttattgctttttgacaatgatgatctcatggctaaaatggctgaacaccctgaaggacatcatgacagtgctctaactcatatgctttacacagccattgccttcttaggtgtggcagatcacaagggtggagtattattgctagtactggctttgtgttgtaaagttggttttcatacagcttccagaaagctctctgtcgacgttggtggagctaaacgtcttcaagctttatctcatcttgtttctgtgcttctcttgtgcccatgggtcattgttctttctgtgacaactgagagtaaagtggagtcttggttttctctcattatgccttttgcaacggttatcttttttgtcatgatcctggatttctacgtggattccatttgttcagtcaaaatggaagtttccaaatgtgctcgttatggatcctttcccatttttattagtgctctcctttttggaaatttttggacacatccaataacagaccagcttcgggctatgaacaaagcagcacaccaggagagcactgaacacgtcctgtctggaggagtggtagtgagtgctatattcttcattttgtctgccaatatcttatcatctccctctaagagaggacaaaaaggtacccttattggatattctcctgaaggaacacctctttataacttcatgggtgatgcttttcagcatagctctcaatcgatccctaggtttattaaggaatcactaaaacaaattcttgaggagagtgactctaggcagatcttttacttcttgtgcttgaatctgctttttacctttgtggaattattctatggcgtgctgaccaatagtctgggcctgatctcggatggattccacatgctttttgactgctctgctttagtcatgggactttttgctgccctgatgagtaggtggaaagccactcggattttctcctatgggtacggccgaatagaaattctgtctggatttattaatggactttttctaatagtaatagcgttttttgtgtttatggagtcagtggctagattgattgatcctccagaattagacactcacatgttaacaccagtctcagttggagggctgatagtaaaccttattggtatctgtgcctttagccatgcccatagccatgcccatggagcttctcaaggaagctgtcactcatctgatcacagccattcacaccatatgcatggacacagtgaccatgggcatggtcacagccacggatctgcgggtggaggcatgaatgctaacatgaggggtgtatttctacatgttttggcagatactcttggcagcattggtgtgatcgtatccacagttcttatagagcagtttggatggttcatcgctgacccactctgttctctttttattgctatattaatatttctcagtgttgttccactgattaaagatgcctgccaggttctactcctgagattgccaccagaatatgaaaaagaactacatattgctttagaaaagatacagaaaattgaaggattaatatcataccgagaccctcatttttggcgtcattctgctagtattgtggcaggaacaattcatatacaggtgacatctgatgtgctagaacaaagaatagtacagcaggttacaggaatacttaaagatgctggagtaaacaatttaacaattcaagtggaaaaggaggcatactttcaacatatgtctggcctaagtactggatttcatgatgttctggctatgacaaaacaaatggaatccatgaaatactgcaaagatggtacttacatcatgtgagataactcaagaattacccctggagaataaacaatgaagattaaatgactcagtatttgtaatattgccagaaggataaaaattacacattaactgtacagaaacagagttccctactactggatcaaggaatctttcttgaaggaaatttaaatacagaatgaaacattaatggtaaaagtggagtaattatttaaattatgtgtataaaaggaatcaaattttgagtaaacatgatgtattacatcatcttcgaaaatagatatgatggattctagtgaagaccaaaattacttctgtttactttctatcaggaagcatctccattgtaaatatgtatttacatgtttattacaaagacccaaatgaaaaatttttagtccattttttgcatagcctaaagataaaataggaataaaagttctatatttatggaaaaaaaaaaaaaaaaaa

SEQ ID NO: 3330 - protein, 765 aa, Homo sapien
MEEKYGGDVLAGPGGGGGLGPVDVPSARLTKYIVLLCFTKFLKAVGLFESYDLLKAVHIVQFIFILKLGTAFFMVLFQKPFSSGKTITKHQWIKIFKHAVAGCIISLLWFFGLTLCGPLRTLLLFEHSDIVVISLLSVLFTSSGGGPAKTRGAAFFIIAVICLLLFDNDDLMAKMAEHPEGHHDSALTHMLYTAIAFLGVADHKGGVLLLVLALCCKVGFHTASRKLSVDVGGAKRLQALSHLVSVLLLCPWVIVLSVTTESKVESWFSLIMPFATVIFFVMILDFYVDSICSVKMEVSKCARYGSFPIFISALLFGNFWTHPITDQLRAMNKAAHQESTEHVLSGGVVVSAIFFILSANILSSPSKRGQKGTLIGYSPEGTPLYNFMGDAFQHSSQSIPRFIKESLKQILEESDSRQIFYFLCLNLLFTFVELFYGVLTNSLGLISDGFHMLFDCSALVMGLFAALMSRWKATRIFSYGYGRIEILSGFINGLFLIVIAFFVFMESVARLIDPPELDTHMLTPVSVGGLIVNLIGICAFSHAHSHAHGASQGSCHSSDHSHSHHMHGHSDHGHGHSHGSAGGGMNANMRGVFLHVLADTLGSIGVIVSTVLIEQFGWFIADPLCSLFIAILIFLSVVPLIKDACQVLLLRLPPEYEKELHIALEKIQKIEGLISYRDPHFWRHSASIVAGTIHIQVTSDVLEQRIVQQVTGILKDAGVNNLTIQVEKEAYFQHMSGLSTGFHDVLAMTKQMESMKYCKDGTYIM

SEQ ID NO: 3331 - DNA, 1680 bp, Homo sapien
agagagctgtttactaggcacgactgcgaaggcaagggggcaccagctcaggactgcatctgcctgccatttcccttccactcctcctttctggagtctgacattagaaagccagcgagaaggaagattcaaacaaccaaccctgatttcctgcttctccttttcatgagtgttcctgtggtctctgcacctcctttctgtcccccggcagagggcagtagagatggccggcccaaggcctcggtggcgcgaccagctgctgttcatgagcatcatagtcctcgtgattgtggtcatctgcctgatgttatacgctcttctctgggaggctggcaacctcactgacctgcccaacctgagaatcggcttctataacttctgcctgtggaatgaggacaccagcaccctacagtgtcaccagttccctgagctggaagccctgggggtgcctcgggttggcctgggcctggccaggcttggcgtgtacgggtccctggtcctcaccctctttgccccccagcctctcctcctagcccagtgcaacagtgatgagagagcgtggcggctggcagtgggcttcctggctgtgtcctctgtgctgctggcaggcggcctgggcctcttcctctcctatgtgtggaagtgggtcaggctctccctcccggggcctgggtttctagctctgggcagcgcccaggccttactcatcctcttgcttatagccatggctgtgttccctctgagggctgagagggctgagagcaagcttgagagctgctaaaggcttacgtgattgcaagggttcagttccaaccatagtcagaggtggcacatctgctcagccatctcattttacagctaacgctgatctccagctccagcgatggaacccactacagaggaggtggggcccctgtgtcaaagaggccgaggggcagcaagggcagccagggcacctgtgacttcttagtacaagattgtctgtccttcaggacttccaaggctcccaaagactccctaaaccatgcagctcattgtcacaccaattcctgctttaattaatggatctgagcaaatcttcctctagcttcaggagggtggggagggagtgattgccgtcatggggccagacttccaggctgatttgccaaatgccaaaatgaaacctagcaaagaacttacggcaacaaacgaggacattaaaagagcgagcacctcagtgtctctggggacatggttaaggagcttccactcagcccaccatagtgagtgggccgccataagccatcactggaactccaaccccagaggtccaggagtgatctctgagtgactcaacaaagacaggacacatggggtacaaagacaaggcttgactgcttcaaagcttccctggacctgaagccagacagggcagaggcgtccgctgacaaatcactcccatgatgagaccctggaggactccaaatcctcgctgtgaacaggactggacggttgcgcacaaacaaacgctgccaccctccacttcccaacccagaacttggaaagacattagcacaacttacgcattggggaattgtgtgtattttctagcacttgtgtattggaaaacctgtatggcagtgatttattcatatattcctgtccaaagccacactgaaaacagaggcagagacatgt

SEQ ID NO: 3332 - protein, 185 aa, Homo sapien
MAGPRPRWRDQLLFMSIIVLVIVVICLMLYALLWEAGNLTDLPNLRIGFYNFCLWNEDTSTLQCHQFPELEALGVPRVGLGLARLGVYGSLVLTLFAPQPLLLAQCNSDERAWRLAVGFLAVSSVLLAGGLGLFLSYVWKWVRLSLPGPGFLALGSAQALLILLLIAMAVFPLRAERAESKLESC

SEQ ID NO: 3333 - DNA, 725 bp, Homo sapien
gctccgggtgtcccgagagttgtcctgcgccggtgttcccacgtgcggcctgaacctgagcgcataatgttatgaggagatgggagcactagtgattcgcggtatcaggaatttcaacctagagaaccgagcggaacgggaaatcagcaagatgaagccctctgtcgctcccagacacccctctaccaacagcctcctgcgagagcagattagtctctatccagaagttaaaggagagattgctcgtaaagatgaaaagctgctgtcgtttctaaaagatgtgtatgttgattccaaagatcctgtgtcttccttgcaggtaaaagctgctgaaacatgtcaagagccgaaggaattcagattgccgaaagaccatcattttgatatgataaatattaagagcattcccaaaggcaaaatttccattgtagaagcattgacacttctcaataatcataagcttttcccagaaacctggactgctgagaaaataatgcaagaataccagttagaacagaaagatgtgaattctcttcttaaatattttgttacttttgaagtcgaaatcttccctcctgaagacaagaaagcaatacgatcaaaatgaagaaaatcacagaaatttcctatgtgtactcctcatccctcctgctgtatattttctcattttttgcgtaataaattatgttaattaccaaaaaaaaaaaaaaaaaaaaaaaaaaaaa

SEQ ID NO: 3334 - protein, 175 aa, Homo sapien
MGALVIRGIRNFNLENRAEREISKMKPSVAPRHPSTNSLLREQISLYPEVKGEIARKDEKLLSFLKDVYVDSKDPVSSLQVKAAETCQEPKEFRLPKDHHFDMINIKSIPKGKISIVEALTLLNNHKLFPETWTAEKIMQEYQLEQKDVNSLLKYFVTFEVEIFPPEDKKAIRSK

SEQ ID NO: 3335 - DNA, 760 bp, Homo sapien
gagttttcatttgtggtgagattctctcccaggccacaagacatttcctgctcggaaccttgtttactaatttccactgcttttaaggccctgcactgaaaatgcaagctcaggcgccggtggtcgttgtgacccaacctggagtcggtcccggtccggccccccagaactccaactggcagacaggcatgtgtgactgtttcagcgactgcggagtctgtctctgtggcacattttgtttcccgtgccttgggtgtcaagttgcagctgatatgaatgaatgctgtctgtgtggaacaagcgtcgcaatgaggactctctacaggacccgatatggcatccctggatctatttgtgatgactatatggcaactctttgctgtcctcattgtactctttgccaaatcaagagagatatcaacagaaggagagccatgcgtactttctaaaaactgatggtgaaaagctcttaccgaagcaacaaaattcagcagacacctcttcagcttgagttcttcaccatcttttgcaactgaaatatgatggatatgcttaagtacaactgatggcatgaaaaaaatcaaatttttgatttattataaatgaatgttgtccctgaacttagctaaatggtgcaacttagtttctccttgctttcatattatcgaatttcctggcttataaactttttaaattacatttgaaatataaaccaaatgaaatattttaactgataaaaaaaaaaaaaaaaaataaaaaa

SEQ ID NO: 3336 - protein, 115 aa, Homo sapien
MQAQAPVVVVTQPGVGPGPAPQNSNWQTGMCDCFSDCGVCLCGTFCFPCLGCQVAADMNECCLCGTSVAMRTLYRTRYGIPGSICDDYMATLCCPHCTLCQIKRDINRRRAMRTF

SEQ ID NO: 3337 - DNA, 2221 bp, Homo sapien
gtgaccggaggcgagaaaccccgcctcggcaccctgacgcagcgcaggacccgccccgcgcgtgacgccagcgtcaggccagccccggcatgctctgcggccgcccgcggtccagctccgacaacaggaattttctccgagagcgggccgggctcagttcagctgctgtccagacccggatcggcaacagtgccgcctccagacgttctcctgccgctcgcccgcccgtcccagcgcccccagccctcccgcgagggcgccccgggacggaaggatccaccagtctgtcggcgcccgccgttctcgtggtcgccgtcgccgtcgtcgtggtggtagtctccgccgtcgcctgggccatggccaattacatccacgtccctcccggctccccggaggtgcccaagctgaacgtcaccgttcaggatcaggaggagcatcgctgccgggagggggccctgagcctcctgcaacacctgcggcctcactgggacccccaggaggtgaccctgcagctcttcacagatggaatcacaaataaacttattggctgttacgtgggaaacaccatggaggatgtagtcctggtgagaatttatggcaataagactgagttattagtcgatcgagatgaggaagtaaagagttttcgagtgttgcaggctcatgggtgtgcaccacaactctactgtaccttcaataatggactatgctatgaatttatacaaggagaagcactggatccaaagcatgtctgcaacccagccattttcaggctaatagctcgtcagcttgctaaaatccatgctattcatgcacacaatggctggatccccaaatctaatctttggctaaagatgggaaagtatttctctctcattcccacaggatttgcagatgaagacattaataaaaggttcctaagtgatatcccaagctctcagattctccaggaagagatgacttggatgaaggagattctttccaacctgggctcacctgttgtgctttgccataatgacctattgtgtaagaatataatctacaatgagaaacaaggtgatgtacagttcattgattatgaatattctggatacaactacctggcatatgatattggaaatcatttcaatgaatttgcaggtgtgagtgatgtagactatagtctgtatccagatagagaactacagagtcagtggctgcgtgcttaccttgaagcctacaaagaatttaagggctttgggactgaagttactgaaaaggaggtagaaatactcttcattcaagtcaatcagtttgcattggcttctcatttcttttggggattgtgggctttgattcaagccaaatactccactattgagtttgatttccttgggtatgcaattgttcgttttaaccagtactttaaaatgaagcctgaggttactgcattaaaagtgcctgagtaaagaagagatttaattattctccagtagctgagcaatgcttgtgaatcttttcttaagaaatcccaaaaagccaatattagttaaaattctgttgtttaatttggttatcttgctttataaattatgcctctaaacaatcaaatctatttttgaaatagactgaatgatgtcaagaaatatacctactgctatccgtatgtggtggattagaaatgtgttaaatctgcaaaaggtataaagatgtcagtttaatttctttgataatttaacctatgttgtatgtgaattatttattataaacttagcacgattctgtgactgtttttctctgtttcacgttcgttgagtgtaagcaatgaaaatgtcccaaataagttttttaagttttactttaataagattaatttcagtaaacattctagttgttcagtgtaacctttttatcttgatgcattgtaagtaaaatgaatcatttactcttgaaatgccagtcattgactgatgtagataatttaggattttcatataaaaatagctgtttaggaaggtgaaatacattcactgtctctgttggtggtacatcttgttgaattcaatattagaaagtatttctttttggggtaatataacttagaattaaatccctgtttctctatgtagtctggcagtataaatataaatatttaccatataatcttggaataagtattagttaatgttaccaaaatctgtattaaataatgttttcaaatgctaaaaaaaaaaaaaaaaaa

SEQ ID NO: 3338 - protein, 452 aa, Homo sapien
MLCGRPRSSSDNRNFLRERAGLSSAAVQTRIGNSAASRRSPAARPPVPAPPALPRGRPGTEGSTSLSAPAVLVVAVAVVVVVVSAVAWAMANYIHVPPGSPEVPKLNVTVQDQEEHRCREGALSLLQHLRPHWDPQEVTLQLFTDGITNKLIGCYVGNTMEDVVLVRIYGNKTELLVDRDEEVKSFRVLQAHGCAPQLYCTFNNGLCYEFIQGEALDPKHVCNPAIFRLIARQLAKIHAIHAHNGWIPKSNLWLKMGKYFSLIPTGFADEDINKRFLSDIPSSQILQEEMTWMKEILSNLGSPVVLCHNDLLCKNIIYNEKQGDVQFIDYEYSGYNYLAYDIGNHFNEFAGVSDVDYSLYPDRELQSQWLRAYLEAYKEFKGFGTEVTEKEVEILFIQVNQFALASHFFWGLWALIQAKYSTIEFDFLGYAIVRFNQYFKMKPEVTALKVPE

SEQ ID NO: 3339 - DNA, 1308 bp, Homo sapien
ggaagaaaacctgaaaaagaccccaaagaagaatatgaaaatggtaactggagccgtagcgtcggtgctggaagacgaggccacagacacttctgatagtgaaggaagctgtggatcggaaaaggaccacttttattctgatgatgacgcaatagaagctgacagtgagggtgatgctgagccctgtgacaaagaaaatgaaaatgatggagaatcaagtgttgggactaatatgggctgggcagatgctatggctaaagtcctcaacaagaaaactcctgaaagtaaacctactattctggtcaaaaataagaagctggaaaaggaaaaagaaaagttaaagcaagaaagactagagaaaataaaacagcgtgataagaggctggagtgggaaatgatgtgcagagtaaagccagatgttgtccaagacaaagagacagagagaaatcttcagagaattgcaacaaggggtgtggtgcaattatttaatgctgttcagaaacatcaaaagaatgttgatgaaaaggttaaggaagctggaagttctatgagaaagcgtgctaagttgatatcaactgtttccaagaaagatttcatcagtgttttgagagggatggatggaagtacaaatgagactgcttcaagcaggaagaaaccaaaagccaaacagactgaagtgaaatcagaagaaggcccaggttggacgatcctacgtgatgatttcatgatgggagcatctatgaaagactgggacaaggaaagtgatgggccagatgacagcagaccagaatctgcaagtgactctgatacataaagcatcataggaaatacaattgcagtcgttttattttttctagaaaaatatgtcatcctctgatagttggggaattataaggataccatttgtaagaaagccaaaagacttttgccagatttcatatttccccttttcatgtacactttatatatacttcattaaaattatattttaaacccttgtataattttaagcattgttcctcagaacatttgtaaaaggatatatttctgcttgaccagcgagatgtgcattttgccaggatcatattggtcatgtctattggtgtattatttcagtatcaccaatgttttcagaaatacagtactaattcatcattaaactctttgaagttaatatttttctgccttctaacttatagactcaactatgtatctgtagtttttgggaatggttggtgttttttgctttgtgttgggaagttattgagaaaacctatataataaaatttaaaattatagtttttcaaa

SEQ ID NO: 3340 - protein, 259 aa, Homo sapien
MKMVTGAVASVLEDEATDTSDSEGSCGSEKDHFYSDDDAIEADSEGDAEPCDKENENDGESSVGTNMGWADAMAKVLNKKTPESKPTILVKNKKLEKEKEKLKQERLEKIKQRDKRLEWEMMCRVKPDVVQDKETERNLQRIATRGVVQLFNAVQKHQKNVDEKVKEAGSSMRKRAKLISTVSKKDFISVLRGMDGSTNETASSRKKPKAKQTEVKSEEGPGWTILRDDFMMGASMKDWDKESDGPDDSRPESASDSDT

SEQ ID NO: 3341 - DNA, 2211 bp, Homo sapien
atttgggagcggccccgagacgcgcctggcgcggatcctaaatcccgacagctttatagagcccaggcctggcaggctcccagaacttgaagccaccagaccccacatggaaccaaaggcctcctgtccagctgctgcacccttgatggagagaaaattccatgttcttgtgggtgtcacggggagtgtcgcagccctgaagttgcctcttctggtgtcaaagcttttggacattcctgggctggaagtatcagtggtcacaactgagagagccaaacatttctacagcccccaggacattcctgtcaccctctacagcgacgctgatgaatgggagatgtggaagagccgctctgacccagttctgcacattgacctgcggaggtgggcagacctcctgctggtggctcctcttgatgccaacactctggggaaggtggccagtggcatctgtgacaacttgcttacctgcgtcatgcgggcctgggaccgcagcaagcccctgctcttctgcccggccatgaacaccgccatgtgggagcacccgatcacagcgcagcaggtagaccagctcaaggcctttggctatgtcgagatcccctgtgtggccaagaagctggtgtgcggagatgaaggtctcggggccatggctgaagtggggaccatcgtggacaaagtgaaagaagtcctcttccagcacagtggcttccagcagagttgacctgggatttctgtcatgggtgtccctctgtactcagaatgggttcaggccaagtcggtgaagatggatgttggcaaaataggaggataccctcatttgctgaatgggggacctgctctgagcctgcccaggggccaggcctgctccaggttaaactggacggaaggcccaggtctcagtttctttcaaccaggagaggccgctgcctagagcccctccccaccttttcctggatgggtgaggcaagccaggagagcaagcagtgttgtcctcacgggaggaggactgagcgactgggaaaactcggctctacatctcacccagaacggcttttagaaacaccacagctggagagtcctggctgagccttgggagtttcagctctttggcggggtgcccaggtgccatgcgatcagcgaagcctgcgagttggcaggactctgaggtttcctgcagaccatgccatgagattgaaggtgcggggaaataaagaaaaatcaccatttaggagactccattctttccctacaacccagctgtggtcccagagatcagggggtgttgccaggtgtggctggggaagggtctgggttcacaactcaccggcactctttagtccccgtataacatggtggttaaggataaagatctgaagccagacagcccctagttccaatcccagctctgccgcttactagcagtggcagtttggttcaggacttagccttcctgaccttcacttacctcagctatcttgttatcctaccctcagggagttgttgagaggattcagtgaaattttgtgtgcagaatacccatgccactgagtgcctggaacgtagtaaatgtcaaatcaatggaagttaaaactaggcatgcatatatgccagagagctttcctagcatttactgcaatgccctgtctcattttgggaaaaaggaaatcctggatgctaagttgacacatccctttatgcaagtgacaggtaagcagccaggagggttgaccctgccctgggtcccaggcctcttgcctgcttcttggtttcctctgttctcatcctttcagctttgctggacctgaggcaggggcctgggtgtctgtgcctccctaccccccagtacacatgaccaagggaagtagatccagagacaccatgcactctggcccagaaaccctctgctacccagcttttgacttaattgccatttggtgtggctgcagcggggagggcttgtctgcgtatttggagctgaggctgaggctggcttcctgccctctggcttccaggccaggtgtgagggacatcccatgtgggctctgagagcactgagagtagaggtgccttgaggggaccaggaagcctactggctggaatcagtgctccagcagcctccacagcctttatctcaacagcacttgacttcaccaggtgaccctttgggataaaattgccttagggtatgaaataaactataactaaaatggt

SEQ ID NO: 3342 - protein, 204 aa, Homo sapien
MEPKASCPAAAPLMERKFHVLVGVTGSVAALKLPLLVSKLLDIPGLEVSVVTTERAKHFYSPQDIPVTLYSDADEWEMWKSRSDPVLHIDLRRWADLLLVAPLDANTLGKVASGICDNLLTCVMRAWDRSKPLLFCPAMNTAMWEHPITAQQVDQLKAFGYVEIPCVAKKLVCGDEGLGAMAEVGTIVDKVKEVLFQHSGFQQS

SEQ ID NO: 3343 - DNA, 3938 bp, Homo sapien
tgagcctgtcaggctgggcgggtccatatccgggtggaccgggtgggtgaggctgcccctccctccaggtcccgaggtggataaggggtggggagtgacgtgcagagattccctttcgccccttcggatccaagagagggtggcagaaggaatgcgtgggtgacttggcgtggatttagggcgtgcccaccctgcagatcggcctcctagagtgtcccgagggcctgagaggccgcagggacacgaaggaagagaaggcatttcccggggatttggagcaggcacgcgcggcccgggcgtccggagctgtagcagcagcagcagccgccgtgccggggccgccaccgcggcgggcacccgcgtcccgggcgcccacggaccatggagagggcagtccagggcacagacggcggcgggggtagcaacagcagcagccgcagcagcagccgtgctacctcggcgggctcctcgccctcctgctctctggcgggccggggggtctccagccggtcggcggcggccgggctcggcggcgggggaagccgcagcagcccgggctctgtggccgctagcccgtccgggggaggcggccgcaggagggagccggcgctcgagggcgtgctcagcaaatacaccaacctcctccagggctggcagaacaggtacttcgtactggatttcgaggctggcatcctgcagtattttgtgaatgagcaaagcaaacaccagaagcctcgaggagtcctgtctttatctggagccatagtgtccctgagcgatgaagctccccacatgctggtggtgtactctgctaatggagagatgtttaaactgagagctgctgatgcaaaagagaaacaattctgggtgactcagcttcgagcttgtgccaaataccacatggaaatgaattctaagagtgctccaagctcccgaagccgaagtctcactttgctcccacatggaacacccaattctgcgtctccctgtagccagagacacctcagtgtgggggcccccggtgttgtcacaatcacgcatcacaagtcgcctgcagccgcccgaagagccaagagtcagtattccggccagcttcacgaagtcagagagatgatgaaccaggtggaagggcagcagaagaaccttgtgcacgccattgagtccctgccagggtccggccccctcactgccttggaccaggacctgctgctcctgaaagctacctctgctgccaccctcagctgccttggggagtgcctcaacttgttacagcagagtgtgcaccaggcgggccagcccagccagaagccaggagcctcggaaaacatcctgggatggcacgggtccaagtcacattccacagagcagctgaaaaatgggacacttggctctttgccatcagccagtgccaacataacctgggcaattttaccaaactctgctgaagacgaacaaacctcacagccagagccagagccaaactcaggctctgaattggttttgtctgaagatgaaaaaagtgacaatgaagataaggaagagacggaattgggcgtcatggaggatcagcgtagtataattcttcatctcatttcacaactcaaacttggaatggatttgaccaaggtggtgcttcccacctttatcctggagaagcgatctttgctggagatgtatgcagatttcatggcgcacccagacctactgctggccatcaccgctggggccacaccagaggagagagtcatttgcttcgttgagtattatctcacagcctttcacgagggccgcaagggcgctttagccaagaagccctacaaccccatcataggcgagacatttcactgctcctgggaagttcccaaggacagggtcaagcctaagaggactgcttcccgctctcctgccagctgtcacgaacacccaatggccgatgacccttccaaaagctacaaactaaggtttgtggctgagcaagtgtcccatcacccacccatctcctgcttctactgtgagtgcgaggagaagagactgtgcgtcaacactcatgtatggaccaaaagcaagttcatgggcatgtccgtgggggtctctatgataggggaaggtgtgttgaggctcctggaacacggggaggagtacgtattcaccctgcctagtgcctacgcccggtccattctcaccatcccgtgggtggagctcggaggaaaagtcagcatcaactgtgccaagactgggtactcagcgacagtgatattccacacgaagcctttctatggagggaaagtccacagggttaccgcagaagtgaagcacaacccaaccaacaccattgtttgtaaagcccatggggaatggaatggtactttagagttcacctacaacaatggagaaaccaaagtcatcgacacaaccacactgccagtgtatcccaagaagatcagacctcttgagaagcagggacccatggagtccaggaacctctggcgggaggtgacccgatacctgcggctgggggacattgacgcagccaccgagcagaagcggcacctggaggagaagcaacgggtggaggaacggaagcgcgagaacctccgcacaccatggaagcccaaatattttatccaggagggcgatggctgggtatacttcaatcccctctggaaagcacactgatggggtggaggtgcagagctttccagtatagccctgtttttgtaggaatattaaagtagtagagtatcagggttttgttggcattcactgagaccttgtattagcatccaagaaatgatgagagagagagaaattatatactatgaaaagtgcacccccacactctgctagaggaatgaatttattcaagagccattcggggcacgtgtgtgtacacaccgtatacgttcacacacatgcactatgtaaacatctgagtatgattacacatttaaatactgcactcaccaaggttaaagtgggtaatcataagctcctttttatcaatgaagtttgaagtttttctatttttcactttgccaaaaatgttttacactcacaaagatattctcacttagtcaactcctgtcaaaatgaaggtgaactggcatggcccgatcactgtccataagggagaaagtggctcattcctggtagaagtatgggtggttatcatttcaaaattattgtgattctcacctccctccccacctcagtgttttgtctgtccgcgcccaagaaagataagcaagtatttcctgctggatgggggttggcaggaagctgttaaagatttatgccagagccttgcaggatggagcacctctgggacaactaagagccaaggcccaccaaggagttttccacccgtctctcatggtcacagcgctagtcattcatttttgagaagttgcttcttttacatcagaaaaccagtcaatcatatggagacttcttttgtgatgaaaaagggctttagaagttaaatacatgcatgcacatgaaaacatgcacaaccacagcctcaatcttgtatttagtttggggaaagagaagagaatttcctgtggattattttttcctcaagtgcacctctctggttaacccaaactctgcaagaaagcactgtgactaaaacatacataacgcctgcataaatattccatggtttcagttaaatttcagtttttagcctttacacatgaggtcaaaggagtgacgaaaatacaaagcaaggaaaaaatgaaatatctggtttttgctgaatgcttaatttattttttactgtgccactccaatatttatcaaatccaaatagcatgaatgcttctctgtagtaatactaattttgtgccttttgtctgctttcttaagaccagttgttcacactttgtagatattagacaaatatatttcgattgaatacaaaaaaaaaaaaaaaa

SEQ ID NO: 3344 - protein, 764 aa, Homo sapien
MERAVQGTDGGGGSNSSSRSSSRATSAGSSPSCSLAGRGVSSRSAAAGLGGGGSRSSPGSVAASPSGGGGRRREPALEGVLSKYTNLLQGWQNRYFVLDFEAGILQYFVNEQSKHQKPRGVLSLSGAIVSLSDEAPHMLVVYSANGEMFKLRAADAKEKQFWVTQLRACAKYHMEMNSKSAPSSRSRSLTLLPHGTPNSASPCSQRHLSVGAPGVVTITHHKSPAAARRAKSQYSGQLHEVREMMNQVEGQQKNLVHAIESLPGSGPLTALDQDLLLLKATSAATLSCLGECLNLLQQSVHQAGQPSQKPGASENILGWHGSKSHSTEQLKNGTLGSLPSASANITWAILPNSAEDEQTSQPEPEPNSGSELVLSEDEKSDNEDKEETELGVMEDQRSIILHLISQLKLGMDLTKVVLPTFILEKRSLLEMYADFMAHPDLLLAITAGATPEERVICFVEYYLTAFHEGRKGALAKKPYNPIIGETFHCSWEVPKDRVKPKRTASRSPASCHEHPMADDPSKSYKLRFVAEQVSHHPPISCFYCECEEKRLCVNTHVWTKSKFMGMSVGVSMIGEGVLRLLEHGEEYVFTLPSAYARSILTIPWVELGGKVSINCAKTGYSATVIFHTKPFYGGKVHRVTAEVKHNPTNTIVCKAHGEWNGTLEFTYNNGETKVIDTTTLPVYPKKIRPLEKQGPMESRNLWREVTRYLRLGDIDAATEQKRHLEEKQRVEERKRENLRTPWKPKYFIQEGDGWVYFNPLWKAH

SEQ ID NO: 3345 - DNA, 1361 bp, Homo sapien
ggggaggtagcccgcagtgcaggggcagcgcggcgcggggccaccgacgggacgcggctccgggaacatggctcgcttcgctctgactgttgtccggcatggagaaacaagatttaacaaggagaaaataatccaaggacaaggagtagatgaacctctttcagaaactggatttaaacaagcagcagctgctggtatatttctgaataatgtgaagtttactcatgctttctccagtgatctcatgaggacaaagcagaccatgcatggaattttggagagaagcaaattttgcaaagatatgacggtaaagtatgactcaagacttcgggaaaggaaatacggggttgtagaaggcaaagcgctaagtgagctgagggccatggccaaagcagccagggaagagtgccctgtgtttacaccgcccggaggagagacgctggaccaggtgaaaatgcgtggaatagacttttttgaatttctttgtcaactaatcctgaaagaagcggatcaaaaagaacagttttcccaaggatctccaagcaactgtctggaaacttctttggcagagatatttcctttaggaaaaaatcacagctctaaagttaattcagacagcggtattccaggattagcagccagtgtcttagttgtgagtcacggtgcttacatgagaagtctgtttgattattttctgactgaccttaagtgttccttaccagccactctgagcagatctgaacttatgtcagtcactcccaatacagggatgagtctctttatcataaactttgaggaaggaagagaagttaaaccaacggttcagtgtatttgtatgaacctacaggatcatctaaatggactgactgaaactcgctaaggttaaatctgcatcaaaatctaaccaatttgagcctctgaagggagtgccattggctttatttacttctctcctctgctagtcctgatttggaaacagttaaaagccaatttttagctccagtggaaccatagccacataaaactttaatggacaaccatatagaattaacttattttgtccaagtacagttggcattttccagaataattttaccaccctgctagatgtcatctctggattgcacatggatgatgaaggaactcagcattgaaagttgggggattagtaaccttgttacaacggtttctttttcattttagcctattttaatggctattggtaagatactgtatgtttttagtatctcatccagtgcttagaagaaagaatggtttataattcccagtacatgtttatattgactgtgttatatttttaaatcctttaaataaaaaatccttataagtttatgtaaagc

SEQ ID NO: 3346 - protein, 270 aa, Homo sapien
MARFALTVVRHGETRFNKEKIIQGQGVDEPLSETGFKQAAAAGIFLNNVKFTHAFSSDLMRTKQTMHGILERSKFCKDMTVKYDSRLRERKYGVVEGKALSELRAMAKAAREECPVFTPPGGETLDQVKMRGIDFFEFLCQLILKEADQKEQFSQGSPSNCLETSLAEIFPLGKNHSSKVNSDSGIPGLAASVLVVSHGAYMRSLFDYFLTDLKCSLPATLSRSELMSVTPNTGMSLFIINFEEGREVKPTVQCICMNLQDHLNGLTETR

SEQ ID NO: 3347 - DNA, 1460 bp, Homo sapien
ggcacgaggcagccaactgctcctgcgccgggcggggtcgtcgccgccagcggctccgagcgccggaagggccaggtcgcagggctcctggagctgcaggcggcgggaggggctacaaatgcttgactcagtgatgcagaacctttcagagttagctggaagccacagccctgcctcttgatgcagcctggatccagccggtgtgaagaggagaccccttccctcttgtggggtttggatcctgtgtttctagcctttgcaaaactctacatcagggatatcctggacatgaaggagtcccgccaggtgccaggtgtatttttgtacaatggacatccaataaaacaggtagatgtcttgggaactgtcattggagtgagagaaagagatgctttctacagttatggagtggatgacagcactggagttataaactgcatctgctggaaaaagttgaatactgagtctgtatcagctgctcctagtgcagcaagagagctcagcttaacctcacaacttaagaagctacaagagaccattgagcagaaaacaaagatagagatcggggacacgatccgagtcagaggcagtatccgcacatacagagaagagcgagagattcatgccaccgcttactataaagtggacgacccagtgtggaacattcaaattgcaaggatgcttgagctgcccactatctacaggaaagtttatgaccagccttttcacagctcagccctagagaaagaagaggcactaagcaatccaggcgccctggacctccccagtctcacgagtttgctgagtgaaaaagccaaagaattcctcatggagaacagagtgcagagcttttaccagcaggagctggaaatggtggagtctttgctgtcccttgccaatcagcctgtgattcacagtgcctgctccgaccaagtgaattttaagaaggacaccacttccaaggcaattcatagtatatttaagaatgctatacaactgctgcaggaaaaaggacttgttttccagaaagatgatggttttgataacctatactatgtaaccagagaagacaaagacctgcacagaaagatccaccggatcattcagcaggactgccagaaaccaaatcacatggagaagggctgtcacttcctgcacatcttggcctgtgctcgcctgagcatccgcccgggcctgagcgaggctgtgctgcagcaagttctggagctcctggaggaccagagtgacattgtcagcacaatggagcactactacacagcgttctgagcagagacacgcagaccagctgaggaggacaaagataaggtggcattcacccccaggctctgactttcagcatcatgcaggggcttatctgtctggaggcagttacctcataataaactataaaatatagtcatcttgggaaaaaaaaaaaaaaaaaaaaaaaaaaaaaaaaa

SEQ ID NO: 3348 - protein, 368 aa, Homo sapien
MQPGSSRCEEETPSLLWGLDPVFLAFAKLYIRDILDMKESRQVPGVFLYNGHPIKQVDVLGTVIGVRERDAFYSYGVDDSTGVINCICWKKLNTESVSAAPSAARELSLTSQLKKLQETIEQKTKIEIGDTIRVRGSIRTYREEREIHATAYYKVDDPVWNIQIARMLELPTIYRKVYDQPFHSSALEKEEALSNPGALDLPSLTSLLSEKAKEFLMENRVQSFYQQELEMVESLLSLANQPVIHSACSDQVNFKKDTTSKAIHSIFKNAIQLLQEKGLVFQKDDGFDNLYYVTREDKDLHRKIHRIIQQDCQKPNHMEKGCHFLHILACARLSIRPGLSEAVLQQVLELLEDQSDIVSTMEHYYTAF

SEQ ID NO: 3349 - DNA, 1021 bp, Homo sapien
ccgctgttatacgtcacttccacggctcagcgtcagggaggagagagaatgtcttttcgaggcggaggtcgtggaggctttaatcgaggtggtggaggtggcggcttcaaccgaggcggcagcagcaaccacttccgaggtggaggcggcggtggaggcggcggcaatttcagaggcggcggcaggggaggatttggacgagggggtggccgcggaggctttaacaaaggccaagaccaaggacctccagaacgtgtagtcttattaggagagttcctgcatccctgtgaagatgacatagtttgtaaatgtaccacagatgaaaataaggtgccttatttcaatgctcctgtttacttagaaaacaaagaacaaattggaaaagtggatgaaatatttggacaactcagagatttttatttttcagttaagttgtcagaaaacatgaaggcttcatcctttaaaaaactacagaagttttatatagacccatataagctgctgccactgcagaggtttttacctcgacctccaggtgagaaaggacctccaagaggtggtggcaggggaggccgaggaggaggaagaggaggaggtggcagaggtggtggcagaggcggtggttttagaggtggaagaggaggtggaggtgggggcttcagaggaggaagaggtggtggtttcagagggagaggacattaagtgaaacagttgacagacatcaccagttgacttctgcattaacctgcatgatctgtttctactatggattggaaacttgtttcttgaacaagtcttgaagatcttggtcattttatgacaatggatctaaaatgtcagcatcatgcaaagtgcaacggaatagtgaattttgctctaaaagagcatgaacaagtctttctaatgttttgtacagtgcctggcactctgtgggtgctcaataaatggataggagttttcatttgaagcatatttgaatttttaaaataaagtgttttattcccttaaaaaaaaaaaaaaa

SEQ ID NO: 3350 - protein, 217 aa, Homo sapien
MSFRGGGRGGFNRGGGGGGFNRGGSSNHFRGGGGGGGGGNFRGGGRGGFGRGGGRGGFNKGQDQGPPERVVLLGEFLHPCEDDIVCKCTTDENKVPYFNAPVYLENKEQIGKVDEIFGQLRDFYFSVKLSENMKASSFKKLQKFYIDPYKLLPLQRFLPRPPGEKGPPRGGGRGGRGGGRGGGGRGGGRGGGFRGGRGGGGGGFRGGRGGGFRGRGH

SEQ ID NO: 3351 - DNA, 727 bp, Homo sapien
gaacgagggtcctagctgccgccacccgaacagcctgtcctggtgccccggctccctgccccgcgcccagtcatgaccctgcgcccctcactcctcccgctccatctgctgctgctgctgctgctcagtgcggcggtgtgccgggctgaggctgggctcgaaaccgaaagtcccgtccggaccctccaagtggagaccctggtggagcccccagaaccatgtgccgagcccgctgcttttggagacacgcttcacatacactacacgggaagcttggtagatggacgtattattgacacctccctgaccagagaccctctggttatagaacttggccaaaagcaggtgattccaggtctggagcagagtcttctcgacatgtgtgtgggagagaagcgaagggcaatcattccttctcacttggcctatggaaaacggggatttccaccatctgtcccagcggatgcagtggtgcagtatgacgtggagctgattgcactaatccgagccaactactggctaaagctggtgaagggcattttgcctctggtagggatggccatggtgccagccctcctgggcctcattgggtatcacctatacagaaaggccaatagacccaaagtctccaaaaagaagctcaaggaagagaaacgaaacaagagcaaaaagaaataataaataataaattttaaaaaacttaaaaaaaaaaaaaaaaaaaaaaaaa

SEQ ID NO: 3352 - protein, 201 aa, Homo sapien
MTLRPSLLPLHLLLLLLLSAAVCRAEAGLETESPVRTLQVETLVEPPEPCAEPAAFGDTLHIHYTGSLVDGRIIDTSLTRDPLVIELGQKQVIPGLEQSLLDMCVGEKRRAIIPSHLAYGKRGFPPSVPADAVVQYDVELIALIRANYWLKLVKGILPLVGMAMVPALLGLIGYHLYRKANRPKVSKKKLKEEKRNKSKKK

SEQ ID NO: 3353 - DNA, 1899 bp, Homo sapien
agcgcgcgactttttgaaagccaggagggttcgaattgcaacggcagctgccgggcgtatgtgttggtgctagaggcagctgcagggtctcgctgggggccgctcgggaccaattttgaagaggtacttggccacgacttattttcacctccgacctttccttccaggcggtgagactctggactgagagtggctttcacaatggaagggatcagtaatttcaagacaccaagcaaattatcagaaaaaaagaaatctgtattatgttcaactccaactataaatatcccggcctctccgtttatgcagaagcttggctttggtactggggtaaatgtgtacctaatgaaaagatctccaagaggtttgtctcattctccttgggctgtaaaaaagattaatcctatatgtaatgatcattatcgaagtgtgtatcaaaagagactaatggatgaagctaagattttgaaaagccttcatcatccaaacattgttggttatcgtgcttttactgaagccaatgatggcagtctgtgtcttgctatggaatatggaggtgaaaagtctctaaatgacttaatagaagaacgatataaagccagccaagatccttttccagcagccataattttaaaagttgctttgaatatggcaagagggttaaagtatctgcaccaagaaaagaaactgcttcatggagacataaagtcttcaaatgttgtaattaaaggcgattttgaaacaattaaaatctgtgatgtaggagtctctctaccactggatgaaaatatgactgtgactgaccctgaggcttgttacattggcacagagccatggaaacccaaagaagctgtggaggagaatggtgttattactgacaaggcagacatatttgcctttggccttactttgtgggaaatgatgactttatcgattccacacattaatctttcaaatgatgatgatgatgaagataaaacttttgatgaaagtgattttgatgatgaagcatactatgcagcgttgggaactaggccacctattaatatggaagaactggatgaatcataccagaaagtaattgaactcttctctgtatgcactaatgaagaccctaaagatcgtccttctgctgcacacattgttgaagctctggaaacagatgtctagtgatcatctcagctgaagtgtggcttgcgtaaataactgtttattccaaaatatttacatagttactatcagtagttattagactctaaaattggcatatttgaggaccatagtttcttgttaacatatggataactatttctaatatgaaatatgcttatattggctataagcacttggaattgtactgggttttctgtaaagttttagaaactagctacataagtactttgatactgctcatgctgacttaaaacactagcagtaaaacgctgtaaactgtaacattaaattgaatgaccattacttttattaatgatctttcttaaatattctatattttaatggatctactgacattagcactttgtacagtacaaaataaagtctacatttgtttaaaacactgaaccttttgctgatgtgtttatcaaatgataactggaagctgaggagaatatgcctcaaaaagagtagctccttggatacttcagactctggttacagattgtcttgatctcttggatctcctcagatctttggtttttgctttaatttattaaatgtattttccatactgagtttaaaatttattaatttgtaccttaagcatttcccagctgtgtaaaaacaataaaactcaaataggatgataaagaataaaggacactttgggtaccagaaaaaaaaaaaaaaaaaaaaaaaaaaaaaaaaaaaaaaaaaaaaaaa

SEQ ID NO: 3354 - protein, 322 aa, Homo sapien
MEGISNFKTPSKLSEKKKSVLCSTPTINIPASPFMQKLGFGTGVNVYLMKRSPRGLSHSPWAVKKINPICNDHYRSVYQKRLMDEAKILKSLHHPNIVGYRAFTEANDGSLCLAMEYGGEKSLNDLIEERYKASQDPFPAAIILKVALNMARGLKYLHQEKKLLHGDIKSSNVVIKGDFETIKICDVGVSLPLDENMTVTDPEACYIGTEPWKPKEAVEENGVITDKADIFAFGLTLWEMMTLSIPHINLSNDDDDEDKTFDESDFDDEAYYAALGTRPPINMEELDESYQKVIELFSVCTNEDPKDRPSAAHIVEALETDV

SEQ ID NO: 3355 - DNA, 1124 bp, Homo sapien
atgctgctgaaagagtaccggatctgcatgccgctcaccgtagacgagtacaaaattggacagctgtacatgatcagcaaacacagccatgaacagagtgaccggggagaaggggtggaggtcgtccagaatgagccctttgaggaccctcaccatggcaatgggcagttcaccgagaagcgggtgtatctcaacagcaaactgcctagttgggctagagctgttgtccccaaaatattttatgtgacagagaaggcttggaactattatccctacacaattacagaatacacatgttcctttctgccgaaattctccattcatatagaaaccaagtatgaggacaacaaaggaagcaatgacaccattttcgacagtgaagccaaagacgtggagagagaagtttgctttattgatattgcctgcgatgaaattccagagcgctactacaaagaatccgaggatcctaagcacttcaagtcagagaagacaggacggggacagttgagggaaggctggagagatagtcatcagcctatcatgtgctcctacaagctggtgactgtgaagtctgaggtctgggggcttcagaccagagtggaacaatttgtacacaaggtggtccgagacattctgctgattggacatagacaggcttttgcatgggttgatgagtggtatgacatgacaatggatgaagtccgagaatttgaacgagccactcaggaagccaccaacaagaaaatcggcattttcccacctgcaatttctatctccagcatccccctgctgccttcttccgtccgcagtgcgccttctagtgctccatccacccctctctccacagacgcacccgaatttctgtccgttcccaaagatcggccccggaaaaagtctgccccagaaactctcacacttccagaccctgagaaaaaagccaccctgaatttacccggcatgcactcttcagataagccatgtcggcccaaatctgagtaactttatataaatatctcatggggttttatattttcatttgttgttgttgtttttttttaagaatcttctgatagagaaaaagactgctttgtcactcaaacatgttccttcgacctttcagtgtg

SEQ ID NO: 3356 - protein, 332 aa, Homo sapien [sequence omitted]

SEQ ID NO: 3357 - DNA, 5566 bp, Homo sapien
atttttggctgcctctgtcggtctgttcagttaccacgtgaaccgccgacggagacccgtagtgggggaggcggcggcagcgttaagtgagaaaggaaaaaagacaacgaggaaaaaggaggtgtccgggtagggcaacgcggcgacacccgaggcctggtggtggcggcggatcgagatattcaaggctgaagcagctacggaacggcagcggcggcggtcggacaaactgactgaccgagccgggtggtggcgggagcagcgggagcagccggaacgatgccggccgtgagcctcccgcccaaggagaatgcgctcttcaagcggatcttgaggtgttatgaacataaacagtatagaaatggattgaaattctgtaaacaaatactttctaatcccaaatttgcagagcatggagaaaccttggctatgaaaggattaacattgaactgtttggggaaaaaggaagaagcttatgaattggttcgtagaggtttgagaaatgacttgaagagtcatgtgtgttggcacgtttatggccttcttcagaggtcagacaagaagtatgatgaagccattaagtgttacagaaatgcactaaaatgggataaagacaatcttcaaatcttaagggacctttccttactacagattcaaatgcgagatcttgagggttacagggaaacgaggtatcagttacttcagcttcgacctgcgcagagagcatcatggattggttatgctattgcttaccatttattagaagattatgaaatggcagcaaagattttagaagaatttaggaaaacacaacagacatcccctgacaaggtggattatgaatatagtgaactactcttatatcagaatcaagttcttcgggaagcaggtctctatagagaagctttggaacatctttgtacctatgaaaagcagatttgtgataaacttgctgtagaagaaaccaaaggggaacttctgttgcaactatgtcgtttggaagatgctgcagatgtttatagaggattgcaagagagaaatcctgaaaactgggcctattacaaaggcttggaaaaagcactcaagccagctaatatgttagaacggctaaaaatttatgaggaagcctggactaaatatcccaggggactggtgccaagaaggctgccgttaaactttttatctggtgagaagtttaaagaatgtttggataagttcctaaggatgaatttcagcaagggttgcccaccagtcttcaatactttaagatcattatacaaagacaaagaaaaggtggcaatcatagaagagttagtagtaggttatgaaacctctctaaaaagctgccggttatttaaccccaatgatgatggaaaggaggaaccaccaaccacattactttgggtccagtactacttggcacaacattatgacaaaattggtcagccatctattgctttggagtacataaatactgctattgaaagtacacctacattaatagaactctttctcgtgaaagctaaaatctataagcatgctggaaatattaaagaagctgcaaggtggatggatgaggcccaggccttggacacagcagacagatttatcaactccaaatgtgcaaaatacatgctaaaagccaacctgattaaagaagctgaagaaatgtgctcaaagtttacaagggaaggaacatcagcggtagagaatttgaatgaaatgcagtgcatgtggttccaaacagaatgtgcccaggcttataaagcaatgaataaatttggtgaagcacttaagaaatgtcatgagattgagagaaaatcactgatgaccagtttgactttcatacatactgtatgaggaagattacccttagatcatatgtggacttattaaaactagaagatgtacttcgacagcatccattttacttcaaggcagcaagaattgctatagagatctatttgaagcttcatgacaacccccttacagatgagaataaagaacacgaagctgatacagcaaacatgtctgacaaagagctaaagaagctacgtaataaacaaagaagagctcaaaagaaagcccagatagaagaagagaaaaaaaatgcagaaaaagaaaagcagcagagaaatcagaaaaagaagaaggatgatgatgatgaggagataggaggtccaaaagaagaacttattccagagaaactggccaaggttgaaactccattggaagaagctattaaatttttaacaccgttgaagaacttggtgaagaacaagatagagactcatctttttgcctttgagatttactttaggaaagaaaagtttcttttgatgctacaatcagtaaagagggcatttgctattgattctagtcatccctggcttcatgagtgtatgattcgtctctttaatactgcagtgtgtgaaagtaaagatttatctgatacagttagaacagtattaaaacaagaaatgaatcgtctttttggagcaacgaatccaaagaattttaatgaaacttttctgaaaaggaattctgattcattgccacacagattatcagctgccaaaatggtatattacttagatccttctagtcagaagcgagctatagagttggcaacaacacttgatgaatctctcactaacagaaacctccagacatgtatggaggtattggaagccttgtatgatggtagcctaggagactgtaaagaagctgctgaaatttatagagcaaattgtcataagcttttcccttatgctttggctttcatgcctcctggatatgaagaggatatgaagatcacagttaatggagatagttctgcagaagctgaagaactggccaatgaaatttgaacatcactaaacaagcaaatggaatgactttggaccatatctagtatataatatttttgtcacgcacctgctgcattgctctaacttacacagaatgagaggagtaaatgttcttgccttcaaatagtgttttacgttttttatcctgctgaaaaagtatatataaaatatctaacattacaggatagaggttcagtttcttaaaaaattaaagctgctaaaattgagtggttaaaaaagataccttatcctattcctccccacccacccatgtttttaaactaatttatataaaatctggaggctgttacagctaacaaagcaggtgtgtggcagaaatattactttaaatttgtcttgtgagattttactatatctcagacagcataaatgctgttttagcactggattctttcactgagcacaaagagttgttggggctttagcatctgactgattttgttacggggttgattctgaccataggaagtatgcaatgtgaatcactatttacagagaaacctacaacagatgcttgatgttgtagaaactgggacatatagataccaagcaaaattataagaaacctataaggtgttcaatacgcttgtgtttccaaaattcactgtacatgatcagtttggtgttcttgtaccacagtttttaactgaaggaaccagttgtaacagtctcaattttaactaaaacttgaagaactaaaacaacaatgcaaacctttcagcattgtttggccaaacttgttaaaactgtaatgcaagaaccaaatgcactgtgatgtggcaccaactaattagcaagcatgaatttttcacccaagagtgaaaaaaggaaaatctaccatggcttgaagttaaagagcagaactcctgactaccattctatgactgatcaaaagactaatagttaaaaacctcagcaggccttgttcacgatatgcagaaaaaaaagtgctgcagtttagatacctctggaatttttccacagtgtcacaggtttgtaatacttgaagccctacatttctaagaatatatttcttgctcagttgtttcaggcaagcccaagactttgtaatttttaaagggcccaagatttttttttttttttttttttcaaataacagaccagcttctttttcttgcagttacagatgtaatttcctttttgttgtcaaacataaggtaccaaatatgatgcaataaattgttttgaaaaacagttgtgtgaatatttcaactaatctgtgttgggcttctgtgaaatacacaggtggaaacagaggtgcaagccagaggcaatgtaatatgctgtaaggctagtgcagatgggagctttttagaaggggctaagtgctggtgtcagggaaattccataatgaagtagaatgctgctcctgcattaagatttcattgagggcaaggctggtggcaggtactatgaatgtaattcataatttaaaaggaaaactaaaaactattttgatttgggaaaatgagccttaatttgttaaacctatacactgagaactagcctcaggcttaatattctcattgcatttgcaagatctgagcaaataagattaagtaaaacaaatcaattgtatatataattgacctttttgtggaacatgtagtttatagaaagtatactctaaagggaatttgccgaagaccttttactgattgaacagttgtgctacaatcaacttttcatagtacatgacctgcattccacatctcagtctaacagtttagtagtgatgtaaagagaagtacaaaccgaactccagtgctttgttatgttttattaactggccctgtctcaggaacatcttaacagatggcaaaaaaacaaaaactttttttcaactcctatgagtggcaactgaagttcttattgttgggaaagaacactagtcctacctctgccactaatgaggtgtttggaggaggtaccagccatataatagggggtgtatgtgtgaattttgtttaaactctactgtatattgaaatgaaattcatttatttgtcttgacaatgttcaaatgatgtagattgtcttagaatgaatattcataagtactcagaactcttaagatgcagatgccacccgtgaggagctaaattcctaatgtgtattgtattccaacccaattttactggaactattgaataaatcttttattttctttcaggtttacttgatagtggatacattggtgtcagaggaccttgactgggttcattttatgtccagacatcacccctgaaacactgtactgtactatcttgctctgagtagtatcaactggatcgtctcatatttgcctcattcatcctattaatttcaaatgatactgtgggggaaaaacagggttagaaaaacaagtggaaaaaatggagtgatgttgtaatctaaacaagtgccttatgtttattgctaagaactggtgttaccaacccttttgagaagaaagggtctcttgacctgtattaacataggaaagtaaagttctttttgtttttctttataagctactcttgtcatttctcgttgaaaaactaaaatctgactaggttagtttactcagctttaattagatagttgagtcatatattttcaacatttttctgtatcgtatttattatgcacaaaaataaagtgtgatctctaat

SEQ ID NO: 3358 - protein, 526 aa, Homo sapien
MPAVSLPPKENALFKRILRCYEHKQYRNGLKFCKQILSNPKFAEHGETLAMKGLTLNCLGKKEEAYELVRRGLRNDLKSHVCWHVYGLLQRSDKKYDEAIKCYRNALKWDKDNLQILRDLSLLQIQMRDLEGYRETRYQLLQLRPAQRASWIGYAIAYHLLEDYEMAAKILEEFRKTQQTSPDKVDYEYSELLLYQNQVLREAGLYREALEHLCTYEKQICDKLAVEETKGELLLQLCRLEDAADVYRGLQERNPENWAYYKGLEKALKPANMLERLKIYEEAWTKYPRGLVPRRLPLNFLSGEKFKECLDKFLRMNFSKGCPPVFNTLRSLYKDKEKVAIIEELVVGYETSLKSCRLFNPNDDGKEEPPTTLLWVQYYLAQHYDKIGQPSIALEYINTAIESTPTLIELFLVKAKIYKHAGNIKEAARWMDEAQALDTADRFINSKCAKYMLKANLIKEAEEMCSKFTREGTSAVENLNEMQCMWFQTECAQAYKAMNKFGEALKKCHEIERKSLMTSLTFIHTV

SEQ ID NO: 3359 - DNA, 1844 bp, Homo sapien
agagtcgggtagacggcagcgggagcggtggcgtctccccgccttccctccctcccgggcctgggcgcccagccggacaggtgagcggcagccaggtgagcgcgcccacctgcgcctctccgcgcggcccgccctccccggcgccgggctcctctccgcgcccctgtcggcgcggaaccctggcctcgtccgcggcccagctccctggagcctcgcatcagcgggggcgcccccgcgagctgcgctctccccggccggagcgctcctcctccagcccccagcccgcagggtactttgccctcggagcgaaggaggctccagaactggtagagccgggccatcgggctgggcacctccccgcggcgcccgcagcgcggagtccactgaccggctcaaaggtatggcgttgacggtggatgtggccgggccagcgccctggggcttccgtatcacagggggcagggatttccacacgcccatcatggtgactaaggtggccgagcggggcaaagccaaggacgctgacctccggcctggagacataatcgtggccatcaacggggaaagcgcggagggcatgctgcatgccgaggcccagagcaagatccgccagagcccctcgcccctgcggctgcagctggaccggtctcaggctacgtctccagggcagaccaatggggacagctccttggaagtgctggcgactcgcttccagggctccgtgaggacatacactgagagtcagtcctccttaaggtcctcctactccagcccaacctccctcagcccgagggccggcagccccttctcaccaccaccctctagcagctccctcactggagaggcggccatcagccgcagcttccagagtctggcatgttccccgggcctccccgctgctgaccgcctgtcctactcaggccgccctggaagccgacaggccggcctcggccgcgctggcgactcggcggtgctggtgctgccgccttccccgggccctcgttcctccaggcccagcatggactcggaagggggaagcctcctcctggacgaggactcggaagtcttcaagatgctgcaggaaaatcgcgagggacgggcggccccccgacagtccagctcctttcggctcttgcaggaagccctggaggctgaggagagaggtggcacgccagccttcttgcccagctcactgagcccccagtcctccctgcccgcctccagggccctggccacccctcccaagctccacacttgtgagaagtgcagtaccagcatcgcgaaccaggctgtgcgcatccaggagggccggtaccgccaccccggctgctacacctgtgccgactgtgggctgaacctgaagatgcgcgggcacttctgggtgggtgacgagctgtactgtgagaagcatgcccgccagcgctactccgcacctgccaccctcagctctcgggcctgagcccgccatgccctcagcctgcctcactgctgggccagggtcatgcctatataagttggcatggcagggacaatggtgggcagttgctcttacatgagctaagtttggagacctgaggcccctttgtcctcgctgggtgggccaaggtctgggacctgtcttggactgtgggagactcaccctcaccttgccaggcctctcccctgcaggactggcattgcactagtctgaggtggccactgcctttgatcaacctttgtgtgcgagggtctaagtagggtcgaacacagaagtgggaaggagaggggtgggccaggggctaatggtgtcactgtgtaaagtttttgacatactagctctataaatatatgaatatggacaaaat

SEQ ID NO: 3360 - protein, 352 aa, Homo sapien
MALTVDVAGPAPWGFRITGGRDFHTPIMVTKVAERGKAKDADLRPGDIIVAINGESAEGMLHAEAQSKIRQSPSPLRLQLDRSQATSPGQTNGDSSLEVLATRFQGSVRTYTESQSSLRSSYSSPTSLSPRAGSPFSPPPSSSSLTGEAAISRSFQSLACSPGLPAADRLSYSGRPGSRQAGLGRAGDSAVLVLPPSPGPRSSRPSMDSEGGSLLLDEDSEVFKMLQENREGRAAPRQSSSFRLLQEALEAEERGGTPAFLPSSLSPQSSLPASRALATPPKLHTCEKCSTSIANQAVRIQEGRYRHPGCYTCADCGLNLKMRGHFWVGDELYCEKHARQRYSAPATLSSRA

SEQ ID NO: 3361 - DNA, 1530 bp, Homo sapien
agttcccagctgtccgaaaggtcttcggaacttcggctctaaagcgttcctcagcgccatccgcccggaaacacgagcgacagagaaaaggtccgcgaggccggcagactccagagtggctgggtccgagcgcggggcgggttgccgaagggcctcggcctgggctgcgtgctggagagcggggacggggccgactcaccagaggctgcagcaacaggtccactttgctctccagtctctttctccgacaccgctgaggcggtttcccaccgacttcctttccatacagcaccggcaggcaccggggtgaagggtcataaaaatggcgctggccgctcgtttgctaccccagttcctgcactctcggtcgctgccctgcggggccgtccgactccggactcctgctgtggccgaggtgaggctgccgtcggccacactttgctacttctgccgctgtcgcctcggcttgggagcggcgttatttccacgaagcgctagggccttggcagcctcggcgctacctgcccagggctcccggtggccagtgctcagcagcccgggactccccgcagccttcgcttctttccctgcctgccctcagcgcagctacagcacggaggagaagccccagcagcaccagaaaaccaagatgatcgtcctgggattctccaaccccatcaactgggttaggactcgaattaaggccttccttatctgggcctatttcgacaaagagttcagcatcacagagttctccgagggagcgaagcaggcttttgctcatgtatccaagttgctgtcacagtgtaaatttgatctgttggaagaacttgtggccaaagaggtgctacatgcattgaaagaaaaggttacttcactacctgacaaccataaaaatgcccttgctgctaacatagatgaaattgtatttacatcaacaggaggcatctccatttactatgatgagaaaggaaggaagtttgttaacatcctgatgtgcttttggtatctaaccagtgccaacatccccagtgaaactttaagaggagccagtgtattccaggttaagttggggaatcagaatgtggaaactaaacaacttcttagtgcaagctatgagtttcagagggagttcacacaaggagtaaagcctgactggaccattgcacggattgaacactcaaaattattagaataattttcttggaaaaatcagcttatggactttagcagttgctgtgaaaaactaaggaagaaaaattttggggtcatttgatcttcacttaatctaagtctgtgaattacttttatattattttgaaatactccttgcagtatattggcatgatacagtaaaagcattttccacagattgttatcaccttctttaaaagaagtcaaaatttaaaaaatacaatagcacgttgttggtgtcatattcaataacatttccaatgctacatataattttatagacataataaagaaggtattgaaaaaactaaaaaaaaaaaaaaaaaaaaaaaaaaa

SEQ ID NO: 3362 - protein, 291 aa, Homo sapien
MALAARLLPQFLHSRSLPCGAVRLRTPAVAEVRLPSATLCYFCRCRLGLGAALFPRSARALAASALPAQGSRWPVLSSPGLPAAFASFPACPQRSYSTEEKPQQHQKTKMIVLGFSNPINWVRTRIKAFLIWAYFDKEFSITEFSEGAKQAFAHVSKLLSQCKFDLLEELVAKEVLHALKEKVTSLPDNHKNALAANIDEIVFTSTGGISIYYDEKGRKFVNILMCFWYLTSANIPSETLRGASVFQVKLGNQNVETKQLLSASYEFQREFTQGVKPDWTIARIEHSKLLE

SEQ ID NO: 3363 - DNA, 3837 bp, Homo sapien
gtcgaatggtttgttggcagggtgtcctggtggattggtttctgtaagttcagattctcataaatcgtgtgagcgtcgccgacacctctgagataaaagggcccctttcgactagcctctgctgaaaggacctagaagaatcccttaggatgaagctgagtcttaccaaggtagttaatggctgtcgcctaggaaaaataaaaaacctgggcaaaacaggggaccacaccatggatattccaggctgccttctgtataccaagactggctccgccccacacctcacccatcacacgctgcataatatccacggggttcctgccatggctcagcttacgctgtcatccctagcagaacatcatgaagtcttgacagaatataaagaaggagttggaaagtttataggcatgccagaatcactcttgtactgctccctgcacgatccagtcagcccctgcccggctggttatgtaacaaacaagtctgtgtctgtgtggagtgttgcaggacgagtggaaatgactgtttccaagttcatggcaattcagaaggcccttcagccagactggttccagtgcctctccgatggagaagtatcttgtaaggaagcaacttccataaaaagggtcagaaagtctgttgaccgatcacttcttttcttggataactgtctgcggctgcaggaagagtcagaggttcttcagaagagtgtgatcattggagtgattgaaggtggagatgtgatggaagagaggctgaggtcagcacgagagacagccaagcggcctgtgggtggcttccttctggatggttttcaaggaaatccaacaaccctggaggctagactacgcttgctgtcatcagtcactgcagagctgccggaggacaagccaaggctcatatctggtgttagtcggccagatgaggtgctcgagtgtattgaaagaggagtggacttatttgagagttttttcccttatcaagtaacagagcggggatgtgccctgactttcagttttgattaccagccgaatcctgaagagacactactacaacaaaatggaacacaagaagaaataaaatgtatggatcaaataaagaaaattgaaacaactggttgcaaccaagaaataacatcatttgaaattaatctgaaggaaaaaaagtaccaggaggactttaacccgctggtgagaggatgttcctgttactgctgtaagaatcacactcgggcatacatccaccatctgctggtgaccaatgagctgctggccggagtcctgcttatgatgcacaactttgaacactactttgggtttttccattacatccgggaagcactaaaaagtgacaaactggcacagttgaaagagctcatccacaggcaagcatcttgagatcttgcaaatacaagtctcactcttcacactgagcctgtaccactgttgtaacatgggaagacgtgaagaagaaataatctgagctttaattatttatatttggatataaggtctgcttaaataaagaatctttgtaccaaactgcccacatgagggtgaagagatttcctcaaaagacttaaatgacctggattgatcagagagaattgaactgtgacctttaaaacttctagactaattcttttagttgatagagattcatttagtcaaagacaaaagctttaactgtgagggcacagccttgaagtgggagtgatgagattctgagggacccatgaattggattgaggcttgaggggaaatggtgtgagacgaatgggctctggacatatgcctgttgatttgagaagaaatctggctggtttgagggtttcctttagttcaccctcatactctcaggagactcttctggatacttttgtcttccaccctgccctggcagtgcagccaatcagaaatggctcttgtgacttaactgggcttggatatccctggaatgtggggcttgaacattgctcctgtgatgatcatctgtcccaggtcacactccttcatttgaccacatggcctatttgcaacttctttttagagccaatgtaattgcctgttaggagccagaagtttgcccagctgctttcttctggttgtacagatccattgtggtctgccttccaggctcattaatagtctaactacgtaataactgaagacctatctcttgtgaagattcattctcaatgtgttcacttggacagagccctgcctggcctaacgattagagggttagtctccatcctgctcagatatgactcctgggcaattcacttaacttctccatggctgcttcctgctgaataaatagggacaggcataatggataggaatgaatgaacttttaagatactgtctagctctaaaattggaagaacaaaaagttttagattagagtcatagccttaatagccctagttgtcatcctgggagacaggcaacagtagagatatttgagagcctaaagagaggtttggcctgtgggtttttaagtggttattgaattggtatcaggagatcctgaggctggtaggggaaggtaattctttctaagttacctctgtatttttcaagttttctataaggaatacacatacacccacatgcacacaccatagtttttatacaaacagcaataacaaaaccaaaaagatgcccctttttttgtagggataagaaatacatttgttttatacttctatgctatattttgctattcaaaatttagtgggcattacttaacattgtttctaattattttgtggctgctgtatgttttatgtgttgggagcccattgtattaggccgttcttggattgctataaagaaatacctgagactgggtaatttggttttttggttttttggggttttttttgagacggagccttgctctgtcgcccaggctggagtgcagtggcgcgatctcggctctatgcaacctccacctcctgggttcatgccattctcctgcctcagcctcccgagtagctgggactacaggcgcccgccaccatgcctggctaattttttatatttttagtagagatggggtttcaccgtatgagccaggatggtctcgatctcctgacctcatgatccacaagactgggtaatctgtaaagaaaagaggtttaattggctcatggctctgcaggctttacaggaagcatggtactggcgtctgcttggtttctggggaggcctccggaagcttatagtcatggcagaaggtgaagggggagcaggcacatcacatgacaaaagcaggaacaagactcagagcaagaagtcacttatcaccaaggggatggcccaggccattcatgagggatccacctttgtgctccaaacacctcccaccaggccccacctccagtattggggattacatttcaacttgaggtttgggcgggaacaaatagtcaaattatattacccatctacatggttttctttttcttagtatgggagtgtccatgaataaattcatgggcatcctcataactcttccatgaatggcaaggggtacttatggaaaacagttttccaaagatctgattgttttgaaatgtgttagattggacttgttcaaatgttcatatttttgttctatgctaaatgcatcgttaggggagtagtggtaaatattccagaatccatatgaaattcatgagtttatttatgtctaaaacactgaaaactgtgtccaatatcgttcagtttcctgggtctttttcttattagcacatttgagaaaaatattcctttcctttattgtagtaaatctattaaaggcaatagccaataaaacatttttaatttt

SEQ ID NO: 3364 - protein, 415 aa, Homo sapien
MKLSLTKVVNGCRLGKIKNLGKTGDHTMDIPGCLLYTKTGSAPHLTHHTLHNIHGVPAMAQLTLSSLAEHHEVLTEYKEGVGKFIGMPESLLYCSLHDPVSPCPAGYVTNKSVSVWSVAGRVEMTVSKFMAIQKALQPDWFQCLSDGEVSCKEATSIKRVRKSVDRSLLFLDNCLRLQEESEVLQKSVIIGVIEGGDVMEERLRSARETAKRPVGGFLLDGFQGNPTTLEARLRLLSSVTAELPEDKPRLISGVSRPDEVLECIERGVDLFESFFPYQVTERGCALTFSFDYQPNPEETLLQQNGTQEEIKCMDQIKKIETTGCNQEITSFEINLKEKKYQEDFNPLVRGCSCYCCKNHTRAYIHHLLVTNELLAGVLLMMHNFEHYFGFFHYIREALKSDKLAQLKELIHRQAS

SEQ ID NO: 3365 - DNA, 3221 bp, Homo sapien
tgtcaaaagcctgcacacgagacccccgtgggccaggactgacttcctccccacacagggctgggcggggcaagcaggaaggagcctgttacagtcaaggtgacgcatccttgccgggccagcccgaacagcagctgggtcggcaagcgacaggagcacgggtcatcttttccccagaggcgtcggaatggacctgtgccacccagagcccgcggagctgagcagcggggagacggaagagttacagaggatcaagtggcaccgaaagcagctcctggaggacatccagaagctgaaggatgagattgcagatgtgtttgcccaaatcgactgcttcgagagtgcggaggagagccggatggcccagaaggagaaggagctgtgtattgggcgcaagaagttcaacatggaccccgccaagggtatccagtatttcattgagcacaagctgctgacccctgacgtccaggacattgcacggttcctgtataaaggcgagggcctcaacaagacagccattggtacctacctgggggagagggatcccatcaacctgcaggtcctccaggccttcgtggactgccacgagttcgccaacctcaacctcgtccaggccctcaggcagttcctgtggagcttccggctgccgggcgaggcccagaagatagaccggatgatggaggcctttgccactcgatactgcctctgcaacccaggcgtcttccagtccacagacacctgctacgtgttgtccttctccatcatcatgctcaacaccagcctccacaatcccaacgtccgggacaggccgcctttcgagcgctttgtgtccatgaaccgcggcatcaacaatggtagcgacctgcccgaggaccagctgcggaacctcttcgacagcatcaagagtgagccattctccatccctgaggacgacggcaatgacctcactcacaccttcttcaatccagaccgggagggttggctgctcaagctagggggccgcgtgaagacgtggaaacggcgctggttcatcctgaccgacaactgcctctactacttcgagttcaccactgacaaggagccacggggaattatacctcttgagaacctctcggtgcagaaggtggatgaccccaagaagccattctgcctggagctctacaaccctagctgccgaggccagaaaatcaaggcctgcaagaccgatggcgacggcagggtggtggagggcaagcacgaatcgtaccgcatctcagccaccagtgccgaggaacgtgaccagtggatcgagtccatccgagccagcatcacccgtgtccccttctacgacctggtctctactcggaagaagaagattgccagcaagcagtgagattcctggaggtggcactgggggctggtcaccctgagagtcccatcgcctgcagcacctggagacccacctcccaccccagtgcactcttttgggccacagacatcattgctgttccccgttacctcgagctgactctagaggggaaggcagagctcaggagggtgggtgggagctgcagtgggctcagagtccagcaatgaggccccctggcctgggcacccagctgcaggcccctgccctacgtgcactacaggaaggggtgaggagagcagccagaggaaaaccagccccagaatgctgcaacttctcttctctctggacttcggtgtcctcggctctgaaggcgctctctgcacttagatgctgtcagccctcaacgtaggaggggccgtggggtccctaagtgattcttctccctggcaaggctcttccttttcagggatatctctgccaacccttcccctgtcctcgggttgggcttggccctctctgcctgagagagctcagcacacacacagctcagacccacggacaggaccccgggacagaaccccgggagcactgccctaggagcctggaccccacgagctcagtcccagctctgcctctgactcgctgtgtaccctctgccaagtcatgcccattctctagttcttgcaaaactgcagtgtttggactagaaacgtattggcccctgctagccctgtgctccagcttccagctggagatggcagccgttatttgcggagcccaggctgactccggattcaacgttgctggggagagaaaagcagtatagactccaccttccaggatgtccatttcggggagaggagcaggtgggaccctcaagaaaatgacggagaacatcccagacagatgggactcaagcaggatgggtgctatatccaagaagccaagaagggagagtttcgtgcactgtggttaacaggagggccgcctggaggcagtggctgagccagaaagtaacacagagctcatgcttggagagatagagtcttggccatggctttcctgcaagaccactgacgagcagtcccatggtgataaagggcagcccggcgggtcccagcatctcgagaccctctgcagaagtattatcagagtagagctgacttccagtacccgggcagccagctctgtctccagggaggcctggcctggaggaggagtccactaacaggaaacacttctcaccccctcacacaggcccaggggagcccctggagggaaattccttggcaggggaacaggaaatgtggtcgcctctgccccactgccagcctgagtgggcaaggaagcaggtggatcccccagaaggaaccgcagctcgcgaggcacctctcctcgtccccacccacccccacatttgcacaccttccacagggtcaggatggagtagctgccttgcgaggtggtgagactcctgtctctggaggtctgcaagcactggtagtgatattgcagcagacaaggtctgggttgggcgtctgcaggaggagaccttgtgggacatctgaggacatccgcagattcttgtcagcctgtgaactaggccctgcctctgtcacctcattggtccatgaaggagcagccaggggtggtggaaggagcactgggctaggggtcaggggtcagagattctgtcctgctcctgggatgcactggctactcccttagtctactcccttcccctctctggtcctcagcttcctccatcatggaggagatgggatcatggattttctgggcataagtggctgttctgggagtcattccaaagagagaataaaactcctgatccaaaaaaaaaaaaaaaaaaaaa

SEQ ID NO: 3366 - protein, 394 aa, Homo sapien
MDLCHPEPAELSSGETEELQRIKWHRKQLLEDIQKLKDEIADVFAQIDCFESAEESRMAQKEKELCIGRKKFNMDPAKGIQYFIEHKLLTPDVQDIARFLYKGEGLNKTAIGTYLGERDPINLQVLQAFVDCHEFANLNLVQALRQFLWSFRLPGEAQKIDRMMEAFATRYCLCNPGVFQSTDTCYVLSFSIIMLNTSLHNPNVRDRPPFERFVSMNRGINNGSDLPEDQLRNLFDSIKSEPFSIPEDDGNDLTHTFFNPDREGWLLKLGGRVKTWKRRWFILTDNCLYYFEFTTDKEPRGIIPLENLSVQKVDDPKKPFCLELYNPSCRGQKIKACKTDGDGRVVEGKHESYRISATSAEERDQWIESIRASITRVPFYDLVSTRKKKIASKQ

SEQ ID NO: 3367 - DNA, 2206 bp, Homo sapien
cgcggggccagggcggcggcccccagggagttggcaggatggcagagggcaaggcaggcggcgcggccggcctcttcgccaagcaggtgcagaagaagtttagcagggcccaggagaaggtgctgcagaaattggggaaagctgtagaaaccaaagatgaacgatttgaacaaagcgctaacaacttctaccaacaacaggcagaaggccacaagctgtacaaggacctgaagaacttccttagtgcagtcaaagtgatgcatgaaagttcaaaaagagtgtcagaaaccctgcaggagatctacagcagcgagtgggatggtcatgaggagctgaaggccatcgtatggaataatgatctcctttgggaagactacgaggagaaactggctgaccaggctgtaaggaccatggaaatctatgttgcccagttcagtgaaattaaggagagaattgccaagcggggtcggaaactcgtggactatgacagtgcccgacaccacctggaggcagtgcagaatgccaagaagaaagatgaggccaagactgccaaggcagaggaagagttcaacaaagcccagactgtgtttgaagatctgaaccaagaactactagaggagctgcctattctttataatagtcgtattggctgctatgtgaccatcttccaaaacatttccaacttgagggatgtcttctacagggaaatgagcaagctgaaccacaatctctacgaggtgatgagcaaactggagaagcaacattccaataaagtctttgtggtgaagggactgtcaagcagcagcaggcgctctttagtcatttctcccccagttcgaacagctacagtctccagtcctcttacctcacctactagtccctctacactttccttgaagagtgagagtgaatctgtctcagcaactgaagatctggcacctgatgcagcccaaggggaagacaattctgagatcaaggagctcttagaagaggaggaaatagagaaggaaggatctgaagcaagctcctctgaggaagatgagcctctaccagcctgcaatggccccgcccaggcccagccctctcctaccactgaaagggccaagtcccaggaggaagttctccccagctccacaactccatcaccaggcggagccctgagcccttcagggcagccttcatcatctgccacagaagtagtcctccgaacccgcaccgcaagtgaaggatctgaacaaccaaagaagagagcctctatccagaggacctcagcaccccctagtaggcctcctccacccagagccactgcaagccccaggccctcctcagggaacataccttccagccctacagcctctggagggggttcacccaccagccctagggcctccttggggactgggactgcaagtcctaggacctccctagaggtctctcctaatccagaaccaccagagaagccagtaagaactcctgaggccaaagaaaatgaaaacatccacaatcagaaccctgaagaactttgtacttcccccaccttaatgacatctcaggttgcttcagagcctggagaggcaaagaagatggaagacaaggaaaaggataataagcttatctcagctgactcctcggagggccaagaccagcttcaagtctccatggtaccagaaaacaacaacctcacagcacctgaacctcaagaagaggtatccacaagtgaaaatccacaactctgaagagaaactaccaagactcctcctgccccaaacctcgccagagaagctcttcaaccagagggtataggtcagagggatataagagccagcatccatccctgggttctcagtaggaatgctggtgctgtctaaagacctggcattaatggaggcggaggagcagccttacgggagggatggagggaggcaggctggggagaagagaacattagactcagggaatatttaattctggttttagcattattagaataagactttatacattaactaaagtggagctttaatcactataaaaagcaaaagtatctatagacacagacacttgcctatacagagacataaccacacacactcagaggatagtgaacaaatctgtctttgacttacgacccattttgcaagacttaaagccggaagaacacattttcagattgttaaataaagtctgattctgactaaaaaaaaaa

SEQ ID NO: 3368 - protein, 565 aa, Homo sapien
MAEGKAGGAAGLFAKQVQKKFSRAQEKVLQKLGKAVETKDERFEQSANNFYQQQAEGHKLYKDLKNFLSAVKVMHESSKRVSETLQEIYSSEWDGHEELKAIVWNNDLLWEDYEEKLADQAVRTMEIYVAQFSEIKERIAKRGRKLVDYDSARHHLEAVQNAKKKDEAKTAKAEEEFNKAQTVFEDLNQELLEELPILYNSRIGCYVTIFQNISNLRDVFYREMSKLNHNLYEVMSKLEKQHSNKVFVVKGLSSSSRRSLVISPPVRTATVSSPLTSPTSPSTLSLKSESESVSATEDLAPDAAQGEDNSEIKELLEEEEIEKEGSEASSSEEDEPLPACNGPAQAQPSPTTERAKSQEEVLPSSTTPSPGGALSPSGQPSSSATEVVLRTRTASEGSEQPKKRASIQRTSAPPSRPPPPRATASPRPSSGNIPSSPTASGGGSPTSPRASLGTGTASPRTSLEVSPNPEPPEKPVRTPEAKENENIHNQNPEELCTSPTLMTSQVASEPGEAKKMEDKEKDNKLISADSSEGQDQLQVSMVPENNNLTAPEPQEEVSTSENPQL

SEQ ID NO: 3369 - DNA, 3434 bp, Homo sapien
gccccgctgcccacctgcccgcctgcccacctgcccaggtgcgagtgcagccccgcgcgccggcctgagagccctgtggacaacctcgtcattgtcaggcacagagcggtagaccctgcttctctaagtgggcagcggacagcggcacgcacatttcacctgtcccgcagacaacagcaccatctgcttgggagaaccctctcccttctctgagaaagaaagatgtcgaatgggtattccacagacgagaatttccgctatctcatctcgtgcttcagggccagggtgaaaatgtacatccaggtggagcctgtgctggactacctgacctttctgcctgcagaggtgaaggagcagattcagaggacagtcgccacctccgggaacatgcaggcagttgaactgctgctgagcaccttggagaagggagtctggcaccttggttggactcgggaattcgtggaggccctccggagaaccggcagccctctggccgcccgctacatgaaccctgagctcacggacttgccctctccatcgtttgagaacgctcatgatgaatatctccaactgctgaacctccttcagcccactctggtggacaagcttctagttagagacgtcttggataagtgcatggaggaggaactgttgacaattgaagacagaaaccggattgctgctgcagaaaacaatggaaatgaatcaggtgtaagagagctactaaaaaggattgtgcagaaagaaaactggttctctgcatttctgaatgttcttcgtcaaacaggaaacaatgaacttgtccaagagttaacaggctctgattgctcagaaagcaatgcagagattgagaatttatcacaagttgatggtcctcaagtggaagagcaacttctttcaaccacagttcagccaaatctggagaaggaggtctggggcatggagaataactcatcagaatcatcttttgcagattcttctgtagtttcagaatcagacacaagtttggcagaaggaagtgtcagctgcttagatgaaagtcttggacataacagcaacatgggcagtgattcaggcaccatgggaagtgattcagatgaagagaatgtggcagcaagagcatccccggagccagaactccagctcaggccttaccaaatggaagttgcccagccagccttggaagggaagaatatcatcatctgcctccctacagggagtggaaaaaccagagtggctgtttacattgccaaggatcacttagacaagaagaaaaaagcatctgagcctggaaaagttatagttcttgtcaataaggtactgctagttgaacagctcttccgcaaggagttccaaccatttttgaagaaatggtatcgtgttattggattaagtggtgatacccaactgaaaatatcatttccagaagttgtcaagtcctgtgatattattatcagtacagctcaaatccttgaaaactccctcttaaacttggaaaatggagaagatgctggtgttcaattgtcagacttttccctcattatcattgatgaatgtcatcacaccaacaaagaagcagtgtataataacatcatgaggcattatttgatgcagaagttgaaaaacaatagactcaagaaagaaaacaaaccagtgattccccttcctcagatactgggactaacagcttcacctggtgttggaggggccacgaagcaagccaaagctgaagaacacattttaaaactatgtgccaatcttgatgcatttactattaaaactgttaaagaaaaccttgatcaactgaaaaaccaaatacaggagccatgcaagaagtttgccattgcagatgcaaccagagaagatccatttaaagagaaacttctagaaataatgacaaggattcaaacttattgtcaaatgagtccaatgtcagattttggaactcaaccctatgaacaatgggccattcaaatggaaaaaaaagctgcaaaagaaggaaatcgcaaagaacgtgtttgtgcagaacatttgaggaagtacaatgaggccctacaaattaatgacacaattcgaatgatagatgcgtatactcatcttgaaactttctataatgaagagaaagataagaagtttgcagtcatagaagatgatagtgatgagggtggtgatgatgagtattgtgatggtgatgaagatgaggatgatttaaagaaacctttgaaactggatgaaacagatagatttctcatgactttattttttgaaaacaataaaatgttgaaaaggctggctgaaaacccagaatatgaaaatgaaaagctgaccaaattaagaaataccataatggagcaatatactaggactgaggaatcagcacgaggaataatctttacaaaaacacgacagagtgcatatgcgctttcccagtggattactgaaaatgaaaaatttgctgaagtaggagtcaaagcccaccatctgattggagctggacacagcagtgagttcaaacccatgacacagaatgaacaaaaagaagtcattagtaaatttcgcactggaaaaataaatctgcttatcgctaccacagtggcagaagaaggtctggatattaaagaatgtaacattgttatccgttatggtctcgtcaccaatgaaatagccatggtccaggcccgtggtcgagccagagctgatgagagcacctacgtcctggttgctcacagtggttcaggagttatcgaacatgagacagttaatgatttccgagagaagatgatgtataaagctatacattgtgttcaaaatatgaaaccagaggagtatgctcataagattttggaattacagatgcaaagtataatggaaaagaaaatgaaaaccaagagaaatattgccaagcattacaagaataacccatcactaataactttcctttgcaaaaactgcagtgtgctagcctgttctggggaagatatccatgtaattgagaaaatgcatcacgtcaatatgaccccagaattcaaggaactttacattgtaagagaaaacaaagcactgcaaaagaagtgtgccgactatcaaataaatggtgaaatcatctgcaaatgtggccaggcttggggaacaatgatggtgcacaaaggcttagatttgccttgtctcaaaataaggaattttgtagtggttttcaaaaataattcaacaaagaaacaatacaaaaagtgggtagaattacctatcacatttcccaatcttgactattcagaatgctgtttatttagtgatgaggattagcacttgattgaagattcttttaaaatactatcagttaaacatttaatatgattatgattaatgtattcattatgctacagaactgacataagaatcaataaaatgattgttttactctgcaaaaaaaaaaaaaa

SEQ ID NO: 3370 - protein, 1025 aa, Homo sapien [sequence omitted]

SEQ ID NO: 3371 - DNA, 1265 bp, Homo sapien
attggcgggcacgccccctcgcccgcggccccctccccgcctctctccaccgcctcctctggctccccggtcagagggccggagcgagaagatggcgaagacgtacgattatctcttcaagctcctgctgatcggcgactcgggggtaggcaagacctgcctcctgttccgcttctcagaggacgccttcaacaccaccttcatctccaccatcggaattgattttaaaattagaacgatagaactagatggaaagaaaattaagcttcagatatgggacacagcgggtcaggaaagattccgaacaatcacgacagcgtactacagaggagccatgggcattatgctggtctatgacatcacaaatgaaaaatcctttgacaatattaaaaattggatcagaaacattgaagagcatgcctcttccgatgtcgaaagaatgatcctgggtaacaaatgtgatatgaatgacaaaagacaagtgtcaaaagaaagaggggagaagctagcaattgactatgggattaaattcttggagacaagcgcaaaatccagtgcaaatgtagaagaggcattttttacacttgcacgagatataatgacaaaactcaacagaaaaatgaatgacagcaattcagcaggagcaggtggaccagtgaaaataacagaaaaccgatcaaagaagaccagtttctttcgttgctcgctactttgatgaactctttctgagagactgcagcacacctagagggccctttcctgcttctctgaaagcacaggtcacccagcctcagaatcacacctcccggctgctgctgagagcaccactgaacttagacctctcaacacagtatgccaagtggattccagcctcatggcctagcaaaagaacagactccctttttcaaacatggaagcaatgaagtggagacacatgcaggacctaactcgttttttccttgttttattacctgttgcagaagcggttatctttcttttttactttgcacatcagtgttagcctttccctatttcagcacaatcttagactcatatttgcacacttttgtgtcgtgaagttctagacaaatttgtacatgtggcaatgttaaaagagcatttacagcagaggttaatatactaaaattaaagggtatttggtctggttcatatggtcaaatattactgccttggtagcatttatttaagggctttttcttaaataagaatcattaaagtcattaaaaaatttactgaaatgccca

SEQ ID NO: 3372 - protein, 207 aa, Homo sapien
MAKTYDYLFKLLLIGDSGVGKTCLLFRFSEDAFNTTFISTIGIDFKIRTIELDGKKIKLQIWDTAGQERFRTITTAYYRGAMGIMLVYDITNEKSFDNIKNWIRNIEEHASSDVERMILGNKCDMNDKRQVSKERGEKLAIDYGIKFLETSAKSSANVEEAFFTLARDIMTKLNRKMNDSNSAGAGGPVKITENRSKKTSFFRCSLL

SEQ ID NO: 3373 - DNA, 1924 bp, Homo sapien
cgcccgggcaggttagaattcagcgaccgcttaattctaggctcagtcccgacgtggaactcagcagcggaggctggacgcttgcatggcgcttgagagattccatcgtgcctggctcacataagcgcttcctggaagtgaagtcgtgctgtcctgaacgcgggccaggcagctgcggcctgggggttttggagtgatcacgaatgagcaaggcgtttgggctcctgaggcaaatctgtcagtccatcctggctgagtcctcgcagtccccggcagatcttgaagaaaagaaggaagaagacagcaacatgaagagagagcagcccagagagcgtcccagggcctgggactaccctcatggcctggttggtttacacaacattggacagacctgctgccttaactccttgattcaggtgttcgtaatgaatgtggacttcaccaggatattgaagaggatcacggtgcccaggggagctgacgagcagaggagaagcgtccctttccagatgcttctgctgctggagaagatgcaggacagccggcagaaagcagtgcggcccctggagctggcctactgcctgcagaagtgcaacgtgcccttgtttgtccaacatgatgctgcccaactgtacctcaaactctggaacctgattaaggaccagatcactgatgtgcacttggtggagagactgcaggccctgtatacgatccgggtgaaggactccttgatttgcgttgactgtgccatggagagtagcagaaacagcagcatgctcaccctcccactttctctttttgatgtggactcaaagcccctgaagacactggaggacgccctgcactgcttcttccagcccagggagttatcaagcaaaagcaagtgcttctgtgagaactgtgggaagaagacccgtgggaaacaggtcttgaagctgacccatttgccccagaccctgacaatccacctcatgcgattctccatcaggaattcacagacgagaaagatctgccactccctgtacttcccccagagcttggatttcagccagatccttccaatgaagcgagagtcttgtgatgctgaggagcagtctggagggcagtatgagctttttgctgtgattgcgcacgtgggaatggcagactccggtcattactgtgtctacatccggaatgctgtggatggaaaatggtcttgcttcaatgactccaatatttgcttggtgtcctgggaagacatccagtgtacctacggaaatcctaactaccactggcaggaaactgcatatcttctggtttacatgaagatggagtgctaatggaaatgcccaaaaccttcagagattgacacgctgtcattttccatttccgttcctggatctacggagtcttctaagagattttgcaatgaggagaagcattgttttcaaactatataactgaccttatttataattagggatattatcaaaatatgtaaccatgaggcccctcaggtcctgatcagtcagaatggatgctttcaccagcagacccggccatgtggctgctcggtcctgggtgctcgctgctgtgcaagacattagccctttagttatgagcctgtgggaacttcaggggttcccagtggggagagcagtggcagtgggaggcatctgggggccaaaggtcagtggcagggggtatttcagtattatacaactgctgtgaccagacttgtatactggctgaatatcagtgctgtttgtaatttttcactttgagaaccaacattaattccatatgaatcaagtgttttgtaactgctattcatttattcagcaaatatttattgagcatctcttctccataagatagtgtgataaacacggtcatgaataaagttattttccccgaaaaaaaaaaaaaaaaaaaaaaaaaa

SEQ ID NO: 3374 - protein, 372 aa, Homo sapien
MSKAFGLLRQICQSILAESSQSPADLEEKKEEDSNMKREQPRERPRAWDYPHGLVGLHNIGQTCCLNSLIQVFVMNVDFTRILKRITVPRGADEQRRSVPFQMLLLLEKMQDSRQKAVRPLELAYCLQKCNVPLFVQHDAAQLYLKLWNLIKDQITDVHLVERLQALYTIRVKDSLICVDCAMESSRNSSMLTLPLSLFDVDSKPLKTLEDALHCFFQPRELSSKSKCFCENCGKKTRGKQVLKLTHLPQTLTIHLMRFSIRNSQTRKICHSLYFPQSLDFSQILPMKRESCDAEEQSGGQYELFAVIAHVGMADSGHYCVYIRNAVDGKWSCFNDSNICLVSWEDIQCTYGNPNYHWQETAYLLVYMKMEC

SEQ ID NO: 3375 - DNA, 1719 bp, Homo sapien
ggcacgaggcttttattcaactgaggtgtcagtttcttccactgaaaatgctgtcagttctgacctccgggcaggggatgtacctgttttatctttgagtaatagcagtgagaatgccgcctctgtgatcagctacagtggctctgcaccctcggtcattgtacacagcagccagttttcatcggtgatcatgcacagcaatgccattgctgccatgaccagcagcaaccacagagccttttcagacccagctgtcagtcagtccctgaaagatgacagtaagcccgagccagataaagtgggtaggtttgcaagcagacccaaaagcattaaggagaaaaagaaaactacatcacataccaggggagaaataccggaggagtcaaactatgttgctgatcctggaggatcactgagcaaaaccacaaatattgctgaagaaaccagcaaaattgaaacctacattgcaaaacctgctctgccgggaacctccacaaatagtaatgttgcacccctttgccaaataacagtgaaaattggaaacgaagccattgtgaaaaggcacattctaggatctaaattgttttataaaagagggagaagacccaagtatcagatgcaggaggagcctttgccacaggggaatgacccagaacccagtggagacagcccactcgggctttgccaatccgagtgcatggagatgagtgaagtgttcgatgacgcaagtgaccaggattccactgacaaaccgtggcgcccttactacaactacaaacccaaaaagaaatccagacagttgaaaaaaatgaggaaagtcaactggaggaaggagcacggaaacaggagcccgagccataaatgtaaatacccagcagaactggattgcgccgtggggaaggctcctcaggataaaccctttgaggaagaagaaactaaagagatgcccaagctgcagtgtgaactctgtgatggagacaaagcagtgggggctggaaaccaaggaaggccccaccgacatcttacttctcggccatatgcctgcgagctctgcgccaagcagttccagagcccttccacactcaaaatgcacatgagatgtcacaccggggagaagccataccagtgcaagacctgcggacggtgcttttcggtgcaaggaaacttacagaaacatgaacgcatccacctgggcttgaaggagttcgtctgtcagtattgcaacaaggcattcaccttgaatgagaccctcaaaatccatgaaagaatccatactggagaaaagcgttaccactgtcagttctgctttcagagatttttgtatctctccaccaaaaggaatcacgagcagaggcatattcgggagcataatgggaagggctatgcctgcttccagtgccccaaaatttgcaaaacagctgctgcccttggaatgcaccaaaagaaacacttattcaaaagcccaagtcagcaggagaaaataggtgacgtgtgccacgaaaactcaaatcccttggagaatcaacatttcattggttcagaagacaatgaccaaaaggataacatacaaaccggtgtggaaaatgttgtcctttgagtggcaagaattagaaaaatcttcaaaaatatagttggtggttttttttagttatgatttaagtttagtttcattttgtccatgtgacagtcatgaaggagtgaaaaaaaaaaaaaaaaaaa

SEQ ID NO: 3376 - protein, 326 aa, Homo sapien
MQEEPLPQGNDPEPSGDSPLGLCQSECMEMSEVFDDASDQDSTDKPWRPYYNYKPKKKSRQLKKMRKVNWRKEHGNRSPSHKCKYPAELDCAVGKAPQDKPFEEEETKEMPKLQCELCDGDKAVGAGNQGRPHRHLTSRPYACELCAKQFQSPSTLKMHMRCHTGEKPYQCKTCGRCFSVQGNLQKHERIHLGLKEFVCQYCNKAFTLNETLKIHERIHTGEKRYHCQFCFQRFLYLSTKRNHEQRHIREHNGKGYACFQCPKICKTAAALGMHQKKHLFKSPSQQEKIGDVCHENSNPLENQHFIGSEDNDQKDNIQTGVENVVL

SEQ ID NO: 3377 - DNA, 1196 bp, Homo sapien
acctttgagcgatggcggcgtctggggaaccccagaggcagtggcaagaggaggtggcggcggtggtagtggtgggctcctgcatgaccgacctggtcagtcttacttctcgtttgccaaaaactggagaaaccatccatggacataagttttttattggctttggagggaaaggtgccaaccagtgtgtccaagctgctcggcttggagcaatgacgtccatggtgtgtaaggttggcaaagattcttttggcaatgattatatagaaaacttaaaacagaatgatatttctacagaatttacatatcagactaaagatgctgctacaggaactgcttctataattgtcaataatgaaggccagaatatcattgtcatagtggctggagcaaatttacttttgaatacggaggatctgagggcagcagccaatgtcattagcagagccaaagtcatggtctgccagctcgaaataactccagcaacttctttggaagccctaacaatggcccgcaggagtggagtgaaaaccttgttcaatccagcccctgccattgctgacctggatccccagttctacaccctctcagatgtgttctgctgcaatgaaagtgaggctgagattttaactggcctcacggtgggcagcgctgcagatgctggggaggctgcattagtgctcttgaaaaggggctgccaggtggtaatcattaccttaggggctgaaggatgtgtggtgctgtcacagacagaacctgagccaaagcacattcccacagagaaagtcaaggctgtggataccacgggtgctggtgacagctttgtgggagctctggccttctacctggcttactatccaaatctgtccttggaagacatgctcaacagatccaatttcattgcagcagtcagtgtccaggctgcaggaacacagtcatcttacccttacaaaaaagaccttccgcttactctgttttgattgctattagtcccaaaataaatatacctgggaataaaatgtacttgggggtggctgctcctggctaatgcttattagaaaatgtcctcgtcccctttctttgcaaatattagttcttttacgaagtcatcctcaagcttcaatttatttataacgatgattcttttgctttccatgcatttgcacaaaacaaccagaattaaagattccacaacc

SEQ ID NO: 3378 - protein, 322 aa, Homo sapien [sequence omitted]

SEQ ID NO: 3379 - DNA, 2740 bp, Homo sapien
ggcggcggcggcggcggcgaagaactgttccttccacctcttcagccccggcaggacgggggcggccgccgcgaacccggggcggggacagcacgcagcctcgaggcgcgcacccccgcccggcagcggccccgacacccggggcgagcgggaaaacggcaacggcggcggcggcggcggcggcgggggaaggatgcaggggaagaagccgggcggttcgtcgggcggcggccggagcggcgagctgcagggggacgaggcgcagaggaacaagaaaaagaaaaagaaggtgtcctgcttttccaacatcaagatcttcctggtgtccgagtgcgccctgatgctggcgcagggcacggtgggcgcctacctggtgagcgtcctgaccaccctggagcgtaggttcaacctgcagagcgctgacgtgggtgtgatcgctagcagcttcgagatcgggaacctggcgctcatcctcttcgtgagctacttcggggcacgcgggcaccggccgcgcctgatcggctgcggcggcatcgtcatggcgctgggcgcgctgctgtcggcgctgcccgagttcctgacccaccagtacaagtacgaggcgggcgagatccgctggggcgccgagggccgcgacgtctgcgcagccaacggctcgggcggcgacgaggggcccgaccccgacctcatctgccgcaaccggacggctaccaacatgatgtacttgctgctcattggggcccaggtgctcctgggcatcggtgctacccctgtgcagcccctgggcgtctcctactacgacgaccacgtgcggaggaaggactcctcgctctatataggaatcctgttcacgatgctggtatttggaccagcctgcgggtttatcctgggctctttctgtaccaaaatctacgtggatgcggtcttcattgacacaagtaacctggacatcactccggacgacccccgctggatcggagcctggtggggtggctttctgctctgcggtgccttactcttcttctcttccctcttgatgtttgggtttccacagtccctgcccccgcactcagaccccgccatggaaagcgagcaggccatgctctccgaaagagaatacgagagacccaagcccagcaacggggtcctgaggcaccccctggagccagacagcagtgcctcctgtttccagcagctgagagtgatcccgaaggtcaccaagcacctgctctcaaaccctgtgttcacctgcatcatcctggccgcctgcatggagattgcagtggtggctggcttcgctgcctttttggggaagtacctggagcagcagtttaacctcaccacctcttctgccaaccagctgcttgggatgactgcgatcccgtgtgcttgtctgggtatcttcctgggaggtcttttggtgaagaagctcagcctgtctgccctgggggccattcggatggccatgctcgtcaacctggtgtccactgcttgctacgtctccttcctcttcctgggctgcgacactggccctgtggctggggttactgttccctatggaaacagcacagcacctggctcagccctggacccctactcgccctgcaataataactgtgaatgccaaaccgattccttcactccagtgtgtggggcagatggcatcacctacctgtctgcctgctttgctggctgcaacagcacgaatctcacgggctgtgcgtgcctcaccaccgtccctgctgagaacgcaaccgtggttcctggaaaatgccccagtcctgggtgccaagaggccttcctcactttcctctgtgtgatgtgtatctgcagcctgatcggtgccatggcacagacaccctcagtcatcatcctcatcaggacagtcagccctgaactcaagtcttacgctttgggagttctttttctcctccttcgtttgttgggcttcatccctccacccctcatcttcggggctggcatcgactccacctgcctgttctggagcacgttctgtggggagcaaggcgcctgcgtcctctacgacaatgtggtctaccgatacctgtatgtcagcatcgccatcgcgctcaaatccttcgccttcatcctgtacaccaccacgtggcagtgcctgaggaaaaactataaacgctacatcaaaaaccacgagggcgggctgagcaccagtgagttctttgcctctactctgaccctagacaacctggggagggaccctgtgcccgcaaaccagacacataggacaaagtttatctataacctggaagaccatgagtggtgtgaaaacatggagtccgttttatagtgactaaaggagggctgaactctgtattagtaatccaagggtcatttttttcttaaaaaaagaaaaaaaggttccaaaaaaaaccaaaactcagtacacacacacaggcacagatgcacacacacgcagacagacacaccgactttgtcctttttctcagcatcagagccagacaggattcagaataaggagagaatgacatcgtgcggcagggtcctggaggccactcgcgcggctgggccacagagtctactttgaaggcacctcatggttttcaggatgctgacagctgcaagcaacaggcactgccaaattcagggaacagtggtggccagcttggaggatggacatttctggatacacatacacatacaaaacagaaaacattttttaaaagaagtttcctaaaataaa

SEQ ID NO: 3380 - protein, 710 aa, Homo sapien
MQGKKPGGSSGGGRSGELQGDEAQRNKKKKKKVSCFSNIKIFLVSECALMLAQGTVGAYLVSVLTTLERRFNLQSADVGVIASSFEIGNLALILFVSYFGARGHRPRLIGCGGIVMALGALLSALPEFLTHQYKYEAGEIRWGAEGRDVCAANGSGGDEGPDPDLICRNRTATNMMYLLLIGAQVLLGIGATPVQPLGVSYYDDHVRRKDSSLYIGILFTMLVFGPACGFILGSFCTKIYVDAVFIDTSNLDITPDDPRWIGAWWGGFLLCGALLFFSSLLMFGFPQSLPPHSDPAMESEQAMLSEREYERPKPSNGVLRHPLEPDSSASCFQQLRVIPKVTKHLLSNPVFTCIILAACMEIAVVAGFAAFLGKYLEQQFNLTTSSANQLLGMTAIPCACLGIFLGGLLVKKLSLSALGAIRMAMLVNLVSTACYVSFLFLGCDTGPVAGVTVPYGNSTAPGSALDPYSPCNNNCECQTDSFTPVCGADGITYLSACFAGCNSTNLTGCACLTTVPAENATVVPGKCPSPGCQEAFLTFLCVMCICSLIGAMAQTPSVIILIRTVSPELKSYALGVLFLLLRLLGFIPPPLIFGAGIDSTCLFWSTFCGEQGACVLYDNVVYRYLYVSIAIALKSFAFILYTTTWQCLRKNYKRYIKNHEGGLSTSEFFASTLTLDNLGRDPVPANQTHRTKFIYNLEDHEWCENMESVL

SEQ ID NO: 3381 - DNA, 2770 bp, Homo sapien
gagtctggccgcagtcgcggcagtggtggcttcccatccccaaaaggcgccctccgactccttgcgccgcactgctcgccgggccagtccggaaacgggtcgtggagctccgcaccactcccgctggttcccgaaggcagatcccttctcccgagagttgcgagaaactttcccttgtccccgacgctgcagcggctcgggtaccgtggcagccgcaggtttctgaaccccgggccacgctccccgcgcctcggcttcgcgctcgtgtagatcgttccctctctggttgcacgctggggatcccggacctcgattctgcgggcgagatgcccctgggacacatcatgaggctggacctggagaaaattgccctggagtacatcgtgccctgtctgcacgaggtgggcttctgctacctggacaacttcctgggcgaggtggtgggcgactgcgtcctggagcgcgtcaagcagctgcactgcaccggggccctgcgggacggccagctggcggggccgcgcgccggcgtctccaagcgacacctgcggggcgaccagatcacgtggatcgggggcaacgaggagggctgcgaggccatcagcttcctcctgtccctcatcgacaggctggtcctctactgcgggagccggctgggcaaatactacgtcaaggagaggtctaaggcaatggtggcttgctatccgggaaatggaacaggttatgttcgccacgtggacaaccccaacggtgatggtcgctgcatcacctgcatctactatctgaacaagaattgggatgccaagctacatggtgggatcctgcggatatttccagaggggaaatcattcatagcagatgtggagcccatttttgacagactcctgttcttctggtcagatcgtaggaacccacacgaagtgcagccctcttacgcaaccagatatgctatgactgtctggtactttgatgctgaagaaagggcagaagccaaaaagaaattcaggaatttaactaggaaaactgaatctgccctcactgaagactgaccgtgctctgaaatctgctggccttgttcattttagtaacggttcctgaattctcttaaattctttgagatccaaagatggcctcttcagtgacaacaatctccctgctacttcttgcatccttcacatccctgtcttgtgtgtggtacttcatgttttcttgccaagactgtgttgatcttcagatactctctttgccagatgaagttatttgctaactccagaaattcctgcagacatcctactcggccagcggtttacctgatagattcggtaatactatcaagagaagagcctaggagcacagcgagggaatgaaccttacttgcactttatgtatacttcctgatttgaaaggaggaggtttgaaaagaaaaaaatggaggtggtagatgccacagagaggcatcacggaagccttaacagcaggaaacagagaaatttgtgtcatctgaacaatttccagatgttcttaatccagggctgttggggtttctggagaattatcacaacctaatgacattaatacctctagaaagggctgctgtcatagtgaacaatttataagtgtcccatggggcagacactccttttttcccagtcctgcaacctggattttctgcctcagctccattttgctgaaaataatgactttctgaataaagatggcaacacaattttttctccattttcagttcttacctgggaacctaattccccagaagctaaaaaactagacattagttgttttggttgctttgttggaatggaatttaaatttaaatgaaaggaaaaatatatccctggtagttttgtgttaaccactgataactgtggaaagagctaggtctactgatatacaataaacatgtgtgcatcttgaacaatttgagaggggaggtggagttggaaatgtgggtgttcctgtttttttttttttttttttttttttttagttttcctttttaatgagctcaccctttaacacaaaaaaagcagggtgatgtattttaaaaaaggaagtggaaataaaaaaatctcaaagctatttgagttctcgtctgtccctagcagtctttcttcagctcacttggctctctagatccactgtggttggcagtatgaccagaatcatggaacttgctagaactgtggaagcttctactcctgcagtaagcacagatcgcactgcctcaataacttggtattgagcacgtattttgcaaaagctacttttcctagttttcagtattactttcatgttttaaaaatccctttaatttcttgcttgaaaatcccatgaacattaaagagccagaaatattttcctttgttatgtacggatatatatatatatatagtcttccaagatagaagtttactttttcctcttctggttttggaaaatttccagataagacatgtcaccattaattctcaacgactgctctattttgttgtacggtaatagttatcaccttctaaattactatgtaatttactcacttattatgtttattgtcttgtatcctttctctggagtgtaagcacaatgaagacaggaattttgtatatttttaaccaatgcaacatactctcagcacctaaaatagtgccgggaacatagtaagggctcagtaaatacttgttgaataaactcagtctcctacattagcattctaaaaaaaaaaaaaaaaaaaaaaaaaaaaaaaaaaaaaaaaaag

SEQ ID NO: 3382 - protein, 239 aa, Homo sapien
MPLGHIMRLDLEKIALEYIVPCLHEVGFCYLDNFLGEVVGDCVLERVKQLHCTGALRDGQLAGPRAGVSKRHLRGDQITWIGGNEEGCEAISFLLSLIDRLVLYCGSRLGKYYVKERSKAMVACYPGNGTGYVRHVDNPNGDGRCITCIYYLNKNWDAKLHGGILRIFPEGKSFIADVEPIFDRLLFFWSDRRNPHEVQPSYATRYAMTVWYFDAEERAEAKKKFRNLTRKTESALTED

SEQ ID NO: 3383 - DNA, 1983 bp, Homo sapien
gtttctcaacatcctggcttagtattgtgtgcaaaatcagagaggggtgcaagatcctgatttttcaggagttcaagcgacaatggcagcccaatacggcagtatgagcttcaaccccagcacaccaggggccagttatgggcctggaaggcaagagcccagaaattcccaattgagaattgtgttagtgggtaaaaccggagcaggaaaaagtgcaacaggaaacagcatccttggccggaaagtgtttcattctggcactgcagcaaaatccattaccaagaagtgtgagaaacgcagcagctcatggaaggaaacagaacttgtcgtagttgacacaccaggcattttcgacacagaggtgcccaatgctgaaacgtccaaggagattattcgctgcattcttctgacctccccagggcctcatgctctgcttctggtggttccactgggccgttacactgaggaagagcacaaagccacagagaagatcctgaaaatgtttggagagagggctagaagtttcatgattctcatattcacccggaaagatgacttaggtgacaccaatttgcatgactacttaagggaagctccagaagacattcaagacttgatggacattttcggtgaccgctactgtgcgttaaacaacaaggcaacaggcgctgagcaggaggcccagagggcacagttgctgggcctgatccagcgcgtggtgagggagaacaaggaaggctgctacactaataggatgtaccaaagggcggaggaggagatccagaagcaaacacaagcaatgcaagaactccacagagtggagctggagagagagaaagcgcggataagagaggagtatgaagagaaaatcagaaagctggaagataaagtggagcaggaaaagagaaagaagcaaatggagaagaaactagcagaacaggaggctcactatgctgtaaggcagcaaagggcaagaacggaagtggagagtaaggatgggatacttgaattaatcatgacagcgttacagattgcttcctttattttgttacgtctgttcgcggaagattaaacttaatgaaaatctgtttgtattttctgcatattctctggcaaccttgccccatacttacttatttagcatagtcgagtgctctagtttctgtctctcaggcactcgtaactaaggaccaccattggccattggtagatgtttgattgacttaacaagagagggacaaattttcaatttgtgaaactccaaagcagaaagtattggtgcttgctaccttgtgaattcttccttagacatgcagagaaaatgtatgcaagagaccaaaaagatggctccaagctatgtcatgttacctgtaataaaatcttttcttctagattctttctatgttggcagataatctccccttgtagcttccactcacttattcttgcattcagagtcacaatgatcatcttacccatgtggtttttgagaaagaaagatcaattctttgtttgcagtaggtaatcttagagatggagatgattgtagaattattcctagatgagtgtcaatttatttaattccattgtcatataaggagtcaaattgtttcttatcatttgttcattgaagaacagagacctgtctggaaaatcgatctctacaaattcaattaaataatgatccccaaatgctgaaaaagtgaaatacagcaattcaacagataatagagcaatgtttagtatattcagctgtatctgtagaaactctttgacgaacctcaatttaaccaatttgatgaatacccagttctcttcttttctagagaaagatagttgcaacctcacctccctcactcaacactttgaatacttattgtttggcaggtcatccacacacttctgcccccactgcattgaattttttgcttatgttgtttataataaaacttttcaattatctcaaaaaaaaaaaaaaaaaaa

SEQ ID NO: 3384 - protein, 329 aa, Homo sapien
MAAQYGSMSFNPSTPGASYGPGRQEPRNSQLRIVLVGKTGAGKSATGNSILGRKVFHSGTAAKSITKKCEKRSSSWKETELVVVDTPGIFDTEVPNAETSKEIIRCILLTSPGPHALLLVVPLGRYTEEEHKATEKILKMFGERARSFMILIFTRKDDLGDTNLHDYLREAPEDIQDLMDIFGDRYCALNNKATGAEQEAQRAQLLGLIQRVVRENKEGCYTNRMYQRAEEEIQKQTQAMQELHRVELEREKARIREEYEEKIRKLEDKVEQEKRKKQMEKKLAEQEAHYAVRQQRARTEVESKDGILELIMTALQIASFILLRLFAED

SEQ ID NO: 3385 - DNA, 2077 bp, Homo sapien
agcgcagcgtgcgggtggcctggatcccgcgcagtggcccggcgatgtcgctcgtgctgctaagcctggccgcgctgtgcaggagcgccgtaccccgagagccgaccgttcaatgtggctctgaaactgggccatctccagagtggatgctacaacatgatctaatccccggagacttgagggacctccgagtagaacctgttacaactagtgttgcaacaggggactattcaattttgatgaatgtaagctgggtactccgggcagatgccagcatccgcttgttgaaggccaccaagatttgtgtgacgggcaaaagcaacttccagtcctacagctgtgtgaggtgcaattacacagaggccttccagactcagaccagaccctctggtggtaaatggacattttcctacatcggcttccctgtagagctgaacacagtctatttcattggggcccataatattcctaatgcaaatatgaatgaagatggcccttccatgtctgtgaatttcacctcaccaggctgcctagaccacataatgaaatataaaaaaaagtgtgtcaaggccggaagcctgtgggatccgaacatcactgcttgtaagaagaatgaggagacagtagaagtgaacttcacaaccactcccctgggaaacagatacatggctcttatccaacacagcactatcatcgggttttctcaggtgtttgagccacaccagaagaaacaaacgcgagcttcagtggtgattccagtgactggggatagtgaaggtgctacggtgcagctgactccatattttcctacttgtggcagcgactgcatccgacataaaggaacagttgtgctctgcccacaaacaggcgtccctttccctctggataacaacaaaagcaagccgggaggctggctgcctctcctcctgctgtctctgctggtggccacatgggtgctggtggcagggatctatctaatgtggaggcacgaaaggatcaagaagacttccttttctaccaccacactactgccccccattaaggttcttgtggtttacccatctgaaatatgtttccatcacacaatttgttacttcactgaatttcttcaaaaccattgcagaagtgaggtcatccttgaaaagtggcagaaaaagaaaatagcagagatgggtccagtgcagtggcttgccactcaaaagaaggcagcagacaaagtcgtcttccttctttccaatgacgtcaacagtgtgtgcgatggtacctgtggcaagagcgagggcagtcccagtgagaactctcaagacctcttcccccttgcctttaaccttttctgcagtgatctaagaagccagattcatctgcacaaatacgtggtggtctactttagagagattgatacaaaagacgattacaatgctctcagtgtctgccccaagtaccacctcatgaaggatgccactgctttctgtgcagaacttctccatgtcaagcagcaggtgtcagcaggaaaaagatcacaagcctgccacgatggctgctgctccttgtagcccacccatgagaagcaagagaccttaaaggcttcctatcccaccaattacagggaaaaaacgtgtgatgatcctgaagcttactatgcagcctacaaacagccttagtaattaaaacattttataccaataaaattttcaaatattgctaactaatgtagcattaactaacgattggaaactacatttacaacttcaaagctgttttatacatagaaatcaattacagttttaattgaaaactataaccattttgataatgcaacaataaagcatcttcagccaaacatctagtcttccatagaccatgcattgcagtgtacccagaactgtttagctaatattctatgtttaattaatgaatactaactctaagaacccctcactgattcactcaatagcatcttaagtgaaaaaccttctattacatgcaaaaaatcattgtttttaagataacaaaagtagggaataaacaagctgaacccacttttaaaaaaaaaaaaaaaaaaaaaaaaaaaaaaaaa

SEQ ID NO: 3386 - protein, 502 aa, Homo sapien
MSLVLLSLAALCRSAVPREPTVQCGSETGPSPEWMLQHDLIPGDLRDLRVEPVTTSVATGDYSILMNVSWVLRADASIRLLKATKICVTGKSNFQSYSCVRCNYTEAFQTQTRPSGGKWTFSYIGFPVELNTVYFIGAHNIPNANMNEDGPSMSVNFTSPGCLDHIMKYKKKCVKAGSLWDPNITACKKNEETVEVNFTTTPLGNRYMALIQHSTIIGFSQVFEPHQKKQTRASVVIPVTGDSEGATVQLTPYFPTCGSDCIRHKGTVVLCPQTGVPFPLDNNKSKPGGWLPLLLLSLLVATWVLVAGIYLMWRHERIKKTSFSTTTLLPPIKVLVVYPSEICFHHTICYFTEFLQNHCRSEVILEKWQKKKIAEMGPVQWLATQKKAADKVVFLLSNDVNSVCDGTCGKSEGSPSENSQDLFPLAFNLFCSDLRSQIHLHKYVVVYFREIDTKDDYNALSVCPKYHLMKDATAFCAELLHVKQQVSAGKRSQACHDGCCSL

SEQ ID NO: 3387 - DNA, 1077 bp, Homo sapien
gtgttttctgcgtgagaggaaaagatgctagaaccacaggagaatggcgtgattgacctaccagattatgagcatgtagaagatgaaacttttcctcctttcccacctccagcctctccagagagacaagatggtgaaggaactgagcctgatgaagagtcaggaaatggagcacctgttcctgtacctccaaagagaacagttaaaagaaatatacccaagctggatgctcagagattaatttcagagagaggacttccagccttaaggcatgtatttgataaggcaaaattcaaaggtaaaggtcatgaggctgaagacttgaagatgctaatcagacacatggagcactgggcacataggctattccctaaactgcagtttgaggattttattgacagagttgaatacctgggaagtaaaaaggaagttcagacctgtttaaaacgaattcgacttgatctccctattttacatgaagattttgttagcaataatgatgaagttgcggagaataatgaacatgatgtcacttctactgaattagatccctttctgacaaacttatctgaaagtgagatgtttgcttctgagttaagtagaagcctaacagaagagcaacaacgaagaattgagagaaataaacaactggccttggaaagaaggcaggcaaagctgctgagtaatagtcagaccctaggaaatgatatgttaatgaatacacccagggcacacacggttgaagaggttaatactgatgaggatcaaaaggaggagtcaaatggattaaacgaagacattctggacaatccatgtaatgatgctattgccaatactttaaatgaagaggaaacactgctggaccagtcttttaaaaatgtgcaacagcaacttgatgctacatccagaaatattactgaagctagataagtttccattaagagaaaatgtatctgttaagtcatcgtcctgcaagcttggcgttactatgtattttttcttcttggagtgaaaatccttagatagtaaaactgttatagattattgtttaaaaaaaaaaaaaaaaaaaaaaaaaaa

SEQ ID NO: 3388 - protein, 301 aa, Homo sapien
MLEPQENGVIDLPDYEHVEDETFPPFPPPASPERQDGEGTEPDEESGNGAPVPVPPKRTVKRNIPKLDAQRLISERGLPALRHVFDKAKFKGKGHEAEDLKMLIRHMEHWAHRLFPKLQFEDFIDRVEYLGSKKEVQTCLKRIRLDLPILHEDFVSNNDEVAENNEHDVTSTELDPFLTNLSESEMFASELSRSLTEEQQRRIERNKQLALERRQAKLLSNSQTLGNDMLMNTPRAHTVEEVNTDEDQKEESNGLNEDILDNPCNDAIANTLNEEETLLDQSFKNVQQQLDATSRNITEAR

SEQ ID NO: 3389 - DNA, 3257 bp, Homo sapien
ggcatgatgggcacctggagggccgcactcccgttccagccaggctgagccttctgtcccctgcctctggggcctgggaaccccccttcttctttctcctgaatggcacccccgccctagaatccagacaccgagtttcccactgtggctggttcaagggtatgtgagagctccctggtgacagtctgtggctgagcatggccctcccagccctgggcctggacccctggagcctcctgggccttttcctcttccaactgcttcagctgctgctgccgacgacgaccgcggggggaggcgggcaggggcccatgcccagggtcagatactatgcaggggatgaacgtagggcacttagcttcttccaccagaagggcctccaggattttgacactctgctcctgagtggtgatggaaatactctctacgtgggggctcgagaagccattctggccttggatatccaggatccaggggtccccaggctaaagaacatgataccgtggccagccagtgacagaaaaaagagtgaatgtgcctttaagaagaagagcaatgagacacagtgtttcaacttcatccgtgtcctggtttcttacaatgtcacccatctctacacctgcggcaccttcgccttcagccctgcttgtaccttcattgaacttcaagattcctacctgttgcccatctcggaggacaaggtcatggagggaaaaggccaaagcccctttgaccccgctcacaagcatacggctgtcttggtggatgggatgctctattctggtactatgaacaacttcctgggcagtgagcccatcctgatgcgcacactgggatcccagcctgtcctcaagaccgacaacttcctccgctggctgcatcatgacgcctcctttgtggcagccatcccttcgacccaggtcgtctacttcttcttcgaggagacagccagcgagtttgacttctttgagaggctccacacatcgcgggtggctagagtctgcaagaatgacgtgggcggcgaaaagctgctgcagaagaagtggaccaccttcctgaaggcccagctgctctgcacccagccggggcagctgcccttcaacgtcatccgccacgcggtcctgctccccgccgattctcccacagctccccacatctacgcagtcttcacctcccagtggcaggttggcgggaccaggagctctgcggtttgtgccttctctctcttggacattgaacgtgtctttaaggggaaatacaaagagttgaacaaagaaacttcacgctggactacttataggggccctgagaccaacccccggccaggcagttgctcagtgggcccctcctctgataaggccctgaccttcatgaaggaccatttcctgatggatgagcaagtggtggggacgcccctgctggtgaaatctggcgtggagtatacacggcttgcagtggagacagcccagggccttgatgggcacagccatcttgtcatgtacctgggaaccaccacagggtcgctccacaaggctgtggtaagtggggacagcagtgctcatctggtggaagagattcagctgttccctgaccctgaacctgttcgcaacctgcagctggcccccacccagggtgcagtgtttgtaggcttctcaggaggtgtctggagggtgccccgagccaactgtagtgtctatgagagctgtgtggactgtgtccttgcccgggacccccactgtgcctgggaccctgagtcccgaacctgttgcctcctgtctgcccccaacctgaactcctggaagcaggacatggagcgggggaacccagagtgggcatgtgccagtggccccatgagcaggagccttcggcctcagagccgcccgcaaatcattaaagaagtcctggctgtccctaactccatcctggagctcccctgcccccacctgtcagccttggcctcttattattggagtcatggcccagcagcagtcccagaagcctcttccactgtctacaatggctccctcttgctgatagtgcaggatggagttgggggtctctaccagtgctgggcaactgagaatggcttttcataccctgtgatctcctactgggtggacagccaggaccagaccctggccctggatcctgaactggcaggcatcccccgggagcatgtgaaggtcccgttgaccagggtcagtggtggggccgccctggctgcccagcagtcctactggccccactttgtcactgtcactgtcctctttgccttagtgctttcaggagccctcatcatcctcgtggcctccccattgagagcactccgggctcggggcaaggttcagggctgtgagaccctgcgccctggggagaaggccccgttaagcagagagcaacacctccagtctcccaaggaatgcaggacctctgccagtgatgtggacgctgacaacaactgcctaggcactgaggtagcttaaactctaggcacaggccggggctgcggtgcaggcacctggccatgctggctgggcggcccaagcacagccctgactaggatgacagcagcacaaaagaccacctttctcccctgagaggagcttctgctactctgcatcactgatgacactcagcagggtgatgcacagcagtctgcctcccctatgggactcccttctaccaagcacatgagctctctaacagggtgggggctacccccagacctgctcctacactgatattgaagaacctggagaggatccttcagttctggccattccagggaccctccagaaacacagtgtttcaagagaccctaaaaaacctgcctgtcccaggaccctatggtaatgaacaccaaacatctaaacaatcatatgctaacatgccactcctggaaactccactctgaagctgccgctttggacaccaacactcccttctcccagggtcatgcagggatctgctccctcctgcttcccttaccagtcgtgcaccgctgactcccaggaagtctttcctgaagtctgaccacctttcttcttgcttcagttggggcagactctgatcccttctgccctggcagaatggcaggggtaatctgagccttcttcactcctttaccctagctgaccccttcacctctccccctcccttttcctttgttttgggattcagaaaactgcttgtcagagactgtttattttttattaaaaatataaggcttaaaaaaaaaaaaaaaaaaaaaaaaaaaa

SEQ ID NO: 3390 - protein, 761 aa, Homo sapien
MALPALGLDPWSLLGLFLFQLLQLLLPTTTAGGGGQGPMPRVRYYAGDERRALSFFHQKGLQDFDTLLLSGDGNTLYVGAREAILALDIQDPGVPRLKNMIPWPASDRKKSECAFKKKSNETQCFNFIRVLVSYNVTHLYTCGTFAFSPACTFIELQDSYLLPISEDKVMEGKGQSPFDPAHKHTAVLVDGMLYSGTMNNFLGSEPILMRTLGSQPVLKTDNFLRWLHHDASFVAAIPSTQVVYFFFEETASEFDFFERLHTSRVARVCKNDVGGEKLLQKKWTTFLKAQLLCTQPGQLPFNVIRHAVLLPADSPTAPHIYAVFTSQWQVGGTRSSAVCAFSLLDIERVFKGKYKELNKETSRWTTYRGPETNPRPGSCSVGPSSDKALTFMKDHFLMDEQVVGTPLLVKSGVEYTRLAVETAQGLDGHSHLVMYLGTTTGSLHKAVVSGDSSAHLVEEIQLFPDPEPVRNLQLAPTQGAVFVGFSGGVWRVPRANCSVYESCVDCVLARDPHCAWDPESRTCCLLSAPNLNSWKQDMERGNPEWACASGPMSRSLRPQSRPQIIKEVLAVPNSILELPCPHLSALASYYWSHGPAAVPEASSTVYNGSLLLIVQDGVGGLYQCWATENGFSYPVISYWVDSQDQTLALDPELAGIPREHVKVPLTRVSGGAALAAQQSYWPHFVTVTVLFALVLSGALIILVASPLRALRARGKVQGCETLRPGEKAPLSREQHLQSPKECRTSASDVDADNNCLGTEVA

SEQ ID NO: 3391 - DNA, 2605 bp, Homo sapien
atacctttgagtcttgcagaagagaaactaccaacaggcattaatcctctcactctacacatcatgagaaggacaaaagaatatgtaagtaatgacgcggcacagtcagatgatgaagagaagttacagtctcagccaacagatactgatggtggaaggttaaaacagaaaacgactcaactaaagaagtttcttggaaaatcagtaaagagagcaaagcaccttgctgaggaatatggtgaacgtgctataaataaagttaaaagtgttagagatgaagtgtttcatactgatcaagatgatccttcatcaagtgatgatgaaggaatgccatacacaagaccagttaaattcaaagcagcacacggtttcaaaggaccttatgattttgatcagatcaaagtggtgcaagatcttagtggtgaacatatgggagctgtttggaccatgaaattttctcactgtggccgattacttgcctcagctggacaagacaatgtagtgagaatatgggctttaaaaaatgcttttgactatttcaacaatatgcgaatgaaatacaatactgaaggacgtgtgtccccatcaccctctcaggaaagtctaagttcatcaaaatcggatacagatacaggggtatgcagtggaactgatgaagaccctgatgataaaaacgcaccctttcggcaacggccattttgcaaatataaaggacatactgctgatctccttgatctttcatggtctaaaaactactttcttctttcttcttcaatggataaaacagtcagattatggcacatttctcgaagagaatgcctttgctgttttcaacatatagatactgccatagcttttcatccaagagatgacaggtattttctaagtgggtctttggatggaaagctccgcctttggaacatacctgacaaaaaagtggctttgtggaatgaagtagatggtcagacaaaattgatcacagctgcaaatttctgtcagaatggcaaatatgcagtgattgggacatatgatggcagatgtattttctatgatacagagcatttgaaataccatacacaaatacatgtccgatctactagagggcgcaacaaggttggaagaaaaattactggcattgagcctttacctggagaaaataagatattggtaacctcaaatgactccagaatcagactatatgatttgagagatttgtcactatccatgaagtataagggttacgtcaatagcagcagccagatcaagcaagtttcagccatgattttacttacctcgttagtggttcagaagataagtatgtttatatctggagtacctaccatgacctaagcaagtttacttcagtcaggagagatcgtaatgacttctgggaaggtattaaagcccacaatgcagttgttacatcagccatctttgcaccaaacccaagtttgatgttatctttggatgtgcaatctgaaaaatcagaagggaacgagaaaagtgaagatgctgaagttttggatgccacaccttctggtattatgaagacagataacacagaagttcttctctctgctgacttcactggagcaatcaaagtgtttgttaataaaagaaaaaatgtatcttaatttgaaatggcatttaaaataaacatatcagtaagtttctatatgtatcaaaactgaaaaaatagtgttccaggctaacatacttttttaatttttattgaaagttgttcaaatataatatattctttgagaggcagtgttaatgatctaggaaaccctgggctgatagagtagaaaggaatatggctagaataacattgccaaacattaggctttatgttttgttatgtttgtgttttcgttgtataattatgaacatgcacaagtttctgcatgaaaagatattaatatattaatcacatgtatgtgccttttggttacatgcattaaatctaacagagttaaattatttcagtggctcttttggcctcttactaggggggatagtcttgtttctagcttaaacaattttttttttgcacaaaatttcatttttaataaaagtggtatcttttgactgagttattgttttgaaaatggtatataggtttccagtaggtcaacaaccatatgtaaatggtttttataaatttctcaatttggggacaagatttttttgtggtctaaattgtgggcttaagattcttttctttatatgtgtacatataatttttttttctttgccacactggagcacaatgtttctatgtaaagaattattttcattctttatccatgagcaccaggctttgctcacttaaaaaaaaattaagccacattaaggagtgagtcttcttttttacaataatgtaaaaattaaactgtttacatttttttaaagcattgtagtttttaaaaattaagctgttttgttttgtgttgttgaatttgaaagcctttgtaaatatcaatataatgtaccaatgaaataacatctggggcaatgaaaccctgatcatgttgttgatggttagcatatgtttctgaaaattaaatatgtattattaaaagttggtctccaacacttgttt

SEQ ID NO: 3392 - protein, 428 aa, Homo sapien
MRRTKEYVSNDAAQSDDEEKLQSQPTDTDGGRLKQKTTQLKKFLGKSVKRAKHLAEEYGERAINKVKSVRDEVFHTDQDDPSSSDDEGMPYTRPVKFKAAHGFKGPYDFDQIKVVQDLSGEHMGAVWTMKFSHCGRLLASAGQDNVVRIWALKNAFDYFNNMRMKYNTEGRVSPSPSQESLSSSKSDTDTGVCSGTDEDPDDKNAPFRQRPFCKYKGHTADLLDLSWSKNYFLLSSSMDKTVRLWHISRRECLCCFQHIDTAIAFHPRDDRYFLSGSLDGKLRLWNIPDKKVALWNEVDGQTKLITAANFCQNGKYAVIGTYDGRCIFYDTEHLKYHTQIHVRSTRGRNKVGRKITGIEPLPGENKILVTSNDSRIRLYDLRDLSLSMKYKGYVNSSSQIKQVSAMILLTSLVVQKISMFISGVPTMT

SEQ ID NO: 3393 - DNA, 1870 bp, Homo sapien
aaaaaacaaccatttcctctctgctgagagccagggaaggcgagctctgcgcacacgggcgtccctgcagcagccactctgctttccaggaccggccaactgccctggaggcatccacacaggggcccaggcagcacagaggagctgtgaacccgctccacaccggccaccctgcccggagcctggcactcacagcaggccggtgctaaggagtgtggcgcgggctcgactcccactgctgccggcctcccgagtgactctgttttccactgctgcaggcgagaagaggcacgcgcggcacaggccggcctccgcttcccgggaagacggcgcactcctggccctgggttcttgctgctgcccaccctctgctccctgggatgggccccgaggcgagcagcttcagcacaggcctggccctgctccaggtgcaggaaggaggataaggccgggccgagaggcggcacacctggaccatcccatgggcctccgcccgcgccgccccgaggatgagtggtgatgtcctctagccacccctagcagcgtcggctctccctggacgtgcggccgcggactgggacttggctttctccggataagcggcggcaccggcgtcagcgatgaccgtgcagagactcgtggccgcggccgtgctggtggccctggtctcactcatcctcaacaacgtggcggccttcacctccaactgggtgtgccagacgctggaggatgggcgcaggcgcagcgtggggctgtggaggtcctgctggctggtggacaggacccggggagggccgagccctggggccagagccggccaggtggacgcacatgactgtgaggcgctgggctggggctccgaggcagccggcttccaggagtcccgaggcaccgtcaaactgcagttcgacatgatgcgcgcctgcaacctggtggccacggccgcgctcaccgcaggccagctcaccttcctcctggggctggtgggcctgcccctgctgtcacccgacgccccgtgctgggaggaggccatggccgctgcattccaactggcgagttttgtcctggtcatcgggctcgtgactttctacagaattggccatacaccaacctgtcctggtcctgctacctgaacattggcgcctgccttctggccacgctggcggcagccatgctcatctggaacattctccacaagagggaggactgcatggccccccgggtgattgtcatcagccgctccctgacagcgcgctttcgccgtgggctggacaatgactacgtggagtcaccatgctgagtcgcccttctcagcgttccatcgatgcacacctgctatcgtggaacagcctagaaaccaagggactccaccaccaagtcacttcccctgctcgtgcagaggcacgggatgagtctgggtgacctctgcgccatgcgtgcgagacacgtgtgcgtttactgttatgtcggtcatatgtctgtacgtgtcgtgggccaacctcgttctgcctccagctttcctggttagcgcaacgcggctccacgaccacacgcacttcagggtggaagctggaagctgagacacaggttaggtggcgcgaggctgccctgcgctccgctttgctttgggattaatttattctgcatctgctgagaggggcaccccagccatatcttacactttggtaaagcagaaaaccaggaaaattttcttaaaatatccacaatattccttgagtgagtcagaatctatagccggttagtgatggtttcaggcagaatcgtgttcgtgtctgttttgctcgattcctttcctaagttaaataaatgcaagcctctgaacttctgtctataaaaaaaaaaaaaaaaa

SEQ ID NO: 3394 - protein, 170 aa, Homo sapien
MTVQRLVAAAVLVALVSLILNNVAAFTSNWVCQTLEDGRRRSVGLWRSCWLVDRTRGGPSPGARAGQVDAHDCEALGWGSEAAGFQESRGTVKLQFDMMRACNLVATAALTAGQLTFLLGLVGLPLLSPDAPCWEEAMAAAFQLASFVLVIGLVTFYRIGHTPTCPGPAT

SEQ ID NO: 3395 - DNA, 1542 bp, Homo sapien
gggcttctggctcggcgcagcaggttccattcacgccaagtctgttggcagtggcagttgtagggccaagggcggttgtaggacccggagcagccggacatggaacaaccgtggccgcctccgggaccctggagcctccctcgggccgggggtgaggctgaggaagagagtgacttcgacgtgttccccagttctccccgctgcccgcagctgccaggcggcggcgcccagatgtatagccatggaattgaattggcttgccaaaagcagaaagagtttgtgaagagctctgtggcgtgcaaatggaatcttgctgaagctcaacagaaacttggtagcttagcactgcataattctgagtccttggatcaggagcatgccaaagcacaaacagcagtatcagaactgaggcaacgggaagaagagtggcgacagaaagaagaagctctagtacaaagagagaagatgtgtctgtggagcacggatgccattagcaaggatgtttttaataagagttttattaatcaagataaaagaaaagacacagaagatgaagataaatcagaatcatttatgcaaaaatatgagcaaaaaatcagacattttggtatgttgagtcgatgggatgatagccagagatttttgtctgaccatccataccttgtatgtgaagaaactgctaaatatcttattttatggtgttttcacctggaagctgagaagaaaggggctttaatggaacaaatagcacatcaagctgttgtaatgcagtttattatggaaatggccaaaaactgtaatgtggatccaagagggtgttttcgtttatttttccagaaagccaaagcagaggaagaaggttattttgaagcattcaaaaatgaacttgaagctttcaagtcaagagtaagactttattctcaatcacaaagttttcaacctatgacagttcagaatcatgttccccattctggtgttggatctataggtttattagaatccttaccacagagtccagattatcttcagtattctatcagtacagctctctgcagcttaaactcggtggtacataaagaagatgatgaacccaaaatgatggacactgtataatttggttaagactgctgaggccaagtgctattttgttacaagaaaggaagaacttggctattttcttgacacttttatgggtgctgcactttatttttgtttggtttttgatgggagggaaagagtactgaaatgttttgtaaattttttttaatgtgctgctaggttttttgttttgttttgttctgaagagaagagtggtaccatatgttgcaggaagtcaaactggactttttgtggctactaaatttgcctttaatcttattgttctcaattttggaatcaagtatgaaaatctgcacaaatgcaatgtttacaagaactggttgattctgggaggcatctgctacagtctctttttatatggatatgtacatgtcctattctacaaaaaaaaaaaaaaaaaaaaaaaaaaaaaaaaaaaaaaaa

SEQ ID NO: 3396 - protein, 337 aa, Homo sapien
MEQPWPPPGPWSLPRAGGEAEEESDFDVFPSSPRCPQLPGGGAQMYSHGIELACQKQKEFVKSSVACKWNLAEAQQKLGSLALHNSESLDQEHAKAQTAVSELRQREEEWRQKEEALVQREKMCLWSTDAISKDVFNKSFINQDKRKDTEDEDKSESFMQKYEQKIRHFGMLSRWDDSQRFLSDHPYLVCEETAKYLILWCFHLEAEKKGALMEQIAHQAVVMQFIMEMAKNCNVDPRGCFRLFFQKAKAEEEGYFEAFKNELEAFKSRVRLYSQSQSFQPMTVQNHVPHSGVGSIGLLESLPQSPDYLQYSISTALCSLNSVVHKEDDEPKMMDTV

SEQ ID NO: 3397 - DNA, 2010 bp, Homo sapien
gtcgactaccagaaaatactttcaacataaatgaactctccaacttattaaacttttatatagatagaggaagacagctctttcgggataaccacctgatacctgcagaaacccccagtcctgttattttcagtgattttccatttatctttaattcgctatccaaaattaaattattgcaagctgattcacatataaagatgcagatgtcagaaaagaaagcatacatgcttatgcatgaaacaattctgcaaaaaaaggatgaatttcctccatcacccagatttatacttagagtcagacgaagtcgcctggttaaagatgctctgcgtcaattaagtcaagctgaagctactgacttctgcaaagtattagtggttgaatttattaatgaaatttgtcctgagtctggaggggttagttcagagttcttccactgtatgtttgaagagatgaccaagccagaatatggaatgttcatgtatcctgaaatgtgttcctgcatgtggtttcctgccaagcctaaacctgagaagaaaagatatttcctctttggaatgctgtgtggactctccttattcaatttaaatgttgctaaccttcctttcccactggctctgtataaaaaacttctggaccaaaagccatcattggaagatttaaaagaactcagtcctcggttggggaagagtttgcaagaagttctagatgatgctgctgatgacattggagatgcgctctgcatacgcttttctatacactgggaccaaaatgatgttgacttaattccaaatgggatctccatacctgtggaccaaaccaacaagagagactatgtttctaagtatattgattacattttcaacgtctctgtaaaagcagtttatgaggaatttcagagaggattttatagagtctgtgagaaggagatacttagacatttctaccctgaagaactaatgacagcaatcattggaaatactgattatgactggaaacagtttgaacagaattcaaagtatgagcaaggataccaaaaatcacatcctactatacagttgttttggaaggctttccacaagctaaccttggatgaaaagaaaaaattcctctttttccttacaggacgtgataggctgcatgcaagaggcatacagaaaatggaaatagtatttcgctgtcctgaaactttcagtgaaagagatcacccaacatcaataacttgtcataatattctctccctccctaagtattctacaatggaaagaatggaggaagcactccaagtagccatcaacaacaacagaggatttgtctcacccatgctcacacagtcataatcacctctgagagactcagggtgggctttctcacacttggatccttctgttcttccttacacctaaataatacaagagattaatgaatagtggttagaagtagttgagggagagattgggggaatggggagatgatgatgatggtcaaagggtgcaaaatctcacacaagactgaggcaggagaatagggtacagagatagggatctaaggatgacttggacacactccctggcactgaagagtctgaacactggcctgtgattggtccattccaggaccttcatttgcataaggtatcaaaccacatcagcctctgattggccatgggccagacctgcactctggccaatgattggttcattccaggacattcatttgcataaggagtcaaaccacaccagtcttggattggctgtgagccaattcacctcagtctctaattggctgtgagtcagtctttcatttacatagggtgtaaccatcaagaaacctctacagggtacttaagccccagaagattttgctaccagggctcttgagccacttgctctagcccactcccaccctgtggaatgtactttcacttttgctgcttcactgccttgtgctccaataaatccactccttcaccacccaaaaaaaaaaaaaaaaaaaaaaaaaaaaaaaaaa

SEQ ID NO: 3398 - protein, 379 aa, Homo sapien
MQMSEKKAYMLMHETILQKKDEFPPSPRFILRVRRSRLVKDALRQLSQAEATDFCKVLVVEFINEICPESGGVSSEFFHCMFEEMTKPEYGMFMYPEMCSCMWFPAKPKPEKKRYFLFGMLCGLSLFNLNVANLPFPLALYKKLLDQKPSLEDLKELSPRLGKSLQEVLDDAADDIGDALCIRFSIHWDQNDVDLIPNGISIPVDQTNKRDYVSKYIDYIFNVSVKAVYEEFQRGFYRVCEKEILRHFYPEELMTAIIGNTDYDWKQFEQNSKYEQGYQKSHPTIQLFWKAFHKLTLDEKKKFLFFLTGRDRLHARGIQKMEIVFRCPETFSERDHPTSITCHNILSLPKYSTMERMEEALQVAINNNRGFVSPMLTQS

SEQ ID NO: 3399 - DNA, 1197 bp, Homo sapien
tttcttcgcggctgctcaagatgaaccgactcttcgggaaagcgaaacccaaggctccgccgcccagcctgactgactgcattggcacggtggacagtagagcagaatccattgacaagaagatttctcgattggatgctgagctagtgaagtataaggatcagatcaagaagatgagagagggtcctgcaaagaatatggtcaagcagaaagccttgcgagttttaaagcaaaagaggatgtatgagcagcagcgggacaatcttgcccaacagtcattcaacatggaacaagccaattataccatccagtctttgaaggacaccaagaccacggttgatgctatgaaactgggagtaaaggaaatgaagaaggcatacaagcaagtgaagatcgaccagattgaggatttacaagaccagctagaggatatgatggaagatgcaaatgaaatccaagaagcactgagtcgcagttatggcaccccagaactggatgaagatgatttagaagcagagttggatgcactaggtgatgagcttctggctgatgaagacagttcttatttggatgaggcagcatctgcacctgcaattccagaaggtgttcccactgatacaaaaaacaaggatggagttctggtggatgaatttggattgccacagatccctgcttcatagatttgcatcattcaagcatatcttgtaaaacaaacacatattatgggactaggaaatatttatctttccaaatttgccataacagatttaggtttctttcctttctttgaaggaaagtttaattacattgctcttttattttttccattaagagactcattgcttgggaaatgctttcttcgtactaaaatttgattcctttttttcttatgaaaaacgaactcagtttaaaagtatttttagctcgtatgacttgttttcattcattaataataatttgaaataaaactaaggaaatggaatcttaaaagtctatgacagtgtaactctacagtcctcaaaatgaccctgtaaatttggataagaccaaagatgagattattggggctggtcatattatgattcagaatccatttctattgtgggtattatagggttgggttaaaggtgatggccctttttgatgggttttgttgtgtcttgtgaacaagtcgttactgtgtccattattggaatg

SEQ ID NO: 3400 - protein, 219 aa, Homo sapien
MNRLFGKAKPKAPPPSLTDCIGTVDSRAESIDKKISRLDAELVKYKDQIKKMREGPAKNMVKQKALRVLKQKRMYEQQRDNLAQQSFNMEQANYTIQSLKDTKTTVDAMKLGVKEMKKAYKQVKIDQIEDLQDQLEDMMEDANEIQEALSRSYGTPELDEDDLEAELDALGDELLADEDSSYLDEAASAPAIPEGVPTDTKNKDGVLVDEFGLPQIPAS

SEQ ID NO: 3401 - DNA, 3874 bp, Homo sapien
gtattctccgccgcccccacgccctcgaggtccccgccaccgaaccagcggcggagcccgcccgcgcctcccgcggcattcccgcaccggatcgctcctcgctggggcgggacctggcctggcggctctggtcactatgagtgaaacatctttcaacctaatatcagaaaaatgtgacattctatccattcttcgggaccatcctgaaaacaggatttaccggaggaaaatcgaggaactcagcaaaaggttcaccgccatccgcaagaccaaaggggatgggaactgcttctacagggccttgggctattcctacctggagtccctgctggggaagagcagggagatcttcaagttcaaagaacgcgtactgcagaccccaaatgaccttctggctgctggctttgaggagcacaagttcagaaacttcttcaatgctttttacagtgtggtggaactggtagagaaggacggctcagtgtccagcctgctgaaggtgttcaacgaccagagtgcctcggaccacatcgtgcagttcctgcgcctgctcacgtcggccttcatcaggaaccgagcagacttcttccggcacttcattgatgaggagatggacatcaaagacttctgcactcacgaagtagagcccatggccacggagtgtgaccacatccagatcacggcgttgtcgcaggccctgagcattgccctgcaagtggagtacgtggacgagatggataccgccctgaaccaccacgtgttccctgaggccgccaccccttccgtttacctgctctataaaacatcccactacaacatcctttatgcagccgataaacattgattaattttaggccatgcagtggaacctgtcacctaatgggactgcattctgaatggaacattccggctcttcaattttttaagcaatttagactgtagcaagaaaatgtgcagccttttgggcaaagcccctgggaacgaggcctacccactatggactatggtaacttggtaggatttttagtatttattttaatggagggacaaatgctttctaactgggcccccgactccgcaccccagttcgcagtgaggccctgggtgggtcacctgccctctctggacttgtttcttcaactggaggaggtccctgcctatgctgacattccattgtagaaaaatggggcctctggtgtctctttaccaggggcagtgcctctctgcgggggaggaaaagctcaaggttagctgtcttaacccaagtgacttaccaggcctacaaaagagtccagtccagtcacttgttggactgggctctgacagatggcctattgaggtcaacttgaatgtgagggctgcggtgtggtttcaaacattcatgatggatgtattttcctacccctaacttaaggagaaaaaaaaaaagacttcctttttttgccaaagtccagaaaggggcctttagcctttagtaggagctcaaattgttggggcccctctacctctctcagggctagaactgcctgactcttggtggacgagcccttcagggttctgctttcagccccacctggacagaggcttacaagactagggtctggaccagaatctgtgtatttctgtctgggaccaggaagctgcagctgtcccatcatccccagcaaatcctagaagtggagtctggatacttcaaggatagaagtgttggcacgcacagccatggacccagctgagcagagcagacgctttgcaggctgcccctggcttcttcctccctttcccgcttctgctctctttatggactggtcagagggtaggtgggaaagaacagacaagccatggaagttggcagtggggagatttccactgtggaaaccgcctgggaattccggccagcagcttcctccttcagccacctggccataccccttaaataagcccctcaccttgctgcctcaggaccttcaagattccatctgtgggctggccggcaagatggcaccagtggggacccacaccctggctgggcagaggtgctgctagcaacccctcttcctctataagaggaaatggaaaatgcagggtgtggaattgccctttggggtccttccttaattgaaggccaccttctcacaggtttcattctgcagggatttactggaatctattggtgctgctgcatgagtctgctgacaacctgactgcacaaggactgggtagcagactcctcagagtcctcttgacacaaatgtcagatttgtgtcactcttctgccttcgtgaaaagccaatagcactctcagatatcaggggattttagttccaagcagggaccctggtttccatactgccctcagctggagtttggatccaaaggctctggctaagtcattatgtcactttctcacaggaatgtaaatttgactgtcacctctgaatttgttcagtgtcccaccatggtctatgagaagtacactggaagcgtggggggaacacatgacatgatttgtgaatatcatcatctttgccagacaagtctccaggggatccctgtttcccaactgaaaggtgtgaacggacacacacacagcctggatgacgccttggctgttctaaggggctgtaaggtgggctctgggccttccagctaggctctcaagcacagcagaagcctcactgggctgctatgtctctgtatttgtggcttgtgtggtagcctcagaagcagagctgtttggcagactggctggagaaattccctctaggagacttgcctgtgctgtgcttccaggtcacagagccccccggaaactcacaggggccctcttcccagaaaagaatctattctatcacttcagaatcaggacactcaagctctggcagaggaaggccaagttactttcatggtcttaccctctgcttttcccctttttgcaaaaaaccactggccaaatccgaaccattgcccttgtttcccccacgttctctctcagatctttgtctcgaagggaaaacatagtggatgaaaaggtgtggcaggctttggcaccttgttaaaatttctagtcatctgtggatgttaccttgcttgtccacagcagccagtcaccctggccagtcccacttcctggataattctctaccctcaccccacagagccatctctctccagaccaaaagctggaaggagagttgctttgagagcttgtttttacaactgcatgtttattatgatactttctctccaaaggaaacttttaaatcaatgggaacaattagcaacagaaagagcacagtccctgcttttgactgggttcctattttaagcacaaatgagagctctggagccagaatgccagggttctaacttcagcattcacttactagctgtatgatcttggccaagtcacttcacctccctgagccccaattcccaagtttgtgaaatggcaacaatacctatgtgtcactggattattggttaaaacagaatgagattccttgtgtgaaaatagctattatacctgacacactcatcgtatgggctctgcaaagggatattccccaacctgtccttcccgacaggaagcatagggcactgcagatggggaagcatgtcaccttggcagtgactcggtggcttcccaagcaggagtgtcaggggaaccatgagagagagtctaggagccaaacacatcaccaccctgagcagatacaggagtggggagggggctgtaactcagtgagtggcttccaggggccccaggccctgctggatgtgggccaagccctacagcttccctaggcagtaagtaaaaacattctcctagcattaaaatggtttccataaaaaaaaaaaaaaaaaaaaaaaaaaa

SEQ ID NO: 3402 - protein, 234 aa, Homo sapien
MSETSFNLISEKCDILSILRDHPENRIYRRKIEELSKRFTAIRKTKGDGNCFYRALGYSYLESLLGKSREIFKFKERVLQTPNDLLAAGFEEHKFRNFFNAFYSVVELVEKDGSVSSLLKVFNDQSASDHIVQFLRLLTSAFIRNRADFFRHFIDEEMDIKDFCTHEVEPMATECDHIQITALSQALSIALQVEYVDEMDTALNHHVFPEAATPSVYLLYKTSHYNILYAADKH

SEQ ID NO: 3403 - DNA, 3197 bp, Homo sapien
ggaccacagctcctcccgtgcatccactcggcctgggaggttctggattttggctgtcgagggagtttgcctgcctctccagagaaagatggtcatgaggcccctgtggagtctgcttctctgggaagccctacttcccattacagttactggtgcccaagtgctgagcaaagtcgggggctcggtgctgctggtggcagcgcgtccccctggcttccaagtccgtgaggctatctggcgatctctctggccttcagaagagctcctggccacgtttttccgaggctccctggagactctgtaccattcccgcttcctgggccgagcccagctacacagcaacctcagcctggagctcgggccgctggagtctggagacagcggcaacttctccgtgttgatggtggacacaaggggccagccctggacccagaccctccagctcaaggtgtacgatgcagtgcccaggcccgtggtacaagtgttcattgctgtagaaagggatgctcagccctccaagacctgccaggttttcttgtcctgttgggcccccaacatcagcgaaataacctatagctggcgacgggagacaaccatggactttggtatggaaccacacagcctcttcacagacggacaggtgctgagcatttccctgggaccaggagacagagatgtggcctattcctgcattgtctccaaccctgtcagctgggacttggccacagtcacgccctgggatagctgtcatcatgaggcagcaccagggaaggcctcctacaaagatgtgctgctggtggtggtgcctgtctcgctgctcctgatgctggttactctcttctctgcctggcactggtgcccctgctcagggaaaaagaaaaaggatgtccatgctgacagagtgggtccagagacagagaacccccttgtgcaggatctgccataaaggacaatatgaactgatgcctggactatcagtaaccccactgcacaggcacacgatgctctgggacataactggtgcctggaaatcaccatggtcctcatatctcccatgggaatcctgtcctgcctcgaaggagcagcctgggcagccatcacaccacgaggacaggaagcaccagcacgtttcacacctcccccttccctctcccatcttctcatatcctggctcttctctgggcaagatgagccaagcagaacattccatccaggacactggaagttctccaggatccagatccatggggacattaatagtccaaggcattccctcccccaccactattcataaagtattaaccaactggcaccaaggaattgcctccagcctgagtcctaggctctaaaagatattacatatttgaactaatagaggaactctgagtcacccatgccagcatcagcttcagccccagaccctgcagtttgagatctgatgcttcctgagggccaaggcattgctgtaagaaaaggtctagaaataggtgaaagtgagaggtgggggacaggggtttctctttctggcctaaggactttcaggtaatcagagttcatgggccctcaaaggtaaattgcagttgtagacaccgaggatggttgacaacccatggttgagatgggcaccgttttgcaggaaacaccatattaatagacatcctcaccatctccatccgctctcacgcctcctgcaggatctgggagtgagggtggagagtctttcctcacgctccagcacagtggccaggaaaagaaatactgaatttgccccagccaacaggacgttcttgcacaacttcaagaaaagcagctcagctcaggatgagtcttcctgcctgaaactgagagagtgaagaaccataaaacgctatgcagaaggaacattatggagagaaagggtactgaggcactctagaatctgccacattcattttcaaatgcaaatgcagaagacttaccttagttcaaggggaggggacaaagaccccacagcccaacagcaggactgtagaggtcactctgactccatcaaactttttattgtggccatcttaggaaaatacattctgcccctgaatgattctgtctagaaaagctctggagtattgatcactactggaaaaacacttaaggagctaaacttaccttcggggattattagctgataaggttcacagtttctctcacccaggtgtaactggattttttctggggcctcaatccagtcttgataacagcgaggaaagaggtattgaagaaacaggggtgggtttgaagtactattttccccagggtggcttcaatctccccacctaggatgtcagccctgtccaaggaccttccctcttctcccccagttccctgggcaatcacttcaccttggacaaaggatcagcacagctggcctccagatccacatcaccactcttccactcgattgttcccagatcctccctgcctggcctgctcagaggttccctgttggtaacctggctttatcaaattctcatccctttcccacacccacttctctcctatcaccttcccccaagattacctgaacagggtccatggccactcaacctgtcagcttgcaccatccccacctgccacctacagtcaggccacatgcctggtcactgaatcatgcaaaactggcctcagtccctaaaaatgatgtggaaaggaaagcccaggatctgacaatgagccctggtggatttgtggggaaaaaatacacagcactccccacctttctttcgttcatctccagggccccacctcagatcaaagcagctctggatgagatgggacctgcagctctccctccacaaggtgactcttagcaacctcatttcgacagtggtttgtagcgtggtgcaccagggccttgttgaacagatccacactgctctaataaagttcccatccttaatgactcacttgtcaactagtggactaattaaccctccaccaaaaaaacacaaagtgcttctgtgagaccaattttgtgctaatgagcattgagactgatgctttgtaagtcacaccacaacaaatattgattgagggcgctgcatgtgctgggtacatttcttggcacttgggaatcagtagtcaagcgaaacccttgcctttgagagtttatggtctggataatataaataaacaagtaagcataaaaaaaaaaaaaaaaa

SEQ ID NO: 3404 - protein, 285 aa, Homo sapien
MVMRPLWSLLLWEALLPITVTGAQVLSKVGGSVLLVAARPPGFQVREAIWRSLWPSEELLATFFRGSLETLYHSRFLGRAQLHSNLSLELGPLESGDSGNFSVLMVDTRGQPWTQTLQLKVYDAVPRPVVQVFIAVERDAQPSKTCQVFLSCWAPNISEITYSWRRETTMDFGMEPHSLFTDGQVLSISLGPGDRDVAYSCIVSNPVSWDLATVTPWDSCHHEAAPGKASYKDVLLVVVPVSLLLMLVTLFSAWHWCPCSGKKKKDVHADRVGPETENPLVQDLP

SEQ ID NO: 3405 - DNA, 1665 bp, Homo sapien
cgggccctgcgggcgcggggctgaaggcggaaccacgacgggcagagagcacggagccgggaagcccctgggcgcccgtcggagggctatggagcagcggccgcggggctgcgcggcggtggcggcggcgctcctcctggtgctgctgggggcccgggcccagggcggcactcgtagccccaggtgtgactgtgccggtgacttccacaagaagattggtctgttttgttgcagaggctgcccagcggggcactacctgaaggccccttgcacggagccctgcggcaactccacctgccttgtgtgtccccaagacaccttcttggcctgggagaaccaccataattctgaatgtgcccgctgccaggcctgtgatgagcaggcctcccaggtggcgctggagaactgttcagcagtggccgacacccgctgtggctgtaagccaggctggtttgtggagtgccaggtcagccaatgtgtcagcagttcacccttctactgccaaccatgcctagactgcggggccctgcaccgccacacacggctactctgttcccgcagagatactgactgtgggacctgcctgcctggcttctatgaacatggcgatggctgcgtgtcctgccccacgccacccccgtcccttgcaggagcaccctggggagctgtccagagcgctgtgccgctgtctgtggctggaggcagagtaggtgtgttctgggtccaggtgctcctggctggccttgtggtccccctcctgcttggggccaccctgacctacacataccgccactgctggcctcacaagcccctggttactgcagatgaagctgggatggaggctctgaccccaccaccggccacccatctgtcacccttggacagcgcccacacccttctagcacctcctgacagcagtgagaagatctgcaccgtccagttggtgggtaacagctggacccctggctaccccgagacccaggaggcgctctgcccgcaggtgacatggtcctgggaccagttgcccagcagagctcttggccccgctgctgcgcccacactctcgccagagtccccagccggctcgccagccatgatgctgcagccgggcccgcagctctacgacgtgatggacgcggtcccagcgcggcgctggaaggagttcgtgcgcacgctggggctgcgcgaggcagagatcgaagccgtggaggtggagatcggccgcttccgagaccagcagtacgagatgctcaagcgctggcgccagcagcagcccgcgggcctcggagccgtttacgcggccctggagcgcatggggctggacggctgcgtggaagacttgcgcagccgcctgcagcgcggcccgtgacacggcgcccacttgccacctaggcgctctggtggcccttgcagaagccctaagtacggttacttatgcgtgtagacattttatgtcacttattaagccgctggcacggccctgcgtagcagcaccagccggccccacccctgctcgcccctatcgctccagccaaggcgaagaagcacgaacgaatgtcgagagggggtgaagacatttctcaacttctcggccggagtttggctgagatcgcggtattaaatctgtgaaagaaaacaaaacaaaacaaaaaaaaaaaaaaaaaa

SEQ ID NO: 3406 - protein, 426 aa, Homo sapien
MEQRPRGCAAVAAALLLVLLGARAQGGTRSPRCDCAGDFHKKIGLFCCRGCPAGHYLKAPCTEPCGNSTCLVCPQDTFLAWENHHNSECARCQACDEQASQVALENCSAVADTRCGCKPGWFVECQVSQCVSSSPFYCQPCLDCGALHRHTRLLCSRRDTDCGTCLPGFYEHGDGCVSCPTPPPSLAGAPWGAVQSAVPLSVAGGRVGVFWVQVLLAGLVVPLLLGATLTYTYRHCWPHKPLVTADEAGMEALTPPPATHLSPLDSAHTLLAPPDSSEKICTVQLVGNSWTPGYPETQEALCPQVTWSWDQLPSRALGPAAAPTLSPESPAGSPAMMLQPGPQLYDVMDAVPARRWKEFVRTLGLREAEIEAVEVEIGRFRDQQYEMLKRWRQQQPAGLGAVYAALERMGLDGCVEDLRSRLQRGP

SEQ ID NO: 3407 - DNA, 1149 bp, Homo sapien
ccgcagccatgaccccgcagcttctcctggcccttgtcctctgggccagctgcccgccctgcagtggaaggaaagggcccccagcagctctgacactgccccgggtgcaatgccgagcctctcggtacccgatcgccgtggattgctcctggaccctgccgcctgctccaaactccaccagccccgtgtccttcattgccacgtacaggctcggcatggctgcccggggccacagctggccctgcctgcagcagacgccaacgtccaccagctgcaccatcacggatgtccagctgttctccatggctccctacgtgctcaatgtcaccgccgtccacccctggggctccagcagcagcttcgtgcctttcataacagagcacatcatcaagcccgaccctccagaaggcgtgcgcctaagccccctcgctgagcgccagctacaggtgcagtgggagcctcccgggtcctggcccttcccagagatcttctcactgaagtactggatccgttacaagcgtcagggagctgcgcgcttccaccgggtggggcccattgaagccacgtccttcatcctcagggctgtgcggccccgagccaggtactacgtccaagtggcggctcaggacctcacagactacggggaactgagtgactggagtctccccgccactgccacaatgagcctgggcaagtagcaagggcttcccgctgcctccagacagcacctgggtcctcgccaccctaagccccgggacacctgttggagggcggatgggatctgcctagcctgggctggagtccttgctttgctgctgctgagctgccgggcaacctcagatgaccgacttttccctttgagcctcagtttctctagctgagaaatggagatgtactactctctcctttacctttacctttaccacagtgcagggctgactgaactgtcactgtgagatattttttattgtttaattagaaaagaattgttgttgggctgggcgcagtggatcgcacctgtaatcccagtcactgggaagccgacgtgggagggtagcttgaggccaggagctcgaaaccagtccgggccacacagcaagaccccatctctaaaaaattaatataaatataaaataaaaaaaaaaaaaa

SEQ ID NO: 3408 - protein, 229 aa, Homo sapien
MTPQLLLALVLWASCPPCSGRKGPPAALTLPRVQCRASRYPIAVDCSWTLPPAPNSTSPVSFIATYRLGMAARGHSWPCLQQTPTSTSCTITDVQLFSMAPYVLNVTAVHPWGSSSSFVPFITEHIIKPDPPEGVRLSPLAERQLQVQWEPPGSWPFPEIFSLKYWIRYKRQGAARFHRVGPIEATSFILRAVRPRARYYVQVAAQDLTDYGELSDWSLPATATMSLGK

SEQ ID NO: 3409 - DNA, 1700 bp, Homo sapien
cggaattggtgggttcttggtctcactgagttctagaatgaagctgcagaccctcgcagtgagtgttacagctcttaaggctctctgactgccacccctgcctgcctgcccggccctgcacaacatgcagccctccggcctcgagggtcccggcacgtttggtcggtggcctctgctgagtctgctgctcctgctgctgctgctccagcctgtaacctgtgcctacaccacgccaggcccccccagagccctcaccacgctgggcgcccccagagcccacaccatgccgggcacctacgctccctcgaccacactcagtagtcccagcacccagggcctgcaagagcaggcacgggccctgatgcgggacttcccgctcgtggacggccacaacgacctgcccctggtcctaaggcaggtttaccagaaagggctacaggatgttaacctgcgcaatttcagctacggccagaccagcctggacaggcttagagatggcctcgtgggcgcccagttctggtcagcctatgtgccatgccagacccaggaccgggatgccctgcgcctcaccctggagcagattgacctcatacgccgcatgtgtgcctcctattctgagctggagcttgtgacctcggctaaagctctgaacgacactcagaaattggcctgcctcatcggtgtagagggtggccactcgctggacaatagcctctccatcttacgtaccttctacatgctgggagtgcgctacctgacgctcacccacacctgcaacacaccctgggcagagagctccgctaagggcgtccactccttctacaacaacatcagcgggctgactgactttggtgagaaggtggtggcagaaatgaaccgcctgggcatgatggtagacttatcccatgtctcagatgctgtggcacggcgggccctggaagtgtcacaggcacctgtgatcttctcccactcggctgcccggggtgtgtgcaacagtgctcggaatgttcctgatgacatcctgcagcttctgaagaagaacggtggcgtcgtgatggtgtctttgtccatgggagtaatacagtgcaacccatcagccaatgtgtccactgtggcagatcacttcgaccacatcaaggctgtcattggatccaagttcatcgggattggtggagattatgatggggccggcaaattccctcaggggctggaagacgtgtccacatacccggtcctgatagaggagttgctgagtcgtggctggagtgaggaagagcttcagggtgtccttcgtggaaacctgctgcgggtcttcagacaagtggaaaaggtacaggaagaaaacaaatggcaaagccccttggaggacaagttcccggatgagcagctgagcagttcctgccactccgacctctcacgtctgcgtcagagacagagtctgacttcaggccaggaactcactgagattcccatacactggacagccaagttaccagccaagtggtcagtctcagagtcctccccccacatggccccagtccttgcagttgtggccaccttcccagtccttattctgtggctctgatgacccagttagtcctgccagatgtcactgtagcaagccacagacaccccacaaagttcccctgttgtgcaggcacaaatatttcttgaaataaatgttttggacatagaaaaaa

SEQ ID NO: 3410 - protein, 486 aa, Homo sapien
MQPSGLEGPGTFGRWPLLSLLLLLLLLQPVTCAYTTPGPPRALTTLGAPRAHTMPGTYAPSTTLSSPSTQGLQEQARALMRDFPLVDGHNDLPLVLRQVYQKGLQDVNLRNFSYGQTSLDRLRDGLVGAQFWSAYVPCQTQDRDALRLTLEQIDLIRRMCASYSELELVTSAKALNDTQKLACLIGVEGGHSLDNSLSILRTFYMLGVRYLTLTHTCNTPWAESSAKGVHSFYNNISGLTDFGEKVVAEMNRLGMMVDLSHVSDAVARRALEVSQAPVIFSHSAARGVCNSARNVPDDILQLLKKNGGVVMVSLSMGVIQCNPSANVSTVADHFDHIKAVIGSKFIGIGGDYDGAGKFPQGLEDVSTYPVLIEELLSRGWSEEELQGVLRGNLLRVFRQVEKVQEENKWQSPLEDKFPDEQLSSSCHSDLSRLRQRQSLTSGQELTEIPIHWTAKLPAKWSVSESSPHMAPVLAVVATFPVLILWL

SEQ ID NO: 3411 - DNA, 2793 bp, Homo sapien
caggtcccccagaccatccgaaccagccgcccatgatgacctgcgagagactcccatgccccactgcaggcctgggccccctcagggaggaagcgatgaagccaggggcagcctccagtcccttgcagcaggtccccgccccgccactgcctgcgaagaagaaccttcccactgcccctcccagacgccgcgtttccgagagggtgtccttagaagaccaaagtccggggatggcggcagagggggaccagctcagcctgcctccccaagggacctcagacggccctgaggacacgccccgggagagcacggagcaaggccaggacacagaggtgaaagccagcgatcctcacagcatgccagagctgcccaggacagccaaacaacccccagtcccgccccccaggaaaaaacggatctctcgacaactggcctcgaccctcccagctcccttagagaacgctgagctctgcacacaggcgatggccttggagacacccacgccgggtccacccagagagggccaaagccctgcttctcaggctgggactcagcaccctcctgcccaggccactgcccattcccagagctctccagagttcaagggctccctggcctccctctcagacagcttgggggtgtctgtcatggccaccgaccaggactcctactccaccagcagcacggaggaggagctggagcagttcagcagccccagcgtgaagaagaagccctccatgatcctgggcaaggctcggcaccggctgagctttgccagtttcagcagcatgttccacgctttcctctccaacaaccgcaagctgtacaagaaggtggtggagctggcgcaggacaagggctcgtactttggcagcctggtgcaggactacaaggtgtacagcctggagatgatggcgcgccagacctccagcacggagatgctgcaggagattcgcaccatgatgacccagctcaagagctacctgctgcagagcaccgagctcaaggccctggtggaccccgccctgcactccgaggaggagctcgaagcaattgtagagtctgccttgtacaaatgtgtcctgaagcccctgaaggaagccatcaactcatgcctgcatcagatccacagcaaggatggttcgctgcagcagctcaaggagaaccagttagtgatcctggccaccaccaccactgacctaggtgtgaccaccagcgtgccggaggtgcccatgatggagaagttcctgcagaagttcaccagcatgcacaaggcctactcacctgagaagaagatctccatcctgctcaagacctgcaaactcatctacgactccatggccctcggcaacccagggaagccctatggggcggatgacttcctgcctgtgctcatgtatgtgctggcccgcagcaacctcacggagatgcttctcaatgtggagtacatgatggagctcatggaccccgccctgcagctgggggagggttcctactatctgaccaccacctacggggccctggagcacatcaagagctacgacaagatcacggtgacccggcagctgagtgtggaggtgcaggactccatccaccgctgggagcgccggcgtactctcaacaaggcccgggcctcccgctcctccgtacaggacttcatctgcgtgtcgtacctggagcccgagcagcaggcgcggacgctggcgtcgcgggcggacacccaggcccaggcgctgtgcgcgcagtgcgcggagaagttcgcggtggagcggccgcaggcgcaccggctgttcgtgctggtggacgggcgctgcttccagctggcggacgacgcgctgccgcactgcatcaagggctacctgctgcgcagcgagcccaagcgcgacttccactttgtctaccggcccctggacggtggtggcggcggcggcgggagcccgccctgcctggtggtgcgggagcccaacttcctgtgaggccctcccggggcgcctcccctcacccccaggcgcacgtctggccccgcctctggctgcgcactcccgaccgcgacgtccacgcagcagagggacatgggccattccatgacgtgcccaggccaacgtcgcaggacagttgtgaaaataacatgacgctcgtccaaggccacttcctgagggcaagtcctaatagccctgagacaccgagacggcatgttcttcattagacggaaagggaaactgaggctcaggagagaggcgctccaggccgctgcagccaacaaaccggcgccctcttcacacgtagctcctcaggccattccccatgagtcccccacacccaccccatcctcggtctttgcaaagaagggcccgagcttagtttccccaggactggcctaggaaggagcaccggccacagctgctccccgtgccactcagggtggacccagcatctcaggagcacctcagggtgtcggttaagagacaggcctccacccctgcaccagagcctgctcttagctcccggtgcccccagaccccgcagctctgtgcccggcaagaagcagctagacacacgccagggcgccaagcacggccagctccgcggacccatggacaagcccagccccgcctcagggaaaacagggcctttccctacaggacacgccccagagctgtggcagattgcaggagccatcgtgtggggagaatttaataaaagcccttttgaaaaaaaaaaaaaaaaaaaaaaaaaaaaaaaaaaaaaaaaaaaaaaaaaaaaaaaaaaaaaaaaaaaaaaaaaaaaaaaaaa

SEQ ID NO: 3412 - protein, 497 aa, Homo sapien
MALETPTPGPPREGQSPASQAGTQHPPAQATAHSQSSPEFKGSLASLSDSLGVSVMATDQDSYSTSSTEEELEQFSSPSVKKKPSMILGKARHRLSFASFSSMFHAFLSNNRKLYKKVVELAQDKGSYFGSLVQDYKVYSLEMMARQTSSTEMLQEIRTMMTQLKSYLLQSTELKALVDPALHSEEELEAIVESALYKCVLKPLKEAINSCLHQIHSKDGSLQQLKENQLVILATTTTDLGVTTSVPEVPMMEKFLQKFTSMHKAYSPEKKISILLKTCKLIYDSMALGNPGKPYGADDFLPVLMYVLARSNLTEMLLNVEYMMELMDPALQLGEGSYYLTTTYGALEHIKSYDKITVTRQLSVEVQDSIHRWERRRTLNKARASRSSVQDFICVSYLEPEQQARTLASRADTQAQALCAQCAEKFAVERPQAHRLFVLVDGRCFQLADDALPHCIKGYLLRSEPKRDFHFVYRPLDGGGGGGGSPPCLVVREPNFL

SEQ ID NO: 3413 - DNA, 2793 bp, Homo sapien; identical to SEQ ID NO: 3411

SEQ ID NO: 3414 - protein, 497 aa, Homo sapien; identical to SEQ ID NO: 3412

SEQ ID NO: 3415 - DNA, 4223 bp, Homo sapien
agtgcatcggccccgggtctgtccgggcgttgcgggattggggcctgggaacgctcggcccccggcagccgagaagcccgtgactgggctgagcagcaccatcccagccctggggcctgctgactgcccagtcccggcttcacctgcagcgaacccggagcgttgctatcctccaccggactgtcaggctctgcgcgccccgcggaggtcggcggcgaccagcagcgactgcggagcgacggcgggcggccccgggcatgtacgcccccggaggcgcagggctgcccggcgggcgccggcggaggagcccgggaggcagcgctctgcccaagcagccggagcgtagcctggcctcggccctgcctggcgccctgtctatcacggcgctgtgcactgccctcgccgagcccgcctggttgcacatccacggaggcacctgttcgcgccaggagctgggggtctccgacgtgttgggctatgtgcacccggacctgctgaaagatttctgcatgaatccccagacagtgctgctcctgcgggtcatcgccgccttctgtttcctgggcatcctgtgtagtctctccgctttccttctggatgtctttgggccgaagcatcctgctctgaagatcactcgtcgctatgccttcgcccatatcctaacggttctgcagtgtgccaccgtcattggcttttcttattgggcttctgaactcatcttggcccagcagcagcagcataagaagtaccatggatcccaggtctatgtcaccttcgccgttagcttctacctggtggcaggagctggtggagcctcaatcctggccacggcagccaacctcctgcgccactaccccacagaggaagaggagcaggcgctggagctgctctcagagatggaagagaacgagccctacccggcggaatatgaggtcatcaaccagttccagccaccccctgcttacacaccctaatgccagccctgggctctcttcctcggcagcccctccctcaactctgcagctcctctcgcacccagaggagctcctttccccagcaggcctcactggtaggatcctgaccatcttctccaaaccttccccaggagagactctgcctttagggtcatccaagtatccctgctctcagaaccggaggtccactggttttctataatgtactctttccctcctgccacatcctgcccccttcacattcacgagtcattaccagccagggaaggtcatccaagtttcctccagcatgggcgatatctttgggaccgagactttccttggagagctgctgagagcggacagtcccaaaaacaagtgtcaaagggcccaagggaaaggggactgtgccctggaggctcacttcacagggatcagtgtttgctccacagctgtagctctgggctgacgccccccagaccccttccttctcggagtgacccgcccccaggccacctgctccggggagttctgtgcactttactctttggacttctcctcacgtgtgccctggttttatggggagagggaatcgctgttgggaaggcagagcagttgcaaccctctctgcccttgcttcatgtggctggagcccaggcaaggagagcaggagccagcgtgagactgaggccccctggtgcctatcaaggaccagagtgaaggggactacatctcccagcccttcaccttttaaatatgagtggttttaaaaggaaaaaagtgaaaccaggcaacagcaacaatattctgtttttaaaatagggacaagactgttgtcactttttagacatgtatcccattccttttggctctgcaatatttggggctgtagctccttccaagcccatggtagtccctccccgagtctctcccagtagaatgcagcctcccttccctggccccttccctctcagtgacggtgactccctggggccttctcgtggaacccagaggggctgaggactgtggcctggctggcgggccagcgtggtgctcctcaggactgcagcactgagatggaacctggcctcagtttaggaacaggggccacaacagggcaggaacccaccaccctccacataggaatacaaccagtggggccacatcatgtgaggcatcagacccacactgtcagcccagcaggccgggctgtgtccttcagaccctgtgctgccctagactctgactcgggactccagcttgccacgtgccctctcccctcttgaatgtactctggtcttgcagtgtgctgctgggacttccttgctcagccatcactctggtcaccttgtttgctctgggtctggctgaattttctgccctgagatctgggcataaagtggatgaaacttgaaagaccttcagtgtagatccagatggccaacctgtccttgttaagttacttgcttcttgggaatcagtgtcccctgctgagctgaaaaggaaatggattccaatctcttccaacctttaaggtgatagatagtttgagcaagactggagaatggacaacactatgaagctgtggctagaaagggactgtcatgtcccatcctttggccagattgactggggatgtccggacagatgcctgcatgggtggtgagggccacatctgcacacgagccagtggctgcttgcagttcactgctgtgatgccagagtgtgttcaaaggtgactctcctgctcttctggactcttctctcaggcaagaaaggctgcaggctgcctgctatgtgatgcctgagcacaaagccaaggaactgaactaagtctttctgttaagtcctgagtttgtcattggcaggtttacttgtggccagctctctctgcccttgggtgtctgagcaggcagaccagaagaccaggcactggacctgcatgccaaagggactggtcatctcctgaggacctgtacatgaccctgtggactgttccgcacgatccggaacccactttttattcactccccatgtctttggccttcctcttctttctctttccctctgccatcctgacactgatagtttgtcatataaattccccgggttgtgtttttttttctagaaaaaaattaaaagggaaaacaaaaccaaaaaaaccagaaaccacgaataagaatggaaatgacaatggctgcctgtcatttttctgtcacgattttcctgatttggtttgttccctttgtctcagagaagcaggagatgttgatgaggctgtatttttttttctttttcttgtttttgagacaagagtctcgctctgtcacccgggctggagtgtaacgtggcatgatctcagctcactgcaacctctgcctcctgggttcaagcgattatcctgcctcagcctcctgagtagctgggattacaggcatgcgccactatgcccagataatttttttgtatttttagtagagacagggtttcaccatgttggccaggctggtctggaactcctaacctcaggttatccacccaccttggcctcccaaagtgctgggattataggcatgaaccaccgtgcctggccaaagatgtaatttaaaatagttaggagggacttggcatgggccagctccgtgcatggcattttcacccccagagcttcctaatcctgttttcacacaggaagtttctaggtctttctagaacagctagaaatagtagctgactcccgcccaaggcccaaccttcaaaccctgagctcttcaggctgcatcctctggtgagctatagaggagaacgtggctcctaaactctagccatcctgtgggaggaaatagacttctttgggctgtggcttgcagaacaaactacactttttttccctctattgtttaaattttatttaataatttgtgtgtttttctgtctttattttctgtatttcacgtgttccttcactccctagaaactgcactttctttgaaaccataggtaatgaatcttactaggagaggcatggggatagagacagttctgggagtgtgacctgtaagcctcctgtagggcagtgccaggccttgattgcccacgttctctccgttccttcttccttcatacatttgaccacacagcctacacccagccccgagtgtgcatcacggtaaaagagctgagggctctcttcagggagcagcccatttaggtctcttttgttgttgttagggagaatacacatctttcttggaaaaaaaaaaaaaaaaa

SEQ ID NO: 3416 - protein, 238 aa, Homo sapien
MYAPGGAGLPGGRRRRSPGGSALPKQPERSLASALPGALSITALCTALAEPAWLHIHGGTCSRQELGVSDVLGYVHPDLLKDFCMNPQTVLLLRVIAAFCFLGILCSLSAFLLDVFGPKHPALKITRRYAFAHILTVLQCATVIGFSYWASELILAQQQQHKKYHGSQVYVTFAVSFYLVAGAGGASILATAANLLRHYPTEEEEQALELLSEMEENEPYPAEYEVINQFQPPPAYTP

SEQ ID NO: 3417 - DNA, 2082 bp, Homo sapien
cttggctggaacctgagacggattcgctcccaaatgatgctccagtggctggagcaactcaagttcatcattgtcctgagagagaggagcagcgcggttctcggccgggacagcagaacgccaggggaccctcacctgggcgcgccggggcacgggctttgattgtcctggggtcgcggagacccgcgcgcctgccctgcacgccgggcggcaacctttgcagtcgcgttggctgctgcgatcggccggcgggtccctgccgaaggctcggctgcttctgtccacctcttacacttcttcatttatcggtggatcatttcgagagtccgtcttgtaaatgtttggcactttgctactttattgcttctttctggcgacagttccagcactcgccgagaccggcggagaaaggcagctgagcccggagaagagcgaaatatggggacccgggctaaaagcagacgtcgtccttcccgcccgctatttctatattcaggcagtggatacatcagggaataaattcacatcttctccaggcgaaaaggtcttccaggtgaaagtctcagcaccagaggagcaattcactagagttggagtccaggttttagaccgaaaagatgggtccttcatagtaagatacagaatgtatgcaagctacaaaaatctgaaggtggaagttaaattccaagggcaacatgtggccaaatccccatatattttaaaagggccggtttaccatgagaactgtgactgtcctctgcaagatagtgcagcctggctacgggagatgaactgccctgaaaccattgctcagattcagagagatctggcacatttccctgctgtggatccagaaaagattgcagtagaaatcccaaaaagatttggacagaggcagagcctatgtcactacaccttaaaggataacaaggtttatatcaagactcatggtgaacatgtaggttttagaattttcatggatgccatactactttctttgactagaaaggtgaagatgccagatgtggagctctttgttaatttgggagactggcctttggaaaaaaagaaatccaattcaaacatccatccgatcttttcctggtgtggctccacagattccaaggatatcgtgatgcctacgtacgatttgactgattctgttctggaaaccatgggccgggtaagtctggatatgatgtccgtgcaagctaacacgggtcctccctgggaaagcaaaaattccactgccgtctggagagggcgagacagccgcaaagagagactcgagctggttaaactcagtagaaaacacccagaactcatagacgctgctttcaccaactttttcttctttaaacacgatgaaaacctgtatggtcccattgtgaaacatatttcattttttgatttcttcaagcataagtatcaaataaatatcgatggcactgtagcagcttatcgcctgccatatttgctagttggtgacagtgttgtgctgaagcaggattccatctactatgaacatttttacaatgagctgcagccctggaaacactacattccagttaagagcaacctgagcgatctgctagaaaaacttaaatgggcgaaagatcacgatgaagaggccaaaaagatagcaaaagcaggacaagaatttgcaagaaataatctcatgggcgatgacatattctgttattatttcaaacttttccaggaatatgccaatttacaagtgagtgagccccaaatccgagagggcatgaaaagggtagaaccacagactgaggacgacctcttcccttgtacttgccataggaaaaagaccaaagatgaactctgatatgcaaaataacttctattagaataatggtgctctgaagactcttcttaactaaaaagaagaatttttttaagtattaattccatggacaatataaaatctgtgtgattgtttgcagtatgaagacacatttctacttatgcagtattctcatgactgtactttaaagtacatttttagaattttataataaaaccacctttattttaaaggaaaaaaaaaaaaaaaaaaaaaaa

SEQ ID NO: 3418 - protein, 502 aa, Homo sapien
MFGTLLLYCFFLATVPALAETGGERQLSPEKSEIWGPGLKADVVLPARYFYIQAVDTSGNKFTSSPGEKVFQVKVSAPEEQFTRVGVQVLDRKDGSFIVRYRMYASYKNLKVEVKFQGQHVAKSPYILKGPVYHENCDCPLQDSAAWLREMNCPETIAQIQRDLAHFPAVDPEKIAVEIPKRFGQRQSLCHYTLKDNKVYIKTHGEHVGFRIFMDAILLSLTRKVKMPDVELFVNLGDWPLEKKKSNSNIHPIFSWCGSTDSKDIVMPTYDLTDSVLETMGRVSLDMMSVQANTGPPWESKNSTAVWRGRDSRKERLELVKLSRKHPELIDAAFTNFFFFKHDENLYGPIVKHISFFDFFKHKYQINIDGTVAAYRLPYLLVGDSVVLKQDSIYYEHFYNELQPWKHYIPVKSNLSDLLEKLKWAKDHDEEAKKIAKAGQEFARNNLMGDDIFCYYFKLFQEYANLQVSEPQIREGMKRVEPQTEDDLFPCTCHRKKTKDEL

SEQ ID NO: 3419 - DNA, 3224 bp, Homo sapien
agcggtaaatttgaaatggctgacgggtcgctgacgggcggcggtctggaggcagcggccatggcgccggagcgcacgggctgggcggtggagcaggagctggcgtctctggagaaaggtttgttccaagatgaagattcatgcagtgattgtagctaccgtgataaaccaggttctagtttacaaagttttatgccagaaggaaaaacctttttcccagaaattttccaaacaaatcaacttttgttctatgagcgattcagagcctatcaagattacattttagctgactgcaaggcctctgaggtacaggaattcacagctgagttcttggagaaggtccttgagccatctggatggcgggcagtctggcacactaatgtgttcaaggtgctggttgagatcacagatgtggactttgcagccttgaaggcagtggtgaggcttgctgaaccatacctctgtgactctcaagtgagcacttttaccatggagtgcatgaaggagctccttgatctgaaggagcatcggttgcccctgcaggagctgtgggtggtgtttgatgattcaggagtgtttgaccagacagcccttgcaattgagcatgtcagatttttctaccaaaacatttggaggagttgggatgaagaagaggaggatgaatacgattattttgtcagatgtgttgaacctcgattaagattgcattatgacattcttgaagaccgagttccatcaggacttattgttgactaccacaatctgttgtctcaatgtgaggagagttacaggaaatttttaaatctgagaagcagtttgtcaaattgtaactctgattccgagcaggaaaatatctccatggtggaagggttaaaattgtattcggagatggaacagttgaaacaaaagctgaaactcattgagaatcctttgttgaggtatgtgtttggttatcagaagaattctaacatccaagcaaagggtgtccgttccagcggtcagaagatcactcatgtggtctcctccaccatgatggctggtctcctgcggtccctgcttacggacaggctttgccaggagcctggtgaggaagaaagagaaattcagttccatagtgatccattgtctgctataaatgcctgcttcgaaggtgacactgttattgtttgtcctggccattatgtggtacatggcactttctccattgctgactccattgagttggaaggatatggcctaccagatgacattgtgatagaaaagaggggcaaaggcgacacttttgtggactgcactggtgctgatattaaaatctcaggcataaaatttgttcagcatgatgctgtagagggaatcttaattgttcaccgtggtaagactacgctggaaaactgtgtgctgcagtgtgagacgaccggagtcacagtgcggacatcagcagagtttctaatgaagaactcggatttatatggcgccaagggtgctggtatagaaatctaccctgggagtcagtgcaccctgagtgacaatgggatccatcactgcaaggaagggatcctcattaaggacttcttagatgaacattatgacattcccaagatatccatggtgaataatataatacataataatgaaggttatggtgttgtcttggtgaaacctacaatcttctctgacctgcaagaaagtgctgaagatggaactgaagaaaataaagcgcttaaaattcagacaagtggagagccagatgtggctgaaagagtggatctagaagagctgattgagtgtgcaactggtaaaatggagctttgtgcaagaactgacccttctgagcaagtcgagggaaattgtgaaattgtaaatgaactaattgctgcctccacacagaaaggccagataaagaagaaaaggttgagtgaactggggatcacgcaagctgatgacaacttaatgtcacaggagatgtttgttgggattgtggggaaccagttcaagtggaatgggaaaggtagttttggcacatttcttttctgactacagtgatgtaagtagatagcaaaatactggattttgcacatgctgccctaagaatcactgctgccattgtagtttgctgtattgtctgtattttatatttgattatttgggcttgagtgaaaggtagatttatttccatttgcaggtgttgcacataaaacactccctctttataagaaaaatcataaatgcatataaaatagaaaatatttggagattgcttatctgaaagtcttgctttcttatacacatggttctctcatattaagcctggtggtaactttttagtgtaattacctttagcacttcaaagacgaggaagtaaggaagggaatgcaagactagtgcataaaaatgcaataggtgtcatatgtacagcattcttcttagagttgccttttcatcccaattacagtgagtctgatttccatcctgtatttgcataatacttgtcttaaaataaaagcttttatgattgggaatttatctgcctaatcagacttattattgagacgtcaatgggacgcatttttctgttgagctatgcagtcgtcaaaacagcgatagacagcataggaggtttgaagcagaaatgaaatgtgttattcagagccaatgttgtacatagagcattttcactattgctgaatgggaatgattaaaaacaaggtatttttcgggccaggcggtggctcacgcttgtaatcgcagcactttgggaggctgaggcaggaggatcacttgagcccaggagttcaagactagcctaggcaacatagtgagaccctgtctctactaaaaataaatttaaaaaaaattagctgagtgtggtggtgcatgcatgtagttccagctactcaggaggctgaggctagaggatccttgagcccaggaggttgaggctgcagtgaggtgtgattgcgccactgcattccagcttgggcgacagagcgagacccagtctcaaaaaaaaaaaaagtatttttctcttaccgttacagtattctgattatattactgacacagtcaaaatgattaactgtacaacctgtatctgctgggtgttcttgttatcatattgtaaaacagctttaaaaatatttatattttaaaaactgtatgtgacattaatatgcctaatgattaaaattatagtgatgaaataacaaagaaaaaaaaaaaaaaaa

SEQ ID NO: 3420 - protein, 672 aa, Homo sapien
MADGSLTGGGLEAAAMAPERTGWAVEQELASLEKGLFQDEDSCSDCSYRDKPGSSLQSFMPEGKTFFPEIFQTNQLLFYERFRAYQDYILADCKASEVQEFTAEFLEKVLEPSGWRAVWHTNVFKVLVEITDVDFAALKAVVRLAEPYLCDSQVSTFTMECMKELLDLKEHRLPLQELWVVFDDSGVFDQTALAIEHVRFFYQNIWRSWDEEEEDEYDYFVRCVEPRLRLHYDILEDRVPSGLIVDYHNLLSQCEESYRKFLNLRSSLSNCNSDSEQENISMVEGLKLYSEMEQLKQKLKLIENPLLRYVFGYQKNSNIQAKGVRSSGQKITHVVSSTMMAGLLRSLLTDRLCQEPGEEEREIQFHSDPLSAINACFEGDTVIVCPGHYVVHGTFSIADSIELEGYGLPDDIVIEKRGKGDTFVDCTGADIKISGIKFVQHDAVEGILIVHRGKTTLENCVLQCETTGVTVRTSAEFLMKNSDLYGAKGAGIEIYPGSQCTLSDNGIHHCKEGILIKDFLDEHYDIPKISMVNNIIHNNEGYGVVLVKPTIFSDLQESAEDGTEENKALKIQTSGEPDVAERVDLEELIECATGKMELCARTDPSEQVEGNCEIVNELIAASTQKGQIKKKRLSELGITQADDNLMSQEMFVGIVGNQFKWNGKGSFGTFLF

SEQ ID NO: 3421 - DNA, 3947 bp, Homo sapien
ttgggaaacccctacctgtctgtacctgtaggtcttttctctggggtctggaagaagaatccttcaatatcttgccttctggtaatctgagagcagggcgagaaaaggaagatcagagttccacccttaaatctgtaggttttcactcccccactctcctttgcagtcccgtggagtctccatctgagccctttcctagtccaggcatcccgatgttggtggatggcccatctgagcggccagccctgtgcttcttgctgttggctgtggcaatgtctttcttcggctcagctctatccatagatgaaacacgggcgcatctgttgttgaaagaaaagatgatgcggctgggggggcggctggtgctgaataccaaggaggagctggccaatgagaggctcatgacgctcaaaatcgctgagatgaaggaggccatgaggaccctgatattcccacccagcatgcactttttccaggccaagcatctcattgagagaagtcaagtgtttaatattctaaggatgatgccaaaaggggctgccttgcacctccatgacattggcatcgtgactatggactggctggtgaggaatgtcacctacaggcctcactgccacatctgtttcaccccaagggggatcatgcagttcagatttgctcacccaactccccgtccatcagaaaaatgttccaagtggattctgctggaggattatcggaagcgggtgcagaacgtcactgagtttgatgacagcttgctgaggaatttcactctggtgacccagcacccggaggtgatttacacaaaccaaaatgttgtctggtcgaaatttgaaaccatcttcttcaccatctctggtctcatccattacgcaccagtgttcagagactatgtcttccggagcatgcaggagttctacgaggacaacgtgctctacatggagatcagagccaggctgctgccggtgtatgagctcagtggagagcaccatgacgaagagtggtcagtgaagacttaccaggaagtagctcagaagtttgtggaaactcaccctgagtttattggaatcaaaatcatttattcggatcacagatccaaagatgtggctgtcatcgcagaatccatccgaatggccatggggctccgaatcaagttccccacggtggtggcagggtttgacctggtggggcatgaggacactggccactccttgcatgactacaaggaagctctgatgatccccgccaaggatggcgttaagctgccttacttcttccacgccggagaaacagactggcagggtacttccatagacaggaacattctggatgctctgatgctgaacactaccagaatcggccatggatttgctttgagcaaacaccccgcagtcaggacttactcctggaaaaaggacatccccatagaagtctgtcccatctctaaccaggtgctgaaactggtgtctgacttgaggaaccaccctgtagccactctgatggccactgggcaccccatggtgatcagctctgatgacccagctatgtttggtgccaaaggcttgtcctatgatttctatgaggtcttcatgggcattggggggatgaaggctgacctgaggaccctcaaacagctggccatgaactctatcaagtacagtaccctgttggagagtgagaaaaatactttcatggaaatctggaagaagagatgggataagttcatagcagatgtggctacaaagtgaggagaagctagccagccctctacaagctgtcttcttgcacacgctgtcacttcctctcactcgttcttgaatcagctccatgtgcccatgaaatcaatggcctctgtatggagcgaccctgtgagaagcacttggctggctgagcaaattcatcctctggaaatattctctctcagccacagtgacattgaccctcttggttttctcctgtctctggccatttcttccagtttccctatttcagagtcttctcctctctctgatctctgtgctgtttcctcaggactcagtcctgggctctcttctattctggtctctttatttttttatttttgtattttttcgagatggagttttgctcttgttgcccaggctggagtacaatggtgcgatctcagctcagtgcaacctccgccacccgggttcaggcaattctcttgcatcagcctcgcgagtagttggaattataggcatgtgccaccacacccagctgatttttgcatttttagtagagacaggttttcaccatgttggcgaggctggtatccaactcttgacctcaggtgatccactcgccccttggctcccaaagtgctggaattacaggcattagccaccatgcctggcctattctggtctctttaactctctcctctttatttctcttctctctctgtacacttttcctgggtggtctcatccattcctttgctttttcataccatttatttgttaatgattcccacatttatttatgcacttggagagctcacaggaatctcagaaactgatgaggtacaattctgaaccctcagtctcttccctttaaacctttctttttctctactttaatttttctaaagagtgtcttgctatgttgcccaggctggtctccaactcaagtgatcctcctgccgcagtctcccgaagtgctgggattactgacatgagccaccacactcagccctttaaacctttccctggcctttcccatagctggtgaaggacacctccatccattccacgcagttgctcaaagcagaaattttcagtgcaagtcttgatgctgcgccgtcccccactccctacatcagaacgcatccctcatctggactccagcggtggcttcttgatgctgcgcggtcccccactccctacatcagaatgcatcccgcatccagactccagcggtggtgctctacctgcacgctgttgccaagtccaagctaccatactcctgcctgagctatgacaacagcctcctcactgatctcccctttcttccctttgcctcctccagctcatttttcacagtgtagaatgacattttgtttgtttgttttgttttgtttgagatggagtctcgctctgttgcccagggtggagtgcagcggtgcgatctcggctcactgcaacctccacctcccgggttcaagcggattctcgtgcctcagcctcctgagtagctgggattacaggcatgcaccaccatgcccggataatttttgtatttttagtagagatggggtttcactatgttggccaggctggtctcgaacacctgacctcgtggtccacccgcctcggcctcccaaagcactgggattacaggcgtgagccacccggcctggcctagaatgacttttaaaagatcaaattaaatcaggtcactcctttgcttacaacgcagtgcgtttagaggtacaccccatgtctccacagggcatacagcatccgatttaatctggatccattccggcgccttcctctcccagtcacccagagggccccaaccccggcggccctttcttcctcaaatgtcctcggctctataccgtgcctgggtcttttctctttctctctgcctggaagattccttctttccccttttgtcttgcccactcctgtttacccttcaagtttcaagttcatgtcactgtctcagagaggttttcctgtgctcgccctgtttctctcaggaagccttgctcttttccatcatgcctctaatcacagcttataatcggatatttatttctgtgtctacagtcttgccctgccagactgtatgccccatgtgggcaggcgctcatgattgtttctgattgtttcacgcatgctgctaacccagagcctgggcccaaagctagttagtactcaataaacaatgcattgaatgcattgaaaaaaaaaaaaaaa

SEQ ID NO: 3422 - protein, 511 aa, Homo sapien
MLVDGPSERPALCFLLLAVAMSFFGSALSIDETRAHLLLKEKMMRLGGRLVLNTKEELANERLMTLKIAEMKEAMRTLIFPPSMHFFQAKHLIERSQVFNILRMMPKGAALHLHDIGIVTMDWLVRNVTYRPHCHICFTPRGIMQFRFAHPTPRPSEKCSKWILLEDYRKRVQNVTEFDDSLLRNFTLVTQHPEVIYTNQNVVWSKFETIFFTISGLIHYAPVFRDYVFRSMQEFYEDNVLYMEIRARLLPVYELSGEHHDEEWSVKTYQEVAQKFVETHPEFIGIKIIYSDHRSKDVAVIAESIRMAMGLRIKFPTVVAGFDLVGHEDTGHSLHDYKEALMIPAKDGVKLPYFFHAGETDWQGTSIDRNILDALMLNTTRIGHGFALSKHPAVRTYSWKKDIPIEVCPISNQVLKLVSDLRNHPVATLMATGHPMVISSDDPAMFGAKGLSYDFYEVFMGIGGMKADLRTLKQLAMNSIKYSTLLESEKNTFMEIWKKRWDKFIADVATK

SEQ ID NO: 3423 - DNA, 7603 bp, Homo sapien
ttttcttgcttttcttcccttttttttctttttgcaaacaaaacaaaaaacagcatagaagaaagagcaaaataaagaagaagaagaggaggaagagagggaaagagaggaagggaaaaaaaacaccaacccgggcagaggaggaggtgcggcggcggcggcggcggcggcagcggcggcagcggcgcggcggcggctcggaccccctcccccggctccccccatcagtgcagctctccgggcgatgccagaatagatgccggggcaatgtcccgccgcaaacagggcaacccgcagcacttgtcccagagggagctcatcaccccagaggctgaccatgtggaggccgccatcctcgaagaagacgagggtctggagatagaggagccaagtggcctggggctgatggtgggtggccccgaccctgacctgctcacctgtggccagtgtcaaatgaacttccccttgggggacatcctggtttttatagagcacaaaaggaagcagtgtggcggcagcttgggtgcctgctatgacaaggccctggacaaggacagcccgccaccctcctcacgctccgagctcaggaaagtgtccgagccggtggagatcgggatccaagtcacccccgacgaagatgaccacctgctctcacccacgaaaggcatctgtcccaagcaggagaacattgcaggtaaagatgagccttccagctacatttgcacaacatgcaagcagcccttcaacagcgcgtggttcctgctgcagcacgcgcagaacacgcacggcttccgcatctacctggagcccgggccggccagcagctcgctcacgccgcggctcaccatcccgccgccgctcgggccggaggccgtggcgcagtccccgctcatgaatttcctgggcgacagcaaccccttcaacctgctgcgcatgacgggccccatcctgcgggaccacccgggcttcggcgagggccgcctgccgggcacgccgcctctcttcagtcccccgccgcgccaccacctggacccgcaccgcctcagtgccgaggagatggggctcgtcgcccagcaccccagtgccttcgaccgagtcatgcgcctgaaccccatggccatcgactcgcccgccatggacttctcgcggcggctccgcgagctggcgggcaacagctccacgccgccgcccgtgtccccgggccgcggcaaccctatgcaccggctcctgaaccccttccagcccagccccaagtccccgttcctgagcacgccgccgctgccgcccatgccccctggcggcacgccgcccccgcagccgccagccaagagcaagtcgtgcgagttctgcggcaagaccttcaagttccagagcaatctcatcgtgcaccggcgcagtcacacgggcgagaagccctacaagtgccagctgtgcgaccacgcgtgctcgcaggccagcaagctcaagcgccacatgaagacgcacatgcacaaggccggctcgctggccggccgctccgacgacgggctctcggccgccagctcccccgagcccggcaccagcgagctggcgggcgagggcctcaaggcggccgacggtgacttccgccaccacgagagcgacccgtcgctgggccacgagccggaggaggaggacgaggaggaggaggaggaggaggaggagctgctactggagaacgagagccggcccgagtcgagcttcagcatggactcggagctgagccgcaaccgcgagaacggcggtggtggggtgcccggggtcccgggcgcggggggcggcgcggccaaggcgctggctgacgagaaggcgctggtgctgggcaaggtcatggagaacgtgggcctaggcgcactgccgcagtacggcgagctcctggccgacaagcagaagcgcggcgccttcctgaagcgtgcggcgggcggcggggacgcgggcgacgacgacgacgcgggcggctgcggggacgcgggcgcgggcggcgcggtcaacgggcgcgggggcggcttcgcgccaggcaccgagcccttccccgggctcttcccgcgcaagcccgcgccgctgcccagccccgggctcaacagcgccgccaagcgcatcaaggtggagaaggacctggagctgccgcccgccgcgctcatcccgtccgagaacgtgtactcgcagtggctggtgggctacgcggcgtcgcggcacttcatgaaggaccccttcctgggcttcacggacgcacgacagtcgcccttcgccacgtcgtccgagcactcgtccgagaacggcagcctgcgcttctccacgccgcccggggacctgctggacggcggcctctcgggccgcagcggcacggccagcggaggcagcaccccgcacctgggcggcccgggccccgggcggcccagctccaaggagggccgccgcagcgacacgtgcgagtactgcggcaaggtgttcaagaactgcagcaacttgacggtgcaccggcggagccacaccggcgagcggccttacaagtgcgagctgtgcaactacgcgtgcgcgcagagcagcaagctcacgcgccacatgaagacgcacgggcagatcggcaaggaggtgtaccgctgcgacatctgccagatgcccttcagcgtctacagcaccctggagaaacacatgaaaaagtggcacggcgagcacttgctgactaacgacgtcaaaatcgagcaggccgagaggagctaagcgcgcgggccccggcgccccgcacctgtacagtggaaccgttgccaaccgagagaatgctgacctgacttgcctccgtgtcaccgccaccccgcaccccgcgtgtccccggggcccaggggaggcggcactccaacctaacctgtgtctgcgaagtcctatggaaacccgagggttgattaaggcagtacaaattgtggagccttttaactgtgcaataatttctgtatttattgggttttgtaatttttttggcatgtgcaggtactttttattattattttttctgtttgaattcctttaagagattttgttgggtatccatcccttctttgttttttttttaacccggtagtagcctgagcaatgactcgcaagcaatgttagaggggaagcatatcttttaaattataatttggggggaggggtggtgctgcttttttgaaatttaagctaagcatgtgtaatttcttgtgaagaagccaacactcaaatgacttttaaagttgtttactttttcattccttccttttttttgtcctgaaataaaaagtggcatgcagttttttttttaattattttttaattttttttttggtttttgtttttggggtggggggtgtggatgtacagcggataacaatctttcaagtcgtagcactttgtttcagaactggaatggagatgtagcactcatgtcgtcccgagtcaagcggccttttctgtgttgatttcggctttcatattacataagggaaaccttgagtggtggtgctgggggaggcaccccacagactcagcgccgccagagatagggtttttggagggctcctctgggaaatggcccgacagcattctgaggttgtgcatgaccagcagatactatcctgttggtgtgccctggggtgccatggctgctattcgctgtagattaggctacataaaatgggctgagggtacctttttggggagatggggtggcctgcagtgacacagaaaggaagaaactagcggtgttcttttaggcgttttctggcttgacggcttctctctttttttaaatcacccccaccacataaatctcaaatcctatgttgctacaaggggtcatccatcatttcccaagcagacgaatgccctaattaattgaagttagtgttctctcatttaatgcacactgatgatattgtagggatgggtggggtggggatcttgcaaatttctattctcttttactgaaaaagcaggggatgagttccatcagaaggtgcccagcgctacttcccaggtttttattttttttttcctatctcattaggttggaaggtactaaatattgaactgttaagattagacatttgaattctgttgacccgcactttaaagcttttgtttgcatttaaattaaatggcttctaaacaagaaattgcagcatattcttctctttggcccagaggtgggttaaactgtaagggacagctgagattgagtgtcagtattgctaagcgtggcattcacaatactggcactataaagaacaaaataaaataataatttataggacagtttttctactgccattcaatttgatgtgagtgccttgaaaactgatcttcctatttgagtctcttgagacaaatgcaaaactttttttttgaaatgaaaagactttttaaaaaagtaaaacaagaaaagtacattctttagaaactaacaaagccacatttactttaagtaaaaaaaaaaaaaattctggttgaagatagaggatatgaaatgccataagacccaatcaaatgaagaaataaacccagcacaaccttggacatccattagctgaattatcctcagccccttttgtttttgggacaacgctgcttagatatggagtggaggtgatttactgctgaattaaaactcaagtgacacaagttacaagttgatatcgttgaatgaaaagcaaaacaaaaacaattcaggaacaacggctaattttttctaaagttaaatttagtgcactctgtcttaaaaatacgtttacagtattgggtacatacaagggtaaaaaaaaaattgtgtgtatgtgtgttggagcgatctttttttttcaaagtttgcttaataggttatacaaaaatgccacagtggccgcgtgtatattgttttcttttggtgacggggttttagtatatattatatatattaaaatttcttgattactgtaaaagtggaccagtatttgtaataatcgagaatgcctgggcattttacaaaacaagaaaaaaaatacccttttcttttccttgaaaatgttgcagtaaaatttaaatggtgggtctataaatttgttcttgttacagtaactgtaaagtcggagttttagtaaatttttttctgccttgggtgttgaatttttatttcaaaaaaaatgtatagaaacttgtatttggggattcaaaggggattgctacaccatgtagaaaaagtatgtagaaaaaaagtgcttaatattgttattgctttgcagaaaaaaaaaaaatcacatttctgacctgtacttatttttctcttcccgcctccctctggaatggatatattggttggttcatatgatgtaggcacttgctgtatttttactggagctcgtaattttttaactgtaagcttgtccttttaaagggatttaatgtacctttttgttagtgaatttggaaataaaaagaaaaaaaaaacaaaaacaaacaggctgccataatatatttttttaatttggcaggataaaatattgcaaaaaaaacacatttgtatgttaagtcctattgtacaggagaaaaagggttgtttgacaacctttgagaaaaagaaacaaaaggaagtagttaaatgctttggttcacaaatcatttagttgtatatattttttgtcggaattggcctacacagagaaccgttcgtgttgggcttctctctgaacgccccgaaccttgcatcaaggctccttggtgtggccacagcagaccagatgggaaattatttgtgttgagtggaaaaaaatcagtttttgtaaagatgtcagtaacattccacatcgtcctccctttctctaagaggccatctctaagatgtcagatgtagaggagagagagcgagagaacatcttccttctctaccatcactcctgtggcggtcaccaccaccacctctcccgcccttaccagcagaaagcaatgcaaactgagctgctttagtccttgagaaattgtgaaacaaacacaaatatcataaaaggagctggtgattcagctgggtccaggtgaagtgacctgctgttgagaccggtacaaattggatttcaggaaggagactccatcacagccaggacctttcgtgccatggagagtgttggcctcttgtctttcttccctgctttgctgctttgctctctgaaacctacattccgtcagtttccgaatgcgagggcctgggatgaatttggtgcctttccatatctcgttctctctccttcccctgcgtttcctctccatccttcatcctccattggtcctttttttttctttcattttttatttaatttcttttcttcctgtctgttcctcccctaatcctctattttatttttattttttgtaaagccaagtagctttaagataaagtggtggtcttttggatgagggaataatgcatttttaaataaaataccaatatcaggaagccattttttatttcaggaaatgtaagaaaccattatttcaggttatgaaagtataaccaagcatccttttgggcaattccttaccaaatgcagaagcttttctgttcgatgcactctttcctccttgccacttacctttgcaaagttaaaaaaaaggggggagggaatgggagagaaagctgagatttcagtttcctactgcagtttcctacctgcagatccaggggctgctgttgcctttggatgccccactgaggtcctagagtgcctccagggtggtcttcctgtagtcataacagctagccagtgctcaccagcttaccagattgccaggactaagccatcccaaagcacaagcattgtgtgtctctgtgactgcagagaagagagaattttgcttctgttttgtgtttaaaaaaccaacacggaagcagatgatcccgagagagaggcctctagcatgggtgacccagccgacctcaggccggtttccgcactgccacaactttgttcaaagttgcccccaattggaacctgccacttggcattagagggtctttcatggggagagaaggagactgaattactctaagcaaaatgtgaaaagtaaggaaatcagcctttcatcccggtcctaagtaaccgtcagccgaaggtctcgtggaacacaggcaaacccgtgattttggtgctccttgtaactcagccctgcaaagcaaagtcccattgatttaagttgtttgcatttgtactggcaaggcaaaatatttttattaccttttctattacttattgtatgagcttttgttgtttacttggaggttttgtcttttactacaagtttggaactatttattattgcttggtatttgtgctctgtttaagaaacaggcacttttttttattatggataaaatgttgagatgacaggaggtcatttcaatatggcttagtaaaatatttattgttcctttattctctgtacaagattttgggcctctttttttccttaatgtcacaatgttgagttcagcatgtgtctgccatttcatttgtacgcttgttcaaaaccaagtttgttctggtttcaagttataaaaataaattggacatttaacttgatctccaaa

SEQ ID NO: 3424 - protein, 823 aa, Homo sapien
MSRRKQGNPQHLSQRELITPEADHVEAAILEEDEGLEIEEPSGLGLMVGGPDPDLLTCGQCQMNFPLGDILVFIEHKRKQCGGSLGACYDKALDKDSPPPSSRSELRKVSEPVEIGIQVTPDEDDHLLSPTKGICPKQENIAGKDEPSSYICTTCKQPFNSAWFLLQHAQNTHGFRIYLEPGPASSSLTPRLTIPPPLGPEAVAQSPLMNFLGDSNPFNLLRMTGPILRDHPGFGEGRLPGTPPLFSPPPRHHLDPHRLSAEEMGLVAQHPSAFDRVMRLNPMAIDSPAMDFSRRLRELAGNSSTPPPVSPGRGNPMHRLLNPFQPSPKSPFLSTPPLPPMPPGGTPPPQPPAKSKSCEFCGKTFKFQSNLIVHRRSHTGEKPYKCQLCDHACSQASKLKRHMKTHMHKAGSLAGRSDDGLSAASSPEPGTSELAGEGLKAADGDFRHHESDPSLGHEPEEEDEEEEEEEEELLLENESRPESSFSMDSELSRNRENGGGGVPGVPGAGGGAAKALADEKALVLGKVMENVGLGALPQYGELLADKQKRGAFLKRAAGGGDAGDDDDAGGCGDAGAGGAVNGRGGGFAPGTEPFPGLFPRKPAPLPSPGLNSAAKRIKVEKDLELPPAALIPSENVYSQWLVGYAASRHFMKDPFLGFTDARQSPFATSSEHSSENGSLRFSTPPGDLLDGGLSGRSGTASGGSTPHLGGPGPGRPSSKEGRRSDTCEYCGKVFKNCSNLTVHRRSHTGERPYKCELCNYACAQSSKLTRHMKTHGQIGKEVYRCDICQMPFSVYSTLEKHMKKWHGEHLLTNDVKIEQAERS

SEQ ID NO: 3425 - DNA, 792 bp, Homo sapien
ccaagctccagctgtttgtcaaggcgagtgaggacggggagagcgtgggtcactgcccctcctgccagcggtcttcatggtcctgctcctcaagggcgtacctttcaccctcaccacggtggacacgcgcaggtccccggacgtgctgaaggacttcgcccccggctcgcagctgcccatcctgctctatgacagcgacgccaagacagacacgctgcagatcgaggactttctggaggagacgctggggccgcccgacttccccagcctggcgcctcgttacagggagtccaacaccgccggcaacgacgttttccacaagttctccgcgttcatcaagaacccggtgcccgcgcaggacgaagccctgtaccagcagctgctgcgcgccctcgccaggctggacagctacctgcgcgcgcccctggagcacgagctggcgggggagccgcagctgcgcgagtcccgccgccgcttcctggacggcgacaggctcacgctggccgactgcagcctcctgcccaagctgcacatcgtcgacacggtgtgcgcgcacttccgccaggcgcccatccccgcggagctgcgcggcgtacgccgctacctggacagcgcgatgcaggagaaagagttcaaatacacgtgtccgcacagcgccgagatcctggcggcctaccggcccgccgtgcacccccgctagcgccccaccccgcgtctgtcgcccaataaaggcatctttgtcgggaaaaaaaaaaaaaaaaaaaaaaaaaaaaaaaaaaaaaaaaaaaaaaa

SEQ ID NO: 3426 - protein, 207 aa, Homo sapien
MVLLLKGVPFTLTTVDTRRSPDVLKDFAPGSQLPILLYDSDAKTDTLQIEDFLEETLGPPDFPSLAPRYRESNTAGNDVFHKFSAFIKNPVPAQDEALYQQLLRALARLDSYLRAPLEHELAGEPQLRESRRRFLDGDRLTLADCSLLPKLHIVDTVCAHFRQAPIPAELRGVRRYLDSAMQEKEFKYTCPHSAEILAAYRPAVHPR

SEQ ID NO: 3427 - DNA, 2992 bp, Homo sapien
ctcgtctttctcccgggaaccttgacgacgccttccgcttggccctgccttctgccgcatccccgccgccgcggcgccttgaggagcaggagaagacgcagccgggccgccgccgttagaggggttcccggccgccgctcgccccgtcggccgccaccgcctccggggtcagccctctctctgggtctccgctttctcctgccgccagcgcccgctcatcgccgcgatggggctcctggactcggagccgggtagtgtcctaaacgtagtgtccacggcactcaacgacacggtagagttctaccgctggacctggtccatcgcagataagcgtgtggaaaattggcctctgatgcagtctccttggcctacactaagtataagcactctttatctcctgtttgtgtggctgggtccaaaatggatgaaggaccgagaaccttttcagatgcgtctagtgctcattatctataattttgggatggttttgcttaacctctttatcttcagagagttattcatgggatcatataatgcgggatatagctatatttgccagagtgtggattattctaataatgttcatgaagtcaggatagctgctgctctgtggtggtactttgtatctaaaggagttgagtatttggacacagtgttttttattctgagaaagaaaaacaaccaagtttctttccttcatgtgtatcatcactgtacgatgtttaccttgtggtggattggaattaagtgggttgcaggaggacaagcattttttggagcccagttgaattcctttatccatgtgattatgtactcatactatgggttaactgcatttggcccatggattcagaaatatctttggtggaaacgatacctgactatgttgcaactgattcaattccatgtgaccattgggcacacggcactgtctctttacactgactgccccttccccaaatggatgcactgggctctaattgcctatgcaatcagcttcatatttctctttcttaacttctacattcggacatacaaagagcctaagaaaccaaaagctggaaaaacagccatgaatggtatttcagcaaatggtgtgagcaaatcagaaaaacaactcatgatagaaaatggaaaaaagcagaaaaatggaaaagcaaaaggagattaaattgaactgggccttaactgttgttgacagtgaggaaaaactcccatatcatataaaatttcagggaaaacagaagcaaaggagagcttgggggtggggagaaaagacaaatgtgctctatgtcctagtaactcttagactgagtaaagtgttaataccatacccagatgttttatttatgaagtttttattttaaacattttttttaaaaattagccttgatattctccagaccaaagcaatcattaagtgactttggggattctccccctgttcacatccagttgtctaaaggatgagatttttcatgtatcttatagtcactcattcttcggtctgaattttagacgatcacagaaacggtctttatgaattattttgataaattactaattatcttatctactgactgaaatcagtggtgttacattttcttgtccaaagctgaaaatgtgtatacacttaaacttgcacatttgaattcatttgctgaccggaatggtcaaatctctccacctctagtcagagtataattttggttgtaattaaatttttaaaatctgctgatctctgtagaatcttagaggcttgatgatgatggtgttggtgaaaataagaaagaattgcagtaaagtcttgtctggtgacccagagatcaccatgacttgaggcacaaatcactgtggggaaacaattttttgtgatgaaaaggcagcatttgaatactcctgttagtagcagaaatatattatgaaaattaagattattgtctgattgaaacatgaaacaactcatgtctttattagtaacatcataagatagttacatttatgtgctgttagaatatgttgatttttatcaggctttccttgttttgatttatggctgttcctgatttttcatatgtggaaatatacctacctcttccgttggaaagaacatttaaaattaaataaattttaattaaaaaatcaaggagtcttctaatgtaaattttaatgttaactttcaaatccactagtattttttttgcttttatgacaaatagcatacaccaaacatttctgtgaaactatccttctctttcaatgtgtttaattttggagtaacgttttccttgtgactaagttgcaagatcttatttattaactaggtatgaagtataaacccattttggtgcaatattcttgactccttggtgctaaagattgttaaattcaatgcttgatgttacaaggtgttgttaaaacacaaaatgaataaaagtgagagtagtcagaactataacattcaatttgctatttacaaatgaagtatttcatgtaatataagtgaacaactggaaataaagtaggaaagaatttgtatcatgttttactacataggttaattttttaagggatgttgcaaagggattactagagaaagacaaaatgtgaccaaaaaaaagcatgaatatttcttaagtatctcaacaacatgtcaaagctgcatgtgtaggatgtatgctgtttgtacaaactatttcagaatattttgtaagctataacatatttattgtgcattaaaattaaatactttttccccaaaggcatgcagtcatgagaattacagaaaatttgcaacatataaagtagtttgatctaagaggattcaacacctttgttttgttgctcagtgtgtaatgactgagatttgtaaatctttgtgaacattctgtactggttcccaagagctattcattccctgctacctgatttcagcacaataaatatacttctgctgtgggaaaaataaaaaaaaaaaaaaaaaaaaaaaaaa

SEQ ID NO: 3428 - protein, 314 aa, Homo sapien
MGLLDSEPGSVLNVVSTALNDTVEFYRWTWSIADKRVENWPLMQSPWPTLSISTLYLLFVWLGPKWMKDREPFQMRLVLIIYNFGMVLLNLFIFRELFMGSYNAGYSYICQSVDYSNNVHEVRIAAALWWYFVSKGVEYLDTVFFILRKKNNQVSFLHVYHHCTMFTLWWIGIKWVAGGQAFFGAQLNSFIHVIMYSYYGLTAFGPWIQKYLWWKRYLTMLQLIQFHVTIGHTALSLYTDCPFPKWMHWALIAYAISFIFLFLNFYIRTYKEPKKPKAGKTAMNGISANGVSKSEKQLMIENGKKQKNGKAKGD

SEQ ID NO: 3429 - DNA, 3205 bp, Homo sapien
agcgggagtctttcgttctgggaggcccaggcggcttcgcgttctgagaataaacagaacctctgttgctctgcgacttgcaggcactgggagattcgtagctaagacgccagggcatcccggaagctgggaaatgggactgttgacattcagggatgtggccgtagaattctctttggaggagtgggaacacctggaaccagctcagaagaatttgtatcagaatgtgatgttagaaaactacagaaacctggtctctctgggtcttgttgtctctaagccggacctgatcacctttttggaacaaaggaaagagccttggaatgtgaagagtgaggagacagtagccatccagccagatgtgttttcgcattataacaaggacctgttgacagagcactgcacagaagcttcattccaaaaagtgatatcgaggagacatgggagctgtgatcttgagaatttacatttaagaaaaaggtggaaaagggaggagtgtgaagggcacaatggatgttatgatgaaaagacttttaaatatgatcaatttgatgaatcctctgttgaaagtttgtttcaccagcaaatactttcttcttgtgccaaaagctataactttgatcaatataggaaggtctttactcattcatcattgcttaatcaacaagaggaaatagatatttggggaaaacatcacatatatgataaaacttcagtgttatttaggcaggtctctactctaaatagttaccgaaatgtttttattggagagaaaaattatcattgcaataattctgaaaaaaccttgaaccaaagctcaagccctaaaaatcatcaggaaaattattttctagaaaaacaatacaaatgtaaagaatttgaggaagtctttcttcagagtatgcatgggcaagagaaacaagaacagtcttacaaatgtaataaatgtgtagaagtttgtacccagtcattaaaacatattcaacatcagaccatccatatcagagaaaactcatatagctataacaaatatgataaagatcttagtcagtcatcaaatcttagaaagcagataatccataatgaagagaaaccatacaaatgtgaaaaatgtggggatagcttaaaccatagtttgcaccttactcaacatcagatcattcctaccgaagagaaaccctataaatggaaagaatgtggcaaggtctttaaccttaactgtagtttataccttactaaacagcagcaaattgatactggagaaaacctttacaaatgtaaagcatgtagcaaatcttttactcgttcctccaatcttattgtgcatcagagaattcacactggagagaaaccatacaaatgtaaagaatgtggcaaagcctttcgctgtagttcataccttactaaacataagcgaattcatactggagagaaaccttataaatgtaaagaatgtggaaaagcttttaaccgtagttcatgccttactcaacatcagacaactcatacaggagaaaaactttacaaatgtaaagtatgtagcaaatcttatgctcgttcttcaaatcttattatgcatcagagagttcatactggagagaagccttataaatgtaaagaatgtggcaaagtctttagccgtagttcttgccttactcaacatcggaaaattcatactggagaaaatctttacaaatgcaaagtatgtgctaaaccttttacttgtttctcaaatcttattgtgcatgagagaattcatactggagagaaaccctataaatgtaaagaatgtggcaaagcctttccttatagttcacaccttattcgacatcatcgaattcatactggagaaaaaccatacaaatgtaaagcatgtagcaaatcttttagtgactcctcaggtcttactgtgcatcggcgaactcatactggagagaaaccctatacatgtaaagaatgtggcaaagcctttagttatagttcagatgttattcagcatcggagaattcatactggccagagaccctacaaatgtgaagaatgtggcaaagccttcaactataggtcatacctcactacacatcagagaagtcatactggagagagaccctacaaatgtgaagaatgtggcaaagccttcaactctaggtcatacctcactacacatcggagaagacatactggagagagaccctacaaatgtgatgaatgtggtaaagccttcagctataggtcatacctcactacacatcggagaagtcatagtggagagagaccctacaaatgtgaagaatgtggcaaagcctttaactctaggtcatacctcattgcacatcagagaagtcatactagagaaaaactttaaaaatgtaaaacatggagcagattttttacttgttacccatgtcttattgtgcatcagataatttatatgggagtgaaaccctacaaatgttaagaatgtggcataacctttaactattttcaagccttacacaatagcagagaatataaactgaaaaaatccatacaaatattaaaaatgtggcaaattattttaaactgtgctcaacccttactcaagataatccatactagagaaacactatagatgtaaaaatgtgaaaagttttattcaaaatatcaaacttatgagtcacctaggggttcatagaaaaaggaagtttgcagatgcaataaatgtgaggaagtatttaataaaaaatgaagtctaaatgtgtcagagaatttatgtgagaaaggactaaagcacagacactttcagcctttatactaaataagagtattttttgtacagaataatctaaaggcaaaataattagataatttatttgcttatatgttttaaagtagcaagaacattgatgttttgacaggtatatttcatagatacttcatttgtatttacagtatttgaggtttttggaaagcaaatattatttatataattcagctttcaaatctgttgctgcttttccttaatccgtggtgttcatgtgaaaatatgtgttctgtttttttttctgcatcagaacaatgtgaggtcattctacgttaatatcattaatatcagcatttttcatggaagtttaatgccaaatgtaaaacacatgaaaatttttaaaaatatgctctttgtgtttgaataaagtagtaatgcacgtaaacaaaaaaaaaaaaaaaa

SEQ ID NO: 3430 - protein, 743 aa, Homo sapien
MGLLTFRDVAVEFSLEEWEHLEPAQKNLYQNVMLENYRNLVSLGLVVSKPDLITFLEQRKEPWNVKSEETVAIQPDVFSHYNKDLLTEHCTEASFQKVISRRHGSCDLENLHLRKRWKREECEGHNGCYDEKTFKYDQFDESSVESLFHQQILSSCAKSYNFDQYRKVFTHSSLLNQQEEIDIWGKHHIYDKTSVLFRQVSTLNSYRNVFIGEKNYHCNNSEKTLNQSSSPKNHQENYFLEKQYKCKEFEEVFLQSMHGQEKQEQSYKCNKCVEVCTQSLKHIQHQTIHIRENSYSYNKYDKDLSQSSNLRKQIIHNEEKPYKCEKCGDSLNHSLHLTQHQIIPTEEKPYKWKECGKVFNLNCSLYLTKQQQIDTGENLYKCKACSKSFTRSSNLIVHQRIHTGEKPYKCKECGKAFRCSSYLTKHKRIHTGEKPYKCKECGKAFNRSSCLTQHQTTHTGEKLYKCKVCSKSYARSSNLIMHQRVHTGEKPYKCKECGKVFSRSSCLTQHRKIHTGENLYKCKVCAKPFTCFSNLIVHERIHTGEKPYKCKECGKAFPYSSHLIRHHRIHTGEKPYKCKACSKSFSDSSGLTVHRRTHTGEKPYTCKECGKAFSYSSDVIQHRRIHTGQRPYKCEECGKAFNYRSYLTTHQRSHTGERPYKCEECGKAFNSRSYLTTHRRRHTGERPYKCDECGKAFSYRSYLTTHRRSHSGERPYKCEECGKAFNSRSYLIAHQRSHTREKL

SEQ ID NO: 3431 - DNA, 1196 bp, Homo sapien
agccgagggctgcacaaagaccttcctggcctgccccagacagagctgaggacccctggccgtgggcttgggcctcggcttcacaggatggggctgccagtgtcctgggcccctcctgccctctgggttctagggtgctgcgccctgctcctctcgctgtgggcgctgtgcacagcctgccgcaggcccgaggacgctgtagcccccaggaagagggcgcggaggcagcgggcgaggctgcagggcagtgcgacggcggcggaagcgtccctactgaggcggacccacctctgctccctcagcaagtcggacaccagactgcacgagctgcaccggggcccgcgcagcagcagggccctgcggcctgccagcatggatctcctgcgcccacactggctggaggtgtccagggacatcaccggaccgcaggcagccccctctgccttcccacaccaggagctgccccgggctctgccggcagctgcagccaccgcagggtgcgctggcctcgaggccacctattccaacgtggggctggcggcccttcccggggtcagcctggcggccagccctgtggtggccgagtatgcccgcgtccagaagcgcaaagggacccatcgcagtccccaagagccacagcaggggaagactgaggtgaccccggccgctcaggtggacgtcctgtactccagggtctgcaagcctaaaaggagggacccaggacccaccacagacccgctggaccccaagggccagggagcgattctggccctggcgggtgacctggcctaccagaccctcccgctcagggccctggatgtgggcagcggccccctggaaaacgtgtatgagagcatccgggagctgggggaccctgctggcaggagcagcacgtgcggggctgggacgccccctgcttccagctgccccagcctagggaggggctggagacccctccctgcctccctgccctgaacactcaaggacctgtgctccttcctccagagtgaggcccgtcccccgccccgccccgcctcacagctgacagcgccagtcccaggtccccgggctgccagcccgtgaggtccgtgaggtcctggccgctctgacagccgcggcctccccgggctccagagaaggcccgcgtctaaataaagcgccagcgcaggatgaaagcgaaaaaaaaaaaaaaaaaa

SEQ ID NO: 3432 - protein, 295 aa, Homo sapien
MGLPVSWAPPALWVLGCCALLLSLWALCTACRRPEDAVAPRKRARRQRARLQGSATAAEASLLRRTHLCSLSKSDTRLHELHRGPRSSRALRPASMDLLRPHWLEVSRDITGPQAAPSAFPHQELPRALPAAAATAGCAGLEATYSNVGLAALPGVSLAASPVVAEYARVQKRKGTHRSPQEPQQGKTEVTPAAQVDVLYSRVCKPKRRDPGPTTDPLDPKGQGAILALAGDLAYQTLPLRALDVGSGPLENVYESIRELGDPAGRSSTCGAGTPPASSCPSLGRGWRPLPASLP

SEQ ID NO: 3433 - DNA, 1414 bp, Homo sapien
ggcacgaggcacctcgctcgcagcctccccagcgcagcagcccggctgtgggcctgcggcagccgggtcttcctggtccccacctcctggggccgacgggcggcaggaaggggctcggcgggacgcgccgtcagggacctgaggaggaacaacggaacgcgttcggaacggcctggactcccgagactcacccgactcgtggccacaccgggagaactgaagcggcagtagccggcggagacgcccgacccgaaggccggctgctagggagcagacagctgaaccgcttgccagacgccgaaacccagtgacgccctccaccgctccaccgtgctcccggctccccgcccccgccgcccgcgggccccaaggcgcatgcgccgcctgtcctggaggggcccatttccgtccgtcgtggggggaggcacagtgagtccactggggcacggcagcgtctaagccacaagccgagcacataagccaggtcctaacggagcctatgtgtaagtccactactggtgcaaggttgcacacttctaagaagagcggcgtggggggctcggcgaccttcgcttcagtcgctcccccgtgcagtcccctgtgcccaagacacagcctgatgcttgtgctccggtgggcggagcttggaggcggcgggaactgcaattggtggctttgaaggcgcggcgagcgggaacagctcttgaggagtgagactgcaggagatgtgggccgtgccaaagagatggatgagactgttgctgagttcatcaagaggaccatcttgaaaatccccatgaatgaactgacaacaatcctgaaggcctgggattttttgtctgaaaatcaactgcagactgtaaatttccgacagagaaaggaatctgtagttcagcacttgatccatctgtgtgaggaaaagcgtgcaagtatcagtgatgctgccctgttagacatcatttatatgcaatttcatcagcaccagaaagtttgggatgtttttcagatgagtaaaggaccaggtgaagatgttgacctttttgatatgaaacaatttaaaaattcgttcaagaaaattcttcagagagcattaaaaaatgtgacagtcagcttcagagaaactgaggagaatgcagtctggattcgaattgcctggggaacacagtacacaaagccaaaccagtacaaacctacctacgtggtgtactactcccagactccgtacgccttcacgtcctcctccatgctgaggcgcaatacaccgcttctgggtcaggagttagaagctactgggaaaatctacctccgacaagaggagatcattttagatattaccgaaatgaagaaagcttgcaattagtgaacatgaaaggaaaataaaaattcctcacagtcaaaaaaaaaaaaaaaaaaa

SEQ ID NO: 3434 - protein, 204 aa, Homo sapien
MDETVAEFIKRTILKIPMNELTTILKAWDFLSENQLQTVNFRQRKESVVQHLIHLCEEKRASISDAALLDIIYMQFHQHQKVWDVFQMSKGPGEDVDLFDMKQFKNSFKKILQRALKNVTVSFRETEENAVWIRIAWGTQYTKPNQYKPTYVVYYSQTPYAFTSSSMLRRNTPLLGQELEATGKIYLRQEEIILDITEMKKACN

SEQ ID NO: 3435 - DNA, 1508 bp, Homo sapien
gctggaggagcctcgaggctgaggctgccggggggctgtgggctaccgggccgccggcgcctcagcgatgttttactcagggctcctcactgagggcggccgcaaggagaccgacatgcgggaggcggcgtcactgcgacagcagcgccggatgaagcaggcggtgcagttcatccacaaggactccgccgacctgctgcccctggacggcctcaagaagctgggctcgtccaaggacatgcaacctcataatattctgcagaggcgcctcatggaaaccaacctgtctaagctccgaagcggtccccgtgtcccttgggcctctaagacgaacaaactcaatcaggctaagtctgaggggctaaagaagtctgaggaggatgacatgattttggtttcttgccagtgtgctggaaaggatgtgaaagccttggttgacacaggctgcctatataatctcatctctttggcctgtgtggacagattgggactcaaggagcatgtcaaatcccacaagcatgaaggagaaaagctttctctaccccggcatctcaaagtagtgggccagattgagcacctagtgatcacactgggctccctccgcctggactgcccagcagctgtggttgatgacaatgagaaaaacttgtcccttggtctacagactctccgatctctgaagtgcatcataaacttggataagcaccggctgatcatggggaagacagacaaggaagaaatcccttttgtggagacagtctctttgaatgaagacaacacttcagaagcataactacagcctgcagcatgtctgcacgtgtgcatgcatacacaccgggttgacagattgagaaaactgggtttgaaccaaatgccgtagtgacttgctgtggaccaagtccttccatctaatagaagctccaggggctccttcccattcagacctctctagactatagtctatgcttagagatcttgtctggttatggccattgttttttactactttgatcacttaacttatagaccttttttgacactgccagtctcacttgtggcctatttctctgcttcttccaggaatttgcttttattagtcaagtataggggctgccaggttctgtgtctccatagatatatgtgcttcttttcctatagctaaatgtataataaacaggaacctgacctttacctcctttcagctgtttcaaacaggtgccaggatacctatgtcttagaattagagtttcttcaaattgattcattgatttctcaagtatggattatgtgaaagagcccagggacattatccattacagtctaactctttcatttaaaggtccagagaggcaagtgaattgtctaagttcatatattaggtcagtgactgaagggaccaagaacgcagacctgatttccaagccaagactcccatgctgcctcatttgtattcaagcctttaacaggagggcaaagaggtgagaatgtgttaaaaaaaaaaaaaaaaa

SEQ ID NO: 3436 - protein, 241 aa, Homo sapien
MFYSGLLTEGGRKETDMREAASLRQQRRMKQAVQFIHKDSADLLPLDGLKKLGSSKDMQPHNILQRRLMETNLSKLRSGPRVPWASKTNKLNQAKSEGLKKSEEDDMILVSCQCAGKDVKALVDTGCLYNLISLACVDRLGLKEHVKSHKHEGEKLSLPRHLKVVGQIEHLVITLGSLRLDCPAAVVDDNEKNLSLGLQTLRSLKCIINLDKHRLIMGKTDKEEIPFVETVSLNEDNTSEA

SEQ ID NO: 3437 - DNA, 1150 bp, Homo sapien
atgaaaaactggagcacaaccacacttacattcaatggcttttccccctgagagaacaaggcttgaacttctatgccaaagaactaactacatatgaaattgaggaattcaaaaaaacaaaagaagcaattagaagattcctcctggcttataaaatgatgctagaattttttggaataaaactgactgataaaactggaaatgttgctcgggctgttaactggcaggaaagatttcagcatctgaatgagtcccagcacaactatttaagaatcactcgtattcttaaaagccttggtgagcttggatatgaaagttttaaatctcctcttgtaaaatttattcttcatgaagctcttgtggagaatactattcccaatattaagcagagtgctctagagtattttgtttatacaattagagacagaagagaaaggagaaagctcctgcggttcgcccagaaacactacacgccttcagagaactttatctggggaccgcctcgaaaagaacagtcggagggaagcaaagcccagaaaatgtcttcccctctcgcctccagtcataacagtcaaacttctatgcacaaaaaagccaaggactccaaaaattcctcctcagctgttcatttaaatagcaaaacagctgaagacaaaaaagtggcaccaaaagagcctgtggaagagacagacaggcccagcccagagcccagcaatgaagctgccaagccaagaaatacagagaaggacagtaatgctgagaacatgaattctcaacctgagaaaacagttactactcccacagaaaaaaaggagagtgtatctcctgagaataacgaagaaggtggaaatgataaccaagacaatgaaaatcctggaaatacaaattgccatgatgttgtactagtacagtgaattatcagaaaacccagaagccagtttaggctagagaggaaaaaactactgtatcatttatcctaaagaacagagatgaggtcaatttcaaattttagccatctgtttgtgatttctgtcataagcattttgttgtttgtttttttattttggatgacaatgaattgaatatctaataaggagatttaagataagacccaataaatgaatgtattctgtaaaaaaaaaaaaaaaaa

SEQ ID NO: 3438 - protein, 252 aa, Homo sapien
MMLEFFGIKLTDKTGNVARAVNWQERFQHLNESQHNYLRITRILKSLGELGYESFKSPLVKFILHEALVENTIPNIKQSALEYFVYTIRDRRERRKLLRFAQKHYTPSENFIWGPPRKEQSEGSKAQKMSSPLASSHNSQTSMHKKAKDSKNSSSAVHLNSKTAEDKKVAPKEPVEETDRPSPEPSNEAAKPRNTEKDSNAENMNSQPEKTVTTPTEKKESVSPENNEEGGNDNQDNENPGNTNCHDVVLVQ

SEQ ID NO: 3439 - DNA, 3270 bp, Homo sapien
ctaagacaggtgcagacgtatgtcggctttggcgtatccatcaagctttatattgctttgattatgatttggaggaaagtggagaaattaaagatatgttacttgagtgcttcataaatattaattatatcaagaaagaagagggaagaagatttcttagttgtctcttcaactggaatatcaacttcatcaaaatgatccacgggaccattaaaaaccagttacagggattacaaaagtctttgatggtatacattgcagaaatttatttcagagcttggaaaaaggcttcagggaaaatactggaggcgattgaaaatgattgcatccaggacttcatgtttcacgggatacaccttccgaggaggtctccagtgcattccaaagtgcgggaggttctgagttactttcaccatcaaaagaaagttcggcagggagtggaagagatgctttatagattatataagcccatcctttggagaggattaaaggccagaaactctgaagttcgatcaaatgctgcattgttgtttgttgaagcatttcctattagggatccaaaccttcatgctattgaaatggatagtgaaatccagaaacagtttgaagagctctatagccttttagaagatccttacccgatggtccgttccacagggatccttggtgtttgtaaaataacttctaagtactgggaaatgatgcccccgaccattcttattgacctcctgaagaaggtgactggggaactggcatttgacacgagctcagctgatgttcgttgttctgtctttaagtgtctgccaatgattttggacaacaaactgagccacccattgttagagcagctccttccagctctcagatacagtctccacgacaattcggagaaagtgagggtagcttttgtggacatgctgttgaagatcaaagctgtgagggctgctaagttttggaaaatatgtcccatggagcacattctggttcgtctggaaactgattctcgacctgtgtctcggcgcctggtgagcctcatctttaattctttcctgcctgtgaatcagccggaggaggtctggtgcgagcgctgtgtcaccctggtgcagatgaaccacgccgctgccaggaggttctatcagtacgcccacgaacacaccgcctgcaccaacatagcaaagctgattcacgttattcgtcattgcttaaatgcctgtatccagagggcagtgagagagcctccagaggacgaggaggaagaggacggaagggagaaggagaatgtgactgttctggacaaaacactgtcagtaaacgatgttgcatgcatggcaggtttactagaaatcattgtgattctctggaaaagtattgacagaagtatggaaaataataaagaggccaaactttacacgattaacaagtttgcctctgtgcttccagagtatctgaaagtatttaaggatgatcgctgcaagatccctttattcatgctaatgtcctttatgccggcctctgctgtccccccattcagctgtggtgtgatttccacgctgagaagccgggaggagggcgctgtggacaagagctactgcactttgttggattgcctctgctcctgggggcaagtggggcacattctggagcttgttgacaactggctgcccacagagcatgcccaggccaagagcaacacagcttctaaaggtagggtgcagatccatgacacacgcccagtcaaacctgaattggcattggtctacattgagtatctgctgactcatccaaagaaccgcgagtgcttgctctctgctcctcggaagaaacttaaccatcttttgaaagcccttgaaacgtcaaaggcagatctggagtcacttctgcagacaccgggtgggaagcctcgtggcttcagtgaagcagctgccccgcgagcctttggtctccactgtcgcctgagcatccatcttcagcacaagttctgctcagaaggaaaggtgtatttgtccatgttggaagacactggcttttggttagaaagcaaaattttatcttttattcaagatcaagaagaagactacctgaagcttcatagggtcatttatcagcaaattatccagacctacctgactgtgtgtaaagatgttgttatggtaggccttggtgaccatcagtttcagatgcaactcttacagcggagtcttggaatcatgcaaacagtgaagggatttttttatgtttcattacttcttgacattctgaaagagataactggaagttccttgattcagaaaacagattcagatgaagaagttgcaatgctgttggacacagtccagaaagtatttcagaaaatgttggaatgtattgcacggagcttcaggaagcagccggaagaaggcctgcggctgctttattctgttcagaggcctcttcatgagttcattactgctgttcagtctcggcacacagacacccctgtgcaccggggtgtactttctactctgatcgctgggcctgtggttgagataagtcaccagctacggaaggtttctgacgtagaagagcttacccctccagagcatctttctgatcttccaccattttcaaggtgtttaataggaataataataaagtcttcgaatgtggtcaggtcatttttggatgaattaaaggcatgtgtggcttctaatgatattgaaggcattgtgtgcctcacggctgctgtgcatattatcctggttattaatgcaggtaaacataaaagctcaaaagtgagggaggttgcagccactgttcacagaaaactaaagacattcatggaaattactttggaagaggatagcattgaaagatttctctatgaatcatcatcaagaactctgggagaacttttgaattcataaccaagccaacatctccagacatgtaaaaatagggaaaagtgattcaaattgaaatgcctgtgtattttcctattgtttttaatgttaataacccatataatagggaaagggtgggatttttttgtgggaatgtgggaaggtgggggttatggaggagataactcaaaacttcttcaattttgcctagtgcctgcgtaaataatatatttaatataaaggactccaggtataaatggtgtagaaatccatgattccaagaaaaaacacttttctagcaaacctggttgtttttaaaatgacttttatatatgtaatattgcttggaaactatgagtaataaagcaatgacaacaaaaaaaaaaaaaaa

SEQ ID NO: 3440 - protein, 935 aa, Homo sapien
MLLECFININYIKKEEGRRFLSCLFNWNINFIKMIHGTIKNQLQGLQKSLMVYIAEIYFRAWKKASGKILEAIENDCIQDFMFHGIHLPRRSPVHSKVREVLSYFHHQKKVRQGVEEMLYRLYKPILWRGLKARNSEVRSNAALLFVEAFPIRDPNLHAIEMDSEIQKQFEELYSLLEDPYPMVRSTGILGVCKITSKYWEMMPPTILIDLLKKVTGELAFDTSSADVRCSVFKCLPMILDNKLSHPLLEQLLPALRYSLHDNSEKVRVAFVDMLLKIKAVRAAKFWKICPMEHILVRLETDSRPVSRRLVSLIFNSFLPVNQPEEVWCERCVTLVQMNHAAARRFYQYAHEHTACTNIAKLIHVIRHCLNACIQRAVREPPEDEEEEDGREKENVTVLDKTLSVNDVACMAGLLEIIVILWKSIDRSMENNKEAKLYTINKFASVLPEYLKVFKDDRCKIPLFMLMSFMPASAVPPFSCGVISTLRSREEGAVDKSYCTLLDCLCSWGQVGHILELVDNWLPTEHAQAKSNTASKGRVQIHDTRPVKPELALVYIEYLLTHPKNRECLLSAPRKKLNHLLKALETSKADLESLLQTPGGKPRGFSEAAAPRAFGLHCRLSIHLQHKFCSEGKVYLSMLEDTGFWLESKILSFIQDQEEDYLKLHRVIYQQIIQTYLTVCKDVVMVGLGDHQFQMQLLQRSLGIMQTVKGFFYVSLLLDILKEITGSSLIQKTDSDEEVAMLLDTVQKVFQKMLECIARSFRKQPEEGLRLLYSVQRPLHEFITAVQSRHTDTPVHRGVLSTLIAGPVVEISHQLRKVSDVEELTPPEHLSDLPPFSRCLIGIIIKSSNVVRSFLDELKACVASNDIEGIVCLTAAVHIILVINAGKHKSSKVREVAATVHRKLKTFMEITLEEDSIERFLYESSSRTLGELLNS

SEQ ID NO: 3441 - DNA, 750 bp, Homo sapien
ggctcccggggctgaggtggagccgcgggacgccggcagggttgtggcgcagcagtctccttcctgcgcgcgcgcctgaagtcggcgtgggcgtttgaagaagctgggatacagcatttaatggcatttaatgaaaaatttatgcttaagaagtaaaaatggcaggcttcctagataattttcgttggccagaatgtgaatgtattgactggagtgagagaagaaatgctgtggcatctgttgtcgcaggtatattgttttttacaggctggtggataatgattgatgcagctgtggtgtatcctaagccagaacagttgaaccatgcctttcacacatgtggtgtattttccacattggctttcttcatgataaatgctgtatccaatgctcaggtgagaggtgatagctatgaaagcggctgtttaggaagaacaggtgctcgagtttggcttttcattggtttcatgttgatgtttgggtcacttattgcttccatgtggattctttttggtgcatatgttacccaaaatactgatgtttatccgggactagctgtgttttttcaaaatgcacttatattttttagcactctgatctacaaatttggaagaaccgaagagctatggacctgagatcacttcttaagtcacattttccttttgttatattctgtttgtagataggttttttatctctcagtacacattgccaaatggagtagattgtacattaaatgttttgtttctt

SEQ ID NO: 3442 - protein, 158 aa, Homo sapien
MAGFLDNFRWPECECIDWSERRNAVASVVAGILFFTGWWIMIDAAVVYPKPEQLNHAFHTCGVFSTLAFFMINAVSNAQVRGDSYESGCLGRTGARVWLFIGFMLMFGSLIASMWILFGAYVTQNTDVYPGLAVFFQNALIFFSTLIYKFGRTEELWT

SEQ ID NO: 3443 - DNA, 2432 bp, Homo sapien
agctgtttccctgtgggtcgggttggactgacttttgacagtcagccttcggctgcggagggggctcggcggcggccggcggagaaagttgctccgagaagaggctgggtcgagctgggccgagccgggcgcgcagggcgggcgtcgcgggcgtcccgggcggacgcggcgcggagactgccggcgcgtcccgggggttccgatttgaagaccttgcttctcatcacccactggattatgccccaggcttccctacccaatgatcctcttgcaacacgccgtgcttcctccacctaagcagccctcaccctcgcctcctatgtcagtggccaccaggtctacaggaaccttgcagcttccaccacagaagccttttgggcaggaggcttccttgcctcttgcaggggaagaagagttatcgaagggaggggagcaagactgtgccctggaggagctatgtaagcccctgtactgcaaactctgcaatgtcaccttgaactctgcacagcaagcccaggctcattatcagggtaaaaatcatggtaagaaactccgaaattactatgcagcaaatagctgtcctcctcctgctagaatgagcaatgtggtcgagcctgcagctactccagttgttccagtccctccgcagatgggctcctttaagccaggaggccgagtgatcctggccacggagaatgattactgtaagctctgtgatgcctccttcagttccccagctgtggctcaggctcactatcaagggaagaatcatgccaagaggctgcggctggcggaagctcagagtaactcattctcggaatcctcagagctgggtcaacggcgggccaggaaagaagggaatgagtttaagatgatgcctaacaggagaaatatgtatacagtacagaataattcagcaggtccttacttcaatccccgctctcggcagagaattccacgtgatctggccatgtgtgttactccaagtggccagttttactgctcaatgtgtaatgttggagctggcgaagagatggaattccggcagcatttagagagcaagcaacataagagcaaggtgtctgaacagcggtacaggaatgagatggagaatctgggatatgtatagtgattatcatattaagatagagcagcttttcctgcctgttgtttgccttttgtcaacttgccctgctttgtggtctttttgatatgagtacattcctctgcttaatgttaatacatgtaacccacagtggtaccatgagatgtcaaaacctgggggcccgggggcggggcggggggaggtgggtgtgaagaacgtgcttcttaggtcataacgcttttgcagggtcaatggtgttgagccgctcatagcatgtgacctacctaccccatcagaaataactttttatcttgctcaagttctggtcaactagtagcctgacggcttagaactttgactatttaaaagtttcattttcttttgcaattttagttttatgtactgttaaagaattgtactgaattctttttagatcacagtaaaaataggttggcagagatttcagtttcccagggcttaaccagaaccgccacctcaatgcattgtcagtagaatacattattagaaactgttaaggtctttcccgggacatttttttctgccattttcttttgcaattgtagttttatgtactgttaaagaattgtattgaattctttttagatcaaagtaaaaataggtcagcagagatttcagtttcccagggcttaaccagaaccgccacctcaatgcattgtcagtaggatacattattagaaactgttagggtctttcccaggacatttttttttctgtatcatgtctccccatcattgaagcgcaaattttcttgaattcaaatactcccaatgagcttgtatacttccaaacagctaaacttgatttccagttgtggatttcacacatataattgccgccttcttccctcctcttttttcccccctagttgaatcagcttgtctaacaagcccattttcatgccccagctgtgctgtgggttttccaagcctcatatttgaatattcaatgagtttaagatggatatgatttcaaaaaatagggccgggcgcggtggctcacgcctgtaatcccagcactttgggaggccgaagcaggcggatcacgaggtcaggaggtcgagatcatcctggctaacacagtgaaaccccatctctactaaaaatacaaaacattagccgggcgtggtggtgggtgcctgtagtcccagctactctggaggctgaggcaggagaatggcgtgaacccgggaggcggagcttgcagtgagccgagatcgcgccactgcactccagcctgggtgacagagcgagactccgtctcaaaaaaaaaaaaaaaaaaaaaaaaa

SEQ ID NO: 3444 - protein, 289 aa, Homo sapien
MILLQHAVLPPPKQPSPSPPMSVATRSTGTLQLPPQKPFGQEASLPLAGEEELSKGGEQDCALEELCKPLYCKLCNVTLNSAQQAQAHYQGKNHGKKLRNYYAANSCPPPARMSNVVEPAATPVVPVPPQMGSFKPGGRVILATENDYCKLCDASFSSPAVAQAHYQGKNHAKRLRLAEAQSNSFSESSELGQRRARKEGNEFKMMPNRRNMYTVQNNSAGPYFNPRSRQRIPRDLAMCVTPSGQFYCSMCNVGAGEEMEFRQHLESKQHKSKVSEQRYRNEMENLGYV

SEQ ID NO: 3445 - DNA, 1534 bp, Homo sapien
tttgcgctcggggaattaaaagaggggaaaaaaagcccgaagaaaactcacgccccaaacaaaacgcaaggagaggagggcgcgcggcctgcagccctcgcccgcgtccccggccgcggcgtgatgcgcgcggaccagcccgcgacgcccgggctgccgctgtccccgcacctggacgctggcgcggtggccgcgccccagcctcgatcgctcgccgcggcgactcggccccaggcttccggcgccggtgggggccctcgctctccatggggctgagggactggctgagaaccgtgtgctgctgctgccggtgcgagtgcttggaggagcgcgccctgcctgagaaggagcccctcgtcagtgataacaatccatattcctcatttggagcaactctggtgagggatgatgagaagaatttatggagtatgccccatgatgtgtcccacacagaggcagacgacgacagaaccctgtacaatttgatagtcattcgtaatcagcaggccaaagactcagaggagtggcagaagctcaactatgatatccataccctgcggcaggttcgaagggaagtaagaaacagatggaagtgcatcttagaagatttaggttttcaaaaggaagctgactctttgttgtcagtgactaaactcagcaccatcagtgattctaaaaacacaaggaaagctcgagagatgttgttaaaactggctgaagaaaccagtattttcccaacaagttgggagctctcagagagatatctctttgttgtggaccgtctcattgcacttgatgctgcagaagagttctttaagcttgctcgtcgaacttaccccaagaagcctggggttccatgcctggcagatggccagaaagaactgcacctgtggggggacctctcatgcagacttgcacatatgcagggagtattgcactgaagatctttgctggaccttcttctcttcagaagataattttcaaaagggagcaatgctgtgaatgcagcttgcttctctctacagattgagaagtccagcttcaaaagttacttgccacttaagcaaggaacttgtcaagagatcatggttcatgttactgaaaagactttaaggatttgtaaggttaatccatagattgctgagaacaatggaaatatttttatttttacagattttgcacttctgaattcaggttaaaaactaacttgtatttagtctgcttagaggactgtgacttgaaaatttttatataccaatgagctttttggtagcgtccacaatgtttaaaatatttcataggcgagatccgtgttctccatttattaatgcattgtagaccaatttaactgctgtgtttcaggaaaattcttcctagtttaataagcaagctaaaagttttattttttatatttagtgcttaatctttgcctcatgttatgtaaaattagcctgcagatattttctctcaattctgtagactctcgcaagataaacattcaaacagtgaaacaaacaataaaataaataaacct

SEQ ID NO: 3446 - protein, 224 aa, Homo sapien
MGLRDWLRTVCCCCRCECLEERALPEKEPLVSDNNPYSSFGATLVRDDEKNLWSMPHDVSHTEADDDRTLYNLIVIRNQQAKDSEEWQKLNYDIHTLRQVRREVRNRWKCILEDLGFQKEADSLLSVTKLSTISDSKNTRKAREMLLKLAEETSIFPTSWELSERYLFVVDRLIALDAAEEFFKLARRTYPKKPGVPCLADGQKELHLWGDLSCRLAHMQGVLH

SEQ ID NO: 3447 - DNA, 1026 bp, Homo sapien
gagagctggctgcgccgagccccctgcgcgctgcacatggggcgcctgacggaagcggcggcagcgggcagcggctctcgggctgcaggctgggcagggtcccctcccacgctcctgccgctgtctcccacgtcccccaggtgcgcggccaccatggcgtccagcgacgaggacggcaccaacggcggcgcctcggaggccggcgaggaccgggaggctcccggcaagcggaggcgcctggggttcttggccaccgcctggctcaccttctacgacatcgccatgaccgcggggtggttggttctagctattgccatggtacgtttttatatggaaaaaggaacacacagaggtttatataaaagtattcagaagacacttaaatttttccagacatttgccttgcttgagatagttcactgtttaattggaattgtacctacttctgtgattgtgactggggtccaagtgagttcaagaatctttatggtgtggctcattactcacagtataaaaccaatccagaatgaagagagtgtggtgctttttctggtcgcgtggactgtgacagagatcactcgctattccttctacacattcagccttcttgaccacttgccatacttcattaaatgggccagatataatttttttatcatcttatatcctgttggagttgctggtgaacttcttacaatatacgctgccttgccgcatgtgaagaaaacaggaatgttttcaataagacttcctaacaaatacaatgtctcttttgactactattattttcttcttataaccatggcatcatatatacctttgtttccacaactctattttcatatgttacgtcaaagaagaaaggtgcttcatggagaggtgattgtagaaaaggatgattaaatgatctctgcaaacaaggtgctttttccagaataaccaagattacctgagtccaagttttaataacaagaataaacaactttgtgaaatatcaaaaaaaaaaaaaaaaaaaaaaaaaaaaaa

SEQ ID NO: 3448 - protein, 288 aa, Homo sapien
MGRLTEAAAAGSGSRAAGWAGSPPTLLPLSPTSPRCAATMASSDEDGTNGGASEAGEDREAPGKRRRLGFLATAWLTFYDIAMTAGWLVLAIAMVRFYMEKGTHRGLYKSIQKTLKFFQTFALLEIVHCLIGIVPTSVIVTGVQVSSRIFMVWLITHSIKPIQNEESVVLFLVAWTVTEITRYSFYTFSLLDHLPYFIKWARYNFFIILYPVGVAGELLTIYAALPHVKKTGMFSIRLPNKYNVSFDYYYFLLITMASYIPLFPQLYFHMLRQRRKVLHGEVIVEKDD

SEQ ID NO: 3449 - DNA, 1971 bp, Homo sapien
aggataggaactggagttattgttaatgttacaggaagaacacattctcaaaggagaggggggtggtgggaaactttgattttcatagggttttcagtttcctctcaaatgggaggatgcagcagtgccgctacttaactgaacgtctcgacagtctgatggggcggccctcagccttccggagcagcagtgggactgacctgtccagtgaggaagaaacactgaaccagatggaatggcctttggggatggaaaaaccccagtttacgctcatctcttctctcagctaacttttgtggagccctgttcccaaactggcctgggccagagcaccgtggaggggtatttgttgtaaatggaaggtttcgaggcccgcctggaaatcctgaagggtgagacctgcagtgggctcaggagtctgcatttgtgggtgaccgagggggcctcccctccctctagagtccacactgtggagagcatcaggaagggaaaggcctgcatcttgtgctcagtgagctcatcgtctagtgaggaaggcatgtgtgaatctctggacaaggcagcgctgagctgttgtggactagtggtgcaggcaagggattacttctgaccaaggatggtgagaaggtttcccatacagactgacgtctggattgagctttgaagaagaaagccaggactggagcagacgacgaggagggaagagtttgaccagatataccatctggcatctccagcctcccctccaaattacatgtataatcctatcaagacattaaagaccaatacgattgggacattaaacatgttggggctggcaaaacgagtcggtgcccgtctgctcctggcctccacatcggaggtgtatggagatcctgaagtccaccctcaaagtgaggattactggggccacgtgaatccaataggacctcgggcctgctacgatgaaggcaaacgtgttgcagagaccatgtgctatgcctacatgaagcaggaaggcgtggaagtgcgagtggccagaatcttcaacacctttgggccacgcatgcacatgaacgatgggcgagtagtcagcaacttcatcctgcaggcgctccagggggagccactcacggtatacggatccgggtctcagacaagggcgttccagtacgtcagcgatctagtgaatggcctcgtggctctcatgaacagcaacgtcagcagcccggtcaacctggggaacccagaagaacacacaatcctagaatttgctcagttaattaaaaaccttgttggtagcggaagtgaaattcagtttctctccgaagcccaggatgacccacagaaaagaaaaccagacatcaaaaaagcaaagctgatgctggggtgggagcccgtggtcccgctggaggaaggtttaaacaaagcaattcactacttccgtaaagaactcgagtaccaggcaaataatcagtacatccccaaaccaaagcctgccagaataaagaaaggacggactcgccacagctgaactcctcacttttaggacacaagactaccattgtacacttgatgggatgtatttttggcttttttttgttgtcgtttaaagaaagactttaacaggtgtcatgaagaacaaactggaatttcattctgaagcttgctttaatgaaatggatgtgcctaaaagctcccctcaaaaaactgcagattttgccttgcactttttgaatctctctttttatgtaaaatagcgtagatgcatctctgcgtattttcaagtttttttatcttgctgtgagagcatatgttgtgactgtcgttgacagttttatttactggtttctttgtgaagctgaaaaggaacattaagcgggacaaaaaatgccgattttatttataaaagtgggtacttaataaatgagtcgttatactatgaaaaaaaaaaaaaaaaaaaaaaaaaaaaaaaaaaaaaaaaaaaaaaaa

SEQ ID NO: 3450 - protein, 252 aa, Homo sapien
MYNPIKTLKTNTIGTLNMLGLAKRVGARLLLASTSEVYGDPEVHPQSEDYWGHVNPIGPRACYDEGKRVAETMCYAYMKQEGVEVRVARIFNTFGPRMHMNDGRVVSNFILQALQGEPLTVYGSGSQTRAFQYVSDLVNGLVALMNSNVSSPVNLGNPEEHTILEFAQLIKNLVGSGSEIQFLSEAQDDPQKRKPDIKKAKLMLGWEPVVPLEEGLNKAIHYFRKELEYQANNQYIPKPKPARIKKGRTRHS

SEQ ID NO: 3451 - DNA, 1014 bp, Homo sapien
ttcctcagaaacgagcaaacctgaaagctactctctcagcttcagagggaaaaaatggttgtagatttctggacttgggagcagacatttcaagaactaatccaagaggcaaaaccccgggccacatggacgctgaagttggatggcaaccttcagctagactgcctggctcaagggtggaagcaataccaacagagagcatttggctggttccggtgttcctcctgccagcgaagttgggcttccgccaagttgcagattctgtgccacacgtactgggagcactggacatcccagggtcaggtgcgtatgaggctctttggccaaaggtgccagaagtgctcctggtcccaatatgagatgcctgagttctcctcggatagcaccatgaggattctgagcaacctggtgcagcatatactgaagaaatactatggaaatggcatgaggaagtctccagaaatgccagtaatcctggaagtgtccctggaaggatcccatgacacagccaattgtgaggcatgcactttgggcatatgtggacagggcttaaaaagctacatgacaaagccgtccaaatccctactcccccacctaaagactgggaattcctcacctggaattggtgctgtgtacctcgcaaaccaagccaagaaccagtcagatgaggcaaaagaggctaaggggagtgggtatgagaaattagggcccagtcgagacccagatccactgaacatctgtgtctttattttgctgcttgtatttattgtagtcaaatgctttacatcagaatgatgaaaataggcttgccactttctcttattttaattccatggtagtcaatgaactggctgccactttaatataactgaaaattcattttgagaccaagcaggatcaagtttgtagaataaacactggtttcctagctatcctctgaaaacagtatgaaacatgaccaagtacataatggatttagtaataaatattgtcgaattgctaaaaaaaaaaaaa

SEQ ID NO: 3452 - protein, 246 aa, Homo sapien
MVVDFWTWEQTFQELIQEAKPRATWTLKLDGNLQLDCLAQGWKQYQQRAFGWFRCSSCQRSWASAKLQILCHTYWEHWTSQGQVRMRLFGQRCQKCSWSQYEMPEFSSDSTMRILSNLVQHILKKYYGNGMRKSPEMPVILEVSLEGSHDTANCEACTLGICGQGLKSYMTKPSKSLLPHLKTGNSSPGIGAVYLANQAKNQSDEAKEAKGSGYEKLGPSRDPDPLNICVFILLLVFIVVKCFTSE

SEQ ID NO: 3453 - DNA, 2035 bp, Homo sapien
attaacctccagctttttaagcagtttatcgatggtcgactggcaaaactaaatgcaggaaggggtttctctgatgtatttgaagaagagatcacttcaggtggcttttgtggagggaacccgaggtcatatcaacaatgggtgcatacagtcaagaaaggaggtgcactgttcaacacagcaatgaccaaagcaacccctgctgtacggacagcatataaatttgcaaaaaatcatgcaaagctgggactaaaggaagtgaagagtaaactaaaacacaaggaaaatgaagaagattatgggacctgttctagttctgtacaatatacaccagtttacaaattacacaatgaaaagggaggaaactcagaaaagcgtaagcttgctcaggcacgcttaaaaaggcctcttaagagccttgatggtgctctatatgatgatgaagatgatgatgacattgaaagagcaagcaagttatcttctgaagatggtgaagaagcttctgcttatctctatgagagtgatgactctgttgaaacaagagtgaagactccttactcaggtgaaatggacttactaggagagattcttgatacattgagcacacacagctcagatcaggggaagctggcagctgcaaagagcttggatttctttagatcaatggatgacattgattacaaacctacgaataaatctaatgctcctagtgagaataacctggctttcctctgtggtggttctggtgaccaagcagagtggaatcttgggcaagacgatagtgccctccatggcaaacacctccctccatctcctaggaagcgggtttcctctagtggtttgacagattctctgtttatcctgagagaggaaaacagtaacaagcacctcggtgctgacaatgtgagtgaccctacttcaggactggatttccaactcacttcccctgaagtttcccagactgataaaggaaaaacagaaaagagggaaacactaagccagatttcagatgatctgcttatacccggtcttgggcggcattcatcgacttttgttccttgggagaaagaagggaaagaagccaaagagacttcagaagatattggactgctccatgaagtagtgtcattatgtcatatgacatctgacttccaacaaagcttgaacatttcagacaaaaacacaaatggaaaccaaacttaaatcttgcatccaagcttctatggagacattttgagattcaatgcaatctgtataataaacagaattatttgtaggaatggcaactcatactatttaaatttttttttgcatttgcaacatttttctcacttgttcatttcgaggatatatgaaatgcattgatttttaaatataaagcgaattctactgtgcttttaaatcaggtactagtttgtatgtatgtttaaagtatgtattgaccatgagatttcccagtgtttggtgcttaatgccgtttattttatttaagctaagaatgcatatgtaacccatgcacataaccagtagctactatactaatctggttgagcatgaactgatcaagatatcaaaacttatcaaaactagcctgaagctgatgaaactgttaacccactaattgccttaatcttaaagctgttttttaagcatacttaaataatgtatgaaagtatgtataaagtttgaaggataagttattagtgttctgcagagcaataatgcctttttctattcatcaaatcaaggtcaaaattcatcttttcaagattaaaaagctctcttaatggaaatatttaatttgcttatataaagcactatagccatgttttccaaaaagtataaaatatacacttacctttcattcagtgaaatataggaagtgctgaattacaatgtgaagttaatgacttctgtttacaaatgagacactctaacgagttttcagtctctctgtatgcctttgctatttaggggtccaccccaagaaagccaaatacaacataaaccgtcctgacaaaaaaaaaaaaaaaaa

SEQ ID NO: 3454 - protein, 339 aa, Homo sapien
MTKATPAVRTAYKFAKNHAKLGLKEVKSKLKHKENEEDYGTCSSSVQYTPVYKLHNEKGGNSEKRKLAQARLKRPLKSLDGALYDDEDDDDIERASKLSSEDGEEASAYLYESDDSVETRVKTPYSGEMDLLGEILDTLSTHSSDQGKLAAAKSLDFFRSMDDIDYKPTNKSNAPSENNLAFLCGGSGDQAEWNLGQDDSALHGKHLPPSPRKRVSSSGLTDSLFILREENSNKHLGADNVSDPTSGLDFQLTSPEVSQTDKGKTEKRETLSQISDDLLIPGLGRHSSTFVPWEKEGKEAKETSEDIGLLHEVVSLCHMTSDFQQSLNISDKNTNGNQT

SEQ ID NO: 3455 - DNA, 6140 bp, Homo sapien
gcggccgcagcctgagccagggccccctccctcgtcaggaccggggcagcaagcaggccgggggcaggtccgggcacccaccatgcgaggcgagctctggctcctggtgctggtgctcagggaggctgcccgggcgctgagcccccagcccggagcaggtcacgatgagggcccaggctctggatgggctgccaaagggaccgtgcggggctggaaccggagagcccgagagagccctgggcatgtgtcagagccggacaggacccagctgagccaggacctgggtgggggcaccctggccatggacacgctgccagataacaggaccagggtggtggaggacaaccacagctattatgtgtcccgtctctatggccccagcgagccccacagccgggaactgtgggtagatgtggccgaggccaaccggagccaagtgaagatccacacaatactctccaacacccaccggcaggcttcgagagtggtcttgtcctttgatttccctttctacgggcatcctctgcggcagatcaccatagcaactggaggcttcatcttcatgggggacgtgatccatcggatgctcacagctactcagtatgtggcgcccctgatggccaacttcaaccctggctactccgacaactccacagttgtttactttgacaatgggacagtctttgtggttcagtgggaccacgtttatctccaaggctgggaagacaagggcagtttcaccttccaggcagctctgcaccatgacggccgcattgtctttgcctataaagagatccctatgtctgtcccggaaatcagctcctcccagcatcctgtcaaaaccggcctatcggatgccttcatgattctcaatccatccccggatgtgccagaatctcggcgaaggagcatctttgaataccaccgcatagagctggaccccagcaaggtcaccagcatgtcggccgtggagttcaccccattgccgacctgcctgcagcataggagctgtgacgcctgcatgtcctcagacctgaccttcaactgcagctggtgccatgtcctccagagatgctccagtggctttgaccgctatcgccaggagtggatggactatggctgtgcacaggaggcagagggcaggatgtgcgaggacttccaggatgaggaccacgactcagcctcccctgacacttccttcagcccctatgatggagacctcaccactacctcctcctccctcttcatcgacagcctcaccacagaagatgacaccaagttgaatccctatgcaggaggagacggccttcagaacaacctgtcccccaagacaaagggcactcctgtgcacctgggcaccatcgtgggcatcgtgctggcagtcctcctcgtggcggccatcatcctggctggaatttacatcaatggccaccccacatccaatgctgcgctcttcttcatcgagcgtagacctcaccactggccagccatgaagtttcgcagccaccctgaccattccacctatgcggaggtggagccctcgggccatgagaaggagggcttcatggaggctgagcagtgctgagaacaccaagtctcccctttgaagactttgaggccacagaaaagacagttaaagcaaagaagagaagtgacttttcctggcctctcccagcatgccctgggctgagatgagatggtggtttatggctccagagctgctgttcgcttcgtcagcacaccccgaatattgaagagggggccaaaaaacaaccacatggattttttataggaacaacaacctaatctcatcctgttttgatgcaagggttctcttctgtgtcttgtaaccatgaaacagcagaagaactaacataactaactccatttttgtttaaggggcctttacctattcctgcacctaggctaggataactttagagcactgacataaaacgcaaaaacaggaatcatgccgtttgcaaaactaactctgggattaaaggggaagcatgtaaacagctaactgtttttgttaaagatttataggaatgaggaggtttggctattgtcacatgacagactgttagccaaggacaaagaagttctgcaaacctcccctggacccttgctggtgtccagatgtctgcggttgtcagccccttcctttcccccgacctaaacataaaagacaaggcaaagcccgcataattttaagacggttctttaggacattagtccaccatcttcttggtttgctggctctccgaaataaagtccctttccttgctccaactccttgtctctcaacgtattggctatgacgcagcaagcagaatgaatttggactcagttacaggctgtcaatggtctgctctgtagcagtctcagagcctccccgacccactacctggagatagccagatagccagatgccctgctcctggccacctttaaagcccctgcatatgacacaggttaactaaagtcaagattggggctgctgcattccaggttccctagactcacaagctggtccttggccaggtgcagtggctcacgcctgtaatcccagcactttgggaggctgaggcaggcggatcacctgaagtcagaagtttgagaccagcctggccaacataattaaaatgtctctactaaaaatacaaaaaattagctgggtgtggtgacgcttgcctgtatcccagctactcaggaagctgagacacgagaatcacttgaacctgggaggcagaggttgcagtgagctcagatagtgccactgcactccagcctgggtgacagagcgagactccgtctcaaaaaaaaaaaaagaaagcagaacctcatggctatagagttggcattttagccccagcttctgtagctctgaaagcctaaagaaggtattctctccatctgttaaacacagtatagtggctctcagcccttggggcatgttatcatgggagggaagtcaaataagaggagagaaaagaactcaagggggaaactgcatttttaggctttgctctcttaccttgccctttctactcagaaccaataacttctgcatcaaaacatgttacagcctgcatcaagggctttaccccaacctgcagcccagccttccctgggtgagcttgctatgcgcagccacatttaccatgtggggctccctattctgatggcctgttcggtgccgggtttactcactgccctgttctgatgtcagtgcctgtacatacctccaaaggcaggacttgcctgataaatatttttcctcctctgaactggattttataggcattaaagacaagtcgggtggctagagggctccttgagacatacctagcagggaactgcaggtggattctgttgagaggcaaagcacctgagtggttgggacacaggcagctggcatgggagggactttttttgagacagggtctcactgtgtcgcccagggcaaggatgcccaaagacaccaggttggagaggcacctgccaactacttgctttccctggagcctgcatgtgcctgtggggtggggaggcgtaggggtctacggctgcctgagatgggtgtgcacagtgtgtgaagtacctacctccttgccttgctggactgtcagccagtcgcagggccggccacaagacccatgtctccatctggtcatactccatagctaccaagttaacctgctctaaactttggagaactggatctgtccaataaacgcttatttggccaagcctgatggctcgtgcctgtactcccagcactttgggaggctgaggtgggagggttgcttgagcccaggggtttgagaccagcttgggcaacaacaacaaaaatgccaggtgtggtggggtgcacctgtagtcccagctactagggaggctgagccaggaggatcacttgagcccgggaggttgaggctgcagtggggggtcataatcatgccactgtactccagcctgggtgacagagtgagaccctgtctccgaaaaaaaaaaaaaaaaaagaacggaaaaagaaatgcttacattgtcagggatcctgtagacaatcattaactctatgagatgcttggttctatttttttgggagactttgtccaagtgttttggcttaagaaatccataggcctctcttggtgacacatctctagtactttttgtcataaacaaacaggccatctgccgccaaatacatccactccccatgccactgacatcctatgggtcagccaggcttgctttgactgaggccgaggcatctggaactttctctgcctgcaggggctagcagcagaggcttcaccgcatcaccaccccttcctccactcctgacattctttcccttcagggatccaaaatggttggccgagctcccagtgggaaaacgtgtgctagagttggggagtgagatgagtggtgctgtccatggaatcaggccacagcaggaactgccccactggccatttgagacacacacaggtggtaaatgctctgctggtgggctgtgcttccctcattcagagagctctgttacagcccactgtgtcctttagaagcttgaaaggaacccaactctttgctgcactgtcctttttcttcctcaaattcagaccctccttccaccggcacccccctactccaccctcagctcttccttgcctggtttatcaagcagagctgaggccccacgtttccaactctgattgtcacttgcatcttcacaaaggataaaccacggagcaactggaaaaccatcagccaagcgttcggatgagtctggttattggtccacccccgaccagattcccttacacttaactcacttctttctttggcaatgaccctcatgacatgtataaatgggtatgactaagaagaggctgtgatctaacatttatttgctgccattttttactctggggagaagcagccccaactcatcactgggaaagaactccccctgcaaaccagctaaatttgataatttaaaccccctgcccctaaaacttctcacagagctggggagttggtggcaactttccaagtcaaggtcttgcttagaaagtccttcactacatggccaggtgcagtggctcacgcctgtagtcccaggtacttgggagcctgaggcaggaggattgcttgagctcaggagttcaaggctgcagagagctatgatcatcccactgcatttgtttaaaaataaatttttaaaatttgtgtgttttatcaggggtctcctgtacagtgtatctgtgtatgtttgtgtgtgtgtttgtatacagccttgtttaatgttttgagcaataagatatgcacacacaggtattttgttgctaaagagattggacaaggttgtagctgtgctcaggcttcagcttggtttgttaaattgagagataaacaatgacaagagctgccagccaaccacactattcaaaaagcaaagtgttcaccactaaagctaaccattcatctggttgcaggcaaggctaaggctctctctcctctagttcctggaacagactcacagattggcatgaagcactgatcaggggctgcactcagactccctggccaagcaaacctacaccagaagagtcagtgtcacagatatgatgcggccaatctctgtctccaaaaacctacctgaacttaatggtagaattcaaagatctggggactgagggcacccagccttctaaaacacaatgtattcatgtgtttagtgtaaactctctgcatggattctcagtgttaataataaaaggaagcattcttttacaactcctgctgtgtgcaaaagaaagtgcaaaggatttggagtggcattccgaagatcaccacacataccttggttctgatggctgctgaactccgacttcttcgctgagacatgactgtgggaacagcctccagctatctgctcatcagaggtgctttcctcaacctcctgcaccacctccaagagaaacagcctaaaaagaaaccccagctgtttacttatattggtctgtaaatccctggaagtaaaccccatgcatttttatctactgtctgaggacatacaataaatctgagaaagtctatgctgtcaaaaaaaaaaaaaaaaaaaa

SEQ ID NO: 3456 - protein, 500 aa, Homo sapien
MRGELWLLVLVLREAARALSPQPGAGHDEGPGSGWAAKGTVRGWNRRARESPGHVSEPDRTQLSQDLGGGTLAMDTLPDNRTRVVEDNHSYYVSRLYGPSEPHSRELWVDVAEANRSQVKIHTILSNTHRQASRVVLSFDFPFYGHPLRQITIATGGFIFMGDVIHRMLTATQYVAPLMANFNPGYSDNSTVVYFDNGTVFVVQWDHVYLQGWEDKGSFTFQAALHHDGRIVFAYKEIPMSVPEISSSQHPVKTGLSDAFMILNPSPDVPESRRRSIFEYHRIELDPSKVTSMSAVEFTPLPTCLQHRSCDACMSSDLTFNCSWCHVLQRCSSGFDRYRQEWMDYGCAQEAEGRMCEDFQDEDHDSASPDTSFSPYDGDLTTTSSSLFIDSLTTEDDTKLNPYAGGDGLQNNLSPKTKGTPVHLGTIVGIVLAVLLVAAIILAGIYINGHPTSNAALFFIERRPHHWPAMKFRSHPDHSTYAEVEPSGHEKEGFMEAEQC

SEQ ID NO: 3457 - DNA, 4669 bp, Homo sapien
tttttattattgctgttattgaggttgagggagaagagatcggtctaaattctggctgggtaagtggggggattctcggcgatgagaaacgggggacttagaagccggaggaaaatcagcagccccacatctccacttctccagtccgccctactctccacccgtgacctccagtggagaccccaggcggcagcatcagtatttgatcggcccttcgtcagcacgctgccagccctggccggctgggttcgccaggcatcacccgctcggctctgaagcggacgcctggccctgcaccgggctttggaaggaccctctctgcgctcgccccctccccagggtggctccgctttcgagcccgggcgcggcgcccaccatgcgcggctgcctgcggctcgcgctgctctgcgcgctgccctggctcctgctggcggcgtcgcccgggcacccggcgaaatcccccaggcagcccccggcaccgcgccgcgaccccttcgacgctgccaggggcgccgatttcgatcatgtctacagcggggtggtgaacctcagcaccgagaacatctactctttcaactacaccagccagcccgaccaggtgacagccgtgagggtgtatgtgaacagttcctctgagaatctcaactacccggtccttgttgtggttcgccagcagaaagaggtgctgtcctggcaggttcctctgctcttccaaggactataccagaggagctacaattatcaagaagtgagccgcaccttatgtccctcagaagcaaccaatgagacgggacccttgcagcaactgatatttgtagatgtcgcatccatggcacccctgggtgctcagtacaaactgctagttaccaagctgaagcacttccagctccggacaaatgttgcctttcactttactgccagcccctctcaacctcagtattttctatacaagtttcccaaagacgtggactcagttatcattaaagtggtgtctgaaatggcttatccatgttctgttgtctcagtccagaatatcatgtgcccggtgtatgatctcgaccacaatgtggaatttaatggtgtctatcagtccatgaccaagaaagctgccatcacgctacagaagaaggattttccaggcgagcagttcttcgtggtatttgtgataaagcctgaagattatgcctgtggaggatctttcttcatccaggaaaaggaaaaccagacctggaatctacagcgaaaaaagaaccttgaagtgaccattgtcccttccattaaagaatctgtttatgtgaaatccagtcttttcagtgtcttcatcttcctgtccttctacttgggatgccttcttgttgggtttgttcattatctgaggtttcagagaaaatccattgatggaagctttgggtccaatgatggctctggaaatatggtggcatctcatcccattgctgccagcacacccgaagggagcaattatgggacaatagatgagtcaagctccagtcctggaaggcagatgtcctcctccgatggtgggccaccgggccagtcagacacagacagctccgtggaggagagcgacttcgacaccatgccagacattgagagtgataaaaacatcatccggaccaagatgttcctttacctgtcagatttgtccaggaaggaccggagaattgtcagcaaaaaatataaaatttatttttggaacatcatcaccattgctgtgttttacgcgctgcccgtgatccagctggtcattacctatcagacagtggtaaatgtcactggcaaccaggacatctgttactacaacttcctctgtgctcaccccttgggcgtcctgagtgccttcaacaacattctcagcaatctgggccacgtgcttctgggcttcctcttcctgctgatagtcttgcgccgcgacatcctccatcggagagccctggaagccaaggacatctttgctgtggagtacgggattcccaaacactttggtctcttctacgctatgggcattgcattgatgatggaaggggtgctcagtgcttgctaccatgtctgccctaattattccaacttccgattcgacacctccttcatgtacatgatcgctggcctgtgcatgctgaagctctatcagacccgccacccagacatcaatgccagcgcctactctgcctatgcctcctttgctgtggtcatcatggtcaccgtccttggagtggtgtttggaaaaaatgacgtatggttctgggtcatcttctctgcaatccacgttctggcctcgctagccctcagcacccagatatattatatgggtcgtttcaagatagatttgggaattttccggcgggctgccatggtgttctacacagactgtatccagcagtgtagccgacctctatatatggatagaatggtgttgctggttgtggggaatctggttaactggtccttcgccctctttggattgatataccgccccagggactttgcttcctacatgctgggcatcttcatctgtaaccttttgctgtacctggccttttacatcatcatgaagctccgcagctctgaaaaggtcctcccagtcccgctcttctgcatcgtggccaccgctgtgatgtgggctgccgccctatattttttcttccagaatctcagcagctgggagggaactccggccgaatcccgggagaagaaccgcgagtgcattctgctggatttcttcgatgaccatgacatctggcacttcctctctgctactgctctgtttttctcattcttggttttgttaactttggatgatgaccttgatgtggttcggagagaccagatccctgtcttctgaacctccaacattaagagaggggagggagcgatcaatcttggtgctgtttcacaaaaattacagtgaccacagcaaagtaaccactgccagatgctccactcaccctctgtagagccaactctgcattcacacaggaaggagaggggctgcgggagatttaaacctgcaagaaaggaggcagaaggggagccatgttttgaggacagacgcaaacctgaggagctgagaaacacttgctccttccatctgcagctttgggagtgcaacagggataggcactgcatccaagtcaactcaccatcttggggtccctcccaccctcacggagacttgccagcaatggcagaatgctgctgcacacttccctccagttgtcaccctgcccagaaaggccagcagcttggacttcctgcccagaaactgtgttggcccccttcacacctctgcaacacctgctgctccagcaagaggatgtgattctttagaatatggcggggaggtgaccccaggccctgccctactgggatagatgttttaatggcaccagctagtcacctcccagaagaaactctgtacatttcccccaggtttctgatgccatcagaagggctcaggagtggggtttgtcacacattcctcttaacaagtaactgtcactgggaccgagtcctgggtgcttacatattccttcgtgtcttcatctcactgacctgtgtggacctcatcactctgactctgccttcttggaaaggccctgtcactccacagatgtctggccagcttcaaggcagaaggaaaaacaggaaaagctcttttaacagcagcaggaacaagagaaatgactaaccatactaaaagactggtaacagcagcagcagccagacaggcctcaccttaaggacttgggctgccagagcaaattcagcagagcttatttggcctcccattcacacagctcagttctgtgcccacatcacctttggggaagaaatcagcattctaatcagggacactacttcaggagtcctccacagcgagtccgtcatctgtcactttatgtagatcagggttctagacttcttccctgaggttctcagaagcagctctcaggatgaacgtattgtcctcttcccctcttcttgcaaagtgcacagctaatctaatgttgtctctcggttgcacctgacattctctccccagtaaggtgttggcaagctcagcatctgggttccactctcacactgtctggcagctctgtgtctgagaagttctacattgaccaggcccccttgttgcctggagtatgacgtaatcagaaaatagacgtataaatgtgcacatgcgtatgtatttgcttgtgaaattaaagtcacctcttgcctctgctttcctgatcattcgttagagaaatggatcaggcatttttttaaattattattctttctctaaactatttgcattgtgttcaaaaacccattttagaagtttgaacagcaagcttttcctgattttaaaaacacaaagttgctttcaatgaaatattttgtgatttttttaaagtccccaaatgtgtacttagccttctgttattccttattctttaagcagtgttggcttccattgaccatatgaaggccaccaattaaatggttgtgttaatccaacatgtaaaaaactttttggcagggcacagtggctcacgcctgtaatcccaaagtgctggaatttacaggtaggaccaccacacttggtccacttacttataataaacattgatttggtcgttaaaaaaaaaaaaaaaaaaaaaaa

SEQ ID NO: 3458 - protein, 827 aa, Homo sapien
MRGCLRLALLCALPWLLLAASPGHPAKSPRQPPAPRRDPFDAARGADFDHVYSGVVNLSTENIYSFNYTSQPDQVTAVRVYVNSSSENLNYPVLVVVRQQKEVLSWQVPLLFQGLYQRSYNYQEVSRTLCPSEATNETGPLQQLIFVDVASMAPLGAQYKLLVTKLKHFQLRTNVAFHFTASPSQPQYFLYKFPKDVDSVIIKVVSEMAYPCSVVSVQNIMCPVYDLDHNVEFNGVYQSMTKKAAITLQKKDFPGEQFFVVFVIKPEDYACGGSFFIQEKENQTWNLQRKKNLEVTIVPSIKESVYVKSSLFSVFIFLSFYLGCLLVGFVHYLRFQRKSIDGSFGSNDGSGNMVASHPIAASTPEGSNYGTIDESSSSPGRQMSSSDGGPPGQSDTDSSVEESDFDTMPDIESDKNIIRTKMFLYLSDLSRKDRRIVSKKYKIYFWNIITIAVFYALPVIQLVITYQTVVNVTGNQDICYYNFLCAHPLGVLSAFNNILSNLGHVLLGFLFLLIVLRRDILHRRALEAKDIFAVEYGIPKHFGLFYAMGIALMMEGVLSACYHVCPNYSNFRFDTSFMYMIAGLCMLKLYQTRHPDINASAYSAYASFAVVIMVTVLGVVFGKNDVWFWVIFSAIHVLASLALSTQIYYMGRFKIDLGIFRRAAMVFYTDCIQQCSRPLYMDRMVLLVVGNLVNWSFALFGLIYRPRDFASYMLGIFICNLLLYLAFYIIMKLRSSEKVLPVPLFCIVATAVMWAAALYFFFQNLSSWEGTPAESREKNRECILLDFFDDHDIWHFLSATALFFSFLVLLTLDDDLDVVRRDQIPVF

SEQ ID NO: 3459 - DNA, 2091 bp, Homo sapien
gtacattttgaggaagcagcaactgctaaggagagatcaaaggtagctaaaattggtgctttctgctgtggccttagtttatgtaaccagcacacaataatactctatgttttgtgcataataccttggattctctttcaacttttaaaaaagaaggaactctccctgggctctttgttgaagttgagcctgtacttctctgctggtttgctgccctatgtccaccttcccatctcatcttaccttaatcacgcccggtggacctggggagaccagacaacactgcaaggatttttgacacattttctcagggaagaatatggaaccttcagcctggccaaatctgaaataggatccagtatgtctgaaatactgctttctcaagtaacaaatatgaggaccgaactctcattcaacatccaagcccttgcagtttgtgcaaatatatgtttagcaacaaaggacagacagaatccatcattagtatggctttttactggaatgttttgcatttattcattggtctttgcttggagagcaaatttagatatttcaaaaccacttttcatgggtgtggtggaacgattctggatgcagagcaatgcagtagtggccgtcctcgctggcattggtttggctgcagttgtgtctgagactaaccgagtgctgaatagcaatgggcttcagtgtctggaatggctttctgcaactctttttgtagtttaccaaatatattctaattacagtgtttgtgaccaaaggaccaactatgtgattgataagttcgcaaagaaccttctcacctctatgcctcatgatgcaattatcttactcagaggagatttgccaggaaattctctccgttacatgcattactgtgaggggttgaggcctgacatttcattagtggatcaggaaatgatgacttacgagtggtatttacccaagatggcaaagcacttgccaggtgtcaactttcctgggaaccggtggaatcctgtggaaggaatattacctagtggaatggtcacatttaatctttatcattttcttgaagtaaataaacaaaaagaaacatttgtttgcataggaattcatgaaggcgacccaacctggaaaaagaactattcactttggccatgggggtcttgtgacaaattagttcctttggagattgtattcaaccctgaggaatggattaaacttacaaaaagtatctataactggaccgaagaatatggaaggtttgatccatcttcttgggaatctgtggccaatgaagaaatgtggcaagcgaggatgaaaacaccgttcttcatctttaacctggcagaaactgctcacatgccttcaaaagtgaaagctcaactctacgctcaagcatatgacctttataaggagattgtctatttacaaaaggagcacccagtgaattggcacaagaactatgccatcgcctgtgagcggatgctgcgtcttcaggcaagagatgcagatcctgaagtgctgttatcggaaaccatcagacatttccgtctgtactctcagaaagcaccgaatgacccacagcaagctgatattttaggtgctctaaagcacctaagaaaagaactgcaaagtctgagaaataggaaaaatgtctgagacagcaaaatatgaaaaacctgctcatcgttcagcttccaaaattctgaagtctggaagtttttccttcaagaaaagaaactgcataaaaaatttaaaactaagtcatctcccagatataagtatcatggtccagcagtactgtttaatggggtattcagtgactaaggtctgctatttatgcaaaattctgtttatcccgtgttaccaaattaccatttcagtgagaagcttttgaaaagtcttctgacttccagtctttcaccagatgactgcactggattagattccagaagagaatgaaccattttcatataactaaatattggtcatgaactgtgtaagggccatgcttattgggatcagttttaaagttaaattcttttgatattaataccagaccaaagacattttctgtttcctggaaaaaaaaaaaaaaaaaaaaaa

SEQ ID NO: 3460 - protein, 427 aa, Homo sapien
MSEILLSQVTNMRTELSFNIQALAVCANICLATKDRQNPSLVWLFTGMFCIYSLVFAWRANLDISKPLFMGVVERFWMQSNAVVAVLAGIGLAAVVSETNRVLNSNGLQCLEWLSATLFVVYQIYSNYSVCDQRTNYVIDKFAKNLLTSMPHDAIILLRGDLPGNSLRYMHYCEGLRPDISLVDQEMMTYEWYLPKMAKHLPGVNFPGNRWNPVEGILPSGMVTFNLYHFLEVNKQKETFVCIGIHEGDPTWKKNYSLWPWGSCDKLVPLEIVFNPEEWIKLTKSIYNWTEEYGRFDPSSWESVANEEMWQARMKTPFFIFNLAETAHMPSKVKAQLYAQAYDLYKEIVYLQKEHPVNWHKNYAIACERMLRLQARDADPEVLLSETIRHFRLYSQKAPNDPQQADILGALKHLRKELQSLRNRKNV

SEQ ID NO: 3461 - DNA, 2170 bp, Homo sapien
tcattttacctctcttggtcatcagaaaataatgaaaagaggcaagaaatcgtatgaaggtaagaattttgagaacatctttactctgagctcatcgcttaatgaaaaccagagaaatctccctggagagaaacaatatagatgtactgaatgtggcaaatgcttcaaacggaactcttctcttgttttgcatcaccgaactcacaccggagagaagccttatacttgtaatgagtgtggaaagtccttctccaagaactacaacctgattgtgcatcaaagaatccacacaggagagaagccctatgaatgcagtaaatgtgggaaagctttcagtgatggctcagctctgacacagcaccagagaattcacacaggcgagaaaccttatgaatgcctagagtgtggaaaaaccttcaaccgaaattcatccttaattttgcaccaaagaactcatacaggggaaaaaccatatagatgtaacgaatgtgggaaacccttcactgacatctcccaccttacagtgcatctcagaatccacaccggtgagaagccctatgagtgtagcaaatgtggaaaggctttccgggacggctcgtacctcacccagcatgagaggactcacactggagaaaagccctttgagtgtgcagagtgcgggaaatccttcaacagaaactctcacctcattgtgcatcaaaagatccattctggggagaaaccctatgaatgtaaagaatgtggcaagactttcatcgagagtgcgtacctcatcaggcatcagaggattcatactggcgagaagccctatggctgcaaccagtgtcagaaacttttcaggaatatcgctggcctcattaggcaccagaggactcatactggtgagaagccctatgagtgtaatcagtgtggcaaagccttcagggacagctcctgtctgaccaagcaccagagaattcacactaaggagaccccatatcagtgtccagaatgtgggaagtccttcaagcagaactctcacctggcagtacatcagagactccatagcagggagggtcccagccggtgtcctcagtgtggaaaaatgttccaaaagagctcatcccttgttcgacatcaaagagcacacctgggagagcaacccatggaaacataatggttgggggccacatgagtcttccagttcactctcactcctgtgtttaggaggcgtgtcttagatctgactcctctctggtcagtagaaaagaatcctttaagctatccagtgaattgatgaatgtgagacattgctgagccacactgttaagtctgctcattggggaactccagagacaacttaggatgagggcagaaaagtctttggggatgattcagtctgtaccagacatgacaacacacacactggaatgaaatgtgcaaacatgggggtgacaccacagagagaacctgtgaatgcattcagaacatgattggaatgaagagccctgtagtagggagtttccaccttgtacgtaagcaaacactgaatcaacttttttttttttttcggacagagtctcactgtgcagtggcatgatctccactcacagcaacctctgcctcccaggttcaagcagttctcctgcctcagcctggccagcatggtgaaaccccatctctaccaaaaatacaggaaattatctgggcatagtagtgtgtgcctgtaatcccagctacttgggaagctgaggcaggagaattgcttgaacctgggaggtggaggttgcagtgagctaagatcgcaccactgcactccagcctgggtgacagagcgagactccatttcaaaaaaaaagactgaaacaagcttgtgctaagatggaaagggctgcttctaacagatgtggtttgttgctttagttgttgaagcaaaaatactgagttgttatgtttatgttatcaccccaccactacctccatggttgttcatttaggatgcttctaattcagccactgtgaaccattataaaggttttattgccatgttgaaaatgtttataatatggcaaaaaggggcatcaaatagaagatttactattattccagccatgtaaaaatatgtgcacatatggatgtatgttgaaagtggatgatggagaaataaaatgtggttttctttggggactgg

SEQ ID NO: 3462 - protein, 374 aa, Homo sapien
MKRGKKSYEGKNFENIFTLSSSLNENQRNLPGEKQYRCTECGKCFKRNSSLVLHHRTHTGEKPYTCNECGKSFSKNYNLIVHQRIHTGEKPYECSKCGKAFSDGSALTQHQRIHTGEKPYECLECGKTFNRNSSLILHQRTHTGEKPYRCNECGKPFTDISHLTVHLRIHTGEKPYECSKCGKAFRDGSYLTQHERTHTGEKPFECAECGKSFNRNSHLIVHQKIHSGEKPYECKECGKTFIESAYLIRHQRIHTGEKPYGCNQCQKLFRNIAGLIRHQRTHTGEKPYECNQCGKAFRDSSCLTKHQRIHTKETPYQCPECGKSFKQNSHLAVHQRLHSREGPSRCPQCGKMFQKSSSLVRHQRAHLGEQPMET

SEQ ID NO: 3463 - DNA, 2428 bp, Homo sapien
gaaaacattttgctgaaaatataagcaaacatcggccttgtcctccttgtgttcatacactgtggaagcttttctctgcctcctccgtgagagtgcgtggccgggagaccagaaacgtggtcctttctcttgcctgtgagctggtgcagagatggaggaagaagaatatgaacaaattccccaggagaatcccccagaagagctgtcccaggatcctgtgctggagctgtcaggaggtctaagggagaaagaacagaagaccccaaggagactgaggctcattctcatggggaaaacagggagtgggaagagtgcaacaggaaacagcatcctcggcagggacgtcttcgagtctaaactcagcaccagacccgtgaccaagacctcccagagacggagccgagagtgggctgggaaggagcttgaggtgattgacacacccaacattctgtccccccaggtctcgccagaggtggcagacgctatctgccaagccatcgtcttatccgccccagggccccacgccgtgctcctggtgacacaactgggccggttcacggatgaggatcagcaggtggtcaggcgcctgcaggaggtctttggagtgggggttctgggtcacaccatcctggtgttcacccggaaggaagacctggctggcagctccctggaagactatgtgcgagagaccaacaaccaggcccttgcctggctggatgtgacccttgcacggcgccattgcggcttcaacaacagggcacagggggaggagcaggaggcccaactgcgagagctcatggagaaagttgaagccattatgtgggaaaacgaaggagattattacagcaacaaggcttaccaatatacccagcaaaactttcggctgaaagaactacaggaaaggcaagtaagccagggccaaggctctgaggacgtgcctggtgaggagtcttggctggaaggactgtcccagatccagaaggaatctgaggaagcccacagatgcctgctggggaaggctgacctttgagcctgtgctggacttgagccaaggacaccatcagcctttgcacccccctgtgtccagccctctgtttctctttccatcccatggagtgcttcccagtctccaggtcatgacgtctggtgtaggaagaggggcatggggcttgaggacagggtccagcatgcccagatcacattccagttccttcattccttcttccagaacatctgggtcctccctcctctgtgccccaacagcacgctgtcttcctattggaccttctatctcattggcattgcctttcatgagttacttgtctatactctgatagaaccaaagtttcttgagggcaggcctgtatcttttacttctgtgtaacttccacagcttttgactgcattggagtcatgcagtcacgtttggtgcggcaactccatgcaagctgttgaccagatgacttctcatctctccccacaccatgatggtttaaggtgcctgttgtgtctggtggagacagtgctgggagatgatcagaaatctcagggcacagcctcaggtctacctggacactcatccactgttggagatgctcaacagctagacacagatgctcacagccgacctgtggcctcttgctctgaagccatcccccatcttccctagacacagcagacatctgagaaagcttcagcatttctcttgctaacagattcagaaaagtgtctcaaagcagagcacagagttatttggtgtttgctgaagacagcctttgtgccacaatcacttattaaataagcgatcaatttcccattgaactgaacatgcaacatttatcatacattcagttctcattcacactccttaagatttggtcagaatttttatttctgttcatgtcttctacttttctactcctgtatgaataaaatattgatttgattacagtggctttgactataatgtgggagccaatttttgcctcagtcttcatttttatatttaccttgttattctcaggcatttttttcttctatgtgagagttaaaatcattctgtaatttccccccaaaatcatattggtattctagttggcaatgtcttacatttatgttaagtttgagggaattggtagttcaagtataagttaattaaggccattttatttctaagtgaacagacttgaaactccagagctactgaagtaaaagttagaatcatttgcattttcattcagataggagataattttgtaaattttgatgctattattttaactctattagcttaagtaatgtcataatagaaaacacaagcatttgaccaaatgagatccattcagcgactaactggcaaggcactcaaaacatgtcattcattaaatgttgtttttatttacctcaaaaaaaaaaaaaaaaaaaaaaa

SEQ ID NO: 3464 - protein, 292 aa, Homo sapien
MEEEEYEQIPQENPPEELSQDPVLELSGGLREKEQKTPRRLRLILMGKTGSGKSATGNSILGRDVFESKLSTRPVTKTSQRRSREWAGKELEVIDTPNILSPQVSPEVADAICQAIVLSAPGPHAVLLVTQLGRFTDEDQQVVRRLQEVFGVGVLGHTILVFTRKEDLAGSSLEDYVRETNNQALAWLDVTLARRHCGFNNRAQGEEQEAQLRELMEKVEAIMWENEGDYYSNKAYQYTQQNFRLKELQERQVSQGQGSEDVPGEESWLEGLSQIQKESEEAHRCLLGKADL

SEQ ID NO: 3465 - DNA, 3916 bp, Homo sapien
agagtgctgatttagaagaatacaaatcatggctgaaaatagtgtattaacatccactactgggaggactagcttggcagactcttccatttttgattctaaagttactgagatttccaaggaaaacttacttattggatctacttcatatgtagaagaagagatgcctcagattgaaacaagagtgatattggttcaagaagctggaaaacaagaagaacttataaaagccttaaaggacattaaagtgggctttgtaaagatggagtcagtggaagaatttgaaggtttggattctccggaatttgaaaatgtatttgtagtcacggactttcaggattctgtctttaatgacctctacaaggctgattgtagagttattggaccaccagttgtattaaattgttcacaaaaaggagagcctttgccattttcatgtcgcccgttgtattgtacaagtatgatgaatctagtactatgctttactggatttaggaaaaaagaagaactagtcaggttggtgacattggtccatcacatgggtggagttattcgaaaagactttaattcaaaagttacacatttggtggcaaattgtacacaaggagaaaaattcagggttgctgtgagtctaggtactccaattatgaagccagaatggatttataaagcttgggaaaggcggaatgaacaggatttctatgcagcagttgatgactttagaaatgaatttaaagttcctccatttcaagattgtattttaagtttcctgggattttcagatgaagagaaaaccaatatggaagaaatgactgaaatgcaaggaggtaaatatttaccgcttggagatgaaagatgcactcaccttgtagttgaagagaatatagtaaaagatcttccctttgaaccttcaaagaaactttatgttgtcaagcaagagtggttctggggaagcattcaaatggatgcccgagctggagaaactatgtatttatatgaaaaggcaaatactcctgagctcaagaaatcagtgtcaatgctttctctaaatacccctaacagcaatcgcaaacgacgtcgtttaaaagaaacacttgctcagctttcaagagagacagacgtgtcaccatttccaccccgtaagcgcccatcagctgagcattccctttccatagggtcactcctagatatctccaacacaccagagtctagcattaactatggagacaccccaaagtcttgtactaagtcttctaaaagctccactccagttccttcaaagcagtcagcaaggtggcaagttgcaaaagagctttatcaaactgaaagtaattatgttaatatattggcaacaattattcagttatttcaagtaccattggaagaggaaggacaacgtggtggacctatccttgcaccagaggagattaagactatttttggtagcatcccagatatctttgatgtacacactaagataaaggatgatcttgaagaccttatagttaattgggatgagagcaaaagcattggtgacatttttctgaaatattcaaaagatttggtaaaaacctaccctccctttgtaaacttctttgaaatgagcaaggaaacaattattaaatgtgaaaaacagaaaccaagatttcatgcttttctcaagataaaccaagcaaaaccagaatgtggacggcagagccttgttgaacttcttatccgaccagtacagaggttacccagtgttgcattacttttaaatgatcttaagaagcatacagctgatgaaaatccagacaaaagcactttagaaaaagctattggatcactgaaggaagtaatgacgcatattaatgaggataagagaaaaacagaagctcaaaagcaaatttttgatgttgtttatgaagtagatggatgcccagctaatcttttatcttctcaccgaagcttagtacagcgggttgaaacaatttctctaggtgagcacccctgtgacagaggagaacaagtaactctcttcctcttcaatgattgcctagagatagcaagaaaacggcacaaggttattggcacttttaggagtcctcatggccaaacccgacccccagcttctcttaagcatattcacctaatgcctctttctcagattaagaaggtattggacataagagagacagaagattgccataatgcttttgccttgcttgtgaggccaccaacagagcaggcaaatgtgctactcagtttccagatgacatcagatgaacttccaaaagaaaactggctaaagatgctgtgtcgacatgtagctaacaccatttgtaaagcagatgctgagaatcttatttatactgctgatccagaatcctttgaagtaaatacaaaagatatggacagtacattgagtagagcatcaagagcaataaaaaagacttcaaaaaaggttacaagagcattctctttctccaaaactccaaaaagagctcttcgaagggctcttatgacatcccacggctcagtggagggaagaagtccttccagcaatgataagcatgtaatgagtcgtctttctagcacatcatcattagcaggtatcccttctccctcccttgtcagccttccttccttctttgaaaggagaagtcatacgttaagtagatctacaactcatttgatatgaagcgttaccaaaatcttaaattatagaaatgtatagacacctcatactcaaataagaaactgacttaaatggtacttgtaattagcacttggtgaaagctggaaggaagataaataacactaaactatgctatttgatttttcttcttgaaagagtaaggtttacctgttacattttcaagttaattcatgtaaaaaatgatagtgattttgatgtaatttatctcttgtttgaatctgtcattcaaaggccaataatttaagttgctatcagctgatattagtagctttgcaaccctgatagagtaaataaattttatgggcgggtgccaaatactgctgtgaatctatttgtatagtatccatgaatgaatttatggaaatagatatttgtgcagctcaatttatgcagagattaaatgacatcataatactggatgaaaacttgcatagaattctgattaaatagtgggtctgtttcacatgtgcagtttgaagtatttaaataaccactcctttcacagtttattttcttctcaagcgttttcaagatctagcatgtggattttaaaagatttgccctcattaacaagaataacatttaaaggagattgtttcaaaatatttttgcaaattgagataaggacagaaagattgagaaacattgtatattttgcaaaaacaagatgtttgtagctgtttcagagagagtacggtatatttatggtaattttatccactagcaaatcttgatttagtttgatagtgtgtggaattttattttgaaggataagaccatgggaaaattgtggtaaagactgtttgtacccttcatgaaataattctgaagttgccatcagttttactaatcttctgtgaaatgcatagatatgcgcatgttcaactttttattgtggtcttataattaaatgtaaaattgaaaattcatttgctgtttcaaagtgtgatatctttcacaatagcctttttatagtcagtaattcagaataatcaagttcatatggataaatgcatttttatttcctatttctttagggagtgctacaaatgtttgtcacttaaatttcaagtttctgttttaatagttaactgactatagattgttttctatgccatgtatgtgccacttctgagagtagtaaatgactctttgctacattttaaaagcaattgtattagtaagaactttgtaaataaatacctaaaacccaagtgt

SEQ ID NO: 3466 - protein, 883 aa, Homo sapien
MAENSVLTSTTGRTSLADSSIFDSKVTEISKENLLIGSTSYVEEEMPQIETRVILVQEAGKQEELIKALKDIKVGFVKMESVEEFEGLDSPEFENVFVVTDFQDSVFNDLYKADCRVIGPPVVLNCSQKGEPLPFSCRPLYCTSMMNLVLCFTGFRKKEELVRLVTLVHHMGGVIRKDFNSKVTHLVANCTQGEKFRVAVSLGTPIMKPEWIYKAWERRNEQDFYAAVDDFRNEFKVPPFQDCILSFLGFSDEEKTNMEEMTEMQGGKYLPLGDERCTHLVVEENIVKDLPFEPSKKLYVVKQEWFWGSIQMDARAGETMYLYEKANTPELKKSVSMLSLNTPNSNRKRRRLKETLAQLSRETDVSPFPPRKRPSAEHSLSIGSLLDISNTPESSINYGDTPKSCTKSSKSSTPVPSKQSARWQVAKELYQTESNYVNILATIIQLFQVPLEEEGQRGGPILAPEEIKTIFGSIPDIFDVHTKIKDDLEDLIVNWDESKSIGDIFLKYSKDLVKTYPPFVNFFEMSKETIIKCEKQKPRFHAFLKINQAKPECGRQSLVELLIRPVQRLPSVALLLNDLKKHTADENPDKSTLEKAIGSLKEVMTHINEDKRKTEAQKQIFDVVYEVDGCPANLLSSHRSLVQRVETISLGEHPCDRGEQVTLFLFNDCLEIARKRHKVIGTFRSPHGQTRPPASLKHIHLMPLSQIKKVLDIRETEDCHNAFALLVRPPTEQANVLLSFQMTSDELPKENWLKMLCRHVANTICKADAENLIYTADPESFEVNTKDMDSTLSRASRAIKKTSKKVTRAFSFSKTPKRALRRALMTSHGSVEGRSPSSNDKHVMSRLSSTSSLAGIPSPSLVSLPSFFERRSHTLSRSTTHLI

SEQ ID NO: 3467 - DNA, 3141 bp, Homo sapien
cgaaaagctgcggttaaggagagtccggtttaaccgtcaccgggaagcgcgctcgttcgggatcgccgagggggctgagatagtgaattcctaagaagaaaataatggattgcatattagttgttctctaagtggactcaacagtgtgcaagcttgttggaaaagccaaaagaagatggcaactccttatgtcccagttcctatgcccataggaaactctgcttccagttttacaacaaacagaaatcaaagaagttcttcttttggcagtgtctcaacaagctcaaattcttctaagggccagttagaagactcaaatatgggtaattttaaacagacaagtgttcctgatcaaatggataatacttcatctgtctgtagcagtcccctcattaggactaaatttacaggtacagcttcttccattgagtattctactagaccaagagacactgaagaacaaaatccggaaacagtgaattgggaagatagaccatctacacctactatactgggttatgaagtgatggaagaaagagctaaatttactgtatataaaatactagtaaagaaaaccccagaagaaagctgggtagttttcagaagatacactgacttctctaggcttaatgacaaattaaaagagatgtttccaggttttcgactagcacttcctccaaaacgctggtttaaagataattacaatgctgactttttagaagacagacaattaggattacaagcgtttcttcaaaatttagtagctcacaaggacattgctaactgccttgcagtgagagaatttctttgtttggatgatccaccgggtccatttgatagcctagaggaaagcagggcattctgtgaaactttagaagagacaaactaccgcttacagaaagaactacttgaaaaacaaaaggagatggaatcactaaagaaactgctcagtgagaagcaacttcatatagacactttagagaacagaatcagaacattgtctttagaacctgaagaatcactggatgtgtcagaaacagaaggtgaacagatcctaaaggtggagtcctctgcacttgaggttgatcaagatgtcctggatgaagaatctagagctgataataaaccatgcttaagttttagtgaacctgaaaatgctgtatcagagatagaagtagcagaagtggcatatgatgctgaagaagactaatgtatcacaagcagttccctccatttagactattcaaaaatttagaagagtggcaaatactattttaaaagaagaaccaagaactgtaaaacatatagaaaagagcaagaatgcacatgtataaagtttacataaagaagtttttttaagttattgagataggaaatatattcactgctgcttttaattgtattttatccaattacatttaatacactaaaaaaaatcttgttggaattctgttatcaaggcccacattcttaaatactgtgcataaattattatggtgttttgcctatatattgctccaaactactgtgtatatatgtatgtgtgttaaatcaccaattatattaatcaaatggaaattaattgcatgttactatctgggtgatatattcttctttatatctctgacatgacatattttcattaatagtttaaatcagtgaccatcataataaagataaaatttagttgagtttttaatgtttacatgtttacatctttaaataaaatttgcttatttgaaatgttaatgctctttagaaaaatgactttctagtaccaaaggaaaactacttgaaagagctgtaatcatatagctaaagtgataagatagccttgattttaaaagctgattcattaatatcaaaatactttaataagtgtcacagttattaatatgttacatttgtttagtttccacgtaatctttatctctacctagatttagtgagtttgcctctttcagaatactacctccttttgttaaggcatattctttcgaaaatatagattctaaataaataggggcttatacaaaaaagaaaataaaaagccatatatactgcaaagttcctaactggcttgactcctgacattgcatttttatttctatttgtgtgaagatgttgttatactgtattatggctgattttctttttaatatatttagccaagtgatgcactttatgataattaaactcttttgtgccaagtttaattggtggatttttttagtaagtagagttaggagaaagaattatgtagtgcctttactatttcactttctacaaaagtctcctagggtctttgagtcagctttatgaaaaaatgtttgtttatttcagctttgtgtacagtcattaaaagtgccttgtttcatttttataggatgaagttatttattttctattttcactgttttgcatattgctgttaataagcattgtaatcatgctggcattttgcaatcccagtcggtatgctttctaaaaactgagggaaacttactggggaaatagaataacaatctccatttttttctttactatctaaaagtttatcggtatcttgatgtatatatatattaaggtgtggctgtttaaaattctaatgacatatatcaacacattcaatggctgttgttaacctttgaagtaaaaaggagatcactttttaccaaataaccaaaaatttttagtctttgtcaaagtgcacaggtatgttctcagaacatttttcacaatgtgtatcagaaatatgtttgctatccttagagacagaaatgaatataacaaattgatctgcttatttattaaaattattattctagacttacaaaaggcttaaaaagaacaatcatttaatcagtaccattctgtatcttatataacagatctttgccaaattctagatattatagtgttgcctgtctgttctaaagcgaaccagccactttttcaatctggctttttggaagattgtatttaaagttcttcaaggatgaagaaaaaaatctgttaattaggtaaaccactattatttatatttataatttacttttttttacttttataatgcattttactcccagtattatgttcatttaataaattattttttcactacaaaaaaaaaaaaaaaaa

SEQ ID NO: 3468 - protein, 344 aa, Homo sapien
MATPYVPVPMPIGNSASSFTTNRNQRSSSFGSVSTSSNSSKGQLEDSNMGNFKQTSVPDQMDNTSSVCSSPLIRTKFTGTASSIEYSTRPRDTEEQNPETVNWEDRPSTPTILGYEVMEERAKFTVYKILVKKTPEESWVVFRRYTDFSRLNDKLKEMFPGFRLALPPKRWFKDNYNADFLEDRQLGLQAFLQNLVAHKDIANCLAVREFLCLDDPPGPFDSLEESRAFCETLEETNYRLQKELLEKQKEMESLKKLLSEKQLHIDTLENRIRTLSLEPEESLDVSETEGEQILKVESSALEVDQDVLDEESRADNKPCLSFSEPENAVSEIEVAEVAYDAEED

SEQ ID NO: 3469 - DNA, 1279 bp, Homo sapien
ggcacgaggggaagtggctgtttggctgctgacaacatgaagacttcctgcgatgagaacagaggcacaggtgccggccctgcagcccccagaacctggactggagggggccatggggcaccggaccctggtcctgccctgggtgctgctgaccttgtgtgtcactgcggggaccccggaggtgtgggttcaagttcggatggaggccaccgagctctcgtccttcaccatccgttgtgggttcctggggtctggctccatctccctggtgactgtgagctgggggggccccgacggtgctggggggaccacgctggctgtgttgcacccagaacgtggcatccggcaatgggcccctgctcgccaggcccgctgggaaacccagagcagcatctctctcatcctggaaggctctggggccagcagcccctgcgccaacaccaccttctgctgcaagtttgcgtccttccctgagggctcctgggaggcctgtgggagcctcccgcccagctcagacccagggctctctgccccgccgactcctgcccccattctgcgggcagacctggccgggatcttgggggtctcaggagtcctcctctttggctgtgtctacctccttcatctgctgcgccgacataagcaccgccctgcccctaggctccagccgtcccgcaccagcccccaggcaccgagagcacgagcatgggcaccaagccaggcctcccaggctgctcttcacgtcccttatgccactatcaacaccagctgccgcccagctactttggacacagctcacccccatggggggccgtcctggtgggcgtcactccccacccacgctgcacaccggccccagggccctgccgcctgggcctccacacccatccctgcacgtggcagctttgtctctgttgagaatggactctacgctcaggcaggggagaggcctcctcacactggtcccggcctcactcttttccctgaccctcgggggcccagggccatggaaggacccttaggagttcgatgagagagaccatgaggccactgggctttccccctcccaggcctcctgggtgtcatccccttactttaattcttgggcctccaataagtgtcccataggtgtctggccaggcccacctgctgcggatgtggtctgtgtgcgtgtgtgggcacaggtgtgagtgtgtgagtgacagttaccccatttcagtcatttcctgctgcaactaagtcagcaacacagtttctctgaaaaaaaaaaaaaaaaaaa

SEQ ID NO: 3470 - protein, 326 aa, Homo sapien
MRTEAQVPALQPPEPGLEGAMGHRTLVLPWVLLTLCVTAGTPEVWVQVRMEATELSSFTIRCGFLGSGSISLVTVSWGGPDGAGGTTLAVLHPERGIRQWAPARQARWETQSSISLILEGSGASSPCANTTFCCKFASFPEGSWEACGSLPPSSDPGLSAPPTPAPILRADLAGILGVSGVLLFGCVYLLHLLRRHKHRPAPRLQPSRTSPQAPRARAWAPSQASQAALHVPYATINTSCRPATLDTAHPHGGPSWWASLPTHAAHRPQGPAAWASTPIPARGSFVSVENGLYAQAGERPPHTGPGLTLFPDPRGPRAMEGPLGVR

SEQ ID NO: 3471 - DNA, 3438 bp, Homo sapien
gccgcggagaaggagccggaccccttgggcggagcgcccaatgtgtggtccctcacgccgtcccgcaccttgctttttagggttctttttccgctttctgagcccttttataccttacgtttagaaggggaaaatcatcctcccacaccttctccccgactttttgccttttttgtcttgaagttacccaaaggcctgtgtattgttctcaatggtcccaagaattactctaatatagttgtttttctgagggaggatggatggagataactatcctgatcccaatgtcactttttaaggcattcgcttcaagagacaagcagtttagaatcaggcagaactggattgcaaaatttatgggcagaccgagaaaatgctgctgtgaagacccaattaaagctttcacataaatgaagctacagctatcatgatttagtgcccccaaaaggaagaacttcagtggacaagaaaggacatttctgggggtagtagaatgcttgaggcctggaatttaaacctgagccactatctgaaggtttaatatatctttgccaagtccaagggtacaaagattttctcctgtgttttcttctagaagttttatcatttgatagtctgtgatccatttcaagttgatttgctatctggtgtgagctattaaataatagaagaaaatggaattgaatatgatgtcagcatggaacaatctaatgattcattaagagtcaaccataatgacggtgaagagtcaaaaaccagtgctcaagtatttgagcatctaatctgtatggactccagggattcttcctttggacaaaatgattctcctacagttttgcccatcactactcgtgaagcaaataattcactcatatcacagaatataccagggcccctgactcagacacagactctttctgcagagcaattccatctagtggaccaaaatgggcaggctattcaatatgaacttcagtcattgggggaatccaatgcacaaatgatgatcgttgccagcccaacagaaaatggacaggtacttcgtgtaattccacctacccagacaggaatggcacaagtgattatacctcaggggcaacttgtggatgtgaatagtcctcgggatgtccctgaagagaaacccagtaacagaaacttaccaactgtaagagtggatactctagcagacaataccagcaattacattcttcatcctcaaacatccttcccattgcccaaaaagtcagtgaccggaatgctggaagaaccccttctggggcctcttcagccactttcttctaatacacctatatgggcctgccgtcttaggagctgtgagaaaattggagattcataccgtggctactgtgtaagtgagactgaattagaaagtgtcctaacatttcacaagcagcaaacacagagtgtttgggggacccgtcagtctccaagcccagccaagcctgctacacgcttgatgtggaaatcccagtatgttccatatgatggaatcccatttgttaatgcagggagtagagctgtggtaatggagtgtcagtatgggccaagaagaaaaggtttccagttaaaaaaagtcagtgagcaggaaagcaggtcttgtcagctctacaaagccacttgtccagctcggatttacattaaaaaggtacagaagtttcctgaatatagagttcctacagaccccaaaattgacaagaaaattatcagaatggagcaggagaaagcttttaacatgctaaagaagaacttggtagatgctggtggtgttcttaggtggtatgtacagttacctacacagcaagctcatcagtatcatgaattagagactccctgcctcactttgtcaccttctccttttcctgtgtcttctcttgaagaagaggaaactgcagttagagatgagaattgtgcattaccctcacgtttacatcctcaagtagcacataagattcaagaattagtatcacagggaatagaacaagtgtatgcagtaaggaaacagctaagaaaatttgtggaaagggaactgttcaaacccgatgaggtacctgaaagacataatttatctttttttccaactgtaaatgatataaaaaatcacatccatgaggtacagaaatccttgagaaatggagatacggtatataactcagagattattccagcaacgcttcaatggactacagacagtgggaatattctcaaagagaccatgacagttacatttgcagaaggaaattcaccaggagaatcaattaccaccaaagtggaaacaaatcagaccaggggttctttgtctcctgagccaacccacttgctctcctcactctcctcatttcagcccaaaatatttacacaactacagggtttgcagttacaaccaaggtacacctctcctgatgaatcaccagctgtggtatcagtaaataaccagccgtcctctagtccttcaggacttctggatacaataggaagtgctgtaatgaataataattctctactgcttggtcaaagtcatagccttcaaagagatacatgcttaacccaaaacaatagtactgcctccaccatgggtaaccttccagaaccagatcaaaatctagttgcaatggacgagctggtagaagttggagatgttgaggatacagggaatctggaaggaactgttcatcggattctgttgggagatgtgcagactattccaatacagattatagacaaccactcagctcttattgaagaaaatccagaaagtaccatttctgtgagccaagttaaacaagaacccaaagaaccagcattgtctatggaagcaaaaaactgtggactataagaaattatctgctacataaattattgaagcttttcagaatttacaactctggtgacttctgatgtcttagaaaggaaggtgaatatagtcaaagcgtggcattgagataattggactgaagaccagtttgatgagaagcttttatttaaaactgatatatttgttgccagttccatatttttaccttccttaagagatgttttactcttcttattttgtataatttttatgctctttgattatctaataaggccagtatttcaaaagctgttctgaatttatccacagtaatatagtctgaacacaaatagtttacttaacttatccttggaaatattcaattttggttattacaaaacagaaaagaacaacagcaacaaaaacattgtgtgaatatatgtttgtatgtgtgtatgtatatcatgaattttttttttaagttctgaaaaagaacttgttctctccttaaagttgtgaagaaattgttaattgccagacaggtaagaaaatgtttataatctatctcattaagaaagatgaagtattagattttacatcataacacaaagtccagcagctacatc

SEQ ID NO: 3472 - protein, 718 aa, Homo sapien
MEQSNDSLRVNHNDGEESKTSAQVFEHLICMDSRDSSFGQNDSPTVLPITTREANNSLISQNIPGPLTQTQTLSAEQFHLVDQNGQAIQYELQSLGESNAQMMIVASPTENGQVLRVIPPTQTGMAQVIIPQGQLVDVNSPRDVPEEKPSNRNLPTVRVDTLADNTSNYILHPQTSFPLPKKSVTGMLEEPLLGPLQPLSSNTPIWACRLRSCEKIGDSYRGYCVSETELESVLTFHKQQTQSVWGTRQSPSPAKPATRLMWKSQYVPYDGIPFVNAGSRAVVMECQYGPRRKGFQLKKVSEQESRSCQLYKATCPARIYIKKVQKFPEYRVPTDPKIDKKIIRMEQEKAFNMLKKNLVDAGGVLRWYVQLPTQQAHQYHELETPCLTLSPSPFPVSSLEEEETAVRDENCALPSRLHPQVAHKIQELVSQGIEQVYAVRKQLRKFVERELFKPDEVPERHNLSFFPTVNDIKNHIHEVQKSLRNGDTVYNSEIIPATLQWTTDSGNILKETMTVTFAEGNSPGESITTKVETNQTRGSLSPEPTHLLSSLSSFQPKIFTQLQGLQLQPRYTSPDESPAVVSVNNQPSSSPSGLLDTIGSAVMNNNSLLLGQSHSLQRDTCLTQNNSTASTMGNLPEPDQNLVAMDELVEVGDVEDTGNLEGTVHRILLGDVQTIPIQIIDNHSALIEENPESTISVSQVKQEPKEPALSMEAKNCGL

SEQ ID NO: 3473 - DNA, 1420 bp, Homo sapien
cccaaatatatatttaatcttgtggttcaaataagcttttggctcacatctaagcacatcataaagaacgctgtagaagaggtgacatgatgaggcgggaagacgaggaagaggagggaacaatgatgaaggcaaaaggggacttagagatgaaggaggaggaagagattagtgagacaggagaactggttggcccttttgtgagtgctatgcccactccaatgccccacaacaagggcacccggttctctgaggcatgggaatatttccacctagctcctgctcgtgctgggcaccatcccaaccagtatgccacctgccgcctgtgtggcaggcaggtgagccgtggccctggggtcaacgtgggcaccactgcactgtggaagcatctgaaaagcatgcacagagaggagctggagaagagtggccatggtcaggctgggcagcgccaggatccaaggccccacgggccccagctccccacaggcattgagggtaactggggtaggctcctggagcaggtgggcaccatggctttgtgggccagccaaagggaaaaggaggtgcttaggagggaaagggcagtggaatggcgggagagggctgtggaaaaaagggagcgagccctggaggaggtggaaagggccatcctggagatgaagtggaaggtgagggctgagaaggaggcatgccagcgggagaaagagctgcctgcagcagtacatcccttccattttgtttaaattgggcttggagaatctattctgaaaacattgactctagacttgtagaaaagagccattttagtttcaactcaaatgtaaagcaaagtagtttggtgacattttgcttttatgtgaaatagtgcacagtatgagttaatctgagcaggtctgaattgaccaaatgcttatctacgaggttcctagagctctgctgacccttggccgaaactctaaaatgtacctattaaagataaatgcttctaccaaagtaaaactctgtgagttgtttcagggcagaatgtaccagccagtcagcgttgtttaacaaaataatcagatttttgcctagcactcggttttggtggagctgacgattttgagggctgaggctggttaggtagctggaatgtgcctatgtgaccagctcacttgcagacaccctgccggaagcagagcttaatcttcctaggactgaggtcttagcacatgtactggtggagtttccagaccaccagtatgaataaaagcttgttctgtgtgacccagcaagtggaaggacaaagaactgtgagcctcagatctttggacctttccaatgcgtctctttctcctgttattgctgcaatgtattttcttgcttatattaaagttgtttcatcagtaaaaaaaaaaaaaaaaaaaaaaaaaaaaaaaaa

SEQ ID NO: 3474 - protein, 217 aa, Homo sapien
MRREDEEEEGTMMKAKGDLEMKEEEEISETGELVGPFVSAMPTPMPHNKGTRFSEAWEYFHLAPARAGHHPNQYATCRLCGRQVSRGPGVNVGTTALWKHLKSMHREELEKSGHGQAGQRQDPRPHGPQLPTGIEGNWGRLLEQVGTMALWASQREKEVLRRERAVEWRERAVEKRERALEEVERAILEMKWKVRAEKEACQREKELPAAVHPFHFV

SEQ ID NO: 3475 - DNA, 2891 bp, Homo sapien
tcctgaaggccgaaggtggctctagcgcatcctttgtcgcgccgtgacctgcaggtactgacagatccgtagggaggacaccgtgacttcccggacgctgggaaatggactcagtctcctttgaggatgtggccgtgaacttcaccctggaggagtgggctttgctggattcttcacagaaaaagctctatgaagatgtgatgcaggagaccttcaaaaacctggtttgtctaggaaaaaagtgggaagaccaggacattgaagatgaccacagaaaccaggggaaaaatcgaagatgtcatatggttgagagactctgtgaaagtagaagaggtagcaaatgtggagaaaccactagccagatgccaaatgttaatatcaacaaggaaacttttactggagcaaaaccacatgaatgcagcttttgtggaagagacttcattcatcattcgtcccttaataggcacatgagatctcacactggacagaaaccaaatgagtatcaggaatatgaaaagcaaccatgtaaatgtaaagcagttgggaaaaccttcagttatcaccactgctttcgcaaacatgaaagaactcacactggagtgaagccctatgaatgtaaacagtgtgggaaagcctttatatattaccagccatttcaaagacatgaaaggactcatgctggacagaaaccctatgaatgtaagcaatgtggaaaaacctttatatattaccagtcttttcaaaaacatgctcatactggaaagaaaccctatgaatgtaaacagtgtgggaaagcctttatatgttaccaatcttttcaaagacacaaaaggactcacactggagagaaaccctatgaatgtaagcaatgtggtaaggctttcagttgtcccacatactttcgaactcatgaaagaactcactctggagaaaaaccctacaaatgtaaagaatgtggtaaagccttcagttttctcagttcttttcgaaggcataaaaggactcatagtggagagaaaccctatgaatgtaaagaatgtggaaaagccttcttttattctgcaagctttcgagcacatgtaataatacacactggggctcgaccttataaatgtaaagaatgtgggaaagccttcaactcttctaattcctgtcgagtgcatgaaagaactcatattggagaaaaaccatatgaatgtaaacgatgtggcaaatcattcagttggtccatttctcttcgattgcatgaaagaactcatactggagagaaaccttatgagtgtaaacagtgtcataaaaccttcagtttttcaagttcccttcgagaacacgaaacaactcacactggagagaaaccctatgaatgtaaacaatgtggtaaaaccttcagtttttcaagttcccttcaaagacatgaaaggactcacaatgcagagaaaccctatgaatgtaaacagtgtgggaaagccttcaggtgttcaagttattttcgaattcatgaaaggtcacacactggagagaaaccctatgaatgtaaacagtgtggaaaagttttcattcgttccagttcctttcgactgcatgaaagaacacacactggagagaaaccctatgaatgtaaactatgcggtaaaaccttcagtttttcaagttcccttcgagaacatgaaaaaattcacactggaaataagccttttgagtgtaagcaatgtggtaaggccttccttcgttccagtcaaattcgattgcatgaaaggactcacactggagagaaaccgtatcaatgtaaacaatgtggaaaagccttcatttcttccagtaaatttcgaatgcatgagagaactcacacgggagagaaaccctatcgatgtaaacaatgtgggaaagccttcagattttcaagttctgttcgaattcatgaaaggtctcacactggagagaaaccttatgaatgcaaacaatgtggaaaagccttcatttcttccagtcactttcgactgcatgaaaggactcatatgggagagaaagtctaagaatataagcaacattctgaagccttcggttgttccagctccttctgaatacacaaaagagttcatactggacagaagctgtgtgaatacaaacattgttctaaagcccttgattgttccagtttcttttgagcacgaaagaattcccactggtgagaaacagtatgaatgtaaacattgtgattaagccttcagttgacctaattcatttcaaagacaggactcgtgctgcagtgaaatctgttttgttttttgttttttgtttttttaaaaaaggccaagcttgttggctcatgcctatagtcccagcactttgggaggccaaggtgcaaggcgggcagatcatttgaggtcagaaattcgagaccagcgtggtcaacatggtgtaaccccatctctactaaaaattaccaaaaaatgaaccaggcatggtagtgcatgcctctaatcccagctactcaggaggctaaggcaggagaatcacttgaacctggagacagaggttgcagtgagctgagatcacgccactgcattccagcctgtgcgacagaatgagacactgtctcaagaaaaaataaaagtgggaaaatcttccaactgtcctctagagtgtgaatatatgaaaggagtcagagtggggtgaaagtctataaatgtaagacatttgggaaagccttcacacagccttttgagcacacatgagaatgtatactggagagaaaccctataaatattaagaatgtgggaaattcttcatcctagttcttttgttgttgttgatgatacaaaaataatttcatttaataaagattgtcaggttatatttaataagaaagaaagtatcatgtaaacagccca

SEQ ID NO: 3476 - protein, 642 aa, Homo sapien
MDSVSFEDVAVNFTLEEWALLDSSQKKLYEDVMQETFKNLVCLGKKWEDQDIEDDHRNQGKNRRCHMVERLCESRRGSKCGETTSQMPNVNINKETFTGAKPHECSFCGRDFIHHSSLNRHMRSHTGQKPNEYQEYEKQPCKCKAVGKTFSYHHCFRKHERTHTGVKPYECKQCGKAFIYYQPFQRHERTHAGQKPYECKQCGKTFIYYQSFQKHAHTGKKPYECKQCGKAFICYQSFQRHKRTHTGEKPYECKQCGKAFSCPTYFRTHERTHSGEKPYKCKECGKAFSFLSSFRRHKRTHSGEKPYECKECGKAFFYSASFRAHVIIHTGARPYKCKECGKAFNSSNSCRVHERTHIGEKPYECKRCGKSFSWSISLRLHERTHTGEKPYECKQCHKTFSFSSSLREHETTHTGEKPYECKQCGKTFSFSSSLQRHERTHNAEKPYECKQCGKAFRCSSYFRIHERSHTGEKPYECKQCGKVFIRSSSFRLHERTHTGEKPYECKLCGKTFSFSSSLREHEKIHTGNKPFECKQCGKAFLRSSQIRLHERTHTGEKPYQCKQCGKAFISSSKFRMHERTHTGEKPYRCKQCGKAFRFSSSVRIHERSHTGEKPYECKQCGKAFISSSHFRLHERTHMGEKV

SEQ ID NO: 3477 - DNA, 3246 bp, Homo sapien; identical to SEQ ID NO: 1972
  Unsure 2530: Unknown base

SEQ ID NO: 3478 - protein, 460 aa, Homo sapien; identical to SEQ ID NO: 1973
  Unsure 2530: Unknown amino acid

SEQ ID NO: 3479 - DNA, 2423 bp, Homo sapien
taagaaactgaaagaattgaaccaacgcattgggaagacagagtgcagaaataagcatgaaggaatagctgataaacttttggcaaaaatagcaaaacttcaaagacgtattaaaacagtattattatttcaaaggaattgtttgaaaccaaacatgttatccagtaatggagcctctaaggttgcaaattcagaggctatgattttggataagaatcttgagtcagttaatagtccaattgaaaagtcttctgtgaattatgagccttctaacccttccgaaaaaggaagtaaaaaaattaatttgtcatcagatcaaaataagtctgtttctgaaagtaacaatgatgatgttatgttgatttctgtggaaagtcctaatttgacaactccaactacatcaaatccaacagataccagaaaaattacatcaggaaattctagcaattctcccaatgctgaagttatggctgtacagaagaaacttgattctataattgatttgacaaaagaaggcctatccaactgcaatacagaaagtccagtatcccccctggagtcacattcgaaagctgcttcaaactcaaaggaaacaaccccattggcacaaaatgcagtccaggttcctgagtcctttgagcacctgccacctctcccagaaccaccagcaccactacctgaattagtagacaaaacccgagacacacttcctccccagaagcctgagctcaaagtgaaacgggttttcagaccaaatggcattgccctgacttggaatataaccaaaatcaatcccaagtgtgctcctgtagaaagctaccacctcttcctgtgtcatgagaactctaataataagttgatttggaagaagattggagaaattaaagctttaccactccccatggcctgtactttatctcagtttttagcttccaacagatactattttaccgtccaatcaaaagatatttttggacgatatggaccattctgtgatataaaatctatccctgggttttctgaaaatcttacgtaaaaggtgtttaataatgatatactactttttttttcatatttgtttgtttgcaatgttactgtaatactatttgccattgtaaaaggccagctcagattgtgagccctttctattgggacagtcctcttctatatgttttaagtggccagtaatttaatgaatttctggtttgtattaaatatgtccttccaatggataagttctaaaacatacgctatcattggcccatgttgctgaggtgcattgtgaacaatacctttagtgactgtggaactgctgcttctatcagaagacctaggatacaagcagccactgtttcctccgttaacaatcagcttttagtaacctgctgtggtcagcatagctacaggaaaagtcagcccttgactgagggccagatcatccctggagtgcacctctactaagattttatgaaaagatgacatgttgggctgcatgataaaagttaattataaaaattaaaagatttttttttttgagatggaatattgctctgttgcccaggctggagtacagtggtcactgcaacctccatctccctggctcaagcaattctcctatgtcagcctcccaagtagctgggactatagtcacttgccaccatgcccggctaatttatttttagtagagatgaggtttcaccttgttggtcaggctggtctcaaactcctgacctcaggggatccacccgcctcggcttcccgaagtgctgggattataggcgtaagccaccatgcctggccaaaaattaaaagattttatgaaacgaaatggcttcccattctttctattcagcttctaagtgggctattcatttgtgctctcctcttttttgtttgttttgcactttgtcaatcatttggggaaatagcctggaggtctttcctgaatctgtttgtagacataataaaatttgtgtgctgtgtacacaaaaacataatgtatcttatgaaagcattacccaacctgtttgagttgagaatgcatttgtccacctttgatttgaggctttagtttgctgatttcctaaatgctaccctttgatcatttcctggccaccatcacaatactaaggggctcagatgtgtcttgtgcccacctcttcctgagaagagatggaagtggagctgtgactagtacaagcagcccaagaaactctgaacgggacccaatggaggcaaacttgagcaaataattgggatgataagaaacaaaaataatcccaactgtttgaaagttcgaaagaggggcattcttttctggtacatggtgagagttcaggctccagagactcaaaacggaatggttttccttggcattttgtaaatgctctcacatctgtagcaataaagctgttattttctgc

SEQ ID NO: 3480 - protein, 293 aa, Homo sapien
MLSSNGASKVANSEAMILDKNLESVNSPIEKSSVNYEPSNPSEKGSKKINLSSDQNKSVSESNNDDVMLISVESPNLTTPTTSNPTDTRKITSGNSSNSPNAEVMAVQKKLDSIIDLTKEGLSNCNTESPVSPLESHSKAASNSKETTPLAQNAVQVPESFEHLPPLPEPPAPLPELVDKTRDTLPPQKPELKVKRVFRPNGIALTWNITKINPKCAPVESYHLFLCHENSNNKLIWKKIGEIKALPLPMACTLSQFLASNRYYFTVQSKDIFGRYGPFCDIKSIPGFSENLT

SEQ ID NO: 3481 - DNA, 2349 bp, Homo sapien
ggaattagcctcctcaatgaaaaagaaagagggggaggaagaggaagagaaaagaagaagaaaaccctgaacatggtttcattggatattcacccgaactgctacagaacaacacgctgcccgattacagcccgggggaatcttttttcactgtctttggggttttcttcccagcggctacaggagtcatggccggttcaacatggggggcgacctcagggagcctgccgccagcattcccctgggctccctggcagctgttggcatctcgtggtttctgtacatcgtcttcgtcttcctcctgggcgccatctgcactcgagaggcccttcgctatgacttcctgatagcggaaaaggtatccctcatgggcttcctgttccttttgggcttatacatctcgtccctggcttcctgcatgggaggactttatggagctccccgcatcctgcagtgcattgcccaggagaaagtgatccctgcacttgcctgtctgggacaagggaaggggccaaacaaaacacccgtggctgccatctgcctgaccagcttggtgaccatggcctttgtttttgtgggtcaagtgaacgttctggcccccatcgtcaccatcaacttcatgcttgacatacgttgcagtggactactcttacttctccctgtccatgtgttcctgcagcctgaccccggtgcctgagccggtgctcagggagggcgcagaaggcctccactgctctgagcacctgctcttagagaaagctcccagttacggctctgagggacctgcccaaagagtcttggagggcacgctactggaattcaccaaggacatggatcagctcctccagctaaccaggaagcttgagagtagccagcccaggcaaggagatggtaacaggaccccagaaagtcagaagaggaaaagcaagaaggccaccaagcagaccctacaagatagcttcctcttggacctcaaatcccctccttctttccctgtcgagatctctgacaggttgcccgctgcctcctgggaggggcaggagtcctgctggaacaagcagacttccaagagcgaagggactcagcctgagggaacatatggagagcaacttgttcctgagctgtgcaaccaatcagagtccagtggagaagatttcttcctgaagtccaggctccaagaacaagatgtctggagaagatccacttctttctatacccacatgtgcaacccctgggtctccctgttgggggctgttgggtcccttctcatcatgtttgtgatacagtgggtgtataccctggttaacatgggtgttgctgccatcgtgtatttctacattggccgggccagtccagggcttcaccttggatcagcctccaacttcagctttttccggtggatgaggtctctcttgctcccctcctgcaggagcttgcagtccccccaggagcagatcatcttggcgccgtccctggctaaggttgacatggagatgactcagctcacccaggagaatgcagacttcgccactcgggatcgctaccaccactcctccctcgtgaaccgggagcagctgatgcctcactactagatgcagtgctgggaccttcctcttttggagctgtcccatgtacagtggacccaagcccaggaccttcgtggagctgcttctccaacctgagaaactcaagacccatcctcccgctgtcactttggacaatggaaatctacattttcttttccctttttttttttttgagacagagtctcgccttgtcacccaggctggagtccagtggcacaatcttggctcactgcaacctctgcttcccgagttcaagcaattctcctgcctcagctctgagtagctgggattataggcatgcaccaccaccacccagctattttttgtatttttactggagacagggtttcaccatgttggccaggctggtctcgaactcctgacctcgtgatccacccgtctcagcctcccaaagtactgggattacaggcgtgagccaccatgcctggccagaaatctatgttttcttagaacatgtggaagaaggaaaaagacaaaaaggaagtctggattctgaggaccacgtctcacccagggtgacatcaggaatggtgctagcctctgcaacacgacacccagtttgaagagctctatacaggtactaagactagcaggggacaccaagactctgcacaaccagattgcttgtgcagagggccacaataagtgtatgttttatattttattgtattatttattcaaaaataaataatacactcacatgtttccacacccaaaaaaaaaaaaaaaaaaaaaaaaaaaa

SEQ ID NO: 3482 - protein, 308 aa, Homo sapien
MCSCSLTPVPEPVLREGAEGLHCSEHLLLEKAPSYGSEGPAQRVLEGTLLEFTKDMDQLLQLTRKLESSQPRQGDGNRTPESQKRKSKKATKQTLQDSFLLDLKSPPSFPVEISDRLPAASWEGQESCWNKQTSKSEGTQPEGTYGEQLVPELCNQSESSGEDFFLKSRLQEQDVWRRSTSFYTHMCNPWVSLLGAVGSLLIMFVIQWVYTLVNMGVAAIVYFYIGRASPGLHLGSASNFSFFRWMRSLLLPSCRSLQSPQEQIILAPSLAKVDMEMTQLTQENADFATRDRYHHSSLVNREQLMPHY

SEQ ID NO: 3483 - DNA, 1444 bp, Homo sapien
ggggggggcggggcgcccagcgggatgcggtgaagggcgagcggcgcggcggctgcgatgagtgcctctgcggccaccggggtcttcgtgctgtccctctcggccatcccggtcacctatgtcttcaaccacctggcggcccagcatgattcctggactattgtaggggttgctgccctcatcctgttcctggtagcactgctggctcgtgtcctcgtcaaaagaaaaccaccccgggacccactgttctatgtgtatgcagtttttggatttaccagcgtggtgaacctcatcataggactggagcaagatggaatcattgacgggttcatgacacactacttgagagagggtgaaccgtatctgaacaccgcatatgggcacatgatctgctactgggatggctctgctcattatctgatgtacctggtgatggtggcagccatagcatgggaggaaacttatagaaccattggcctatattgggttggatctattattatgagtgttgttgtttttgtgccaggaaacattgtagggaagtatggaacacgaatttgccctgcttttttcttaagcataccatatacttgtcttcctgtctgggctggtttcagaatctataatcagccatcagaaaattataattacccctcaaaggttattcaagaagcccaagcgaaagacctgctgagaagaccatttgatttaatgttggttgtgtgtctcctcctggcaactggattttgcctgttcagaggtttgattgctttggattgcccatctgagctctgccgattatatacgcaatttcaagagccctatctaaaggatcctgctgcttatcctaaaattcagatgctggcatatatgttctattctgttccttactttgtgactgcactgtatggcttagtggttcctggatgttcctggatgcctgacatcacattgatacatgctggaggtctggctcaggctcagttttctcacattggtgcatctcttcatgctagaactgcttatgtctacagagtccctgaagaagcaaaaatcctttttttagcattaaacatagtatatggagttcttcctcagctcttggcctatcgttgtatctacaaaccagagttcttcataaaaacaaaggcagaagaaaaagtggaataaaaatattacttcatgttcctcctttctaaattactaacttttgttatactggtactgatattttgtcccatttcactctcttctcatacgtgagtacttaagaatatgtacattcttgctctgcactgtatgtgtgagctatatggtattgtgtaaattttttttgaaggaaaatggaaattcttgagaaacagtttgtttaaagaaatatattcaaaatcatttgtgaataaacttgatcatccatctcaaaaaaaaaaaaaaaaaaaaaaaa

SEQ ID NO: 3484 - protein, 370 aa, Homo sapien
MSASAATGVFVLSLSAIPVTYVFNHLAAQHDSWTIVGVAALILFLVALLARVLVKRKPPRDPLFYVYAVFGFTSVVNLIIGLEQDGIIDGFMTHYLREGEPYLNTAYGHMICYWDGSAHYLMYLVMVAAIAWEETYRTIGLYWVGSIIMSVVVFVPGNIVGKYGTRICPAFFLSIPYTCLPVWAGFRIYNQPSENYNYPSKVIQEAQAKDLLRRPFDLMLVVCLLLATGFCLFRGLIALDCPSELCRLYTQFQEPYLKDPAAYPKIQMLAYMFYSVPYFVTALYGLVVPGCSWMPDITLIHAGGLAQAQFSHIGASLHARTAYVYRVPEEAKILFLALNIVYGVLPQLLAYRCIYKPEFFIKTKAEEKVE

SEQ ID NO: 3485 - DNA, 2750 bp, Homo sapien
ggctgccggggaggccagagcgtggagcgctgcgcggcgcggcggccgggccctcgagacggggacggacacaccagcccctcagataccacttggccactcccgctgaggccactcccactgcgtggctgaagcctcgaggtcaccaggcggaggcgcggagatgcccctgcatcagctgggggacaagccgctcaccttccccagccccaactcagccatggaaaacgggcttgaccacaccccacccagcaggagggcatccccgggcacacccctgagccccggctccctccgctccgctgcccatagccccctggacaccagcaagcagcccctctgccagctctgggccgagaagcatggcgcccgggggacccatgaggtgcggtacatctcggccgggcagagcgtggcgtgcggctggtgggccttcgcaccgccgtgcctgcaggtcctcaacacgcccaagggcatcctgttcttcctgtgtgcggccgcattcctgcaggggatgactgtgaatggcttcatcaacacagtcatcacctccctggagcgccgctatgacctgcacagctaccagagcgggctcatcgccagctcctacgacattgccgcctgcctctgcctcaccttcgtcagctacttcgggggctcagggcacaagccgcgctggctgggctggggcgtgctgcttatgggcacgggttcgctggtgttcgcgctgccccacttcacggctggccgctatgaggtggagttggacgcgggtgtcaggacgtgccctgccaaccccggcgcggtgtgtgcggacagcacctcgggcctgtcccgctaccagctggtcttcatgctgggccagttcctgcatggcgtgggtgccacacccctctacacgctgggcgtcacctacctggatgagaacgtcaagtccagctgctcgcccgtctacattgccatcttctacacagcggccatcctgggcccagctgccggctacctgattggaggtgccctgctgaatatctacacggaaatgggccgacggacggagctgaccaccgagagcccactgtgggtcggcgcctggtgggtcggcttcctgggctctggggccgctgctttcttcaccgccgttcccatccttggttaccctcggcagctgccaggctcccagcgctacgcggtcatgagagcggcggaaatgcaccagttgaaggacagcagccgtggggaggcgagcaacccggactttgggaaaaccatcagagacctgcctctctccatctggctcctgctgaagaaccccacgttcatcctgctctgcctggccggggccaccgaggccactctcatcaccggcatgtccacgttcagccccaagttcttggagtcccagttcagcctgagtgcctcagaagctgccaccttgtttgggtacctggtggtgccagcgggtggtggcggcaccttcctgggcggcttctttgtgaacaagctcaggctccggggctccgcggtcatcaagttctgcctgttctgcaccgttgtcagcctgctgggcatcctcgtcttctcactgcactgccccagtgtgcccatggcgggcgtcacagccagctacggcgggagcctcctgcccgaaggccacctgaacctaacggctccctgcaacgctgcctgcagctgccagccagaacactacagccctgtgtgcggctcggacggcctcatgtacttctcactgtgccacgcagggtgccctgcagccacggagacgaatgtggacggccagaaggtgtaccgagactgtagctgtatccctcagaatctttcctctggttttggccatgccactgcagggaaatgcacttcaacttgtcagagaaagcccctccttctggttttcatattcgttgtaattttctttacattcctcagcagcattcctgcactaacggcaactctacgatgtgtccgtgaccctcagagatcctttgccctgggaatccagtggattgtagttagaatactagggggcatcccggggcccatcgccttcggctgggtgatcgacaaggcctgtctgctgtggcaggaccagtgtggccagcagggctcctgcttggtgtaccagaattcggccatgagccgctacatactcatcatggggctcctgtacaaggtgctgggcgtcctcttctttgccatagcctgcttcttatacaagcccctgtcggagtcttcagatggcctggaaacttgtctgcccagccagtcctcagcccctgacagtgccacagatagccagctccagagcagcgtctgaccaccgcccgcgcccacccggccacggcgggcactcagcatttcctgatgacagaacagtgccgttgggtgatgcaatcacacgggaacttctatttgacctgcaaccttctacttaacctgtggtttaaagtcggctgtgacctcctgtccccagagctgtacggccctgcagtgggtgggaggaacttgcataaatatatatttatggacacacagtttgcatcagaacgtgtttatagaatgtgttttatacccgatcgtgtgtggtgtgcgtgaggacaaactccgcaggggctgtgaatcccactgggagggcggcgggcctgcagcccgaggaaggcttgtgtgtcctcagttaaaactgtgcatatcgaaatatattttgttatttaagcctgaaaaaaaaaaaaaaaaaa

SEQ ID NO: 3486 - protein, 722 aa, Homo sapien
MPLHQLGDKPLTFPSPNSAMENGLDHTPPSRRASPGTPLSPGSLRSAAHSPLDTSKQPLCQLWAEKHGARGTHEVRYISAGQSVACGWWAFAPPCLQVLNTPKGILFFLCAAAFLQGMTVNGFINTVITSLERRYDLHSYQSGLIASSYDIAACLCLTFVSYFGGSGHKPRWLGWGVLLMGTGSLVFALPHFTAGRYEVELDAGVRTCPANPGAVCADSTSGLSRYQLVFMLGQFLHGVGATPLYTLGVTYLDENVKSSCSPVYIAIFYTAAILGPAAGYLIGGALLNIYTEMGRRTELTTESPLWVGAWWVGFLGSGAAAFFTAVPILGYPRQLPGSQRYAVMRAAEMHQLKDSSRGEASNPDFGKTIRDLPLSIWLLLKNPTFILLCLAGATEATLITGMSTFSPKFLESQFSLSASEAATLFGYLVVPAGGGGTFLGGFFVNKLRLRGSAVIKFCLFCTVVSLLGILVFSLHCPSVPMAGVTASYGGSLLPEGHLNLTAPCNAACSCQPEHYSPVCGSDGLMYFSLCHAGCPAATETNVDGQKVYRDCSCIPQNLSSGFGHATAGKCTSTCQRKPLLLVFIFVVIFFTFLSSIPALTATLRCVRDPQRSFALGIQWIVVRILGGIPGPIAFGWVIDKACLLWQDQCGQQGSCLVYQNSAMSRYILIMGLLYKVLGVLFFAIACFLYKPLSESSDGLETCLPSQSSAPDSATDSQLQSSV

SEQ ID NO: 3487 - DNA, 10434 bp, Homo sapien
atggcgaaccggcgagtggggcgaggctgctgggaagtgagcccgaccgagcggaggccgcccgcggggctgcggggccccgcggccgaggaggaggcgtcttccccgccggtcctgtctctcagccacttctgcaggtctcctttcctttgcttcggggacgttctcctgggagcctcacggacgctgtctctggccctagacaaccctaacgaggaggtggcagaagtgaagatctcccacttcccggccgcggacctgggcttcagtgtgtcgcagcgctgtttcgtgttgcagcctaaagagaaaattgttatttctgttaactggacaccactcaaagaaggccgagtaagagagattatgacatttcttgtaaatgatgttctgaaacaccaagctatattactaggaaatgcagaagagcagaaaaagaaaaagaggagtctttgggataccattaaaaagaagaaaatttcagcctctacaagtcacaacagaagggtttcaaatattcagaatgttaataaaacatttagtgtttcccaaaaagttgacagagttaggagcccactacaagcttgtgaaaacttggctatgaatgaaggcggtcccccaacagaaaacaattctttaatacttgaagaaaataaaatacccatatcacctattagccctgctttcaatgaatgccatggtgcaacttgcttgccactctctgtacgtcgatctactacctactcatctcttcatgcatcagaaaatagggaactattaaatgtacacagtgccaacgtttcaaaagtttcttttaatgagaaagctgtaactgaaacttcctttaattctgtaaatgttaatggccaaagaggagagaatagtaaacttagtcttacccccaactgttcttcaactttgaacattacacaaagccaaatacattttctaagtccagattcttttgtaaataatagtcatggagctaataatgaactagaattagtaacatgtctttcatcagatatgtttatgaaagataattcacagcctgtgcatttggaatcaacaattgcacatgaaatttatcagaaaattttaagtccagattctttcataaaagataattatggactaaatcaggatctagaatcagagtcagttaatcctattttatcccctaatcaatttttaaaagataacatggcatatatgtgtacatctcagcaaacatgtaaagtaccattatcaaatgaaaattctcaagtcccacagtctcctgaagattggagaaaaagtgaagtttcgccacgtattcctgaatgtcagggttcaaaatctcccaaagctatttttgaagaactagtagaaatgaagtcaaattactacagttttataaaacaaaataatcctaaattttctgcagttcaggatatttctagtcatagccacaataaacaacctaagagacgtccaatactttctgccactgttactaaaaggaaggccacctgtaccagagaaaaccaaactgagattaataaaccaaaagcaaaaagatgtctcaacagtgcagtgggtgaacatgaaaaagtaataaataatcaaaaggaaaaagaagattttcattcttatcttccaattatagatccaatattaagtaaatctaagagttataaaaacgaggtaacaccctcttcgacaacagcttcagttgctcggaaaagaaagagcgatggaagcatggaagatgcaaatgtgagagttgcaattacagaacatacagaagtgcgagaaatcaaaagaatccatttttctccctcagagcctaaaacatcagctgttaagaaaacaaaaaatgtgacaacacccatctcaaaacgtattagcaacagagagaaattaaacctgaagaagaaaactgatttatcaatattcagaactccaatttctaaaacaaacaaaaggacaaaacccattatcgctgtggcacagtccagtttgaccttcataaaaccattaaaaacagatattcccagacacccgatgccatttgctgcaaaaaacatgttttatgatgaacgctggaaggaaaagcaggaacagggcttcacttggtggttaaattttatattaacccctgatgacttcactgtaaaaacaaatatttctgaagtaaatgctgctactcttcttttgggaatagagaatcaacataaaataagtgttcctagagcacctacaaaagaggaaatgtctctcagagcttatactgctcggtgtaggttaaacagactacgtcgtgcagcatgccgtttgtttacttctgaaaaaatggttaaagctattaaaaagcttgaaattgaaattgaagctaggcggttaattgttcgaaaagatagacacctatggaaagatgtgggagaacgtcagaaagtcctgaattggctgttgtcctacaatcctttgtggcttcgaattggtctagagacaacttatggagaactcatatctttggaagataacagtgatgtcacagggttggctatgtttattctgaatcgcctactttggaatcctgatatagcagctgagtatagacaccccactgttcctcacctgtatagagatggtcatgaagaagctttgtccaagtttacattgaaaaagttattgttgttggtctgttttcttgattatgctaaaatttccagactcattgatcatgatccttgtctcttctgtaaagatgccgaattcaaggctagtaaagaaatccttttggctttttcacgagatttcctaagtggtgaaggtgacctttcccgtcaccttggcttattgggattacctgttaaccatgttcagacaccatttgatgaatttgattttgccgttacaaatcttgccgtagacttgcaatgtggagtgcgccttgtgcgaaccatggaacttctcacacagaactgggacctctcaaagaaactcaggattccggcaataagtcgtcttcaaaagatgcacaatgttgacattgttcttcaagttcttaaatcacgaggaattgaattaagtgatgagcatggaaatacaattctatctaaggatattgtggataggcacagagaaaaaactctcaggttgctttggaaaatagcgtttgcttttcaggtggatatttcccttaacttagatcaattaaaggaagaaattgcctttctaaaacacacaaagagtataaagaaaacaatatctctactatcatgccattctgatgatcttattaataagaaaaaaggcaaaagggatagtggttcctttgaacaatatagtgaaaacataaagttattgatggattgggtaaatgctgtttgtgccttctataataaaaaggtggagaattttacagtgtctttctcagacggccgtgtgttatgttacctgatccaccattaccatccttgctatgtgccatttgacgctatatgtcagcgtactactcaaactgtggaatgtacgcaaactggttcagtggtattaaattcatcatctgaatctgatgacagttctctggatatgtcacttaaagcatttgatcatgaaaatacttcagagctatacaaagagctcctagaaaatgaaaagaaaaattttcacttggttaggtctgcagttagagaccttggtggaatacctgctatgattaatcattcagatatgtcaaatacaattccagatgaaaaggtggttattacctatttgtcatttctttgtgcaaggcttttggatcttcgtaaagaaataagagctgctcgactcatacaaacaacatggagaaaatataaactaaaaacagatctcaaacgccatcaggagagagagaaagctgcaagaattattcaattggctgtaatcaattttctagcaaaacaaagattgagaaaaagagttaatgcagcactcgtcattcagaaatattggcgaagagtcttagcacagagaaaattattaatgttaaaaaaggaaaagctggaaaaagttcaaaataaagcagcatcacttattcagggatattggagaagatattccactagacaaagatttctgaaattgaaatattattcaatcatcctgcaatctaggataagaatgataattgctgttacatcttataaacgatatctttgggctacagttacaattcagaggcattggcgtgcttatttaagaagaaaacaagatcaacaaagatatgaaatgctaaaatcatcaactcttataatccaatctatgttcagaaaatggaagcaacgtaaaatgcaatcacaagtaaaagctacagtaatattgcaaagagcttttagagaatggcatttaagaaaacaagctaaagaagaaaattctgctattatcatacaatcatggtatagaatgcataaagaattacggaagtatatttatattagatcttgtgttgttatcattcagaaaagatttcggtgctttcaagcccaaaagttatataaaagaagaaaagagtccatactaaccatccagaagtactacaaagcatatctgaaaggaaagattgagcgcaccaactatttgcagaaacgagctgcagccattcaattacaagctgcttttaggagactgaaagctcataatttatgtagacaaattagagctgcttgtgttattcagtcatactggagaatgagacaagacagagttcgatttttaaaccttaagaagactattatcaaatttcaggcacatgtaagaaaacatcaacaacgacagaaatataagaagatgaagaaagcagctgttataattcagactcatttccgagcttatatttttgccatgaaagttctagcatcttaccagaaaacacgctctgctgtcattgtgctgcagtctgcatatagagggatgcaagccaggaaaatgtatattcacatcctcacatctgttataaagattcaatcatattatcgtgcttatgtttctaaaaaggaatttttgagcctaaaaaatgctacaataaaattgcagtcaactgttaagatgaaacaaacacgtaaacaatatttgcatttaagagcagctgcactatttatccagcaatgttaccgttccaaaaaaatagctgcacaaaagagagaagagtatatgcagatgcgggaatcttgtatcaaactgcaagcatttgttagaggataccttgtccgaaagcagatgaggttacaaagaaaagctgttatttcactacagtcttatttcagaatgagaaaggctcggcagtattatctgaaaatgtataaagcaattattgtcattcagaattactatcatgcatacaaagcacaggtcaatcagaggaagaacttcttgcaagtcaaaaaagcagctacttgcttgcaagcagcttacagaggttataaagtacgccagctaatcaaacaacaatctatagctgctcttaaaattcagtctgcttttagaggctataataaaagggtaaaatatcaatctgtgcttcaatctataataaagattcagagatggtacagggcgtacaagactcttcatgatacaagaacacattttttgaagacaaaggcagctgtgatttccctccagtctgcttatcgtggctggaaggttcggaaacagattagaagggaacatcaagctgccttgaagattcagtctgcttttagaatggccaaggcccagaaacagtttagattgtttaaaacagcagcattagtcatccagcaaaatttcagagcatggactgcaggaaggaagcaatgtatggagtatattgaactccgtcatgcggtactggtgcttcaatctatgtggaagggaaaaacactgagaagacagcttcaaaggcaacataaatgtgctatcatcatacagtcatactatagaatgcatgtgcaacaaaagaagtggaaaatcatgaaaaaagctgctcttctgattcaaaagtattatagggcttacagtattggaagagaacagaatcatttatatttgaaaacaaaagcagctgtagtaactttacagtcagcttatcgtggtatgaaagtgagaaaaagaataaaggattgcaacaaagcagcagtcactatacagtctaaatacagagcttacaaaaccaaaaagaaatatgcaacctatagagcttcagctattataattcagagatggtatcgaggtattaaaattacaaaccatcagcataaggagtatcttaatttgaagaagacagcaattaaaatccaatctgtttatagaggtattagagttagaagacatattcaacacatgcacagggcagccacttttattaaagccatgtttaaaatgcatcagtcaagaataagttaccatacaatgagaaaagcagctattgttattcaagtaagatgtagagcatattatcaaggtaaaatgcagcgtgaaaagtacctgacaattttgaaagctgttaaagtccttcaggcaagttttagaggagtaagagttagacggactcttagaaagatgcagactgcagcaacactcattcagtcaaactacagaagatacagacagcaaacatactttaataagttaaagaaaataacaaaaacagtacagcaaagatactgggcaatgaaagaaagaaacatacaatttcaaaggtataacaaactgaggcattctgtaatatacattcaggctatttttaggggaaagaaagctagaagacatttaaaaatgatgcatatagccgcaactctcattcagaggagatttagaactctaatgatgagaagaagattcctctctctcaagaaaactgctattttgattcagagaaaatatcgggcacatctttgtacaaagcatcacttacagttccttcaggtacaaaatgcagttattaaaatccagtcatcatacagaagatggatgataaggaaaaggatgcgagagatgcacagggctgctactttcatccagtctactttcagaatgcacagattacatatgagatatcgagctttgaaacaggcctccgttgtgatccaacagcaataccaagcaaatagagctgcaaaactgcagaggcagcattatctcagacaaagacactctgctgtgatccttcaggctgcattcaggggtatgaaaactagaagacatttgaagagtatgcattcctctgcaacccttattcagagtaggtttagatcattactggtgaggagaagattcatttccctcaaaaaagctactatttttgttcagaggaaatatcgagccaccatttgtgccaaacataaattgtaccaattcttgcacttaagaaaggcagccattacaatacagtcatcttacagaagactgatggtaaagaagaagttacaagaaatgcaaagggctgcagttctcattcaggctactttcaggatgcacagaacatatattacatttcagacttggaaacatgcttcaattctaattcagcaacattatcgaacatatagagctgcaaaattgcaaagagaaaattatatcagacaatggcattctgctgtggttattcaggctgcatataaaggaatgaaagcaagacaacttttaagggaaaaacacaaagcttctatcgtaatacaaagcacctacagaatgtataggcagtattgtttctaccaaaagcttcagtgggctacaaaaatcatacaagaaaaatatagagcaaataaaaagaaacagaaagtatttcaacacaatgaacttaagaaagagacttgtgttcaggcaggttttcaggacatgaacataaaaaaacagattcaggaacagcaccaggctgccattattattcagaagcattgtaaagcctttaaaataaggaagcattatctccaccttagagcaacagtagtttctattcaaagaagatacagaaaactaactgcagtgcgtacccaagcagttatttgtatacagtcttattacagaggctttaaagtacgaaaggatattcaaaatatgcaccgggctgccacactaattcagtcattctatcgaatgcacagggccaaagttgattatgaaacaaagaaaactgcaattgtggttatacagaattattataggttgtatgttagagtaaaaacagaaagaaaaaactttttagcagttcagaaatctgtacgaactattcaggctgcttttagaggcatgaaagttagacaaaaattgaaaaatgtatcagaggaaaagatggcagccattgttaaccaatctgcactctgctgttacagaagtaaaactcagtatgaagctgttcaaagtgaaggtgttatgattcaagagtggtataaagcttctggccttgcttgttcacaggaagcagagtatcattctcaaagtagggctgcagtaacaattcaaaaagctttttgtagaatggtcacaagaaaactggaaacacagaaatgtgctgccctacggattcagttcttccttcagatggctgtgtatcggagaagatttgttcagcagaaaagagctgctatcactttacagcattattttaggacgtggcaaaccagaaaacagtttttactatatagaaaagcagcagtggttttacaaaatcactacagagcatttctgtctgcaaaacatcaaagacaagtctatttacagatcagaagcagtgttatcattattcaagctagaagtaaaggatttatacagaaacggaagtttcaggaaattaaaaatagcaccataaaaattcaggctatgtggaggagatatagagccaagaaatatttatgtaaagtgaaagctgcctgcaagattcaagcctggtatagatgttggagagcacacaaagaatatctagctatattaaaagctgttaaaattattcaaggttgcttctataccaaactagagagaacacggtttttgaatgtgagagcatcagcaattatcattcagagaaaatggagagctatacttcctgcaaagatagctcatgaacacttcttaatgataaaaagacatcgagctgcttgtttgatccaagcacattatagaggatataaaggaaggcaggtctttcttcggcagaaatctgctgctttgatcatacaaaaatatatacgagccagggaggctggaaagcatgaaaggataaaatatattgaatttaaaaaatctacagttatcctacaagcactggtgcgtggttggctagtacgaaaaagatttttagaacagagagccaaaattcgacttcttcacttcactgcagctgcatattatcacctgaatgctgttagaattcaaagagcctataaactttacctggctgtgaagaatgctaacaagcaggttaattcagtcatctgtattcagagatggtttcgagcaagattacaagaaaagagatttattcagaaatatcatagcatcaaaaagattgagcatgaaggtcaagaatgtctgagccagcgaaatagggctgcatcagtaatacagaaagcagtgcgccattttctcctccgtaaaaagcaggaaaaattcactagtggaatcattaaaattcaggcattatggagaggctattcttggaggaagaaaaatgattgtacaaaaattaaagctatacgactaagtcttcaagttgttaatagggagattcgagaagaaaacaaactctacaaaagaactgcacttgcacttcattaccttttgacatataagcacctttctgccattcttgaggccttaaaacacctagaggtagttactagattgtctccactttgttgtgagaacatggcccagagtggagcaatttctaaaatatttgttttgatccgaagttgtaatcgcagtattccttgtatggaagtcatcagatatgctgtgcaagtcttgcttaatgtatctaagtatgagaaaactacttcagcagtttatgatgtagaaaattgtatagatatactattggagcttttgcagatataccgagaaaagcctggtaataaagttgcagacaaaggcggaagcatttttacaaaaacttgttgtttgttggctattttactgaagacaacaaatagagcctctgatgtacgaagtaggtccaaagttgttgaccgtatttacagtctctacaaacttacagctcataaacataaaatgaatactgaaagaatactttacaagcaaaagaagaattcttctataagcattccttttatcccagaaacacctgtaaggaccagaatagtttcaagacttaagccagattgggttttgagaagagataacatggaagaaatcacaaatcccctgcaagctattcaaatggtgatggatacgcttggcattccttattag

SEQ ID NO: 3488 - protein, 2000 aa, Homo sapien
MANRRVGRGCWEVSPTERRPPAGLRGPAAEEEASSPPVLSLSHFCRSPFLCFGDVLLGASRTLSLALDNPNEEVAEVKISHFPAADLGFSVSQRCFVLQPKEKIVISVNWTPLKEGRVREIMTFLVNDVLKHQAILLGNAEEQKKKKRSLWDTIKKKKISASTSHNRRVSNIQNVNKTFSVSQKVDRVRSPLQACENLAMNEGGPPTENNSLILEENKIPISPISPAFNECHGATCLPLSVRRSTTYSSLHASENRELLNVHSANVSKVSFNEKAVTETSFNSVNVNGQRGENSKLSLTPNCSSTLNITQSQIHFLSPDSFVNNSHGANNELELVTCLSSDMFMKDNSQPVHLESTIAHEIYQKILSPDSFIKDNYGLNQDLESESVNPILSPNQFLKDNMAYMCTSQQTCKVPLSNENSQVPQSPEDWRKSEVSPRIPECQGSKSPKAIFEELVEMKSNYYSFIKQNNPKFSAVQDISSHSHNKQPKRRPILSATVTKRKATCTRENQTEINKPKAKRCLNSAVGEHEKVINNQKEKEDFHSYLPIIDPILSKSKSYKNEVTPSSTTASVARKRKSDGSMEDANVRVAITEHTEVREIKRIHFSPSEPKTSAVKKTKNVTTPISKRISNREKLNLKKKTDLSIFRTPISKTNKRTKPIIAVAQSSLTFIKPLKTDIPRHPMPFAAKNMFYDERWKEKQEQGFTWWLNFILTPDDFTVKTNISEVNAATLLLGIENQHKISVPRAPTKEEMSLRAYTARCRLNRLRRAACRLFTSEKMVKAIKKLEIEIEARRLIVRKDRHLWKDVGERQKVLNWLLSYNPLWLRIGLETTYGELISLEDNSDVTGLAMFILNRLLWNPDIAAEYRHPTVPHLYRDGHEEALSKFTLKKLLLLVCFLDYAKISRLIDHDPCLFCKDAEFKASKEILLAFSRDFLSGEGDLSRHLGLLGLPVNHVQTPFDEFDFAVTNLAVDLQCGVRLVRTMELLTQNWDLSKKLRIPAISRLQKMHNVDIVLQVLKSRGIELSDEHGNTILSKDIVDRHREKTLRLLWKIAFAFQVDISLNLDQLKEEIAFLKHTKSIKKTISLLSCHSDDLINKKKGKRDSGSFEQYSENIKLLMDWVNAVCAFYNKKVENFTVSFSDGRVLCYLIHHYHPCYVPFDAICQRTTQTVECTQTGSVVLNSSSESDDSSLDMSLKAFDHENTSELYKELLENEKKNFHLVRSAVRDLGGIPAMINHSDMSNTIPDEKVVITYLSFLCARLLDLRKEIRAARLIQTTWRKYKLKTDLKRHQEREKAARIIQLAVINFLAKQRLRKRVNAALVIQKYWRRVLAQRKLLMLKKEKLEKVQNKAASLIQGYWRRYSTRQRFLKLKYYSIILQSRIRMIIAVTSYKRYLWATVTIQRHWRAYLRRKQDQQRYEMLKSSTLIIQSMFRKWKQRKMQSQVKATVILQRAFREWHLRKQAKEENSAIIIQSWYRMHKELRKYIYIRSCVVIIQKRFRCFQAQKLYKRRKESILTIQKYYKAYLKGKIERTNYLQKRAAAIQLQAAFRRLKAHNLCRQIRAACVIQSYWRMRQDRVRFLNLKKTIIKFQAHVRKHQQRQKYKKMKKAAVIIQTHFRAYIFAMKVLASYQKTRSAVIVLQSAYRGMQARKMYIHILTSVIKIQSYYRAYVSKKEFLSLKNATIKLQSTVKMKQTRKQYLHLRAAALFIQQCYRSKKIAAQKREEYMQMRESCIKLQAFVRGYLVRKQMRLQRKAVISLQSYFRMRKARQYYLKMYKAIIVIQNYYHAYKAQVNQRKNFLQVKKAATCLQAAYRGYKVRQLIKQQSIAALKIQSAFRGYNKRVKYQSVLQSIIKIQRWYRAYKTLHDTRTHFLKTKAAVISLQSAYRGWKVRKQIRREHQAALKIQSAFRMAKAQKQFRLFKTAALVIQQNFRAWTAGRKQCMEYIELRHAVLVLQSMWKGKTLRRQLQRQHKCAIIIQSYYRMHVQQKKWKIMKKAALLI

SEQ ID NO: 3489 - DNA, 1152 bp, Homo sapien
aaggctattattaccaccactgagtggcttaaataatcctgtcaacagcaatcgcccatttccaaagccatggtgaaacatctctgtgctaatttcttttgttttgtttcctaattttttttttttggcaggtggtgggaaataatctttgtcttctttggagtaaaccttcaacaccggattttttcttttaattatggatgtaaaccccaatatccccataatttacattgggtctcgaccaattgcctaattataagaggatatatttaggctcttatttcatccacacaaaaacttgtgtaacaggtagttggaaacatctgaggcaccactttgattctgttttggatggtcatgttttttctcctccgtttccccagcatgtctgccaccatcctcatgcactgcttccaagtgcctgggagcctttatgagcgtccctaaacctaaaagaatccagaggcggggctcggatgaaccctcgagataagcaagtgagccgcttctcccctctaaaggatgtttacacgtgggtggcactcgctggaatccagcgctcgggcagccctgggaggacgcgctcagctgcgaggaggatggagagcaatacatcatcatctttggagaatttagcgacggcgcctgtgaaccagatccaagaaacaatttctgataattgtgtggtgattttctcaaaaacatcctgttcttactgtacaatggcaaaaaagcttttccatgacatgaatgttaactataaagtggtggaactggacctgcttgaatatggaaaccagttccaagatgctctttacaaaatgactggtgaaagaactgttccaagaatatttgtcaatggtacttttattggaggtgcaactgacactcataggcttcacaaagaaggaaaattgctcccactagttcatcagtgttatttaaaaaaaagtaagaggaaagaatttcagtgatgtttatactaataagtttgctagtacagtgtcagttatttaaagtggtaatgcccgataatgtcttttaaatgtttgaggatgttttaaatacatgcattgtcttcacgaagaagatgtaaaaataatgaacaataaattgcggtggaaacctaaaaaaaaaaaaaaaaaaaaaaaa

SEQ ID NO: 3490 - protein, 165 aa, Homo sapien
MNPRDKQVSRFSPLKDVYTWVALAGIQRSGSPGRTRSAARRMESNTSSSLENLATAPVNQIQETISDNCVVIFSKTSCSYCTMAKKLFHDMNVNYKVVELDLLEYGNQFQDALYKMTGERTVPRIFVNGTFIGGATDTHRLHKEGKLLPLVHQCYLKKSKRKEFQ

SEQ ID NO: 3491 - DNA, 1708 bp, Homo sapien
aatcgcagccatggcgtcgttactgtggggaggcgacgcaggggcggcggagagcgagcggctgaacagccacttttcaaacctcagccaaccccggaagaacctttggggtattaagagtactgcagtccgaaacatagatggttctattaataacatcaatgaagatgatgaagaagatgtagtggatttggcagctaattcactcttaaacaagttaatccatcaatccttagtagaatccagtcaccgtgtggaagttttacagaaggatcccagctctccactttactcagtaaagacatttgaagagctgcggctaaaggaagagttactaaaaggaatctatgcaatgggatttaataggccatctaaaatccaagagatggctctccctatgatgctggcacatccaccccagaacctcatagcacagagccagtctggaacaggaaagacagcggcatttgtgttggcaatgttaagcagagttaatgccttggaattgttcccacagtgcctctgcctagctcctacttatgaattggctctgcaaactggccgtgtggttgagcagatgggaaaattctgtgtggatgttcaagtgatgtatgccattcgagggaatcgaattcccagaggcaccgacatcactaaacagattataattggcactcctgggactgtcctagattggtgttttaaactaaaattgattgatttgactaagattcgtgtgtttgtcctggatgaagcagatgtgatgattgacactcaaggattctcagatcatagtattcgtattcaaagagctctaccctccgaatgccaaatgctcctcttttcagcaacctttgaggactctgtgtggcactttgctgagcgaatcatccctgaccctaatgttatcaagttacgcaaagaggagctcacactgaacaacatccggcaatattacgtgctgtgtgagcacaggaaagacaaataccaagctctgtgcaacatttatggcagcatcaccattggtcaggccatcatcttctgccagactcgtcgaaacgctaagtggttgaccgtggagatgatacaggatggccaccaggtgtctttgttaagcggggagctgaccgtggagcagcgagcttccatcattcagaggtttcgggatgggaaagagaaggttctcataacaactaatgtttgtgcccgagggattgatgtgaagcaggtcacaattgttgtgaactttgatctccctgtaaaacaaggagaggagccggactatgagacctacctccaccgcatagggcggacggggcgctttgggaaaaaaggccttgccttcaacatgattgaagtagatgagctgccctcgctcatgaaaatccaggaccactttaacagcagtattaagcaactcaacgctgaagacatggatgaaattgaaaagattgactattgaagaaagaactttattgtttgtgcagtatcctagtttatgtgagaatgtctcagtgggttttgaaggtaatttttttatgttgaggctttttcgacgtgaaactgtcacagatggcaaaataaatgtcacggtacttagttttaagacatgaggtctttttgaagccaaattgatgtgaagcttgtgatccttttgaataaaaaaaaggcaagattatttcttattctaaaaaaaaaaaaaaaaaaa

SEQ ID NO: 3492 - protein, 369 aa, Homo sapien
MGFNRPSKIQEMALPMMLAHPPQNLIAQSQSGTGKTAAFVLAMLSRVNALELFPQCLCLAPTYELALQTGRVVEQMGKFCVDVQVMYAIRGNRIPRGTDITKQIIIGTPGTVLDWCFKLKLIDLTKIRVFVLDEADVMIDTQGFSDHSIRIQRALPSECQMLLFSATFEDSVWHFAERIIPDPNVIKLRKEELTLNNIRQYYVLCEHRKDKYQALCNIYGSITIGQAIIFCQTRRNAKWLTVEMIQDGHQVSLLSGELTVEQRASIIQRFRDGKEKVLITTNVCARGIDVKQVTIVVNFDLPVKQGEEPDYETYLHRIGRTGRFGKKGLAFNMIEVDELPSLMKIQDHFNSSIKQLNAEDMDEIEKIDY

SEQ ID NO: 3493 - DNA, 1599 bp, Homo sapien
agatgcggtggtggccgccgagcgcctggaaggagctgctggacaggccgagggagcctccgcccgagaccgcgcagccgccgccgccatggctacaaaagaccccacagctgtagagagagcaaacttgttaaacatggctaaactgagtatcaaaggactcattgaatctgctctgagctttggccgcactttggattctgactatccccccttgcagcaattctttgttgttatggaacattgcctgaaacacggtcttaaagtaagaaaatcatttttgagttacaacaaaaccatctggggccctttggaactggtggagaagctgtaccccgaagcagaggaaataggagctagtgtccgggatctacctggtctgaagacccctctgggtcgagcaagagcgtggcttcgattagccctcatgcagaaaaaaatggccgattacttacgttgcttaattattcagagggatctcttgagtgagttttatgagtatcacgcactaatgatggaagaagaaggagcagtaattgttgggctgctggttggcctgaatgtgatcgatgctaatctgtgtgtgaagggagaggatttagactcacgagttggagtgattgatttttctatgtatttaaagaatgaagaagatattggaaataaagaaaggtatgattttcataagttatttcacatattgggttttttatatagctctttacaaatcattataagatccatctatttacagtgtggttttattttgttgttttcccccctgtgacttcttcatttcattttcacttccattacaagctttacaaagcagattatggaaaatcacttaggagaaggaggttttattaatagtatgaagtgggacctttggttatacctgtagttactgagacccattttaatagtggttttttggaataaaagagatgaaagcttattattcacaagtttgcaaatactggggaggctgaggcaggagaatcgcttgaacccgggaagcagaggttgcagtgagccgagatcgcaccactgcactccaacctgggtgacagagcaagactccatctcaaaaacaaagaaacactgaacagttatcctatctgatctttttatatgcaggatagtgattaaatcactctacaaccactttcctctaatttctcctcataagcctaatcaaatgtatttgccttacttcctaccattctgttgaagattctccgaaaattggagaaagcactaaatatggtaggaagattctcttgaagttcctgtgatcttttgaaactgcattcctgagttctatccttacttccttaaagcagcatgcacttttggtttgttgttaatcaggggtctcctgtgcttggtgtgtggggtaggaaggcaggtgatcacctgcaacaattcttcacagattggaagttaaacatgaaaagcccccggagaccccacgaactagatgccagaaagttctgcagtcattgactgttaactgcaattccaactatacggtcagccctccatatccatgggttccatatccgtggattcaaccaacatggattgaaatattcc

SEQ ID NO: 3494 - protein, 232 aa, Homo sapien
MATKDPTAVERANLLNMAKLSIKGLIESALSFGRTLDSDYPPLQQFFVVMEHCLKHGLKVRKSFLSYNKTIWGPLELVEKLYPEAEEIGASVRDLPGLKTPLGRARAWLRLALMQKKMADYLRCLIIQRDLLSEFYEYHALMMEEEGAVIVGLLVGLNVIDANLCVKGEDLDSRVGVIDFSMYLKNEEDIGNKERYDFHKLFHILGFLYSSLQIIIRSIYLQCGFILLFSPL

SEQ ID NO: 3495 - DNA, 2887 bp, Homo sapien
gaagcagcaggtaccccctccacatccctagggctctgtgatgtaggcagaggcccgtgggagtcagcatgccgcgtggctgggccgcccccttgctcctgctgctgctccagggaggctggggctgccccgacctcgtctgctacaccgattacctccagacggtcatctgcatcctggaaatgtggaacctccaccccagcacgctcacccttacctggcaagaccagtatgaagagctgaaggacgaggccacctcctgcagcctccacaggtcggcccacaatgccacgcatgccacctacacctgccacatggatgtattccacttcatggccgacgacattttcagtgtcaacatcacagaccagtctggcaactactcccaggagtgtggcagctttctcctggctgagagcatcaagccggctccccctttcaacgtgactgtgaccttctcaggacagtataatatctcctggcgctcagattacgaagaccctgccttctacatgctgaagggcaagcttcagtatgagctgcagtacaggaaccggggagacccctgggctgtgagtccgaggagaaagctgatctcagtggactcaagaagtgtctccctcctccccctggagttccgcaaagactcgagctatgagctgcaggtgcgggcagggcccatgcctggctcctcctaccaggggacctggagtgaatggagtgacccggtcatctttcagacccagtcagaggagttaaaggaaggctggaaccctcacctgctgcttctcctcctgcttgtcatagtcttcattcctgccttctggagcctgaagacccatccattgtggaggctatggaagaagatatgggccgtccccagccctgagcggttcttcatgcccctgtacaagggctgcagcggagacttcaagaaatgggtgggtgcacccttcactggctccagcctggagctgggaccctggagcccagaggtgccctccaccctggaggtgtacagctgccacccaccacggagcccggccaagaggctgcagctcacggagctacaagaaccagcagagctggtggagtctgacggtgtgcccaagcccagcttctggccgacagcccagaactcggggggctcagcttacagtgaggagagggatcggccatacggcctggtgtccattgacacagtgactgtgctagatgcagaggggccatgcacctggccctgcagctgtgaggatgacggctacccagccctggacctggatgctggcctggagcccagcccaggcctagaggacccactcttggatgcagggaccacagtcctgtcctgtggctgtgtctcagctggcagccctgggctaggagggcccctgggaagcctcctggacagactaaagccaccccttgcagatggggaggactgggctgggggactgccctggggtggccggtcacctggaggggtctcagagagtgaggcgggctcacccctggccggcctggatatggacacgtttgacagtggctttgtgggctctgactgcagcagccctgtggagtgtgacttcaccagccccggggacgaaggacccccccggagctacctccgccagtgggtggtcattcctccgccactttcgagccctggaccccaggccagctaatgaggctgactggatgtccagagctggccaggccactgggccctgagccagagacaaggtcacctgggctgtgatgtgaagacacctgcagcctttggtctcctggatgggcctttgagcctgatgtttacagtgtctgtgtgtgtgtgtgcatatgtgtgtgtgtgcatatgcatgtgtgtgtgtgtgtgtgtcttaggtgcgcagtggcatgtccacgtgtgtgtgtgattgcacgtgcctgtgggcctgggataatgcccatggtactccatgcattcacctgccctgtgcatgtctggactcacggagctcacccatgtgcacaagtgtgcacagtaaacgtgtttgtggtcaacagatgacaacagccgtcctccctcctagggtcttgtgttgcaagttggtccacagcatctccggggctttgtgggatcagggcattgcctgtgactgaggcggagcccagccctccagcgtctgcctccaggagctgcaagaagtccatattgttccttatcacctgccaacaggaagcgaaaggggatggagtgagcccatggtgacctcgggaatggcaattttttgggcggcccctggacgaaggtctgaatcccgactctgataccttctggctgtgctacctgagccaagtcgcctcccctctctgggctagagtttccttatccagacagtggggaaggcatgacacacctgggggaaattggcgatgtcacccgtgtacggtacgcagcccagagcagaccctcaataaacgtcagcttccttccttctgcggccagagccgaggcgggcgggggtgagaacatcaatcgtcagcgacagcctgggcacccgcggggccgtcccgcctgcagagggccactcgggggggtttccaggcttaaaatcagtccgtttcgtctcttggaaacagctccccaccaaccaagatttctttttctaacttctgctactaagtttttaaaaattccctttatgcacccaagagatatttattaaacaccaattacgtagcaggccatggctcatgggacccaccccccgtggcactcatggagggggctgcaggttggaactatgcagtgtgctccggccacacatcctgctgggccccctaccctgccccaattcaatcctgccaataaatcctgtcttatttgttcatcctggagaattga

SEQ ID NO: 3496 - protein, 538 aa, Homo sapien
MPRGWAAPLLLLLLQGGWGCPDLVCYTDYLQTVICILEMWNLHPSTLTLTWQDQYEELKDEATSCSLHRSAHNATHATYTCHMDVFHFMADDIFSVNITDQSGNYSQECGSFLLAESIKPAPPFNVTVTFSGQYNISWRSDYEDPAFYMLKGKLQYELQYRNRGDPWAVSPRRKLISVDSRSVSLLPLEFRKDSSYELQVRAGPMPGSSYQGTWSEWSDPVIFQTQSEELKEGWNPHLLLLLLLVIVFIPAFWSLKTHPLWRLWKKIWAVPSPERFFMPLYKGCSGDFKKWVGAPFTGSSLELGPWSPEVPSTLEVYSCHPPRSPAKRLQLTELQEPAELVESDGVPKPSFWPTAQNSGGSAYSEERDRPYGLVSIDTVTVLDAEGPCTWPCSCEDDGYPALDLDAGLEPSPGLEDPLLDAGTTVLSCGCVSAGSPGLGGPLGSLLDRLKPPLADGEDWAGGLPWGGRSPGGVSESEAGSPLAGLDMDTFDSGFVGSDCSSPVECDFTSPGDEGPPRSYLRQWVVIPPPLSSPGPQAS

SEQ ID NO: 3497 - DNA, 1323 bp, Homo sapien
atgatcatcccctctctagaggagctggactccctcaagtacagtgacctgcagaacttagccaagagtctgggtctccgggccaacctgagggcaaccaagttgttaaaagccttgaaaggctacattaaacatgaggcaagaaaaggaaatgagaatcaggatgaaagtcaaacttctgcatcctcttgtgatgagactgagatacagatcagcaaccaggaagaagctgagagacagccacttggccatgtcaccaaaacaaggagaaggtgcaagactgtccgtgtggaccctgactcacagcagaatcattcagagataaaaataagtaatcccactgaattccagaatcatgaaaagcaggaaagccaggatctcagagctactgcaaaagttccttctccaccagacgagcaccaagaagctgagaatgctgtttcctcaggtaacagagattcaaaggtaccttcagaaggaaagaaatctctctacacagatgagtcatccaaacctggaaaaaataaaagaactgcaatcactactccaaactttaagaagcttcatgaagctcattttaaggaaatggagtccattgatcaatatattgagagaaaaaagaaacattttgaagaacacaattccatgaatgaactgaagcagcccatcaataagggaggggtcaggactccagtacctccaagaggaagactctctgtggcttctactcccatcagccaacgacgctcgcaaggccggtcttgtggccctgcaagtcagagtaccttgggtctgaaggggtcactcaagcgctctgctatctctgcagctaaaacgggtgtcaggttttcagctgctactaaagataatgagcataagcgttcactgaccaagactccagccagaaagtctgcacatgtgaccgtgtctgggggcaccccaaaaggcgaggctgtgcttgggacacacaaattaaagaccatcacggggaattctgctgctgttattaccccattcaagttgacaactgaggcaacgcagactccagtctccaataagaaaccagtgtttgatcttaaagcaagtttgtctcgtcccctcaactatgaaccacacaaaggaaagctaaaaccatgggggcaatctaaagaaaataattatctaaatcaacatgtcaacagaattaacttctacaagaaaacttacaaacaaccccatctccagacaaaggaagagcaacggaagaaacgcgagcaagaacgaaaggagaagaaagcaaaggttttgggaatgcgaaggggcctcattttggctgaagattaa

SEQ ID NO: 3498 - protein, 440 aa, Homo sapien
MIIPSLEELDSLKYSDLQNLAKSLGLRANLRATKLLKALKGYIKHEARKGNENQDESQTSASSCDETEIQISNQEEAERQPLGHVTKTRRRCKTVRVDPDSQQNHSEIKISNPTEFQNHEKQESQDLRATAKVPSPPDEHQEAENAVSSGNRDSKVPSEGKKSLYTDESSKPGKNKRTAITTPNFKKLHEAHFKEMESIDQYIERKKKHFEEHNSMNELKQPINKGGVRTPVPPRGRLSVASTPISQRRSQGRSCGPASQSTLGLKGSLKRSAISAAKTGVRFSAATKDNEHKRSLTKTPARKSAHVTVSGGTPKGEAVLGTHKLKTITGNSAAVITPFKLTTEATQTPVSNKKPVFDLKASLSRPLNYEPHKGKLKPWGQSKENNYLNQHVNRINFYKKTYKQPHLQTKEEQRKKREQERKEKKAKVLGMRRGLILAED

SEQ ID NO: 3499 - DNA, 2316 bp, Homo sapien
ggataaaagcaagtttaaaacaaaaattaggaggttgtatgatatagctaatgttctgagtagcctggatcttatcaagaaagttcatgttacagaggaaagaggccgaaaaccagctttcaaatggaccggcccagaaatcagtccaaataccagtggctccagcccagtcattcattttactccctctgatttggaggtgagacggtcttcaaaagagaactgtgccaaaaacctcttttccacacgtgggaaaccaaactttactcgacacccatctcttatcaaattggtaaagagtatagaaagtgatcggagaaagataaattctgcgcccagtagccctatcaagaccaacaaagctgagagttctcagaattctgcacccttcccaagtaaaatggctcagctcgcagctatttgtaaaatgcagttagaagagcaatcaagtgaatccagacagaaagtgagagtacagctggcaagatctggaccctgcaaaccagtagcccctctggaccccccagtgaatgctgagatggagctgacagcaccgtccctcatccagcccctgggaatggttcccctgatccccagccccttgtcatcagcagtgcccctgatcctacctcaggccccttcaggcccatcctatgccatctacctgcagcccactcaagcccaccaaagtgtgacgccaccccaaggcctgagcccaacggtgtgcaccacccactcttctaaagctactggctcaaaagactccacagatgccaccactgagaaggcagccaatgatacctcaaaggccagtgcctctaccaggcctggaagcttgctgccagcaccagagaggcaaggggcaaagagccgaaccagggagccagctggagaaagaggctcaaagagggcaagcatgctcgaggacagtggttccaaaaagaaatttaaagaggacctaaaaggacttgaaaatgtctccgcaaccttgttcccatcaggatacctaatccctctcacgcagtgctcatccctgggggcagagtccattttgtctggtaaagaaaactcaagtgctctttccccaaaccacaggatttacagctccccaattgcaggtgttattccagtgacatcatctgaactcactgctgttaattttccctcttttcatgtaacaccgttgaagctaatggtctcaccaacttccgtggcagccgtacctgtcgggaacagcccggctctcgcttcaagccaccctgttcccatccagaacccaagctcagccattgtaaacttcaccctgcagcacctgggactcatctcacccaatgtgcagttgtctgccagccctgggtctggaatcgttcctgtgtctccaagaatagagtctgttaatgtcgcaccagaaaatgcaggcactcagcaaggaagggccaccaactatgactcaccagtcccaggccagagccagccaaatggacaatcagttgctgtgacaggggcacaacagcctgttcctgtgacacccaaagggtcacaattagtggccgaaagtttcttccgtaccccaggtggacccaccaagccaaccagctcatcctgcatggattttgagggtgctaataaaacctccttaggaactctctttgtcccacagcgaaaactggaagtctcaacagaggatgtccattaatcaacagatgttggcttagtttaattttctaaagagttgtttaatagagaaaatgtacacagactgatttggagaacacattctctgaaaatactgtaaatacgttggggatttgttcaatgtgaaatcagatagttgttttcatacatatatatatatacacacacacacacacacacacacacacacatatatttgtataaagctaagtttagctttcaatcctacaaaataaaagtaaaatgttgaactctaagatatattaacttctagggggaaaaatccattattttagctatgcctatactattatgcaaagtaactgtattaaagtttacttccctctaagcaaatatgcttgacatgcctaacacagcattcccttaaacattttgcacaaagaaaatgctgtgtgatgtataatgttgtatttttaaataggggtatagctatattttttgtaatttctttaatctgttgttgcagtgtatctttttgtaaagtttgcaacaatcctcaatcaagtctatggaaaaattatttataaaatgtatttttaatcataagttgttcaaattaaaacttttctaaaaaataaaaaaaaaaaaaaaaaaaaaaaa

SEQ ID NO: 3500 - protein, 431 aa, Homo sapien
MAQLAAICKMQLEEQSSESRQKVRVQLARSGPCKPVAPLDPPVNAEMELTAPSLIQPLGMVPLIPSPLSSAVPLILPQAPSGPSYAIYLQPTQAHQSVTPPQGLSPTVCTTHSSKATGSKDSTDATTEKAANDTSKASASTRPGSLLPAPERQGAKSRTREPAGERGSKRASMLEDSGSKKKFKEDLKGLENVSATLFPSGYLIPLTQCSSLGAESILSGKENSSALSPNHRIYSSPIAGVIPVTSSELTAVNFPSFHVTPLKLMVSPTSVAAVPVGNSPALASSHPVPIQNPSSAIVNFTLQHLGLISPNVQLSASPGSGIVPVSPRIESVNVAPENAGTQQGRATNYDSPVPGQSQPNGQSVAVTGAQQPVPVTPKGSQLVAESFFRTPGGPTKPTSSSCMDFEGANKTSLGTLFVPQRKLEVSTEDVH

SEQ ID NO: 3501 - DNA, 1586 bp, Homo sapien
agtccctcttgcgtcgaggctgcaaaatggttccattcgccaggagacgctcctgagagaagggcgcgcgcggcacagaggccttccttgcacctcggagcaaagcagctcggatagcgccacacgtctgcgcgctgcgtgggaagggcagggctgacagcacttcctccccggggcagcgacctggagcccgggtgcggcagtctgcaccgcgcgtcgctttcccggccggagtctcgccgccttcccgcgccccgcagcgccccgcagagcagtcgagatgggtgagtcaagtgaagacatagaccaaatgttcagcactttgctgggagagatggatcttctgactcagagtttaggagttgacactctccctcctcctgaccctaatccacccagagctgaatttaactacagtgtggggtttaaagatttaaatgagtccttaaatgcactggaagaccaagatttagatgctctcatggcagatctggtagcagacataagtgaggctgagcagaggacaatccaggcacagaaagagtccttgcagaatcaacatcattcagcatctctacaagcatcaattttcagtggtgcagcctctcttggttatggaacaaatgttgctgccactggtatcagccaatatgaggatgacttaccacctccaccagccgatcctgtgttagaccttccactgccaccaccacctcctgaacctctctctcaggaagaggaagaagcccaagccaaggctgataaaattaagctggcgctggaaaaactgaaggaggccaaggttaagaagctcgtcgtcaaggtgcacatgaatgataacagcacaaagtcactgatggtggatgagcggcagctggcccgagatgttctggacaaccttttcgagaaaactcattgtgactgcaatgtagactggtgtctttatgaaatctacccggaactacaaattgagaggttttttgaagaccatgaaaatgttgttgaagtcttatcagactggacaagagacacagaaaataaaatactatttttggagaaagaattcagaaggagtcccagtatatcaagtatctctgctgtgatgacacaagaacccttaaccagtgggtcatgggaatacggatagccaagtatgggaagactttctatgataactaccagcgggctgtggcaaaggctggacttgcctctcggtggacaaacttggggacagtcaatgcagctgcaccagctcagccatctacaggacctaaaacaggcaccacccagcccaatggacagattccccaggctacacattctgtcagtgctgttctccaagaggcccagagacatgctgaaacatcgaaggtaaaaccagcaagcagctgacccctataagccatgttctaaaccattcacattattccagtaactgctcttttaaaaagagaaaataagctgagtgcagtagctcacacctgtagtcccggaactttgggaggctgaggcaggaggatcacttgagcttcagtttgagaccagactggacaatatagcgagagcttgtctctactaaaaaaaaa

SEQ ID NO: 3502 - protein, 288 aa, Homo sapien
MGESSEDIDQMFSTLLGEMDLLTQSLGVDTLPPPDPNPPRAEFNYSVGFKDLNESLNALEDQDLDALMADLVADISEAEQRTIQAQKESLQNQHHSASLQASIFSGAASLGYGTNVAATGISQYEDDLPPPPADPVLDLPLPPPPPEPLSQEEEEAQAKADKIKLALEKLKEAKVKKLVVKVHMNDNSTKSLMVDERQLARDVLDNLFEKTHCDCNVDWCLYEIYPELQIERFFEDHENVVEVLSDWTRDTENKILFLEKEFRRSPSISSISAVMTQEPLTSGSWEYG

SEQ ID NO: 3503 - DNA, 2844 bp, Homo sapien
acccaaccctgtcattatttcccctccgactgggccggtgccatcggaaaccggagtgaccagaggagggacacgcatccaatttcactgggctgcaagatatcaataagccttgcctctttaaactacttatgtacaaataaaagtgatggtgagaacctggctcaggaaatgcagtagcaggccatattgcatccaaaggaattactcacagctgtgctgtgtgcattctctgtgggcctagcagggaaggggacagccctgtggcaatgggcatgacacggatgctcctggaatgcagtctcagtgacaagttgtgtgtcatccaggagaagcagtatgaagtgattatcgtcccaactttgttggttactatcttcctcatccttcttggggtcatcctgtggctttttatcagagaacaaagaactcaacagcagcgttctggacctcaaggcattgcccctgttcctccacctagggacctaagctgggaagcaggacatggaggaaatgtggctttgccacttaaggagacatccgtggaaaactttctgggagctaccacacctgccctggctaagctgcaggtgccgcgggagcaactctctgaagttctggagcagatttgcagtggtagctgtgggcccatctttcgagccaatatgaacactggggacccttctaagcccaagagtgttattctcaaggctttaaaagaaccagctgggctccatgaggtacaagatttcttagggcgaatccaattccatcaatacctggggaaacacaaaaacctggtgcagctggaaggctgctgcactgaaaagctgccactctatatggtgttggaggatgtggcccagggggacctgctcggctttctctggacctgtcggcgggatgtgatgactatggatggtcttctctatgatctcacagaaaaacaagtatatcacatcggaaagcaggtccttttggcgctggaattcctgcaggagaagcatttgttccatggggatgtggcagccaggaatattctgatgcaaagtgatctcactgctaagctctgtggattaggcctggcttatgaagtttacacccgaggggccatctcctctactcaaaccatacctctcaagtggcttgccccagaacggcttctcctgagacctgctagcatcagagcagatgtctggtcttttgggatcctgctctatgagatggtgactctaggagcaccaccgtatcctgaagtccctcctaccagcatcctagagcatctccaaagaaggaaaatcatgaagagacccagtagctgcacacataccatgtacagtatcatgaagtcctgctggcgctggcgtgaggctgaccgcccctcacctagagagctgcgcttgcgcctagaagctgccattaaaactgcagatgacgaggctgtgttacaagtaccagagttggtggtacctgaactgtatgcagctgtggccggcatcagagtggagagcctcttctacaactatagcatgctttgaagagtctcgggcaagaaacattcatgcatgagtatatgttcttggaatcaattcctctaagaacagagaatggtctttcccagggacacaaagggagaaatgggacatggattcttgatcttcctttacacatttctcgggaaatctgaaatgatgctggatgggactctacacatcctgagctaagacatactgtcagtctcacttctgctgtcccagtcctagaaatcctgggtagaagtggtggacctgtgcaaaggaggttttagaactctgcagtatttgttggggcatggcacaaataagctcatccctcccgtccgaggctagtttcctctggaaccacatttttatctagatgaaaatttggaatgaaatgaaggaatagaaatccaataaaagagttgaagggaaagaaaatttaaggttcttcttgctcaggattacagatatggaccaacacctccttcaagaaaaggtggtaggacacaaagttcttcagtcctgagccctacatgtggggttggaggagaactataacggaaaaacctctgagtttcaccttaggtatagataaaagaaagatggtccccttttatctgattctgagacaggtaaattctgtttgttactacgtttaattagaaggtggaggagtcatttcatgattaagaacattcaacatgtattgttcattaagctagcttcctagttccgattagactaaggagactaagcctagagagtcaatgttagaacagtgaaaagaattctgtgtgtgtgtgtgtgtgtgtgcacaataaataggaaatgtagaaaccaagcaagaaggcttagtagctcagtctttaacaagggctagaaaagaatgtaatctgatatggaaggatagcagcttctaattttcaatcatctgttgatatactgtgaaacttattttattaaattaatatttattaaatggaaatatgcttttctggtttataactactaaaaatatcatagggaggataaaagtaaataagtgaaagttaatgccaatagaaaaattcaagagataatgtacaatgtcagaaaagggattctttatgtgtaaatggggataatacctatttcacaaggttgttctgaggattgatacgttttgagtatgtatttgtacactatctggcacatatgcgctcaataaacgtgtttctccttttaaaaaaaaaaaaaaaaaaaaaaaaaaaaaaaaaaaaaaaaaaaaaaaaaaaaaaaaaaaaaaaaaaaaaaaaaaaaaaaaaaaaaaaaaaaaaaaaaaaaa

SEQ ID NO: 3504 - protein, 422 aa, Homo sapien
MGMTRMLLECSLSDKLCVIQEKQYEVIIVPTLLVTIFLILLGVILWLFIREQRTQQQRSGPQGIAPVPPPRDLSWEAGHGGNVALPLKETSVENFLGATTPALAKLQVPREQLSEVLEQICSGSCGPIFRANMNTGDPSKPKSVILKALKEPAGLHEVQDFLGRIQFHQYLGKHKNLVQLEGCCTEKLPLYMVLEDVAQGDLLGFLWTCRRDVMTMDGLLYDLTEKQVYHIGKQVLLALEFLQEKHLFHGDVAARNILMQSDLTAKLCGLGLAYEVYTRGAISSTQTIPLKWLAPERLLLRPASIRADVWSFGILLYEMVTLGAPPYPEVPPTSILEHLQRRKIMKRPSSCTHTMYSIMKSCWRWREADRPSPRELRLRLEAAIKTADDEAVLQVPELVVPELYAAVAGIRVESLFYNYSML

SEQ ID NO: 3505 - DNA, 4155 bp, Homo sapien
gggagctggtggcgcggcgcaggtcccggccgagtgtggcgcagcagtggcggcgcttcccattcgccatgcgccgggggtgggtgcccgaaggttgcatgatggaatttgaacattacttcaagaggttttgtattttggattagttaattgggtttgtcctctgctgactgtttcttcggatgcattttttggtgtgctcttgagggattaaatgcaaagagatcacaccatggactacaaggaaagctgcccaagtgtaagcattcccagctccgatgaacacagagagaaaaagaagaggtttactgtttataaagttctggtttcagtgggaagaagtgaatggtttgtcttcaggagatatgcagagtttgataaactttataacactttaaaaaaacagtttcctgctatggccctgaagattcctgccaagagaatatttggtgataattttgatccagattttattaaacaaagacgagcaggactaaacgaattcattcagaacctagttaggtatccagaactttataaccatccagatgtcagagcattccttcaaatggacagtccaaaacaccagtcagatccatctgaagatgaggatgaaagaagttctcagaagctacactctacctcacagaacatcaacctgggaccgtctggaaatcctcatgccaaaccaactgactttgatttcttaaaagttattggaaaaggcagctttggcaaggttcttcttgcaaaacggaaactggatggaaaattttatgctgtcaaagtgttacagaaaaaaatagttctcaacagaaaagagcaaaaacatattatggctgaacgtaatgtgctcttgaaaaatgtgaaacatccgtttttggttggattgcattattccttccaaacaactgaaaagctttattttgttctggattttgttaatggaggggagctttttttccacttacaaagagaacggtcctttcctgagcacagagctaggttttacgctgctgaaattgctagtgcattgggttacttacattccatcaaaatagtatacagagacttgaaaccagaaaatattcttttggattcagtaggacatgttgtcttaacagattttgggctttgtaaagaaggaattgctatttctgacaccactaccacattttgtgggacaccagagtatcttgcacctgaagtaattagaaaacagccctatgacaatactgtagattggtggtgccttggggctgttctgtatgaaatgctgtatggattgcctcctttttattgccgagatgttgctgaaatgtatgacaatatccttcacaaacccctaagtttgaggccaggagtgagtcttacagcctggtccattctggaagaactcctagaaaaagacaggcaaaatcgacttggtgccaaggaagactttcttgaaattcagaatcatcctttttttgaatcactcagctgggctgaccttgtacaaaagaagattccaccaccatttaatcctaatgtggctggaccagatgatatcagaaactttgacacagcatttacagaagaaacagttccatattctgtgtgtgtatcttctgactattctatagtgaatgccagtgtattggaggcagatgatgcattcgttggtttctcttatgcacctccttcagaagacttatttttgtgagcagtttgccattcagaaaccattgagcaaaataagtctatagatgggactgaaacttctatttgtgtgaatatattcaaatatgtataactagtgcctcatttttatatgtaatgatgaaaactatgaaaaaatgtattttcttctatgtgcaagaaaaatagggcatttcaaagagctgttttgattaaaatttatattcttgtttaataagcttatttttaaacaatttaaaagctattattcttagcattaacctatttttaaagaaaccttttttgctattgactgttttttccctctaagtttacactaacatctacccaagatagactgttttttaacagtcaatttcagttcagctaacatatattaatacctttgtaactctttgctatggcttttgttatcacaccaaaactatgcaattggtacatggttgtttaagaagaaaccgtatttttccatgataaatcactgtttgaaatatttggttcatggtatgatcgaaatgtaaaagcataattaacacattggctgctagttaacaattggaataactttattctgcagatcatttaagaagtaacaggccgggcgcggtggctcacgcctgtaatcccagcactttgggaggctgaggcgggcagatcacctgaggtcaggagttggagaccagcctgaccaacatggacaaaccccgtctctactaaaaatacaaaattggcagggtgtggtggcacatgcctataatcccagctacttgggaggctaaggcaggagaatcgcttgaacccgggaggcggaggttgcagtgagccgagatcgcaccattgcactcctgcctgggcaacaagagtgaaactccatctccaaaaaaaaaaagaaaaagtaacaaaaggaaattatttgtttttgaaataccagttcaactttgtggattatttttcctctgaaggaaaagaaaaggcttaatggttaggatttttaagtattcccaaagatctgaagggtaataaaatgtactggattttttaaggtggtaccaaaaatgaatgtctgtcatatatttatattacaaatacattatatttatgttctattcatcttttgaatgtttagtatgctattaagtcattctgaatctttgtatttgcttttgcaaataggtatttcaaagctcttttcctaactggttaagtaaaataaaaaattgagctttctagaatatttgcctaattgggaattaaaaagtaaaataataggccaggcatggtggctcatgcctataagcaccctgggaggccgaggcaggcagattatttgagctcaggagtttgagaccatcctgggcaacatggcgaaaccctatctctacaaaaaatacaaaaattagccagacatggtggcacatgcctttagtcccagctactctggaggctgaagttggaggatggcttgagcccacgagatggaagttgcagtgaactgaaattgtgccactgcacttttcagcctgggtgccacagcgagaccctagttaagagaaaaaaaaagtaaaaacaaattgtgggtcaaagtaaatgtatacagttttattacaatgtaacaaaagttgaaaatcaggcagatgtgtattcagtatccaattcaatatatcttagaaaaagcacaggaaacagaccttaaaattgtaacctaccaactaacttacatgcttataaaagtaaaggagaataactggccgggcacggtggctcatgcctataaaattccagcactttgggaggccaaggcaggaggatcacttgagcctatgagttcaagaccagcctaggcaatgtagtgacacctcatttctatttattttaaaaaaaagagagagtaactacagaagaactttaaaaaataaaaaataagcttaccttggattcttggcttagagtagaggttttttttaagttatggaggaaacatttttgtaaaagtttaatgacccactttagatgctccaagaacaagcatcccttccatgtatgtcttgagaaagaaatcacagaagcatttctcaccaatactctttggcttaaaatgttcagcagaattgggcagtgggggtgacttttcttatattaataatatttacatccaatacactgaatcttcctttagaggtaagactttaatatctatactgtaaatatttggtttatttggcactactgtaagttttgtttttcacaaagctcttattatgaagcaaaataaaaattctagtttcttgtatgattttttgtactcattcattcctgttaagctgccaaaaattaaagtgcaatattgtatatttttaagaacaaatttaaaatagaattttgatgtttctcagatcacaagaaatacaaatctatatagtataataaaatcagcaaaaagatcaaaaaaaaaaa

SEQ ID NO: 3506 - protein, 429 aa, Homo sapien
MALKIPAKRIFGDNFDPDFIKQRRAGLNEFIQNLVRYPELYNHPDVRAFLQMDSPKHQSDPSEDEDERSSQKLHSTSQNINLGPSGNPHAKPTDFDFLKVIGKGSFGKVLLAKRKLDGKFYAVKVLQKKIVLNRKEQKHIMAERNVLLKNVKHPFLVGLHYSFQTTEKLYFVLDFVNGGELFFHLQRERSFPEHRARFYAAEIASALGYLHSIKIVYRDLKPENILLDSVGHVVLTDFGLCKEGIAISDTTTTFCGTPEYLAPEVIRKQPYDNTVDWWCLGAVLYEMLYGLPPFYCRDVAEMYDNILHKPLSLRPGVSLTAWSILEELLEKDRQNRLGAKEDFLEIQNHPFFESLSWADLVQKKIPPPFNPNVAGPDDIRNFDTAFTEETVPYSVCVSSDYSIVNASVLEADDAFVGFSYAPPSEDLFL

SEQ ID NO: 3507 - DNA, 4485 bp, Homo sapien
gtagacagatccaggctcaccagtcctgtgccactgggcttttggcgttctgcacaaggcctacccgcagatgccatgcctgctcccccagcctaatgggctttgatgggggaagagggtggttcagcctctcacgatgaggaggaaagagcaagtgtcctcctcggacattctccgggttgtgaaatgtgctcgcaggaggcttttcaggcacagaggagccagctggtcgagctgctggtctcagggtccctggaaggcttcgagagtgtcctggactggctgctgtcctgggaggtcctctcctgggaggactacgagggcttccacctcctgggccagcctctctcccacttggccaggcgccttctggacaccgtctggaataagggtacttgggcctgtcagaagctcatcgcggctgcccaagaagcccaggccgacagccagtcccccaagctgcatggctgctgggacccccactcgctccacccagcccgagacctgcagagtcaccggccagccattgtcaggaggctccacagccatgtggagaacatgctggacctggcatgggagcggggtttcgtcagccagtatgaatgtgatgaaatcaggttgccgatcttcacaccgtcccagagggcaagaaggctgcttgatcttgccacggtgaaagcgaatggattggctgccttccttctacaacatgttcaggaattaccagtcccattggccctgcctttggaagctgccacatgcaagaagtatatggccaagctgaggaccacggtgtctgctcagtctcgcttcctcagtacctatgatggagcagagacgctctgcctggaggacatatacacagagaatgtcctggaggtctgggcagatgtgggcatggctggacccccgcagaagagcccagccaccctgggcctggaggagctcttcagcacccctggccacctcaatgacgatgcggacactgtgctggtggtgggtgaggcgggcagtggcaagagcacgctcctgcagcggctgcacttgctgtgggctgcagggcaagacttccaggaatttctctttgtcttcccattcagctgccggcagctgcagtgcatggccaaaccactctctgtgcggactctactctttgagcactgctgttggcctgatgttggtcaagaagacatcttccagttactccttgaccaccctgaccgtgtcctgttaacctttgatggctttgacgagttcaagttcaggttcacggatcgtgaacgccactgctccccgaccgaccccacctctgtccagaccctgctcttcaaccttctgcagggcaacctgctgaagaatgcccgcaaggtggtgaccagccgtccggccgctgtgtcggcgttcctcaggaagtacatccgcaccgagttcaacctcaagggcttctctgaacagggcatcgagctgtacctgaggaagcgccatcatgagcccggggtggcggaccgcctcatccgcctgctccaagagacctcagccctgcacggtttgtgccacctgcctgtcttctcatggatggtgtccaaatgccaccaggaactgttgctgcaggagggggggtccccaaagaccactacagatatgtacctgctgattctgcagcattttctgctgcatgccacccccccagactcagcttcccaaggtctgggacccagtcttcttcggggccgcctccccaccctcctgcacctgggcagactggctctgtggggcctgggcatgtgctgctacgtgttctcagcccagcagctccaggcagcacaggtcagccctgatgacatttctcttggcttcctggtgcgtgccaaaggtgtcgtgccagggagtacggcgcccctggaattccttcacatcactttccagtgcttctttgccgcgttctacctggcactcagtgctgatgtgccaccagctttgctcagacacctcttcaattgtggcaggccaggcaactcaccaatggccaggctcctgcccacgatgtgcatccaggcctcggagggaaaggacagcagcgtggcagctttgctgcagaaggccgagccgcacaaccttcagatcacagcagccttcctggcagggctgttgtcccgggagcactggggcctgctggctgagtgccagacatctgagaaggccctgctccggcgccaggcctgtgcccgctggtgtctggcccgcagcctccgcaagcacttccactccatcccgccagctgcaccgggtgaggccaagagcgtgcatgccatgcccgggttcatctggctcatccggagcctgtacgagatgcaggaggagcggctggctcggaaggctgcacgtggcctgaatgttgggcacctcaagttgacattttgcagtgtgggccccactgagtgtgctgccctggcctttgtgctgcagcacctccggcggcccgtggccctgcagctggactacaactctgtgggtgacattggcgtggagcagctgctgccttgccttggtgtctgcaaggctctgtatttgcgcgataacaatatctcagaccgaggcatctgcaagctcattgaatgtgctcttcactgcgagcaattgcagaagttagctctattcaacaacaaattgactgacggctgtgcacactccatggctaagctccttgcatgcaggcagaacttcttggcattgaggctggggaataactacatcactgccgcgggagcccaagtgctggccgaggggctccgaggcaacacctccttgcagttcctgggattctggggcaacagagtgggtgacgagggggcccaggccctggctgaagccttgggtgatcaccagagcttgaggtggctcagcctggtggggaacaacattggcagtgtgggtgcccaagccttggcactgatgctggcaaagaacgtcatgctagaagaactctgcctggaggagaaccatctccaggatgaaggtgtatgttctctcgcagaaggactgaagaaaaattcaagtttgaaaatcctgaagttgtccaataactgcatcacctacctaggggcagaagccctcctgcaggcccttgaaaggaatgacaccatcctggaagtctggctccgagggaacactttctctctagaggaggttgacaagctcggctgcagggacaccagactcttgctttgaagtctccgggaggatgttcgtctcagtttgtttgtgagcaggctgtgagtttgggccccagaggctgggtgacatgtgttggcagcctcttcaaaatgagccctgtcctgcctaaggctgaacttgttttctgggaacaccataggtcacctttattctggcagaggagggagcatcagtgccctccaggatagacttttcccaagcctacttttgccattgacttcttcccaagattcaatcccaggatgtacaaggacagcccctcctccatagtatgggactggcctctgctgatcctcccaggcttccgtgtgggtcagtggggcccatggatgtgcttgttaactgagtgccttttggtggagaggcccggcctctcacaaaagaccccttaccactgctctgatgaagaggagtacacagaacacataattcaggaagcagctttccccatgtctcgactcatccatccaggccattccccgtctctggttcctcccctcctcctggactcctgcacacgctccttcctctgaggctgaaattcagaatattagtgacctcagctttgatatttcacttacagcacccccaaccctggcacccagggtgggaagggctacaccttagcctgccctcctttccggtgtttaagacatttttggaaggggacacgtgacagccgtttgttccccaagacattctaggtttgcaagaaaaatatgaccacactccagctgggatcacatgtggacttttatttccagtgaaatcagttactcttcagttaagcctttggaaacagctcgactttaaaaagctccaaatgcagctttaaaaaattaatctgggccagaatttcaaacggcctcactaggcttctggttgatgcctgtgaactgaactctgacaacagacttctgaaatagacccacaagaggcagttccatttcatttgtgccagaatgctttaggatgtacagttatggattgaaagtttacaggaaaaaaaattaggccgttccttcaaagcaaatgtcttcctggattattcaaaatgatgtatgttgaagcctttgtaaattgtcagatgctgtgcaaatgttattattttaaacattatgatgtgtgaaaactggttaatatttataggtcactttgttttactgtcttaagtttatactcttatagacaacatggccgtgaactttatgctgtaaataatcagaggggaataaactgttgagtcaaaac

SEQ ID NO: 3508 - protein, 1040 aa, Homo sapien
MGEEGGSASHDEEERASVLLGHSPGCEMCSQEAFQAQRSQLVELLVSGSLEGFESVLDWLLSWEVLSWEDYEGFHLLGQPLSHLARRLLDTVWNKGTWACQKLIAAAQEAQADSQSPKLHGCWDPHSLHPARDLQSHRPAIVRRLHSHVENMLDLAWERGFVSQYECDEIRLPIFTPSQRARRLLDLATVKANGLAAFLLQHVQELPVPLALPLEAATCKKYMAKLRTTVSAQSRFLSTYDGAETLCLEDIYTENVLEVWADVGMAGPPQKSPATLGLEELFSTPGHLNDDADTVLVVGEAGSGKSTLLQRLHLLWAAGQDFQEFLFVFPFSCRQLQCMAKPLSVRTLLFEHCCWPDVGQEDIFQLLLDHPDRVLLTFDGFDEFKFRFTDRERHCSPTDPTSVQTLLFNLLQGNLLKNARKVVTSRPAAVSAFLRKYIRTEFNLKGFSEQGIELYLRKRHHEPGVADRLIRLLQETSALHGLCHLPVFSWMVSKCHQELLLQEGGSPKTTTDMYLLILQHFLLHATPPDSASQGLGPSLLRGRLPTLLHLGRLALWGLGMCCYVFSAQQLQAAQVSPDDISLGFLVRAKGVVPGSTAPLEFLHITFQCFFAAFYLALSADVPPALLRHLFNCGRPGNSPMARLLPTMCIQASEGKDSSVAALLQKAEPHNLQITAAFLAGLLSREHWGLLAECQTSEKALLRRQACARWCLARSLRKHFHSIPPAAPGEAKSVHAMPGFIWLIRSLYEMQEERLARKAARGLNVGHLKLTFCSVGPTECAALAFVLQHLRRPVALQLDYNSVGDIGVEQLLPCLGVCKALYLRDNNISDRGICKLIECALHCEQLQKLALFNNKLTDGCAHSMAKLLACRQNFLALRLGNNYITAAGAQVLAEGLRGNTSLQFLGFWGNRVGDEGAQALAEALGDHQSLRWLSLVGNNIGSVGAQALALMLAKNVMLEELCLEENHLQDEGVCSLAEGLKKNSSLKILKLSNNCITYLGAEALLQALERNDTILEVWLRGNTFSLEEVDKLGCRDTRLLL

SEQ ID NO: 3509 - DNA, 1842 bp, Homo sapien
gcgcgccacggcaggaaagggcggtcctgcgctgtggcccacgctcgctcccgctgtcggactctgggcctggaccgcgcgtggccggcgccaaaagcgagaggcatgagcgcgcgcccgggccagtgaactgctcggggatggactgcggctcggtcggcggccagaggacccagcgcctgcccggccgccagcggcttctcttcttgcccgtgggcctcagcggaagaccgggcggcagcgaaacctcagcacgccgctgcccctctgcgctctccgacggtctgggggcgctgcgccctcgcgccccggcggcccgcggcggcgtgtcacgtgcctcaccgctgctcctcctcctgctagtgccctccccgcgcttggccgccgcagccccgcgccggcagctcggggactgggagcgctcgcgcctcgggtatgccgcacccccggccgggcgcagcggcgcgtggaggtgctcaccgggcgtcgccgctgccgccggcgcccttccccagtaccacggcccggcgcctgcactcgtttcctgcaggagagagctaagcttgtctgctggatccctgcagctggagcgcaaaaggagagatttcacctcttctgggagcaggaaactctacttcgacactcatgccttagtgtgcttactggaagacaatgaatctcactctttcatccaggctggagtgcagtggcacagtcttggcctactgcaacccccacctcccggtttcaagcgatcctcccacctcatcctcctgagtagctgggattacaggcatgcaccaccacacctggataatttttctgtatttttactagagacggggtttcaccatgttggccaggctggtctcaaactgctgacctcaagtgatccacccaccttggcctcctaaagtgctgggattacaggcgtgaaccactgtgtccagttgccaaacctaattatgtttaaacatgaactctttttttaattaaaattttttaaaattttatttacattaaaatggagatgggatcactatgttgcccatgctggttctgaactcctgggctcaaagatcctcccgccttggtctcccagagtgttaggattacaggcgtgagccaccacacccagccagtgaactcttcttaataaaactttaaaatttggcaaaagtttagtttgagtttttaaaaactaggaagacagacgagaaaaaagaaaacagagtcagagctaaacaatgttaacattttgggtttgctactcaacaagcagaaatcattgtgtctgcattggtcaagatcctggaggccaacatggacatcgtctacaaagatatggtcaccaagatgcagcaggaaatcacttttcagcaagtaatgtctcagattgcgaatgtgaaaaaggatatgattattttggagaagagtgaattttcagccctcagagcagaaaatgagaaaataaaactcgaactacatcagttaaaacaacaagtaatggatgaagtgatcaaagtccgaacagataccaaattagacttcaacctagaaaagagcagagtaaaagaattgtattcattgaacgaaaagaagctgctggaattgagaacagaaatagtggcattgcatgcccagcaagatcgggcccttacccagacagacaggaagatcgaaactgaggttgctggcctcaaaaccatgcttgagtcacacaagcttgataatattaaatatttagcagggtctatatttacgtgcctaacagtagctctgggattttatcgcctgtggatctaataaagtgtctatttaaagtgaaaaaaaaaaaaaaaa

SEQ ID NO: 3510 - protein, 257 aa, Homo sapien
MDCGSVGGQRTQRLPGRQRLLFLPVGLSGRPGGSETSARRCPSALSDGLGALRPRAPAARGGVSRASPLLLLLLVPSPRLAAAAPRRQLGDWERSRLGYAAPPAGRSGAWRCSPGVAAAAGALPQYHGPAPALVSCRRELSLSAGSLQLERKRRDFTSSGSRKLYFDTHALVCLLEDNESHSFIQAGVQWHSLGLLQPPPPGFKRSSHLILLSSWDYRHAPPHLDNFSVFLLETGFHHVGQAGLKLLTSSDPPTLAS

SEQ ID NO: 3511 - DNA, 1960 bp, Homo sapien
gccgtcatctctaagaaacaaccataccactgaatgctactgtgtacttacaaaccacactcatattcgtcacgtcatttcatcttcacccccacctccaaatgaggcttgaaatgagatgagatgttcctccctcccctttcaaccatggacctcacactgtggacttcctcttagagcctctgagttaggtacccaagccaaggcacaatgtccctgccccccataagactgcccagcccctatggctctgatcggctggtacagctagcagccaggctccggccagcactctgtgatactctgatcaccgtagggagccaggagttccccgcccacagcctggtgctagcaggtgtcagccagcagctgggccgcaggggccagtgggctctgggagaaggcatcagcccttctacctttgcccagctcctgaactttgtgtatggggagagtgtagagctgcagcctggagagctaaggccccttcaggaggcggccagggccttgggagtgcagtccctggaagaggcatgctggagggctcgaggggacagggctaaaaagccagatccaggcctgaagaaacatcaggaggagccagagaaaccctcaaggaatcctgagagagaactgggggaccctggagagaagcagaaaccagaacaggtttctagaactggtgggagagaacaggagatgttgcacaagcactcgccaccaagaggcagacccgagatggcaggagcaacgcaggaggctcagcaggaacagaccaggtcaaaggagaaacgcctccaagcccctgttggccaaaggggagcagatgggaagcatggagtgctcacgtggttgagggaaaatccagggggctctgaggaaagtctgcgcaagctccctggcccccttcccccagcaggctccctgcaaaccagcgtcacccctaggccctcgtgggctgaggccccttggttggtggggggccagcctgccctgtggagcatcctgctgatgccgcccagatatggcattcccttctaccatagcacccccaccactggagcctggcaggaggtctggcgggaacagaggatcccactgtccctaaatgcccccaaagggctctggagccagaaccagttggcctcctccagccctaccccaggttccctcccccagggccccgcacagctcagccctggggagatggaagagtctgatcaggggcacacaggcgcacttgcaacctgtgcgggtcatgaggacaaggcaggctgcccacctcgcccgcaccctcccccggcccctcctgctcggtctcggccctatgcgtgctctgtctgtggaaagaggttttcactcaagcatcagatggagacgcactaccgagtccacacaggagagaagcccttctcctgtagcctttgtcctcagcgctcccgggacttctcggccatgaccaagcacctgcggacacacggggccgctccgtaccgctgctccctgtgcggggccggctgtcccagcctggcctccatgcaggcgcacatgcgcggtcactcgcccagccaactcccgcccggatggaccatccgctccaccttcctctactcctcctcgaggccgtctcggccctcgacctctccctgttgtccttcttcctccaccacctgacggggtgtcggtagcgtcttagccaagagtccaattaaagaacgaaaagcgggccggctcggcttctgacctggcaccgctgctacggcggcctagcaaattccgccccagaagcgccccaggaagggcgccgagtgccctctcctggacgatcgcgggtcgcagaagcccaggccagcgagccctacagagtgaggacactgaagtgtgcaggagcgaaggttaacagtaggggagattgtcgatctcatcaccataataaagagtttcctgtgccctcccttca

SEQ ID NO: 3512 - protein, 487 aa, Homo sapien
MSLPPIRLPSPYGSDRLVQLAARLRPALCDTLITVGSQEFPAHSLVLAGVSQQLGRRGQWALGEGISPSTFAQLLNFVYGESVELQPGELRPLQEAARALGVQSLEEACWRARGDRAKKPDPGLKKHQEEPEKPSRNPERELGDPGEKQKPEQVSRTGGREQEMLHKHSPPRGRPEMAGATQEAQQEQTRSKEKRLQAPVGQRGADGKHGVLTWLRENPGGSEESLRKLPGPLPPAGSLQTSVTPRPSWAEAPWLVGGQPALWSILLMPPRYGIPFYHSTPTTGAWQEVWREQRIPLSLNAPKGLWSQNQLASSSPTPGSLPQGPAQLSPGEMEESDQGHTGALATCAGHEDKAGCPPRPHPPPAPPARSRPYACSVCGKRFSLKHQMETHYRVHTGEKPFSCSLCPQRSRDFSAMTKHLRTHGAAPYRCSLCGAGCPSLASMQAHMRGHSPSQLPPGWTIRSTFLYSSSRPSRPSTSPCCPSSSTT

SEQ ID NO: 3513 - DNA, 2478 bp, Homo sapien
tttgtgttccctcaaatggcggtgtgaagagagttcgcctgagccagatcccaggtttcactgaagaaacttcttagaggttcattgcacttctgagatttaatgtttacaacttggagttgtcgaccttcttataagatacattttggaagtcaaaatgaaagttttctgtgaagttttagaagagttatacaagaaggtacttcttggagccacacttgaaaatgacagccatgattacatcttttatctcaacccagcagtttcagatcaagattgttctacagccacctccttagaatgggcaaacacctgtggtatccagggcaggcatcagcccatctctgttggtgtggctcccattgctgtagcacctgtgtgtttgaagaccaactctcagatgagcggttccagagaagtaatgctccttcagttaacagtgatcaaagtgatgacaacccggatattgtctgtcaaaaccgagttccatgcaaaggagcagtacagagatgtaattaaaattctcttagaatcagccaaagtcgattctaaattaatctgcatgttccaaaattcagataaattgttatctcacatggctgcacagtgccttgcattgcttctatatttccaattgagagaaaagataaccttaagtaattcctggattgctttttgccagaaaaatctttctgaatactctgagagtaataaagcaatatactgcctctggactcttacagcaataataaaagaaatctttaaagattcatgttcacagaaaacagaaattctaaagcagttcctgactcatttcgacaccatttttgaagtgttttacaattccttattctctcagcattttgaaaactgccgggatacttctaaaatagtaaacatcctgatgtgtttcctggatttgcttgagcttctcatcgcctccagaatccacctgaagttacatttcacttgccagaggattttatttttgaaaccatcttgcatgctagaagttattacctggcctattcaggcttttgttaaaaggaaggtcatcatattcctcaaaaagtgccttctctgtaaagtgggtgaagacctctgtcgtggatctgtgcctgccttaatgccgccagaccatcatgtagcggtggacatgctggctttagctaatgctgttttgcaagctgtgaattcggggttgttgaagacactgtctgtttatgaaaaacattccttttttggaggtgatgaagttcaacctgaatgtgaacttatcactagtccagatcatgtgatccttagagcagcaagcttagttataatgaaatccttagaaatcaagtttcaaaattattcttcagcaagtgaaatgaaaggtgcgtgaccatggcccactgcagccctgaccccccttcggcccatgctattcctcctgtcccaacctgggaggtcctggcctgggagatcaaggctacagtgagccgcgacccatcgcacacctgcactccagtcctggtgcaacagatggagatcctttcagggagagagagagagagagaggagaagacagagagattaaagaaaaatatgttcactcccacttatgtgtttattgttattattgtttgttgttatttctttgttattgttgtgtttactgtttatttattttgaggcagggtcttgctctgtctcccaggctcactgcagcctcaacgttttgagctgaagtgatcctctcgcctctgcttccccaccccatttgtattaatccttcatacaattagtgtttctactaatgtagattattgaaaattagatattgaattaaagctaatatatgagaagttatattgacaaagaaattgttacatatataatttccagaatagtaactcaggagttcaaagtcttccattttacttgagaaaaatgaatagtaaatgtctctaaacaggcagcatacagattcagtgaaaagtttgaattgtgagcaatgacatcactgaattgctttggatataatttagcttttaataactacacattagttataattctgtgcagttttaatttataacactagatggcacctgttatataattcagttttaaattgtagttcaaactacctaaaacgtttttttatttttgtgcttaataatagtacttctatgctttaaacaaacaaaaaatatgtttttctgttattttgaagacaaaattatttttgcttggttgcattcttggacagacagctctggcatccgatgaagtgatcttagttgtctgctcatttatttatctgcttttagcaagaaatcacataacttttatttctaagagacagttgttaggcagttgttgcaaatagatgatgtagctgtacattttaaatgtatgctctggaatgagtcactttttttccctgagcctcagtgtcctcatttgccaaataaagatgcttcctaactg

SEQ ID NO: 3514 - protein, 409 aa, Homo sapien
MKVFCEVLEELYKKVLLGATLENDSHDYIFYLNPAVSDQDCSTATSLEWANTCGIQGRHQPISVGVAPIAVAPVCLKTNSQMSGSREVMLLQLTVIKVMTTRILSVKTEFHAKEQYRDVIKILLESAKVDSKLICMFQNSDKLLSHMAAQCLALLLYFQLREKITLSNSWIAFCQKNLSEYSESNKAIYCLWTLTAIIKEIFKDSCSQKTEILKQFLTHFDTIFEVFYNSLFSQHFENCRDTSKIVNILMCFLDLLELLIASRIHLKLHFTCQRILFLKPSCMLEVITWPIQAFVKRKVIIFLKKCLLCKVGEDLCRGSVPALMPPDHHVAVDMLALANAVLQAVNSGLLKTLSVYEKHSFFGGDEVQPECELITSPDHVILRAASLVIMKSLEIKFQNYSSASEMKGA

SEQ ID NO: 3515 - DNA, 850 bp, Homo sapien
gaattccggcaaaatgcatgacagtaacaatgtggagaaagacattacaccatctgaattgcctgcaaacccaggttgtctgcattcaaaagagcattctattaaagctaccttaatttggcgcttatttttcttaatcatgtttctgacaatcatagtgtgtggaatggttgctgctttaagcgcaataagagctaactgccatcaagagccatcagtatgtcttcaagctgcatgcccagaaagctggattggttttcaaagaaagtgtttctatttttctgatgacaccaagaactggacatcaagtcagaggttttgtgactcacaagatgctgatcttgctcaggttgaaagcttccaggaactgaatttcctgttgagatataaaggcccatctgatcactggattgggctgagcagagaacaaggccaaccatggaaatggataaatggtactgaatggacaagacagtttcctatcctgggagcaggagagtgtgcctatttgaatgacaaaggtgccagtagtgccaggcactacacagagaggaagtggatttgttccaaatcagatatacatgtctagatgttacagcaaagccccaactaatctttagaagcatattggaactgataactccattttaaaatgagcaaagaatttatttcttataccaacaggtatatgaaaatatgctcaatatcactaataactgggaaaatacaaatcaaaatcatagtaaaatattacctgttttcatggtgctaatattacctgttctcccactgctaatgacatacccgagaatgagtaatttataaataaaagagatttaattgaaaaaaa

SEQ ID NO: 3516 - protein, 191 aa, Homo sapien
MHDSNNVEKDITPSELPANPGCLHSKEHSIKATLIWRLFFLIMFLTIIVCGMVAALSAIRANCHQEPSVCLQAACPESWIGFQRKCFYFSDDTKNWTSSQRFCDSQDADLAQVESFQELNFLLRYKGPSDHWIGLSREQGQPWKWINGTEWTRQFPILGAGECAYLNDKGASSARHYTERKWICSKSDIHV

SEQ ID NO: 3517 - DNA, 2970 bp, Homo sapien
tgggatatgggatattgtaatgggagagcaggaaatttaaggtcggaggtatttgtttaggatacctcagtattctagagctatgggatttattttgctttgaagtccagaggtatttagctttattctaaaagcgatgaagttcctcttaattaaagacgctcctggaaaaaaaaaaaggaaaaatttaatgctgtcttttaaaaggaaacatgccaaaggccaggatttgtttgatcagattgtgtaccacttggaccttgtggaaacagattactttggcctccagttcctcgactctgcccaggttgcgcactggctggatcatgccaaacccataaaaaagcagatgaaaattggacctgcttatgctttacactttcgagttaaatactattcttcagaaccaaacaaccttcgtgaggagtttacaaggtacctgtttgttttacaactcaggcatgacattctttctggaaaattgaaatgcccttatgaaacagctgtggaattagctgctctctgtctacaagcggagcttggggagtgcgagcttccagaacacacaccagagcttgtgtctgagtttcggttcattccaaatcagacagaagcaatggaatttgatatcttccagagatggaaagagtgcaggggaaagagccctgcccaggcggaactctcctatctgaataaagcgaagtggctggaaatgtatggggtagacatgcacgttgtcaggggaagagatggctgtgaatattctcttggactgaccccgacaggcatattaatctttgaaggagctaacaaaataggcttattcttttggcctaaaattaccaaaatggattttaaaaagagcaaattgacactcgtggtggtcgaggatgatgatcagggacgtgagcaagagcacacgtttgtgttccggttagacagtgccaggacctgcaaacacctttggaagtgtgcagttgagcaccacgcattcttccgactgcggacgccaggaaacagcaaatccaatagatccgactttatcaggctgggctctcgcttcagatttagtgggcggacagaatatcaagctacacatggctccaggttacgaagaaccagcacctttgagaggaagcctagtaaacgttatccatcccggagacattcaacgttcaaagcaagcaacccagtgatagcagcccagctctgctctaaaacaaatccagaagtccataattaccagcctcaatatcatcctaatatccatcccagccagccccggtggcatcctcactctccaaatgtcaggccatcctttcaggatgacaggtcgcattggaaagcatcggccagtggagatgacagccattttgattatgtccacgaccagaaccagaagaacttaggagggatgcaaagtatgatgtatcgagataaactcatgactgcactttgagagactgaagcatctctcttccattcaccttcatagtttcattgcattccatgaaaagtgtcttggcctcagatggatggatgtgtttggacgagtgtctttaaggagtagtcctgaaaggtgtttttggtgtccatgtaaatatttgaagataaaaccactatagcttgtcataatttactgttgactgcattctcattaaaatgaaggtaaaggctcaggaatcatattgatgttctgattttaaaattggagtcaaagtctatgtttatcattttactatgttcctgatgttctttgttatttaattaatgggagcaaataaaaccagaagagcttgggaagattgctcagcatatattcctgtcgtagaagttgagattgctagggtccagtttccctagtgtggcctggacgagtcatttccccttcattgacctcattttccccatctgaaaagagagggttggactaagtgatctccaaggtcctttccaactctaaaattctgcaatttgttaacatttcattttgtttaggttgaggacatacattcaaactaattttatcacaaggaaaactgcaatacccacttccttgacagagttactcctttcagaagctaaataaagtatataacttattagatgttatatagatacagggggactttgaatttcacatcttaaagcagttgagctactttgaatttaagcagtcgtactaatcttaaattgcatagcatttgttttgatcgaatttgctgctcaagtatgggaataatttttaatgtcttaatgattggtgctgctaacttgcgtgatttcagaagacataattgtgaatacacactgtcagaattgggggattggtttttaccctagacttcactcttaaaaagcaacgtgcaatcaagatcatttatggctcaaatgaaagcatataaggttttcttgaagttgtgccaaagcattctgtagagtaggatgagatggttgttgccctagtctgttggtagaaccagaaatcaatatgttgtcttttaggttaaagcttgtaccaaaatatttatttcccccatttcaagccctgagtcaaacatttttttctcttaataatagacctgaaatgttttattagtatttctgtgaaatcagttgattcttgtgccatttttgtatatgtaattgtaattttgcccatgttaggccctctaaaaaatgtttgacatcctttgagatattttattactaaaatctgatcttttttggctactgcaaaaatctattcagcaagaaggtatcagctgcataccttgcacagtggagctgactacctataaactctccctaaggcatttgtttacaggtgtattccattttagcagacgttctgatgctcagtgtatgtgctgcatacaaataaatgtgttctgaatcttttcatcttattgatagcatttttacaaatgtgtttccaaggaataaagattattcttgctttaaaaaaaa

SEQ ID NO: 3518 - protein, 440 aa, Homo sapien
MKFLLIKDAPGKKKRKNLMLSFKRKHAKGQDLFDQIVYHLDLVETDYFGLQFLDSAQVAHWLDHAKPIKKQMKIGPAYALHFRVKYYSSEPNNLREEFTRYLFVLQLRHDILSGKLKCPYETAVELAALCLQAELGECELPEHTPELVSEFRFIPNQTEAMEFDIFQRWKECRGKSPAQAELSYLNKAKWLEMYGVDMHVVRGRDGCEYSLGLTPTGILIFEGANKIGLFFWPKITKMDFKKSKLTLVVVEDDDQGREQEHTFVFRLDSARTCKHLWKCAVEHHAFFRLRTPGNSKSNRSDFIRLGSRFRFSGRTEYQATHGSRLRRTSTFERKPSKRYPSRRHSTFKASNPVIAAQLCSKTNPEVHNYQPQYHPNIHPSQPRWHPHSPNVRPSFQDDRSHWKASASGDDSHFDYVHDQNQKNLGGMQSMMYRDKLMTAL

SEQ ID NO: 3519 - DNA, 2468 bp, Homo sapien
accgggcaccggacggctcgggtactttcgttcttaattaggtcatgcccgtgtgagccaggaaagggctgtgtttatgggaagccagtaacactgtggcctactatctcttccgtggtgccatctacatttttgggactcgggaattatgaggtagaggtggaggcggagccggatgtcagaggtcctgaaatagtcaccatgggggaaaatgatccgcctgctgttgaagcccccttctcattccgatcgctttttggccttgatgatttgaaaataagtcctgttgcaccagatgcagatgctgttgctgcacagatcctgtcactgctgccattgaagttttttccaatcatcgtcattgggatcattgcattgatattagcactggccattggtctgggcatccacttcgactgctcagggaagtacagatgtcgctcatcctttaagtgtatcgagctgatagctcgatgtgacggagtctcggattgcaaagacggggaggacgagtaccgctgtgtccgggtgggtggtcagaatgccgtgctccaggtgttcacagctgcttcgtggaagaccatgtgctccgatgactggaagggtcactacgcaaatgttgcctgtgcccaactgggtttcccaagctatgtgagttcagataacctcagagtgagctcgctggaggggcagttccgggaggagtttgtgtccatcgatcacctcttgccagatgacaaggtgactgcattacaccactcagtatatgtgagggagggatgtgcctctggccacgtggttaccttgcagtgcacagcctgtggtcatagaaggggctacagctcacgcatcgtgggtggaaacatgtccttgctctcgcagtggccctggcaggccagccttcagttccagggctaccacctgtgcgggggctctgtcatcacgcccctgtggatcatcactgctgcacactgtgtttatgacttgtacctccccaagtcatggaccatccaggtgggtctagtttccctgttggacaatccagccccatcccacttggtggagaagattgtctaccacagcaagtacaagccaaagaggctgggcaatgacatcgcccttatgaagctggccgggccactcacgttcaatgaaatgatccagcctgtgtgcctgcccaactctgaagagaacttccccgatggaaaagtgtgctggacgtcaggatggggggccacagaggatggagcaggtgacgcctcccctgtcctgaaccacgcggccgtccctttgatttccaacaagatctgcaaccacagggacgtgtacggtggcatcatctccccctccatgctctgcgcgggctacctgacgggtggcgtggacagctgccagggggacagcggggggcccctggtgtgtcaagagaggaggctgtggaagttagtgggagcgaccagctttggcatcggctgcgcagaggtgaacaagcctggggtgtacacccgtgtcacctccttcctggactggatccacgagcagatggagagagacctaaaaacctgaagaggaaggggacaagtagccacctgagttcctgaggtgatgaagacagcccgatcctcccctggactcccgtgtaggaacctgcacacgagcagacacccttggagctctgagttccggcaccagtagcaggcccgaaagaggcacccttccatctgattccagcacaaccttcaagctgctttttgttttttgtttttttgaggtggagtctcgctctgttgcccaggctggagtgcagtggcgaaatccctgctcactgcagcctccgcttccctggttcaagcgattctcttgcctcagcttccccagtagctgggaccacaggtgcccgccaccacacccaactaatttttgtatttttagtagagacagggtttcaccatgttggccaggctgctctcaaacccctgacctcaaatgatgtgcctgcttcagcctcccacagtgctgggattacaggcatgggccaccacgcctagcctcacgctcctttctgatcttcactaagaacaaaagaagcagcaacttgcaagggcggcctttcccactggtccatctggttttctctccaggggtcttgcaaaattcctgacgagataagcagttatgtgacctcacgtgcaaagccaccaacagccactcagaaaagacgcaccagcccagaagtgcagaactgcagtcactgcacgttttcatctctagggaccagaaccaaacccaccctttctacttccaagacttattttcacatgtggggaggttaatctaggaatgactcgtttaaggcctattttcatgatttctttgtagcatttggtgcttgacgtattattgtcctttgattccaaataatatgtttccttccctcaaaaaaaaaaaaaaaaaaaaaaaaaaaaaaa

SEQ ID NO: 3520 - protein, 454 aa, Homo sapien
MGENDPPAVEAPFSFRSLFGLDDLKISPVAPDADAVAAQILSLLPLKFFPIIVIGIIALILALAIGLGIHFDCSGKYRCRSSFKCIELIARCDGVSDCKDGEDEYRCVRVGGQNAVLQVFTAASWKTMCSDDWKGHYANVACAQLGFPSYVSSDNLRVSSLEGQFREEFVSIDHLLPDDKVTALHHSVYVREGCASGHVVTLQCTACGHRRGYSSRIVGGNMSLLSQWPWQASLQFQGYHLCGGSVITPLWIITAAHCVYDLYLPKSWTIQVGLVSLLDNPAPSHLVEKIVYHSKYKPKRLGNDIALMKLAGPLTFNEMIQPVCLPNSEENFPDGKVCWTSGWGATEDGAGDASPVLNHAAVPLISNKICNHRDVYGGIISPSMLCAGYLTGGVDSCQGDSGGPLVCQERRLWKLVGATSFGIGCAEVNKPGVYTRVTSFLDWIHEQMERDLKT

SEQ ID NO: 3521 - DNA, 2115 bp, Homo sapien
tccaaagaatgttgctacagagacacaattgaaaggtggtcagcattctcaagctgctccagtgaaatggattttccaagataatctacagccttttacgccatctcttgttcctgttaagtcttcaaataatgtggcttcaaagattttaaaaacttttgtagataggaaaaatttgggagataatactataaatatgccaccattgagtaccatcgatcctagtgggacgcgatccaaaaatatgcctattaaagataatgctttggttatgtttaatgggaaagtctatctgttggctaaaaaggggacagatgttctgccatcacaaattgaccaacagaattctgtttctcctgatactccagtaagaaaagacacgttacagacagtgagttcaagtccagtcacagaaatatccagagaggttgtaaatattgttttggctaaaagtaaatcttcccagatggagacaaaatcactttccaatacccagcttgcttccatggccaatctaagggcagagaagaataaagtggagaaaccatctccttctaccacaaatccacatatgaaccaatccagtaactacttaaaacagagtaagactttattcacaaatccaatctttccagttggatttagtacaggacacaatgcccccagaaaagtaacagccgtcatttatgctagaaaaggaagtgtcctccagagcatagagaaaataagttcctctgttgatgcaacaactgttacttcacaacagtgtgttttcagagaccaagaaccaaagatccataatgagatggcatcaacatcagataaaggtgcccaaggaagaaatgacaagaaagattctcaaggaagaagtaataaggcattacatctgaagagtgatgctgaatttaaaaagatatttggccttactaaggatttgagagtgtgccttactcgaattcctgaccatttgacctctggagaaggtttcgattcctttagcagtttggtaaagagtggtacttacaaagagacagagtttatggtgaaggaaggagagagaaaacagcagaattttgataagaaaagaaaagcaaaaactaataagaagatggatcacataaagaagagaaaaacagagaatgcttataacgcaatcataaatggggaagctaatgtcaccggttcccaactccagtattttaccaacttcagatgtgtcacaacataacattctcacgagtcacagcaaaaccagacaagaaaagagaactgagatggaatactatacccatgagaagcaagagaaaggcactttgaattcaaatgcagcttatgaacaaagtcatttcttcaataaaaattataccgaagatattttcccagtgacaccaccggagttagaagaaaccattcgagatgaaaaaataagaagacttaagcaggtgctgagagagaaagaagcagctcttgaagaaatgcgtaagaagatgcaccaaaaataaaatctcctgtaaagacttcagtgaaatagctgttttttaaaatatacttcagcattaataagttaattgtaggtgtgttctgaaagtgtctttgaatatgaagcttgttttttcatcagtcgattgtacaactttaaggaatacagaaaaggttgattcacatatgacttgtgaataatttacatggggtatctatacctttgtcttagatacctttttttggaaggataaattttatatttttctattattttaactagaattctccaagtttgaatatttgggcagggtttttgttattgtttgtatctttacctaaattgctcaggcattattccagcagtagatagtgactgtgtattactgaaattttacaattcaagagaggaaatcagctccaaacttagcttttccagtggatttgtatatgtacttgctttatctctttacccttaaaatgatgataccttgtattcaccattgttttttttaatgtcgtgaaataatatgtattatggcaacattatttaaacattcaaacatttctcaagaatgagcaacatttgtaactttacaatgtaattttatataatccaaaggtattttagaattc

SEQ ID NO: 3522 - protein, 343 aa, Homo sapien
MPPLSTIDPSGTRSKNMPIKDNALVMFNGKVYLLAKKGTDVLPSQIDQQNSVSPDTPVRKDTLQTVSSSPVTEISREVVNIVLAKSKSSQMETKSLSNTQLASMANLRAEKNKVEKPSPSTTNPHMNQSSNYLKQSKTLFTNPIFPVGFSTGHNAPRKVTAVIYARKGSVLQSIEKISSSVDATTVTSQQCVFRDQEPKIHNEMASTSDKGAQGRNDKKDSQGRSNKALHLKSDAEFKKIFGLTKDLRVCLTRIPDHLTSGEGFDSFSSLVKSGTYKETEFMVKEGERKQQNFDKKRKAKTNKKMDHIKKRKTENAYNAIINGEANVTGSQLQYFTNFRCVTT

SEQ ID NO: 3523 - DNA, 1673 bp, Homo sapien
ctctcctcgcccgctgggtgctgaagttgggcggatggcagcaaaccggctccgctagaggaccgagccgcccagccccgctcccccggacccatcggcgcgctgcccacacctccaggcgaccggccaactgggtcctgaagtagctgaaatgcgaaaaaggcagcagtcccaaaatgaaggaacacctgccgtgtctcaagctcctggaaaccagaggcccaacaacacctgttgcttttgttggtgctgttgttgcagctgctcctgcctcactgtgaggaatgaagaaagaggggaaaatgcgggaagacccacacacactacaaaaatggagagtatccaggtcctagaggaatgccaaaaccccactgcagaggaagtcttgtcctggtctcaaaattttgacaagatgatgaaggccccagcaggaagaaaccttttcagagagttcctccgaacagaatacagtgaagagaacctacttttctggcttgcttgtgaagacttaaagaaggagcagaacaaaaaagtaattgaagaaaaggctaggatgatatatgaagattacatttctatactatcaccaaaagaggtcagtcttgattctcgagttagagaggtgatcaatagaaatctgttggatcccaatcctcacatgtatgaagatgcccaacttcagatatatactttaatgcacagagattcttttccaaggtttttgaactctcaaatttataagtcatttgttgaaagtactgctggctcttcttctgaatcttaatgttcatttaaaaacaatcattttggagggctgagatgggaaataaaagtagttaaataacatcagaaactgagttcctggagaactacagtttagcattcctcaggctactgtgaaaacacaaccgttatggtctttgtctccatttttatcaaggttttccatggttaagtttggagaaaataccacacaaaacaatgaattgccaaattgtttgttttattcaagactcattctacttgcaagcaaagtgtatttgtagtcctatgaacagtctcctcgtgtatctccagagactgcatgtgcaaagtaaaatgcttcatttgccacatagttgttgtaatatttaatccagtagcataacttatatctgtatttaaggacttttgtgcaatatggtcttaagaaataattgccaaaaaaatcggccatggttctgcatttttaacataatctaagacagaaaaaaagcaatttttactatgtaacaatggtattcaacattctatatactgtgtttagtacactaattttgaagccaatatttctgtacatgaaaaagagctatttatctctgtttgttggaaaatcctaatggggattcctctggttgttcactgccaaaactgtggcattttcattacaggagagtttactatgctaaaagcaaaaaacaaaaaaaaaaaaaaagggaagaaggaaaaaagcaaaaaacaatttgaagatatcctatctcaatgacaaatcaaaagagtgatattgcttttaactgtaatagaagaaaatgaatttatgtatatatcagatgtccaatactgtaattaatttattaaagactggctctccagttttaaaaaaaaaaaaaaaaaaaaaaaaaaaaaaaaaaaaa

SEQ ID NO: 3524 - protein, 210 aa, Homo sapien
MRKRQQSQNEGTPAVSQAPGNQRPNNTCCFCWCCCCSCSCLTVRNEERGENAGRPTHTTKMESIQVLEECQNPTAEEVLSWSQNFDKMMKAPAGRNLFREFLRTEYSEENLLFWLACEDLKKEQNKKVIEEKARMIYEDYISILSPKEVSLDSRVREVINRNLLDPNPHMYEDAQLQIYTLMHRDSFPRFLNSQIYKSFVESTAGSSSES

SEQ ID NO: 3525 - DNA, 980 bp, Homo sapien
ggggcagacgtgggacgggaaggacggctgccgggactggcgcgcggggacactgggccgacgcgtggagtagcggggagagcgggaagcctgagggggcggggccggcgcgaggccgtgggtgcggcacgaggatgccggcggcgggacagcgcccgtaggcagccccacgggcagggcgcgcgggcggggcggggcgggccgggccagaggagctcccggcatgtcgcaagggctcccggccgccggcagcgtcctgcagaggagcgtcgcggcgcccgggaaccagccgcagccgcagccgcagcagcagagccctgaggatgatgacaggaaggtccgaaggagagaaaaaaaccgagttgctgctcagagaagtcggaagaagcagacccagaaggctgacaagctccatgaggaatatgagagcctggagcaagaaaacaccatgctgcggagagagatcgggaagctgacagaggagctgaagcacctgacagaggcactgaaggagcacgagaagatgtgcccgctgctgctctgccctatgaactttgtgccagtgcctccccggccggaccctgtggccggctgcttgccccgatgaagccggggacactcctctgcccagcaaggagccttggtcattttcatacctgggaggaaggcttttccttcacaattgtatacagggggcacctgtggccaggcctcctcctgggagctccaggaccagccagctgtgttccctgcagactgggctcagcccgacatccaacaggcgccaaactcacagagcccttgtgcagatccagcatggaggccaccctcaggagtgacttctcatccaccctggcagctagtaggttctgctgttatgcagagccatttcctctagaatttggataataaagatgcttattgtctctcccttctccagttctgggaatttacaggcacaatacacttccttttcctgg

SEQ ID NO: 3526 - protein, 127 aa, Homo sapien
MSQGLPAAGSVLQRSVAAPGNQPQPQPQQQSPEDDDRKVRRREKNRVAAQRSRKKQTQKADKLHEEYESLEQENTMLRREIGKLTEELKHLTEALKEHEKMCPLLLCPMNFVPVPPRPDPVAGCLPR

SEQ ID NO: 3527 - DNA, 2071 bp, Homo sapien
catcaccctttttaacattgtttacacatcactgcctgttttagccatggggatttttgaccaggatgtgagtgaccagaacagcgtggactgtccccagctctacaaaccaggacagctgaatctgctttttaacaagcgtaaattttccatttgcgtgttgcatggaatctacacctcattagtccttttcttcatcccctatggggccttttacaacgtggctggagaagatgggcaacatattgctgactaccagtcctctgcagttacatggccacatctttggtcattgtggtcagtgtgcagatagccttggataccagttactggactttcattaatcacgtcttcatctgggggagcattgccatttatttctccattttatttacaatgcacagtaatggcatctttggcatcttcccaaaccagtttccatttgttggtaatgcacgacattccctgacccagaagtgcatctggcttgtaattctcttaacaacagtggcttcagttatgccagtggtggcattcagatttttgaaggtggatttatacccaaccctgagtgatcagatccgccggtggcagaaggctcaaaagaaggcaaggcctccaagtagccgaaggcctcggacccgcaggtcaagctcaagaaggtctggatatgcttttgctcaccaagaaggctatggagagcttatcacatctggaaaaaatatgcgagctaaaaatccacccccaacatcagggctggaaaagacacattataatagcactagctggattgaaaatttatgtaagaaaaccacagacaccgtgagcagctttagccaggataaaacagtgaaactgtgagtcaatatgaatttaaaccacgtagttatcttttcacttcaggtggagctgaaattctgctggctccagagtttgagatttgaggcaagaggtggggcaggcagattgcctcacttaacttaaatctgcggcagacaactgccagtgcccatcaaacaggagtgtgcgctatggaaaaccaggccagagggtcactgtctggtttgtgatttggtggacaaaacactcgctgttacaagtacagattttttttttttttaaatcaacctagataccaattgacctgaactttagaatcttatttatggagaaaaacttgtaaagctgcatattcactgaatggatcctcaggcggataaaagggtgcattttaaaggtatatatccaagctgaaaagcatgcctattgacagataaacatgtatctgtaagatcagcctttcccaaggtatacttttaaaatttaaagcgtgtactgtgttgctttcagactgagttgcatgtcactctttagtcttgatatctacctgtctgttcagccaggacaacaaatggcttccaagcctgaagaatacaaaagtgtgcttgtgtttctcatttttataccagtctagggacaaaggagactgaacatctttgcagcaggataggctggtaatttgatcaaatttattcaaaaagctctcagtctgtgtcatgtaaggacatgcttatgaaatgtgagagaggctcgccactaagtattctaaatacttttcaatggcttttctaacaacctcagtagtaatttgctgagcatcatccagaccattaatagaatcagcaaagcactggaatttcacactttaatgataatattccacatagtctatgggcaaatattttcaacatttccaatttttaaagcttcagaattgaagccaaacaaattaataaataattgttttaattactatttaaaaactcaggtttagattgtttaaaattagttgcttttgatactcagctgtcatgtttataattcaaacatgtagtaaacatatgtaggtaaggttgtttttttggagatgttgcagctcaaatttcagtccacatatgaatcatcagtgtattttccataaagtgattcgggcatatttgtgtgaaaacctcagttctgtcacttcttacctctataaacttggacgataatgaaaaaaaaaaaaaaaaaa

SEQ ID NO: 3528 - protein, 195 aa, Homo sapien
MATSLVIVVSVQIALDTSYWTFINHVFIWGSIAIYFSILFTMHSNGIFGIFPNQFPFVGNARHSLTQKCIWLVILLTTVASVMPVVAFRFLKVDLYPTLSDQIRRWQKAQKKARPPSSRRPRTRRSSSRRSGYAFAHQEGYGELITSGKNMRAKNPPPTSGLEKTHYNSTSWIENLCKKTTDTVSSFSQDKTVKL

SEQ ID NO: 3529 - DNA, 2487 bp, Homo sapien
ggcgagcttcttggcctaagggcaggaagagatggcagcgggggagacgcagctctacgccaaggtctccaacaagctcaagagccgcagcagcccctcgctcctggagcccctcctggccatgggcttcccggtgcacaccgcgctgaaagcgttggcagccacggggaggaagacggcggaggaggccttggcctggctgcatgatcattgcaatgacccttccctagacgaccccatcccccaggagtatgcccttttcctctgtccaacggggcccctgctggaaaaacttcaagagttctggagagagagcaagcgccagtgtgcaaagaacagagctcatgaggtcttcccacacgtgacactctgtgacttcttcacgtgtgaagaccagaaggtggaatgcctgtacgaggcgctgaagagagctggagacaggctcctgggctccttccccacggccgtgcctctggctctccactcctccatcagctacctcggcttcttcgtcagtggcagccccgcagacgtcatccgggaattcgccatgaccttcgccacggaagcatctctcttagcaggcacttccgtttcccgcttctggattttcagccaggtgcctggacatggccctaacctgaggctgagcaatttaactagagcctccttcgtgagccactacatccttcaaaaatactgctccgtgaagccttgcaccaaacagctgcatctgaccttggcccacaagttctacccccaccaccagaggacgctggagcagctggccagagccatccccctgggccacagctgccagtggaccgcagcactctactcccgagacatgcgctttgtgcactaccagaccctgagagccctattccagtacaaaccccagaacgtggatgagctgacgctaagtcctggtgactacatctttgtggaccccacgcagcaggacgaagccagcgagggctgggtgattgggatctcacagcggacgggctgccggggcttcctgccggaaaactacacggatcgagccagtgagtctgacacgtgggtgaagcacaggatgtacaccttcagtctagccacagacctgaactccagaaaggatggtgaagccagcagcagatgcagcggggaatttcttccacaaacggcaaggagtcttagcagcttacaggccttgcaggctaccgttgcaaggaagagcgtgctggtggttcgccacggggagagagtggatcagatcttcgggaaggcatggctgcagcaatgctccactcctgatgggaaatactacaggccagacctgaatttcccctgcagtctgccaagacggagtcgtgggatcaaagactttgaaaacgatcccccattatcatcgtgtggcattttccagtccagaattgcaggggacgcgctactggacagtggtatcagaatcagctctgtgtttgcctccccagccctccgctgtgtgcagacggccaaactcatcctggaagaactcaaactggagaaaaaaatcaagatacgagtggaacctggaatctttgaatggacaaaatgggaagctggcaaaaccaccccaaccctcatgagcctggaagagctgaaagaggcaaatttcaacattgacactgattacaggcccgcgtttcccctgtccgccctcatgccggccgagagctaccaggagtacatggacaggtgcacggcgagcatggtgcaaatcgtcaacacctgtccacaggacacgggtgtcatcctaattgtgagtcacggctccactctggactcctgcacgcggccactgctcgggctgccgccccgggaatgtggggattttgcccaactcgtgagaaagatcccttccctgggcatgtgcttctgtgaagaaaataaagaggaaggaaaatgggagttggtgaacccaccggtgaagaccctgacccacggggcgaacgcagcatttaactggaggaactggatctcaggcaactgagagccacggtgatgttgtcataacctcagagtggagaggcagaaaccatgtgcagaggctgggagatgctgctgtttccagaggcgtcttagtctcacccaatgtgatttgtagaagcacgagacgcacttttatatcccggaatatttccctccggctttcgcctttgtaactcccatctgtggacccatcgtccaccagcccagctgcggggagcacagggcaggtggctgggtgaggatgccgccctgcagcatgtacaccgagtgtctgcagctggggacacaactgcccgggactctaacttccaggaattaaagactcaccacacacgaaggatctaaccacttcattttccatggtctaatcattaaattcccaatcgttttttctttttctgggtccatcactctttagccatatccacatgggctaaaacaggtgtaatagtcaataaaatggtcccagaa

SEQ ID NO: 3530 - protein, 661 aa, Homo sapien
MAAGETQLYAKVSNKLKSRSSPSLLEPLLAMGFPVHTALKALAATGRKTAEEALAWLHDHCNDPSLDDPIPQEYALFLCPTGPLLEKLQEFWRESKRQCAKNRAHEVFPHVTLCDFFTCEDQKVECLYEALKRAGDRLLGSFPTAVPLALHSSISYLGFFVSGSPADVIREFAMTFATEASLLAGTSVSRFWIFSQVPGHGPNLRLSNLTRASFVSHYILQKYCSVKPCTKQLHLTLAHKFYPHHQRTLEQLARAIPLGHSCQWTAALYSRDMRFVHYQTLRALFQYKPQNVDELTLSPGDYIFVDPTQQDEASEGWVIGISQRTGCRGFLPENYTDRASESDTWVKHRMYTFSLATDLNSRKDGEASSRCSGEFLPQTARSLSSLQALQATVARKSVLVVRHGERVDQIFGKAWLQQCSTPDGKYYRPDLNFPCSLPRRSRGIKDFENDPPLSSCGIFQSRIAGDALLDSGIRISSVFASPALRCVQTAKLILEELKLEKKIKIRVEPGIFEWTKWEAGKTTPTLMSLEELKEANFNIDTDYRPAFPLSALMPAESYQEYMDRCTASMVQIVNTCPQDTGVILIVSHGSTLDSCTRPLLGLPPRECGDFAQLVRKIPSLGMCFCEENKEEGKWELVNPPVKTLTHGANAAFNWRNWISGN

SEQ ID NO: 3531 - DNA, 1696 bp, Homo sapien
agaacagacgtttgaacagagcaggcttctgaggtctccaaaatgcctgtcccagcctcctggccccatcctcctggtcctttcctgcttctgactctactgctgggacttacagaagtggcaggtgaggaggagctacagatgattcagcctgagaagctcctgttggtcacagttggaaagacagccactctgcactgcactgtgacctccctgcttcccgtgggacccgtcctgtggttcagaggagttggaccaggccgagaattaatctacaatcaaaaagaaggccacttccccagggtaacaacagtttcagacctcacaaagagaaacaacatggacttttccatccgcatcagtagcatcaccccagcagatgtcggcacatactactgtgtgaagtttcgaaaagggagccctgagaacgtggagtttaagtctggaccaggcactgagatggctttgggtgccaaaccctctgcccccgtggtattgggccctgcggcgaggaccacacctgagcatacagtgagtttcacctgtgagtcccatggcttctctcccagagacatcaccctgaaatggttcaaaaatgggaatgagctctcagacttccagaccaacgtggaccccacaggacagagtgtggcctacagcatccgcagcacagccagggtggtactggacccctgggacgttcgctctcaggtcatctgcgaggtggcccatgtcaccttgcagggggaccctcttcgtgggactgccaacttgtctgaggccatccgagttccacccaccttggaggttactcaacagcccatgagggcggggaaccaggtaaacgtcacctgccaggtgaggaagttctacccccagagcctacagctgacctggttggagaatggaaacgtgtgccagagagaaacagcctcgacccttacagagaacaaggatggtacctacaactggacaagctggttcctggtgaacatatctgaccaaagggatgatgtggtcctcacctgccaggtgaagcatgatgggcagctggcggtcagcaaacgccttgccctggaggtcacagtccaccagaaggaccagagctcagatgctacccctggcccggcatcatctcttactgcgctgctcctcatagctgtcctcctgggccccatctatgtcccctggaagcagaagacctgactctccttccttcctcccctgccacgtgggaccctcatctctgctgcctccttcctttcctgagaggctcagcttgagagaatgagccagtgagaagcttctctagacttggctccaaacatctcccctcccaagacatctgcctgcccacaggctcctgttgctccttcacacagacctggatgccccagagcaaggtcttcattcatggtcctgagcaggggccatgggattgggctctgggcactgacttaacggcacctccctagaaggcgagaaacatgccaaatctaaacacaccaggactcccatccatcgccttgagactgaccgtaaaccacagacgctctccaggttctcaagagttatcctgccttccagattcctgcctatcccaactccccagccttgttgaggttctctattgcctcttgaatacaaatgcactcccaaagtggttttaagaaaataaaaagattatccttccaaa

SEQ ID NO: 3532 - protein, 354 aa, Homo sapien
MIQPEKLLLVTVGKTATLHCTVTSLLPVGPVLWFRGVGPGRELIYNQKEGHFPRVTTVSDLTKRNNMDFSIRISSITPADVGTYYCVKFRKGSPENVEFKSGPGTEMALGAKPSAPVVLGPAARTTPEHTVSFTCESHGFSPRDITLKWFKNGNELSDFQTNVDPTGQSVAYSIRSTARVVLDPWDVRSQVICEVAHVTLQGDPLRGTANLSEAIRVPPTLEVTQQPMRAGNQVNVTCQVRKFYPQSLQLTWLENGNVCQRETASTLTENKDGTYNWTSWFLVNISDQRDDVVLTCQVKHDGQLAVSKRLALEVTVHQKDQSSDATPGPASSLTALLLIAVLLGPIYVPWKQKT

SEQ ID NO: 3533 - DNA, 2747 bp, Homo sapien
attgattaaaaagagattgccctgcaaggtaaatcagttaaaaccaacctctcctgccctgagtggataggtagggttagggttgccagatgtcacgaagttacaggatgctcagttttaaggtatatcccttatactataagggttatagtaaaaaatattcattatgtgaaattcaaatataactgggtatcaggtattctatgtggcaaccctaggtaggggagcacaggttaggcaagcgattagaagatttgcagcctccaaagtttctgcacctcgatgggacactagaacaggaaggctcctgggcctttctggctctgggaatgaagcgtggaaaaccctccttaggcgggcgcagtgcttcaagtagccaagctctgacttccgagggaagaaaggaggccatgggcctctgccagagccatgctctgcactctggggtcagcagagttcaaaacgacctgcaacgtctggcgcttagctcctaaagaggtctccagtccagcgccgacggccagcggctagaggccgtccgcccgactccaagatggcgcccgccacagctgccaggtgttaagatggcggcgcggggccgcgcccgcgctcccaggctctcctcccccagccttcctccggctggcagcacgactcgcgtagccgtgcgccgattgcctctcggcctgggcaatggtcccggctgccggtcgacgaccgccccgcgtcatgcggctcctcggctggtggcaagtattgctgtgggtgctgggacttcccgtccgcggcgtggaggttgcagaggaaagtggtcgcttatggtcggaggagcagcctgctcaccctctccaggtgggggctgtgtacctgggtgaggaggagctcctgcatgacccgatgggccaggacagggcagcagaagaggccaatgcggtgctggggctgggcacccaaggcgatcacatggtgatgctgtctgtgattcctggggaagctgaggacaaagtgagttcagagcctagcggcgtcacctgtggtgctggaggagcggaggactcaaggtgcaacgtccgagagagccttttctctctggatggcgctggagcacacttccctgacagagaagaggagtattacacagagccagaagtggcggaatctgacgcagccccgacagaggactccaataacactgaaagtctgaaatccccaaaggtgaactgtgaggagagaaacattacaggattagaaaatttcactctgaaaattttaaatatgtcacaggaccttatggattttctgaacccaaacggtagtgactgtactctagtcctgttttacaccccgtggtgccgcttttctgccagtttggcccctcactttaactctctgccccgggcatttccagctcttcactttttggcactggatgcatctcagcacagcagcctttctaccaggtttggcaccgtagctgttcctaatattttattatttcaaggagctaaaccaatggccagatttaatcatacagatcgaacactggaaacactgaaaatcttcatttttaatcagacaggtatagaagccaagaagaatgtggtggtaactcaagccgaccaaataggccctcttcccagcactttgataaaaagtgtggactggttgcttgtattttccttattctttttaattagttttattatgtatgctaccattcgaactgagagtattcggtggctaattccaggacaagagcaggaacatgtggagtagtgatggtctgaaagaagttggaaagaggaacttcaatccttcgtttcagaaattagtgctacagtttcatacattttctccagtgacgtgttgacttgaaacttcaggcagattaaaagaatcatttgttgaacaactgaatgtataaaaaaaattataaactggtgttttaactagtattgcaataagcaaatgcaaaaatattcaatagatgcactattcttgtttttactgcatgaacgtaatccagtatttggaaagtaatccagtttgaaatgtgaagatgtattccggcagaatagtgagtagaatgacatgcttactatacagaaggcaaaaataggactctcaggtaatagtttaaggaaacccttgattccttatatatgtttaagaaggttagctttctgtttctttgcagtttttcttctagagtccatagcaggaaagtatgtaaccagaattggttagtgtgaccccctcaagtagcaagtgatggaaaataagagtcaaataccttgatgtttgtgatctctaactcaaaaaatttgaagtgttttaagttgtttctgggtaagggagatgttaggagaaaggaaatgctgtaactaaagctcaattattatcagttctatgctaacgtatacattttaatcatagttacctaagcagcatgcattaattgaaccttaaaatgttcccagcaggctggtctcaaactgctgacttcaggtgatccacccgcctcggcctcccaaggtgttgggattgcaggtgtgagccactgcgcctggcctaaacaaactttttgaaaagctgtttctaaaagattccttaaattcagatatgacagctaattacctcatcataaattacttttatactaattgtttccagggttttagagtagttgaatgtttatttcacaaggcaccctaaattctatagaaataaaacctcagatgagtctc

SEQ ID NO: 3534 - protein, 360 aa, Homo sapien
MVPAAGRRPPRVMRLLGWWQVLLWVLGLPVRGVEVAEESGRLWSEEQPAHPLQVGAVYLGEEELLHDPMGQDRAAEEANAVLGLGTQGDHMVMLSVIPGEAEDKVSSEPSGVTCGAGGAEDSRCNVRESLFSLDGAGAHFPDREEEYYTEPEVAESDAAPTEDSNNTESLKSPKVNCEERNITGLENFTLKILNMSQDLMDFLNPNGSDCTLVLFYTPWCRFSASLAPHFNSLPRAFPALHFLALDASQHSSLSTRFGTVAVPNILLFQGAKPMARFNHTDRTLETLKIFIFNQTGIEAKKNVVVTQADQIGPLPSTLIKSVDWLLVFSLFFLISFIMYATIRTESIRWLIPGQEQEHVE

SEQ ID NO: 3535 - DNA, 1327 bp, Homo sapien
tcctagggcgatgttgacagacagacagaggggcggatgcagcctacctcctgggcagtgagctgcggtctgaggcccctgcccagctggaaaccacagggaggggaagggaggggaggagaggagaggagaggaaccgtcatggggccttggagtcgagtcagggttgccaaatgccagatgctggtcacctgcttctttatcttgctgctgggcctctctgtggccaccatggtgactcttacctacttcggggcccactttgctgtcatccgccgagcgtccctggagaagaacccgtaccaggctgtgcaccaatgggccttctctgcggggttgagcctggtgggcctcctgactctgggagccgtgctgagcgctgcagccaccgtgagggaggcccagggcctcatggcagggggcttcctgtgcttctccctggcgttctgcgcacaggtgcaggtggtgttctggagactccacagccccacccaggtggaggacgccatgctggacacctacgacctggtatatgagcaggcgatgaaaggtacgtcccacgtccggcggcaggagctggcggccatccaggacgtgtttctgtgctgtgggaagaagtctcctttcagccgtctggggagcacagaggctgacctgtgtcagggagaggaggcggcgagagaggactgccttcagggcatccggagcttcctgaggacacaccagcaggtcgcctccagcctgaccagcatcggcctggccctcacggtgtccgccttgctcttcagctccttcctgtggtttgccatccgctgtggctgcagcttggaccgcaagggcaaatacaccctgaccccacgagcatgtggccgccagccccaggagcccagcctcttgagatgctcccagggtggacccacacattgtctccactccgaagcagttgctattggtccaagaggatgctcgggtagtcttcggtggctgcaggagagcgatgctgcgcctctgcccctctcctgccacctggctgcccacagagctctccagggcagaagtcgcggtgggctcagtgggtgccctgagcggggtctctcagactgacgtcaggccttggtgggctgcactctcacctggaggctccggggaagcatctgcctccaggaccattcaggctgttgacaagtcaactcctcatggctgtaggactgaggttcccaagtccttgtccctggtcctgtggtccctccaccttcaaaccagcaatggtgcattgagcaaattgtggtcaaatatacatcacatcaaatttaccatcttaaaaaaa

SEQ ID NO: 3536 - protein, 320 aa, Homo sapien
MGPWSRVRVAKCQMLVTCFFILLLGLSVATMVTLTYFGAHFAVIRRASLEKNPYQAVHQWAFSAGLSLVGLLTLGAVLSAAATVREAQGLMAGGFLCFSLAFCAQVQVVFWRLHSPTQVEDAMLDTYDLVYEQAMKGTSHVRRQELAAIQDVFLCCGKKSPFSRLGSTEADLCQGEEAAREDCLQGIRSFLRTHQQVASSLTSIGLALTVSALLFSSFLWFAIRCGCSLDRKGKYTLTPRACGRQPQEPSLLRCSQGGPTHCLHSEAVAIGPRGCSGSLRWLQESDAAPLPLSCHLAAHRALQGRSRGGLSGCPERGLSD

SEQ ID NO: 3537 - DNA, 2444 bp, Homo sapien
ggctccgggggtggcggtcggacagtgtctagcacgctcagtccgggcttggggccccgcggcggagaaggaggtagagggggcggcggcggcggcggcggtggtggcggcaccatgtttcttcactcagttaatctctggaacctggcgttttatgtcttcatggtctttctggcaaccctggggctgtgggatgtcttcttcggcttcgaggagaataagtgcagtatgagctacatgtttgagtacccggagtatcagaaaatagaacttccaaagaaactggcaaaacgctatcccgcatatgagttgtatctttatggagagggatcctatgctgaagaacacaaaattctccctttgacgggtattccagttctctttcttcctggtaatgctggaagttataagcaagttcgttctattggctccattgcacttagaaaagcagaggacattgacttcaagtaccactttgacttctttagtgtgaacttcaatgaagaactggtggctttgtatggtggaagtcttcagaagcagaccaagtttgtacatgaatgtattaaaacaattctcaaactctataagggtcaagaatttgctccaaaaagtgtggcaataattggtcattctatgggtggccttgttgcaagagcattgcttacactgaaaaattttaagcatgatctgataaatcttcttattacacaagccacacctcatgttgctcctgtgatgccattagatcgtttcattacagatttttatacgactgtaaacaactattggattctaaatgctcgacacataaatttaaccacactttctgtagctggaggattccgggattaccaagttcgttcaggattgacttttctaccaaaattaagccatcataccagtgccttatctgttgtgagttcagcagtgcctaagacctgggtctcaacagaccacctctccattgtgtggtgtaaacaattgcagttgactacagttcgagcattctttgatcttattggtgctgatactaaacaaataactcaaaattccaagaagaaactgtcagttttgtatcaccactttataagacacccatcaaaacattttgaggaaaatccagctataatttctgacttaacagggacatctatgtgggttctagtaaaagtgtccaaatggacctatgtagcttacaacgaatctgagaagatatattttacatttcctcttgaaaatcatagaaaaatctacactcatgtctattgtcagagcactatgctggatacaaatagttggatttttgcttgcataaacagcacttctatgtgcctgcaaggggttgatttatcatggaaagctgaactgctgccaacaattaagtatctgacattaagacttcaagactatccatctttgtctcatcttgttgtttatgtaccatctgttcgtggaagtaagtttgttgtagattgtgaattctttaaaaaagagaaaagatacatacagcttcctgtaactcatcttttttcctttggattgtcttcaaggaaagtggtgttaaatacaaatggcctatactacaatctagagcttctgaactttggacagatataccaagcttttaaaatcaacgtggtaagcaagtgctcagcagtcaaagaagaaataaccagtatctatagacttcatattccttggtcttatgaagattcactaaccattgcacaggctccatcttccacagaaatttctctgaaactccatattgctcaaccagaaaacaatacccatgtggcattatttaaaatgtacacgtcatcagactgtcggtacgaggtgacagttaagacttccttttcacaaatacttggacaggttgttgcttagaatatgctaccatgttggataaagaagccaaaccatacaaagttgatccttttgtaattatcattaagtttctgttggggtaagttttattatctgtgataatgattttaattgtgttttacatgtaacattatatttggttccataatgcaatataaattttcatacagatttggcagttgacttgtttcattaaatgaggtttttttttttctcttaggcaaaggtctaataagtatatcaatgtctacttcaatagtatcatttcaaaagtaattattcactttatgtatatcagtctaaacttagactgcctttaatgtttgtaaataggtgtatatggtccatgatctgtgagtatcctagattcaaacgcaaatcattacagggtattgatgaaacagtgcctctctgatcacttttaaaagtatattttagacctctctaccctagttaacattccattcttaatttagtcacattttcagatttttggttaagcatcaatatgtagatctttttttccatcattacaactaacttggctttct

SEQ ID NO: 3538 - protein, 592 aa, Homo sapien
MFLHSVNLWNLAFYVFMVFLATLGLWDVFFGFEENKCSMSYMFEYPEYQKIELPKKLAKRYPAYELYLYGEGSYAEEHKILPLTGIPVLFLPGNAGSYKQVRSIGSIALRKAEDIDFKYHFDFFSVNFNEELVALYGGSLQKQTKFVHECIKTILKLYKGQEFAPKSVAIIGHSMGGLVARALLTLKNFKHDLINLLITQATPHVAPVMPLDRFITDFYTTVNNYWILNARHINLTTLSVAGGFRDYQVRSGLTFLPKLSHHTSALSVVSSAVPKTWVSTDHLSIVWCKQLQLTTVRAFFDLIGADTKQITQNSKKKLSVLYHHFIRHPSKHFEENPAIISDLTGTSMWVLVKVSKWTYVAYNESEKIYFTFPLENHRKIYTHVYCQSTMLDTNSWIFACINSTSMCLQGVDLSWKAELLPTIKYLTLRLQDYPSLSHLVVYVPSVRGSKFVVDCEFFKKEKRYIQLPVTHLFSFGLSSRKVVLNTNGLYYNLELLNFGQIYQAFKINVVSKCSAVKEEITSIYRLHIPWSYEDSLTIAQAPSSTEISLKLHIAQPENNTHVALFKMYTSSDCRYEVTVKTSFSQILGQVVA

SEQ ID NO: 3539 - DNA, 2125 bp, Homo sapien
aatgaaggcccatgtagcaaaatactgattcaatgtaaagcaaactttgaaaataagctaatagtccttaaagaaaaacttatttcagatagcaaaagacaagccaatgaactcattagttttaaaaaccaaagtcaagaaaggctgaataagaaaaagacagattatgaaaaagaattattggaaaaaagccggaagttggctttaactgtaaagggcaaagaattgagtgaggaagagttacatgagaaattcaatcaactttggaaaaagtgggtgtgtgatgtatccacaactctcccgcaagttacagagcctgacattgatttggattctgaaaacatcctttgggagtatttcaaaaacaagacgaatgtcgtgggtctactgacaaattctgcagagaagtttcaaatcaattatgataaacatatcaaggtgaataagaaatataaccatatcccaatgacattaacagtctttgagaaagagttcattaatatgactactgactacattgtttcaagatttaataaaattattaacaacatgtggaaacaacagtgtggttacaatccaaattatttccatgagattctaaagacaatagaagaagaagtgaaatctgcctctactcagaagagatacacatttacaaatacatttatcattgacttatgtgtgtgtttatttcaaagagcaagagagaattttaaggaaatgcacagggcattcaagagagcaaatgatcctgtaaactacctagaaagtaagaaagatgatttcttcacgagttttaagatctcctgtcaaggagcaacctccatcaaaacatttgttgatattctgtggtataagctcactcctgcagtctccactactatatgggaggacatgacctttaaaattgcgggggacatgcgagctacctgccctgcgttcaatggaaacaggactaacctggagaaacacattctcttctctctggcagaagaagaaaactttgataattactgggaataccttcataattcaaaatcgttttttaggagttacatcaaaaatcatattaaaagatattgttcagacaatggaggtgaaaaaatgaagactttttttgaaaaaagcttaattgatatcaagaataccatcctctctgccatccatgaatccacatcagtagctaaagataaaagcagcactgcttctgagtggttggatttattctgtgattgcctggggtgcaacttgatctttccacgaagggacttgataagcattgaacaccaggagataaaacatactgaatttcttaaagaagccatgagtgcagctttggatctcacaatgaagaaaatagaacagaattattcaagtaagcctatagaagcaatggtttctaaaattgagaaaatgctctctgaacatctctgtggctgctggaaacagtgtcccagctgtggagcaatttgtacaaacacaattcctacacatgaaggagaccatagtgttcccttccaccgtcctcaggctgtcaatggggaggaatggtatgaaacagatgattttgtcattgattgctgtactagtttggttgcaagtgattgtttgttggttttgagggatggcaggaatttcccatttaagaactatcgacaagcaggaggggattatgccatgtggagcatcaccccagatacctccatccagctatactggaaatggtttgtctctcacttcagatcaaatctagaagaaaaatatcagaaaaaatttgcaggtaaaggtaaaatccccaatgcatgggccaaaatcacaaagcaagatgtgcttgaagacttgaaaaaacagtaatactcagtgaccacaaaagagccccagtgtctgaagaaaagaggcagtgtacctgaacaatccaaaaacaactactcattacaattagaaccttcatcatttccatgtttaaaatgaaatgtgtaaaaatcaatcaattaacacattaagagatgaaaatttccagtaaaaggacttcatttctctctgcctcaattcctctagtttaaaaacaacttactaaaatctgttaatatatgatgaaatcaaataacattcattttagaaacct

SEQ ID NO: 3540 - protein, 462 aa, Homo sapien
MTLTVFEKEFINMTTDYIVSRFNKIINNMWKQQCGYNPNYFHEILKTIEEEVKSASTQKRYTFTNTFIIDLCVCLFQRARENFKEMHRAFKRANDPVNYLESKKDDFFTSFKISCQGATSIKTFVDILWYKLTPAVSTTIWEDMTFKIAGDMRATCPAFNGNRTNLEKHILFSLAEEENFDNYWEYLHNSKSFFRSYIKNHIKRYCSDNGGEKMKTFFEKSLIDIKNTILSAIHESTSVAKDKSSTASEWLDLFCDCLGCNLIFPRRDLISIEHQEIKHTEFLKEAMSAALDLTMKKIEQNYSSKPIEAMVSKIEKMLSEHLCGCWKQCPSCGAICTNTIPTHEGDHSVPFHRPQAVNGEEWYETDDFVIDCCTSLVASDCLLVLRDGRNFPFKNYRQAGGDYAMWSITPDTSIQLYWKWFVSHFRSNLEEKYQKKFAGKGKIPNAWAKITKQDVLEDLKKQ

SEQ ID NO: 3541 - DNA, 1817 bp, Homo sapien
gtgcggagccgcccgtaagatgctctgacctttgaccctgccgttcagctctagggcccgtgcaggccacaccatgaacacctccccaggcacggtgggcagtgacccggtcatcctggccactgcaggctacgaccacaccgtgcgcttctggcaggcccacagcggcatctgcacccggacggtgcagcaccaggactcccaggtgaatgccttggaggtcacaccggaccgcagcatgattgctgctgcaggttaccagcacatccgcatgtatgatctcaactccaataaccctaaccccatcatcagctacgacggcgtcaacaagaacatcgcgtctgtgggcttccacgaagacggccgctggatgtacacgggcggcgaggactgcacagccaggatctgggacctcaggtcccggaacctgcagtgccagcggatcttccaggtgaacgcacccattaactgcgtgtgcctgcacccgaaccaggcagagctcatcgtgggtgaccagagcggggctatccacatctgggacttgaaaacagaccacaacgagcagctgatccctgagcccgaggtctccatcacgtccgcccacatcgatcccgacgccagctacatggcagctgtcaatagcaccggaaactgctatgtctggaatctgacggggggcattggtgacgaggtgacccagctcatccccaagactaagatccctgcccacacgcgctacgccctgcagtgtcgcttcagccccgactccacgctcctcgccacctgctcggctgatcagacgtgcaagatctggaggacgtccaacttctccctgatgacggagctgagcatcaagagcggcaaccccggggagtcctcccgcggctggatgtggggctgcgccttctcgggggactcccagtacatcgtcactggtgagccccgccctggcctcccccatccctggcccccggcgctggcctccagagccagcccacctcggctgcagcttcccctctgctggggccgcctgcttggcctgcacctgcgctcttagccctgcacaatctccccctccagcttcctcggacaacctggcccggctctggtgtgtggagactggagagatcaagagagagtatggcggccaccagaaggctgttgtctgcctggccttcaatgacagtgtgctgggctagcctgtgacccctcgggactgcctggtgcaggtggtggcagctggagggacccatgcagcacccaggtcagagcagaccctcccctgccggcctgcgccagctggacctgatggccccctgtggcgccttgacctgctgggccaggctgccctgggactctcagcccccagttgcttatccagatgtgacagagctcgacccaagccaggctgcacactcctggactgggctagcctgcactgcctgggaaagtcggccgagggcccaaagctgctgaggggtctgaggctggtgcccacccccaagctagtgcgttctctgcccctccctgcccgcgtttcagggcctcggtccatagagaacaccaccaccatggccaggtggaagggtttattagtccctgccagcagctgtcctccctggtgcaggtggcctggccagcccactggattggggacgggccaggctgggccaggtcgggggctcagtctgggaggtaataaaagcagaccgacacgcagatgttgctcgggaaaaaaaaaaaaaaaaaaaaaaaaaccaaaaaaaaaaaaaaaaaaaaaaaaaaaaaaaaaaaaaaaaaaaaaaaaaaaaaaaaaa

SEQ ID NO: 3542 - protein, 327 aa, Homo sapien
MNTSPGTVGSDPVILATAGYDHTVRFWQAHSGICTRTVQHQDSQVNALEVTPDRSMIAAAGYQHIRMYDLNSNNPNPIISYDGVNKNIASVGFHEDGRWMYTGGEDCTARIWDLRSRNLQCQRIFQVNAPINCVCLHPNQAELIVGDQSGAIHIWDLKTDHNEQLIPEPEVSITSAHIDPDASYMAAVNSTGNCYVWNLTGGIGDEVTQLIPKTKIPAHTRYALQCRFSPDSTLLATCSADQTCKIWRTSNFSLMTELSIKSGNPGESSRGWMWGCAFSGDSQYIVTGEPRPGLPHPWPPALASRASPPRLQLPLCWGRLLGLHLRS

SEQ ID NO: 3543 - DNA, 4215 bp, Homo sapien
gggcgacacccgggccgtgccgccagcgtccgtcgggagagtgaaggctcgcaacgccttgcccgggggaaggtaacgcgccgcgcccggggctgcgcggtttgcaccgccaggccgagggctgggggccagaagacaagagagacggcgaggcgcgctccctgcccggcagcgactcggaggtaggtgatgctctgatgctgctgcctcttatgaattgacgacaggtgcagagagagaataaactgtgtctaagactggaccagagagtgagtgtgctggaagccaccataggaacaagcgacctgtttggcaaggaatacagcatccttctgagagcctcttctcgacactatcccacagaccaggacttcctcatgggaaagagcacttaggatcttgctatcagctgccctaaacttttgctgagccaaaataagactttgatgcagaactgaacaagatatttcatttttgtgtgttttaatcttcctggttgcagtcttagttgttcagccctgagaattttgagccacatttgttgctattatttttgcatgcacttttcaaaatgattgacttaagcttcctgactgaagaggaacaagaggccatcatgaaggttttgcagcgggatgctgctctgaagagggccgaagaagagagagtcagacatttgcctgaaaaaattaaggatgaccagcagctgaagaatatgagtggccaatggttttatgaagccaaggcaaaaaggcacagggacaaaatccatggcgcagatatcatcagagcatctatgagaaagaagaggccccagatagcagctgagcagagtaaagacagagaaaatggggcaaaggaaagctgggtgaataatgtcaacaaagatgctttccttcctccagagctggctggcgttgtagaagagccagaagaagatgcagcaccagcaagcccgagttccagtgtggtaaatccagcttccagtgtgattgatatgtcccaggaaaacacaaggaaaccaaatgtgtctccagagaagaggaagaatccgtttaatagctccaagttgccagaaggtcactcatcacaacaaactaaaaatgaacagtcaaaaaatggaagaactggtttatttcagacttcaaaagaggatgaattgtcagagtcaaaagaaaagtcaactgtcgcagatacttcaatccaaaagttagagaaatcaaagcagactttgccaggcctttcaaatgggtcccaaatcaaggctccaatccccaaagccaggaagatgatctacaaatcaactgatttaaacaaagatgataaccagtcttttcctagacaaaggacagactccctgaaagcgagaggggctccgagagggatcctcaagcgcaactccagttccagtagcacagactcagaaacccttcgttataatcacaactttgaacccaaaagcaaaattgtgtcacctggcctaaccatccatgagagaatttctgagaaggagcattctttagaagacaactcttccccaaactccctggagccattaaagcatgtgagattctctgcagtgaaggatgagcttccacagagtcctgggctaatccatggtcgggaagtaggagaatttagtgttttagaatctgacagattgaaaaatggaatggaagatgcaggggacacagaagagtttcagagtgaccctaagccttctcaatacagaaagccttcgctttttcatcaatcaacctcaagcccatatgtatcaaaaagtgaaacacatcagccaatgacttctggttcttttccaattaatgggctgcattctcattcagaagttttaactgcaagaccacagtctatggagaattcaccaaccatcaatgaacccaaagataaatcatcagaattaacaaggcttgaatctgtattacccagaagccctgctgatgaactgtctcattgtgttgagcctgagccatctcaggtgccaggtggcagttctagagaccgtcagcaaggttcagaagaagaacccagtcctgttttgaaaactttggaaaggagtgccgctaggaaaatgccttccaaaagtctagaagacatttcatcagattcatcaaatcaagcaaaagtagataatcagccagaagaattagtgcgtagtgctgaagatgatgagaaaccagatcagaagccagttacaaatgaatgcgtaccaagaatttccacagtgcctacacaacctgataatccattttctcaccctgacaaactcaaaaggatgagcaagtctgttccagcatttctccaagatgaggtgagtggcagtgtgatgagtgtttatagtggagactttggcaatctggaagttaaaggaaatattcagtttgcaattgaatatgtggagtcactgaaggagttgcatgtttttgtggcccagtgtaaggacttagcagcagcggatgtaaaaaaacagcgttcagacccatatgtaaaggcctatttgctaccagacaaaggcaaaatgggcaagaagaaaacactcgtagtgaagaaaaccttgaatcctgtgtataacgaaatactgcggtataaaattgaaaaacaaatcttaaagacacagaaattgaacctgtccatttggcatcgggatacatttaagcgcaatagtttcctaggggaggtggaacttgatttggaaacatgggactgggataacaaacagaataaacaattgagatggtaccctctgaagcggaagacagcaccagttgcccttgaagcagaaaacagaggtgaaatgaaactagctctccagtatgtcccagagccagtccctggtaaaaagcttcctacaactggagaagtgcacatctgggtgaaggaatgccttgatctaccactgctaaggggaagtcatctaaattcttttgttaaatgtaccatccttccagatacaagtaggaaaagtcgccagaagacaagagctgtagggaaaaccaccaaccctatcttcaaccacactatggtgtatgatgggttcaggcctgaagatctgatggaagcctgtgtagagcttactgtctgggaccattacaaattaaccaaccaatttttgggaggtcttcgtattggctttggaacaggtaaaagttatgggactgaagtggactggatggactctacttcagaggaagttgctctctgggagaagatggtaaactcccccaatacttggattgaagcaacactgcctctcagaatgcttttgattgccaagatttccaaatgagcccaaattccactggctcctccactgaaaactactaaaccggtggaatctgatcttgaaaatctgagtaggtggacaaatatcctcactttctatctattgcacctaaggaatactacacagcatgtaaaagtcaatctgcatgtgcttctttgattacaaggcccaagggatttaaatataacaaaatgtgtaatttgtgactctaatattaaataagatatttgaacaagctaggaaaattgaatttctgctgctgcttcaaagaaaaagctgccccagagcattaaacatggggtattgttaagaagcaaaatgttcttgtttgccatcatgtgtttcacaccacaattctgtgccacagttaagagggtctggtacccttgcaggacctttgtaggttgtgggaaaaagtcgcagaaagatactcaaagtggagcagggaatggagacagacatcagtgatgataaaaaaaaaaatggaccttaagaaactatttactctgtaatctctaataaaatatggaattccatattagggcaatgagactgaaactactggtgtttttctgccttgagaaaacaaacagttaaaacaagcctcaaatgtattttagtgccacccactggccataggtacaattcagttgttggcttgttttgacttaattctaaaataggtctcaagcctgtatttttatgagtttatttttttaaaaccctgcatatatatgattgtttttcttataactttactatatgaaagcagcataagagtagtcacaaacatgttttgcaacaaagttttaattagaatgtaagttgctcagttatactgttcttcttatgtatgtaaaattttcgtattttgtaaaaacccttagaataaattatcatttgatttaaattgt

SEQ ID NO: 3544 - protein, 910 aa, Homo sapien
MIDLSFLTEEEQEAIMKVLQRDAALKRAEEERVRHLPEKIKDDQQLKNMSGQWFYEAKAKRHRDKIHGADIIRASMRKKRPQIAAEQSKDRENGAKESWVNNVNKDAFLPPELAGVVEEPEEDAAPASPSSSVVNPASSVIDMSQENTRKPNVSPEKRKNPFNSSKLPEGHSSQQTKNEQSKNGRTGLFQTSKEDELSESKEKSTVADTSIQKLEKSKQTLPGLSNGSQIKAPIPKARKMIYKSTDLNKDDNQSFPRQRTDSLKARGAPRGILKRNSSSSSTDSETLRYNHNFEPKSKIVSPGLTIHERISEKEHSLEDNSSPNSLEPLKHVRFSAVKDELPQSPGLIHGREVGEFSVLESDRLKNGMEDAGDTEEFQSDPKPSQYRKPSLFHQSTSSPYVSKSETHQPMTSGSFPINGLHSHSEVLTARPQSMENSPTINEPKDKSSELTRLESVLPRSPADELSHCVEPEPSQVPGGSSRDRQQGSEEEPSPVLKTLERSAARKMPSKSLEDISSDSSNQAKVDNQPEELVRSAEDDEKPDQKPVTNECVPRISTVPTQPDNPFSHPDKLKRMSKSVPAFLQDEVSGSVMSVYSGDFGNLEVKGNIQFAIEYVESLKELHVFVAQCKDLAAADVKKQRSDPYVKAYLLPDKGKMGKKKTLVVKKTLNPVYNEILRYKIEKQILKTQKLNLSIWHRDTFKRNSFLGEVELDLETWDWDNKQNKQLRWYPLKRKTAPVALEAENRGEMKLALQYVPEPVPGKKLPTTGEVHIWVKECLDLPLLRGSHLNSFVKCTILPDTSRKSRQKTRAVGKTTNPIFNHTMVYDGFRPEDLMEACVELTVWDHYKLTNQFLGGLRIGFGTGKSYGTEVDWMDSTSEEVALWEKMVNSPNTWIEATLPLRMLLIAKISK

SEQ ID NO: 3545 - DNA, 1834 bp, Homo sapien
gaaaaatccttgtggttaacagcagaggcttcagagtgtaacctgtactcgggcctagaaattatttaaaatggcgactgatacgtctcaaggtgaactcgtccatcctaaggcactcccacttatagtaggagctcagctgatccacgcggacaagttaggtgagaaggtagaagatagcaccatgccgattcgtcgaactgtgaattctacccgggaaactcctcccaaaagcaagcttgctgaaggggaggaagaaaagccagaaccagacataagttcagaggaatctgtctccactgtagaagaacaagagaatgaaactccacctgctacttcgagtgaggcagagcagccaaagggggaacctgagaatgaagagaaggaagaaaataagtcttctgaggaaaccaaaaaggatgagaaagatcagtctaaagaaaaggagaagaaagtgaaaaaaacaattccttcctgggctaccctttctgccagccagctagccagggcccagaaacaaacaccgatggcttcttccccacgtcccaagatggatgcaatcttaactgaggccattaaggcatgcttccagaagagtggtgcatcagtggttgctattcgaaaatacatcatccataagtatccttctctggagctggagagaaggggttatctccttaaacaagcactgaaaagagaattaaatagaggagtcatcaaacaggttaaaggaaaaggtgcttcttggaagttttgttgtggttcagaaatcaagaaaaaacacctcagaaatccagaaaacagaaagaataggagctctgcagtggatccagaaccacaagtaaaattggaggatggtctcccactggcctttactcgcctttgtgaacctaaagaagcttcctacagtctcatcaggaaatatgtgtctcagtattatcctaagcttagagtggacatcaggcctcagctgttgaagaacgctctgcagagagcagtagagaggggccagttagaacagataactggcaaaggtgcttcggggacattccagctgaagaaatcaggggagaaacccctgcttggtggaagcctgatggaatatgcaatcttgtctgccattgctgccatgaatgagccgaagacctgctctaccactgctctgaagaagtatgtcctagagaatcacccaggaaccaattctaactatcaaatgcatttgctgaaaaaaaccctgcagaaatgcgaaaagaatgggtggatggaacagatctctgggaaagggttcagtggcaccttccagctctgttttccctattatcccagcccaggagttctgtttccgaagaaagagccagatgattctagagatgaggatgaagatgaagatgagtcatcagaagaagactctgaggatgaagagccgccacctaagagaaggttgcagaagaaaaccccagccaagtccccagggaaggccgcatctgtgaagcagagagggtccaaacctgcacctaaagtctcagctgcccagcgggggaaagctaggcccttgcctaagaaagcacctcctaaggccaaaacgcctgccaagaagaccagaccctcatccacagtcatcaagaaacctagtggtggctcctcaaagaagcctgcaaccagtgcaagaaaggaagtaaaattgccgggcaagggcaaatccaccatgaagaagtctttcagagtgaaaaagtaaattttataggaaaaaagggtatgatgatgaaattcaaaatcttattttctaagcacttttgatatcaagcaagtggcttcctttttgagatattaaaac

SEQ ID NO: 3546 - protein, 554 aa, Homo sapien
MATDTSQGELVHPKALPLIVGAQLIHADKLGEKVEDSTMPIRRTVNSTRETPPKSKLAEGEEEKPEPDISSEESVSTVEEQENETPPATSSEAEQPKGEPENEEKEENKSSEETKKDEKDQSKEKEKKVKKTIPSWATLSASQLARAQKQTPMASSPRPKMDAILTEAIKACFQKSGASVVAIRKYIIHKYPSLELERRGYLLKQALKRELNRGVIKQVKGKGASWKFCCGSEIKKKHLRNPENRKNRSSAVDPEPQVKLEDGLPLAFTRLCEPKEASYSLIRKYVSQYYPKLRVDIRPQLLKNALQRAVERGQLEQITGKGASGTFQLKKSGEKPLLGGSLMEYAILSAIAAMNEPKTCSTTALKKYVLENHPGTNSNYQMHLLKKTLQKCEKNGWMEQISGKGFSGTFQLCFPYYPSPGVLFPKKEPDDSRDEDEDEDESSEEDSEDEEPPPKRRLQKKTPAKSPGKAASVKQRGSKPAPKVSAAQRGKARPLPKKAPPKAKTPAKKTRPSSTVIKKPSGGSSKKPATSARKEVKLPGKGKSTMKKSFRVKK

SEQ ID NO: 3547 - DNA, 4619 bp, Homo sapien
gaaggcgtcccggcatcggccaagattctacattgctcatctgggcatctgagcctccttcgaagtttcctgtcacaactgtcctcttgacagcatggatgaggaggaagacaatctgtctctgctgaccgcactgctggaagaaaatgagtcagccttggattgtaattcagaagaaaataacttcttgacgcgggaaaatggcgagcccgacgcatttgatgagctctttgatgccgacggcgacggtgaatcttatacagaagaggctgatgatggagaaacaggagagacaagagacgaaaaggaaaatctggccactctctttggagatatggaggacttaacagatgaagaagaagttcccgcatcacagtcaactgaaaatagggtcctccctgctcctgcccccaggcgagagaaaacgaatgaagagttgcaagaggaattaaggaatttgcaagagcaaatgaaggccttacaagagcagctaaaagtaacaacaattaaacagacagcaagcccagcccgtctgcaaaaatcccctgagaagtctccccggccacctcttaaggagaggagagttcagagaattcaggagtcaacatgcttttctgcggagcttgatgtccctgcgctaccaagaaccaagagggtggctcgaacaccaaagccttcacctccagatcccaaaagctcatcttcaaggatgacaagtgcaccctcccaacccctacagacgatttctcggaacaaacctagtgggataactagaggtcaaattgtggggaccccaggaagttctggggaaacgactcaacccatctgtgtggaagccttctctggtctgcggctcaggcggcctcgagtatcctccacagaaatgaacaagaaaatgaccggccgaaaactgatcagactgtctcagatcaaggaaaagatggccagagagaagctggaagaaatagattgggtgacatttggggttatattgaagaaggttacgccacagagtgtgaatagtggaaaaaccttcagcatatggaaactgaatgatcttcgtgacctgacacaatgtgtgtccttgttcttatttggagaagttcacaaagcgctctggaagacggagcaggggactgtcgtagggatcctcaatgccaaccccatgaagcccaaggatggttcagaggaggtgtgtttatctatcgatcatcctcagaaggtcttaattatgggtgaagctcttgacctgggaacctgtaaagccaagaagaagaatggagagccgtgcacgcagactgtgaatttgcgtgactgtgagtactgtcagtaccatgtccaggctcagtacaagaagctcagtgcaaagcgtgcggatctgcagtccaccttctctggaggacgaattccaaagaagtttgcccgcagaggcaccagcctcaaagaacggctgtgccaagatggcttttactacggaggggtttcttctgcctcgtatgcagcttcaattgcagcagctgtggctcctaagaagaagattcaaaccactctgagtaatctggttgttaagggcacaaacttgatcatccaggaaacacggcaaaaactcggaataccccagaagagcctgtcttgctctgaggagttcaaggaactgatggacctgccgacgtgtggagccaggaacttaaaacaacatttagccaaagcctcagcttcagggattatggggagcccaaaaccagccatcaagtccatctcggcctcagcactcttgaagcaacagaagcagcggatgttggagatgaggagaaggaaatcagaagaaatacagaagcgatttctgcagagctcaagtgaagttgagagcccagctgtgccatcttcatcaagacagccccctgctcagcctccacggacaggatccgagttccccaggctggagggagccccggccacaatgacgcccaagctggggcgaggtgtcttggaaggagatgatgttctcttttatgatgagtcaccaccaccaagaccaaaactgagtgctttagcagaagccaaaaagttagctgctatcaccaaattaagggcaaaaggccaggttcttacaaaaacaaacccaaacagcattaagaagaaacaaaaggaccctcaggacatcctggaggtgaaggaacgtgtagaaaaaaacaccatgttttcttctcaagctgaggatgaattggagcctgccaggaaaaaaaggagagaacaacttgcctatctggaatctgaggaatttcagaaaatcctaaaagcaaaatcaaaacacacaggcatcctgaaagaggccgaggctgagatgcaggagcgctactttgagccactggtgaaaaaagaacaaatggaagaaaagatgagaaacatcagagaagtgaagtgccgtgtcgtgacatgcaagacgtgcgcctatacccacttcaagctgctggagacctgcgtcagtgagcagcatgaataccactggcatgatggtgtgaagaggtttttcaaatgtccctgtggaaacagaagcatctccttggacagactcccgaacaagcactgcagtaactgtggcctctacaaatgggaacgggacggaatgctaaaggtatgccatttgcgtactaatttttgactccttttagtgacccatgctaataatgtggaaccatctcctattaaaatattttcatttttctaggaaaagactggtccaaagataggaggagaaactctgttaccaagaggagaagaacatgctaaatttctgaacagccttaaataacccgaacttcagacattttcccacagacttcctggcctcctgtgactctggaaagcaaaggattggctgtgtattgtccattgattcctgattgacgccgtcaaaaacaaatgcttgttaagcccataagctttgcctgcttactttctgccattgggttggtttgataccacatttaacattgacatttaagtggaaaaccaagttatcattgtcttttctaagctcagtgtggatgattgcattacttcattcactgaagtttttgcccaaaaattggaaggtaaacagagagctatgtttctgtatcttttggttatagagtgttcacttctttatcataacaaaattctagtgtttatacgaacacccagaggcaaaagaatttggcttaattctcactccaggtaagtagcttaacttctgggcttcagttttctcatctgtaaaatcaggaagattggactaagtgatcctgaaatgtattttttagcactggatttctacaaataataaaactttcccatctagataatgatgatcacatagtcttgatgtacggacattaaaagccagatttcttcattcaattctgttatctctgttttactctttgaaattgatcaagccactgaatcactttgcatttcagtttatatatagagagagaaagaaggctgtctgctcttacattattgtggagccctgtgatagaaatatgtaaaatctcatattattttttttttaatttttttattttttatgacagggtctcactatgtcaccctggctggagtgcagtagtgcgatcgcggcacactgcagccttggcttccctgggctcaagcagtcctcccacctcagtctcccaaatagctaggactacaggcgtgcgtgaccaagcccagctaatttttgcattttttgtagagatggggttttgccatgttgctcaggctggtctcaaactcctgagcactagcaatccacccacctctgtttccaaaaaaaaaaaaaaaatgaaaggtcaacccctatgcaaattaccacagcaaaggtttcattcaggagattcttccatctgggcaacctggttttccaaatatcatttgacctaagtgaatgttgatactagctaaagattgggtaaattggttgaattattgtattgaagcttgagctgtagctaaaagtaatttaggtttcccctaagatgttattatgttagggacataacacttttgggaggttgttgtgggagatggttgatttaggttttcaaaagctagaaataaaatttacatgccttagatttcataaaattctgctctaattgggtggaaggtgctgtatctaacttgtgttcctcctaaggttatgtcctaataactattcttttaggagtatacttctactttatagaaggttgcttttctttttaattttttctaacaaagaaaagaataaagtatttattaataagaaccagaaagcacttgaaactgatgtttttaatggctcatttagggtagatttatttatctcattaacttaaaacagctatgtgtatgaaataggtcacaacagaacttgaacaccaggttggtgtctgagcaatccctttcttatgggaaaaacaatgttcttgtttgaacagagggtatcattgcagtcagtattcacgtgtatattgttatataagttgtataatatgcttgtaaaggctgagggtgagctgtatctggatgcctttttacaatttgattttaacttttaaaataaatttaaaacataaaaaaaaaaaaaa

SEQ ID NO: 3548 - protein, 855 aa, Homo sapien
MDEEEDNLSLLTALLEENESALDCNSEENNFLTRENGEPDAFDELFDADGDGESYTEEADDGETGETRDEKENLATLFGDMEDLTDEEEVPASQSTENRVLPAPAPRREKTNEELQEELRNLQEQMKALQEQLKVTTIKQTASPARLQKSPEKSPRPPLKERRVQRIQESTCFSAELDVPALPRTKRVARTPKPSPPDPKSSSSRMTSAPSQPLQTISRNKPSGITRGQIVGTPGSSGETTQPICVEAFSGLRLRRPRVSSTEMNKKMTGRKLIRLSQIKEKMAREKLEEIDWVTFGVILKKVTPQSVNSGKTFSIWKLNDLRDLTQCVSLFLFGEVHKALWKTEQGTVVGILNANPMKPKDGSEEVCLSIDHPQKVLIMGEALDLGTCKAKKKNGEPCTQTVNLRDCEYCQYHVQAQYKKLSAKRADLQSTFSGGRIPKKFARRGTSLKERLCQDGFYYGGVSSASYAASIAAAVAPKKKIQTTLSNLVVKGTNLIIQETRQKLGIPQKSLSCSEEFKELMDLPTCGARNLKQHLAKASASGIMGSPKPAIKSISASALLKQQKQRMLEMRRRKSEEIQKRFLQSSSEVESPAVPSSSRQPPAQPPRTGSEFPRLEGAPATMTPKLGRGVLEGDDVLFYDESPPPRPKLSALAEAKKLAAITKLRAKGQVLTKTNPNSIKKKQKDPQDILEVKERVEKNTMFSSQAEDELEPARKKRREQLAYLESEEFQKILKAKSKHTGILKEAEAEMQERYFEPLVKKEQMEEKMRNIREVKCRVVTCKTCAYTHFKLLETCVSEQHEYHWHDGVKRFFKCPCGNRSISLDRLPNKHCSNCGLYKWERDGMLKVCHLRTNF

SEQ ID NO: 3549 - DNA, 2426 bp, Homo sapien
acgcggggattctgtgtaattcctatccacagtcacttctgttcatttttaatgaaaacctattgctgttattttctattatgagttaacggtgatgtgtgttttttaaattttgtatacttgctctcaccctaaaatataccttaagagacttttcccctgtttttctttctgctttccaagactccaggaaaaacagcttccatggcacattttgtacagggcacatctagaatgattgccgcagaaagttctacggagcataaagagtgtgctgaaccatcaacaagaaagaacttgatgaattctcttgaacaaaagataaggtgtttggaaaaacaaagaaaagagctcctggaagttaaccagcaatgggatcagcaatttagaagtatgaaagagttatatgaaagaaaggtagcagagctgaagacgaaactggacgccgcggaaagattcctcagcacgcgggagaaggatccgcatcagaggcagagaaaggacgacaggcagagagaggacgacaggcagcgcgacctgacccgggaccggctgcagcgggaggagaaggaaaaggaacgcctaaatgaagaattacatgaattgaaagaagagaataaacttttaaagggaaaaaatactcttgcgaacaaggaaaaggaacattacgaatgtgaaataaaacgcctcaataaggctcttcaggatgccttgaatatcaagtgttcattttccgaggactgtttgaggaagtctcgagtggaattctgccatgaggagatgagaacagaaatggaagttctgaagcagcaggtgcaaatatacgaagaagacttcaaaaaggaacgatcggatcgagagagacttaatcaagagaaagaggagctacagcaaattaatgaaacttcccaatcccagttgaacaggctgaattcccagataaaagcttgtcagatggagaaagaaaaactagaaaagcaattaaaacagatgtattgcccaccctgtaactgcggcttggttttccacctgcaagatccatgggtaccaacaggccctggagctgtgcagaagcaacgggagcacccaccagactgtcagtggtatgctcttgaccagcttccgccagatgtacaacacaaggcaaatggtttatcctcagtaaagaaagtccatccgtagaagtacacactaacagagagagacaacaggcaacgagggagcgtggctgaggaccctcttctttgtttatactgaggcttgtttctgccacaaaggcacatcatctaccctgttatttgtgcctggtcatgttttcctttggtatgaatacaggaaaaggcttctgacagctaagatcctgatcaaattggaggagccagttattatacaaccaaatacaacttccagtttccttgaaatgagacttggcagatggatgatgcacgactccctgaaaatctcttcagcatattgctgttggatgcacaaaaatgattctatgatttaggcaactcagtgtttgctgcagggatattgtatgttgatttaaagtgcatatgtgtgtgtgtgtgtgtgtgtgtgtgtgtgtttcctggggtaaaaatttctgcagttgtaaacgtttaacattgctcccattcttcttccacagggccttagttctttagctatttgactacatattgttgacctcagtgatcctaaacgtagaattgaagaggtgtatatacctcgttaaattaaataagtggttcaatctgaataagatggttaattggaagctattccttagacagatcatttctttaagatggtgagaaattgtgcgcctgcatcacaagacttgattatgaaagataaagtcttgggctgggtgcagtggctcatgcctataatcccagcactttgggaggctgaggcaggtggattgctttgaggccaggagttctagaccagcctggccagcatggtgaaaccccatctctactataaatacaaaaattagccaggctcgtggcacacacctataaacccagctactcaggaggcttgaggcgggaggatcacttgagcccagggaggcagaggttgctgtaagttgagatcgccactgcactccagcctgggaaatagagtgagcaagactcagtgccccctacccacccactccacaccaccaaaaaaaaaaaaaaaaaaaaaaggaagacaaagtcctgatgggatgatgatggctatatggctatgctgtgtccatatatacttacagaaatatttcagacatatggatttatagttaaatctgtgtttttccttcctatggatttgattaattttaatgaaaaacttaattctgactcctcaagccaattaaaatgaaaatggaatttatttaaaaaaaaaaaaaaaaaaaaaaaaaaaaaaaa

SEQ ID NO: 3550 - protein, 325 aa, Homo sapien
MAHFVQGTSRMIAAESSTEHKECAEPSTRKNLMNSLEQKIRCLEKQRKELLEVNQQWDQQFRSMKELYERKVAELKTKLDAAERFLSTREKDPHQRQRKDDRQREDDRQRDLTRDRLQREEKEKERLNEELHELKEENKLLKGKNTLANKEKEHYECEIKRLNKALQDALNIKCSFSEDCLRKSRVEFCHEEMRTEMEVLKQQVQIYEEDFKKERSDRERLNQEKEELQQINETSQSQLNRLNSQIKACQMEKEKLEKQLKQMYCPPCNCGLVFHLQDPWVPTGPGAVQKQREHPPDCQWYALDQLPPDVQHKANGLSSVKKVHP

SEQ ID NO: 3551 - DNA, 6792 bp, Homo sapien
ctccagtccgcatgctcagtagctgctgccggccgggctgcggggcggcgtccgctgcgcgcctacgggctgcggtggcggccgccgcggcacccggcagggcccgccagtccccgcttccctgctccagagccgccgcctgggccggggcagggcgggcccggggctcctccatgctgccagccgccgggctgcggagccgaccaagtggctcctgcgatggcggcggaagaggaggctgcggcgggaggtaaagtgttgagagaggagaaccagtgcattgctcctgtggtttccagccgcgtgagtccagggacaagaccaacagctatggggtctttcagctcacacatgacagagtttccacgaaaacgcaaaggaagtgattcagacccatcccaagtggaagatggtgaacaccaagttaaaatgaaggccttcagagaagctcatagccaaactgaaaagcggaggagagataaaatgaataacctgattgaagaactgtctgcaatgatccctcagtgcaaccccatggcgcgtaaactggacaaacttacagttttaagaatggctgttcaacacttgagatctttaaaaggcttgacaaattcttatgtgggaagtaattatagaccatcatttcttcaggataatgagctcagacatttaatccttaagactgcagaaggcttcttatttgtggttggatgtgaaagaggaaaaattctcttcgtttctaagtcagtctccaaaatacttaattatgatcaggctagtttgactggacaaagcttatttgacttcttacatccaaaagatgttgccaaagtaaaggaacaactttcttcttttgatatttcaccaagagaaaagctaatagatgccaaaactggtttgcaagttcacagtaatctccacgctggaaggacacgtgtgtattctggctcaagacgatcttttttctgtcggataaagagttgtaaaatctctgtcaaagaagagcatggatgcttacccaactcaaagaagaaagagcacagaaaattctatactatccattgcactggttacttgagaagctggcctccaaatattgttggaatggaagaagaaaggaacagtaagaaagacaacagtaattttacctgccttgtggccattggaagattacagccatatattgttccacagaacagtggagagattaatgtgaaaccaactgaatttataacccggtttgcagtgaatggaaaatttgtctatgtagatcaaagggcaacagcgattttaggatatctgcctcaggaacttttgggaacttcttgttatgaatattttcatcaagatgaccacaataatttgactgacaagcacaaagcagttctacagagtaaggagaaaatacttacagattcctacaaattcagagcaaaagatggctcttttgtaactttaaaaagccaatggtttagtttcacaaatccttggacaaaagaactggaatatattgtatctgtcaacactttagttttgggacatagtgagcctggagaagcatcatttttaccttgtagctctcaatcatcagaagaatcctctagacagtcctgtatgagtgtacctggaatgtctactggaacagtacttggtgctggtagtattggaacagatattgcaaatgaaattctggatttacagaggttacagtcttcttcataccttgatgattcgagtccaacaggtttaatgaaagatactcatactgtaaactgcaggagtatgtcaaataaggagttgtttccaccaagtccttctgaaatgggggagctagaggctaccaggcaaaaccagagtactgttgctgtccacagccatgagccactcctcagtgatggtgcacagttggatttcgatgccctatgtgacaatgatgacacagccatggctgcatttatgaattacttagaagcagaggggggcctgggagaccctggggacttcagtgacatccagtggaccctctagcctttgatttttaactccaaaaatgagaaacattttaaagcattatttacgaaaaaactgtctcaactattcttaagtactgtattgatattgtttgtatcttttattaatgttctaccactttttatagatttgcatcttcctgtcacagggatgtggggaaatacgttttcctcccaagagaaccaagtttattatagactcctttattcagtgaaatggcttataatccactagttgccatatttttgctaaaatatttctaaccaagaatactacttacatattgttttggctttgttttatttttgatgcagttttttttagttgaggtaatgtaatatattgatgttttcctttgtgtctaagattgatttataatagtaggtttgtataatttggaacattttccatgccttgcgaatttccttaattgaggatagggcttacacactttaagaaaacagtgagtacttgaacatttaaagggacagtgcaatttatagtcataatcacattgaatactgtatttgatctttggagacttaggcaagcacagagctgggatatttatgctcagttgagcactttaagatgaattttaagtgagatgatttcttgcttaaaactcagaaagtcaaaagagtttcagctttccttacagaaaaggaaggatcttgggccctagatcttggggattaacctctgcatataagatttactcttaataggccagacgtggtgctcacgcctgtaatcccagtactttgggaggctgagacgggcagatcacttgaggtcaggagttcaagaccagcctggccaatatggtgaaaccccgtttctactaaaaatacaaaaaaaattacccaggcactcactcttgaggtaactaaccaactcccacgataatgacagtccattcatgagcgcaaaggcctcatgacctaatggcacacacctgtaatcccaactgcttgggaggctgaggcgagaggattgcttgaacctgggaggcagaggttgcagtgagccgagatcgcaccactgcactccagtctgggcaacagagtgagacttcatctcaaaaaaagtaaaaaaaaagatttaatataatcactgaagatctctattatagatagattaggtttttgacattggaaacatacttagggatagatttgtcctaaaggaaaaaagtaggcccgggcagattaaatgtcttgtgtaaagtcacacattaaattcagtcacacattaaattcatagagttttaaatgtttaatgtatataaaccagtttctttatacacatttgggaaaacattggtctcacagattaaatgattaactaactgacccaggaactagttgtagctttctaagtaattaggcaattacagttattgcctgtaaccaaaggtaataaaacaaaatgacaagtacatgtttaaaattatgaggcaatgagaaataatttaaaaaccaattttctagttataatttaaaatttggagagcatttttaacagtaattaatccagaggtggctcaaattgagtataagaattaagattatttaaaatactgcatgtctaccttctcggggatcatactttataacactttctgcttcagtagctcttcatagcttgccaagtatgctcccatattttctctctcgtgcctcgcaaatgaaagtcagataggctgggaactcatggggcagccctcagacttcaatgtgggcttcaaatccagtttcctgttctatatggtgctacatctttccagaaaatttccctcagagcccctcgccaaaacaaagcattattttgaccctgcatgctatttctttagctgtaggtgatagattagaacttctgtcagacatgttaatgacaaacataccaacagacaataaccaaagcaaatgtttccttcaagtgtgaaatgtgcaggggctcgtgggcaaggatgtattggcacactgtcctcttgaactgatagtgtcccagcaatgttggaggttggcaccattcctggtccgacacttgaggacctgagagacatcaggtttagaatgagccaaagaaatcctacaagatggggagaattggtgtgcagcagcctaagtgttatagttaagtctaaagaagtatgaaagatcccctgtgttctctaaattgagcagaggggcctgcctaccaatatcactttttaggggactgaaccattgcaggttagacttggcttccaaagagtctgcctaagccaggggtggcagggtaggccatcatagctggatggcctcaaaagcagatgggggcagacttgccctcgtgatgccaggatttgagaggcagagtttctagagggagaccagtgctgcctctcacagtggcagttttttctctttgcaagaggaggggctgttcaattccatagaccagtgggcagatagccagttgaatactctgtgcatggtttgatcctttattagttcgctctaatatttttctgtagatccttttgtcctggactcaaaatctaatccatgcattgtatgataccgtagctctcctaaggtttgtgtttccttcaaaatgttttagttttcttcaactaaatttgatttttgctgttagaagtgacatatttttatggtatacactatgttccttttttctactgcgagtcaattttttgaattttcgtgagaaagaatatatctacaaattgcacgaaagtatcataaaaacagtactctagagcagcgctgtccaatagaaatataatctgagccacatgtataattttattttcttctagccacattaaagaagtaaaaagatacaagtagaactaattttaatgttttaattcagtatatccaaaatatcatttgaacatgtaattaatataaaattattaatgtgatattttacattcttttggtaatactagtcttcaaaatctggtatgtatcttacattgatagcacatctcactttgtactagccacattgcaagtgctcagtagccacatgtggctagtggctactgcactggacagcacagttctaggttccaccctaacacccaagtcctgtggattagaatcccagaatcagagctggaagtaaacatagagatcaaacctccttttaaaaatgaggacgctgaggcacagagtttaaatggcttgcatgaggtcatacagctaaattcagcctcaacagggtcttctgattccaggcactcttcccactccactacattactgtagtggtaattcttagggttaaaaaaagtgtagagtaggccgggcgcagtggctcatgcctgtaatcccagcactttgggaggccgaagtgggcggatcacgaggtcaggagatcgagaccatcctggccaacatggtgaaaccccgtctctactgaaaatacaaagcaaaattagccaggtgtggtggcgggcgcctgtggtcccagctgctctggaggctgaggcagaatggcgtgaacccaggaggcagagatggcagtgagccaagatcgcgccactgcaccccagcctgggcgacagagcgagactccatctcaaaaaaaaaaaaaaaaaaaaaagaaaagaaaagaaaagtctagagaacattatattaagtggttattattgaagtagaccaaagtttataccataaggatatttttccttaaataccatgtttgaagaacaattatttattgatccttgaatctgtaagatcaaataacaagtctctatccatgttaccaaatttaaccttttgaaaataataaactttaaaatatcagatgtgttattacaggatgatacttggaatcaagtgaaatgagttatatggtcatcactaaatttagaaatctattgtgaaacaaagacaaacaggaaagtacagaatagagacttttagtaaataaatggaatttaaaagaaagtgtttatttacagtgtcacgacagaaaaggatgtctttgttgtcatagtctttgagggatctccgtaaaatctggggcacaggtacaagaaatagccaatatttagttcccagaccatgtttagtagtgtccagtttcagatcatgctgccaagaggtatctccccctcaggtgggtcatcactgagccctggaattggagactcatacttgcccagcacaatgttacgggcagacaggccgacatctatgattagctagaagccataaagaaaagctgctaagtggccactaggtgccacttttctgtttttgtaatgctttcattagcagatcttttttttccaagctccatggggcctatgagaggcatttatgatttttgtgcctacaataagtcagcctgtctggtgtgagttgttttatgagaaatgctttccaagggaggtctaggaagatcctgacacataagaactttggcttagagagctttccaggtgtagtgccaataaaaactgacctggaaagaaaacctgcccagcacggaacatgctttctgaactcacttgagagtgtatggtgtatgtcacttctcatatattcttgagtttagatttgtcttttatacaatttttagctcttttccagttcacttgtgctcgtctgtatattggtatttttaaatttttgtggtaaataatgaaaagagtgaaattatattttataattactcatttgtagtttttttttttaatttaataaacttcctccaaaaagtgctcccttaaaa

SEQ ID NO: 3552 - protein, 602 aa, Homo sapien
MAAEEEAAAGGKVLREENQCIAPVVSSRVSPGTRPTAMGSFSSHMTEFPRKRKGSDSDPSQVEDGEHQVKMKAFREAHSQTEKRRRDKMNNLIEELSAMIPQCNPMARKLDKLTVLRMAVQHLRSLKGLTNSYVGSNYRPSFLQDNELRHLILKTAEGFLFVVGCERGKILFVSKSVSKILNYDQASLTGQSLFDFLHPKDVAKVKEQLSSFDISPREKLIDAKTGLQVHSNLHAGRTRVYSGSRRSFFCRIKSCKISVKEEHGCLPNSKKKEHRKFYTIHCTGYLRSWPPNIVGMEEERNSKKDNSNFTCLVAIGRLQPYIVPQNSGEINVKPTEFITRFAVNGKFVYVDQRATAILGYLPQELLGTSCYEYFHQDDHNNLTDKHKAVLQSKEKILTDSYKFRAKDGSFVTLKSQWFSFTNPWTKELEYIVSVNTLVLGHSEPGEASFLPCSSQSSEESSRQSCMSVPGMSTGTVLGAGSIGTDIANEILDLQRLQSSSYLDDSSPTGLMKDTHTVNCRSMSNKELFPPSPSEMGELEATRQNQSTVAVHSHEPLLSDGAQLDFDALCDNDDTAMAAFMNYLEAEGGLGDPGDFSDIQWTL

SEQ ID NO: 3553 - DNA, 2589 bp, Homo sapien
cggcccgctggagaggaagcccgagagctgccgcgcgcctgccggacgagggcgtagaagccaggcgtcagagcccgggctccggtggggtcccccacccggccctcgggtcccccgccccctgctccctgcccatcccagcccacgcgaccctctcgcgcgcggaggggcgggtcctcgacggctacgggaaggtgccagcccgccccggatgggcatcgtggagccgggttgcggagacatgctgacgggcaccgagccgatgccggggagcgacgagggccgggcgcctggcgccgacccgcagcaccgctacttctacccggagccgggcgcgcaggacgcggacgagcgtcgcgggggcggcagcctggggtctccctacccggggggcgccttggtgcccgccccgccgagccgcttccttggagcctacgcctacccgccgcgaccccaggcggccggcttccccggcgcgggcgagtccttcccgccgcccgcggacgccgagggctaccagccgggcgagggctacgccgccccggacccgcgcgccgggctctacccggggccgcgtgaggactacgcgctacccgcgggactggaggtgtcggggaaactgagggtcgcgctcaacaaccacctgttgtggtccaagtttaatcagcaccagacagagatgatcatcaccaagcagggacggcggatgttcccattcctgtcatttactgtggccgggctggagcccaccagccactacaggatgtttgtggacgtggtcttggtggaccagcaccactggcggtaccagagcggcaagtgggtgcagtgtggaaaggccgagggcagcatgccaggaaaccgcctgtacgtccacccggactcccccaacacaggagcgcactggatgcgccaggaagtttcatttgggaaactaaagctcacaaacaacaagggggcgtccaacaatgtgacccagatgattgtgctccagtccctccataagtaccagccccggctgcatatcgttgaggtgaacgacggagagccagaggcagcctgcaacgcttccaacacgcatatctttactttccaagaaacccagttcattgccgtgactgcctaccagaatgccgagattactcagctgaaaattgataataacccctttgccaaaggattccgggagaactttgagtccatgtacacatctgttgacaccagcatcccctccccgcctggacccaactgtcaattccttgggggagatcactactctcctctcctacccaaccagtatcctgttcccagccgcttctaccccgaccttcctggccaggcgaaggatgtggttccccaggcttactggctgggggccccccgggaccacagctatgaggctgagtttcgagcagtcagcatgaagcctgcattcttgccctctgcccctgggcccaccatgtcctactaccgaggccaggaggtcctggcacctggagctggctggcctgtggcaccccagtaccctcccaagatgggcccggccagctggttccgccctatgcggactctgcccatggaacccggccctggaggctcagagggacggggaccagaggaccagggtccccccttggtgtggactgagattgcccccatccggccggaatccagtgattcaggactgggcgaaggagactctaagaggaggcgcgtgtccccctatccttccagtggtgacagctcctcccctgctggggccccttctccttttgataaggaagctgaaggacagttttataactattttcccaactgagcagatgacatgatgaaaggaacagaaacagtgttattaggttggaggacaccgactaatttgggaaacggatgaaggactgagaaggcccccgctccctctggcccttctctgtttagtagttggttggggaagtggggctcaagaaggattttggggttcaccagatgcttcctggcccacgatgaaacctgagaggggtgtccccttgccccatcctctgccctaactacagtcgtttacctggtgctgcgtcttgcttttggtttccagctggagaaaagaagacaagaaagtcttgggcatgaaggagctttttgcatctagtgggtgggaggggtcaggtgtgggacatgggagcaggagactccactttcttcctttgtacagtaactttcaaccttttcgttggcatgtgtgttaatccctgatccaaaaagaacaaatacacgtatgttataaccatcagcccgccagggtcagggaaaggactcacctgactttggacagctggcctgggctccccctgctcaaacacagtggggatcagagaaaaggggctggaaaggggggaatggcccacatctcaagaagcaagatattgtttgtggtggttgtgtgtgggtgtgtgttttttctttttctttctttttattttttttgaatgggggaggctatttattgtactgagagtggtgtctggatatattccttttgtcttcatcactttctgaaaataaacataaaactgttaaaaaaaaaaaaaaaaa

SEQ ID NO: 3554 - protein, 535 aa, Homo sapien
MGIVEPGCGDMLTGTEPMPGSDEGRAPGADPQHRYFYPEPGAQDADERRGGGSLGSPYPGGALVPAPPSRFLGAYAYPPRPQAAGFPGAGESFPPPADAEGYQPGEGYAAPDPRAGLYPGPREDYALPAGLEVSGKLRVALNNHLLWSKFNQHQTEMIITKQGRRMFPFLSFTVAGLEPTSHYRMFVDVVLVDQHHWRYQSGKWVQCGKAEGSMPGNRLYVHPDSPNTGAHWMRQEVSFGKLKLTNNKGASNNVTQMIVLQSLHKYQPRLHIVEVNDGEPEAACNASNTHIFTFQETQFIAVTAYQNAEITQLKIDNNPFAKGFRENFESMYTSVDTSIPSPPGPNCQFLGGDHYSPLLPNQYPVPSRFYPDLPGQAKDVVPQAYWLGAPRDHSYEAEFRAVSMKPAFLPSAPGPTMSYYRGQEVLAPGAGWPVAPQYPPKMGPASWFRPMRTLPMEPGPGGSEGRGPEDQGPPLVWTEIAPIRPESSDSGLGEGDSKRRRVSPYPSSGDSSSPAGAPSPFDKEAEGQFYNYFPN

SEQ ID NO: 3555 - DNA, 1185 bp, Homo sapien
accgtcttccgccgcacgtggattcagcgcgatgcccaaatccaagcgcgacaagaaagtctccttaaccaaaactgccaagaaaggcttggaattgaaacaaaacctgatagaagagcttcggaaatgtgtggacacctacaagtaccttttcatcttctctgtggccaacatgaggaacagcaagctgaaggacatccggaacgcctggaagcacagccggatgttctttggcaaaaacaaggtgatgatggtggccttgggtcggagcccatctgatgaatacaaagacaacctgcaccaggtcagcaaaaggttgaggggtgaggtgggtctcctgttcaccaaccgcacaaaggaagaggtgaatgagtggttcacgaaatacacagaaatggactacgcccgagctggtaacaaagcagctttcactgtgagcctggatccagggcccctggagcagttcccccactccatggagccacagctcaggcagctgggcctgcccaccgccctcaagagaggtgtggtgactctgctgtctgactacgaggtgtgcaaggagggcgatgtgctgaccccagagcaggctcgcgtcctgaagctttttgggtatgagatggctgaattcaaggtgaccatcaaatacatgtgggattcacagtcgggaaggttccagcagatgggagacgacttgccagagagcgcatctgagtccacagaagagtcagactcagaagatgatgactgaaagggactcgggactgaaggtctcctggaagcttctgggtctcactggaccatcaggactgctgccgcccctctggagagagcagctttttatttgtctgtagacagggaacatgatgggcactgacctcctgtaaagaataaaactgtgggccgggcgcggtggctcacgcctggaatcccagcactttgggaagccgaggtgggcagatcataaggtcaggagattaagaccatcctggctaacacggtgaaaccccgtctctactaaaaatagaaaaaaaaactagttgggcatagtggcatgtgcctgtagtcccagctactcaggaggctgaggcaggagaatcacttgaacccgggaggtggaggttgccgtgagttgagattggaccactgctctccagcctgggcaacagagtaaaactctgtccc

SEQ ID NO: 3556 - protein, 239 aa, Homo sapien
MPKSKRDKKVSLTKTAKKGLELKQNLIEELRKCVDTYKYLFIFSVANMRNSKLKDIRNAWKHSRMFFGKNKVMMVALGRSPSDEYKDNLHQVSKRLRGEVGLLFTNRTKEEVNEWFTKYTEMDYARAGNKAAFTVSLDPGPLEQFPHSMEPQLRQLGLPTALKRGVVTLLSDYEVCKEGDVLTPEQARVLKLFGYEMAEFKVTIKYMWDSQSGRFQQMGDDLPESASESTEESDSEDDD

SEQ ID NO: 3557 - DNA, 1330 bp, Homo sapien
ttttttttttcctgtgtcagcaagatcagtcttcatgaaatcctgctaaattccctgtgaaatataataagcttaagacattttagagaaccaaatgctgtttatgatacagtttagtagagttgtaatatatttcagcacagaattttagaatactatgggggctgattttcaattttgtaagagaaattatgagcatagtttatatagtcttttatttgtaattgtttacgtgatttcagaagtaatatgcttaagttattctaatgtttttaaagctagagagtctgaaaagagggaagaagaaagaaaagtgtttaaattgatctcttttgaatttaaaatgcatattaagtataactagaacataaaatgaagaatttaaattctcatcttattcctagaattatacctataatatgtatcattacttataacaattcatattttaattttgcatggcacataatctcttctgtgagttggatttttaggtggtgggaatttaagcataaattctcataactttcttggggtcaatttaatattaataagtgtagtaagtaataatacccagcttgagacctcatgtacttgttgcatttggatttaaagctcatttcctatagaagagctgtagaaatcagtcatgtagtttcataaactccttcatgcttgttaataattttcaagaatcttaaaataaattacaggaatattgttatgaagtagtagaagcagtatggtataggggagaaagtgattgtagttgggatctgaggatagtctttactttgctattaactagctgtgtgaccttgggcaagttgcttatctctgcttcagttccataaactaagaattacagagctgaaccggatcttggaagcaatctagtacaaacctctcattttacagatgaggaagcagataatttgcacaggctttcactgtaagacagttgggcccaaaattcagttttctgactctcaggttggttttttttttccattatactttacagcctcttttcatctgtaaaatgagagcattggattagaggctctcaaaggtctcttccagctcaaaaatattgtcattcctgtgacattagtcgtaatataatttattaggggaaagtttgtagcttttatttattggtgaaagaaatgtttcttgaagaggcagtataacctttgcaaggttatattttgtttttttaagagaatatcatcaggcgaggtgctatgtctcaggcctgtaatcccagctttgggagaccaaggcaagaggattgcttgagtccaggagtttgagactagcctgatcc

SEQ ID NO: 3558 - protein, 68 aa, Homo sapien
MGADFQFCKRNYEHSLYSLLFVIVYVISEVICLSYSNVFKARESEKREEERKVFKLISFEFKMHIKYN

SEQ ID NO: 3559 - DNA, 2000 bp, Homo sapien
acaaaagataggaagaaccttaaaaatatagatgccttttatgcagtgataaaatgtctagatatttatactgtggtgattattaggaatatgtgcaaagattggctattaggatgttcattacagtgttgtttaataattataaaaggacagaaagcaatgtggactcaaaaataggaaaagaatttaaataaatcctagtgtacccgttatacatgaaattatggaaatatgaccctgagcatggaaatatgtacatgagaatgtctaaaagctagttcattttgaaaaacaaaataatgtcacctcatattatttatagtatataaagatgattttaagagtggcagtgtctgggattataggtgattgtatttcttcccttttgcacatctatgttctctcatttgtattgtgtggggagaagtgactttttttataaaaagaaaaaggtatatgcatcccagcagagaagcactggctccacccagtacctgcctcctcatgccaccctctcaagccaaaagccgggggaagcccaggcaccttgaccatgaccgcccgagactcacacttcttctttctcatcagggaaggaaagcccccctgtaagcgatactccagatgagggcgatgagcccatgccgatccccgaggacctctccaccacctcgggaggacagcaaagctccaagagtgacagagtcgtgggtaagtgggtcaccagcggcctctgtgcctgtgaaacctttatctctttgtatttttccaagacagtgatgaagggatgcaagtcattttatccattgtgttccctcaactggcatattaaagaaatatggcacaaagatcagcaggatgggggtcctctggtgtgtgggaggatggacactcacaggccagcatggccgtgagagccacacaccccgcaaaatgtccaagttgaggagcaatcctgcccagggacgcgtctctgtcactgtcctctgtcctcactgcacttgcaggaatatcaaatgttatggattgtagatcgtgaaaattacacacttacgtgttttggcaacagtgcttttcagtgtttggggttagaacaagccacatctggccattttatgttatccctctaatctctagttcttaaatttcagatttaactgaaaatagaaagtttcataaatggtaatttttaaatgttagaaaaaaatcaaagcacacatttacataccttttccataaaaaagtgtgtgtgaaaccatctgcaactccactggttaacttacacatgcgacagtttgtgtttggaaaacttcacccaccctctttatttcaagaaaccaaagacggagagaagttcagtgaattaaccaaggtgaaatgacagagtcagaattgaactgaatttctgactgaaaaactagttctcgctccattataccatgttctaatgagctaatgagtcaacagttccctggaatacctgttttcttctttaaaaagagaaagagctgtgatactgagagctacctattggcataaaagaatatgaaggacatacaggtaaaatgaggtagactggatcaatgtgggtcagctacataagcccccatagccaaggagggaacatgtatgtaaaattctcaggcttatgagaatcacaactgtatgtctataggacatcctaatgcaataatgggaaaatgtgataactgaattttatctacatgtatagaaaacatattttgggccgggcatggtggctcaagcttgtaatcccagcactttgggaggccgaggctggcggatcacaaggtcaggaaatcgagaccatcctggctaacacggtgaaaccctgtctctactaaaaatacaaaaaattagccgggcgtagtggtgggcgcctgtagtcccagctactcgggaggctgaggcaggagaatggcgtgaacccggcaggcggagcttgcagtgagccgagattgcgccactgcactccagcc

SEQ ID NO: 3560 - protein, 90 aa, Homo sapien
MPIPEDLSTTSGGQQSSKSDRVVGKWVTSGLCACETFISLYFSKTVMKGCKSFYPLCSLNWHIKEIWHKDQQDGGPLVCGRMDTHRPAWP

SEQ ID NO: 3561 - DNA, 4826 bp, Homo sapien
gggtcgaggtcgacggtatcgataagttttttttttttttttttttttttttttcctttcccctccccctccctctccaagccggaggggtcctgaggtgacagcgcctgcaactgaaatttcagcagcgggagaagatggacaagagaaagctcgggcgacggccatcttcatccgaaatcatcacagaaggaaaaaggaaaaagtcatcttctgatttatcggagataagaaagatgttaaatgcaaaaccagaggatgtccatgttcaatcaccactgtccaaattcagaagctcagaacgctggactctccctttgcagtgggaaagaagcctaaggaataaagtcatctctctagaccataaaaataaaaaacatatccgagggtgtcctgttacttccaggtcatcaccagaaaggatacccagagttatattgacgaatgtcctgggaacggagttaggaagaaaatacataaggaccccacctgtaactgagggaagtttgagtgatacagacaacttgcaatcagagcaactttcttcatcatctgatggcagcctagaatcttatcaaaatctaaaccctcacaagagctgttatttatctgaaaggggctcacaacgaagtaagacagtagatgacaattctgcaaagcagactgcgcacaataaagaaaaacgaagaaaggatgatggcatttctcttttaatatctgatactcagcctgaagaccttaacagtggaagtagaggttgtgatcatctcgaacaggaaagcagaaacaaggatgttaaatattctgattcaaaagtggaactcactctgatttccaggaagacaaagagaaggcttagaaataatttacctgattctcaatattgtacttctttggataagtcaacagaacagacaaaaaaacaagaagatgactcaacaatatccactgagtttgaaaggccaagtgaaaactatcatcaggatccaaaactgcctgaagaaattacaactaaacctacaaaaagtgattttactaagctatcctcacttaacagtcaggagttgactttgagtaatgccaccaaaagtgcctctgccggttcaaccactgaaaccgttgagtactctaattccattgatattgtggggatttcttccctggttgagaaggatgagaatgagttgaataccatagaaaagcctattctaagaggacataatgaagggaaccaatcactgatctcagctgaaccaattgttgtttccagtgatgaagaaggacctgttgaacataaaagttcagaaattcttaagttacaatctaagcaagaccgtgagacaactaatgaaaatgagagtacttctgaatcagcattgttagaactaccattgattacatgtgaatctgtacagatgtcatctgaattatgcccatataatcctgtcatggagaacatttccagtattatgcctagtaatgagatggatctacaactggattttatatttacttctgtttatattggtaaaataaaaggagcttctaaaggttgtgttacaatcacaaaaaaatatattaagatcccatttcaagtgtccctgaatgagatttcattgctagtggataccacacatttaaagcggtttgggttatggaaaagtaaggatgataatcacagtaaaaggagtcatgctattcttttcttctgggtctcttcagattatcttcaagagattcagacccaattagaacactctgtattaagccagcaatcaaaatctagtgaattcattttccttgaactacacaatcctgtttcacagagagaagaattgaagctgaaagatattatgacggaaataagtataatcagtggagaattagagctttcttacccgttgtcttgggttcaggcatttcctttgtttcagaacctctcttcaaaagaaagttcttttattcattattactgtgtttcaacttgttctttccctgctggtgttgctgttgctgaagaaatgaagctgaaatcagtatctcagccctcaaacacagatgcggccaagcctacttacaccttcctgcagaagcaaagtagcggttgctactccctttctattacatctaatccagatgaagaatggcgggaagtcaggcacactggacttgttcagaagttgattgtatatcctccaccacctactaaggggggattgggagtaactaatgaagatctggagtgtttagaagaaggagagtttcttaatgatgtaatcattgatttttaccttaagtatcttatattggagaaggcatcagatgaacttgttgaacgaagtcacatttttagtagctttttctataaatgcttgacaagaaaggaaaataatttaacagaagataatccaaatctttcaatggcacagagaagacataaaagagtaagaacatggactcgtcacataaacatttttaataaagattacatctttgtacctgtaaatgagtcgtctcactggtatctcgcagtcatttgttttccatggttagaagaagctgtgtatgaagattttccacaaactgtatcccagcagtcccaggctcagcagtcccaaagtgacaacaaaacaatagataatgatctacgtactacttcgacactgtctttgagtgcagaggattcccaaagtaccgagtcgaatatgtcagtaccaaagaaaatgtgtaaaaggccatgtattcttatactagactccttgaaagctgcttctgtacgaaacacagttcagaatttacgagagtatttagaggtagagtgggaagttaaactaaaaactcatcgtcaattcagcaaaacaaacatggtggatctatgccctaaagttcctaaacaggacaatagcagtgattgtggagtatatttattgcagtatgtggaaagcttcttcaaggatcctattgttaactttgaacttccaattcatttggagaagtggtttcctcgtcatgtaataaagaccaaacgggaagatattcgagagctcatcttgaaacttcatttacagcaacagaagggcagcagtagctagttaatctgtacaaacatgacacagatgttctctaagattactggaaagccccttaccagcatttgtgttagccagctcacagagaagaaaataacttgcagtagttttataataagtcattggaacattatttaaaatatgtaggacacattattagaattgttgggatctcatagatggaatgggaatgggggtgatatagataaacttactagatataaattaaaattttataaatatttcatatttttctgagtaaatatgattggattatgcaacagcatatgtaatatgggaatgttttgtagataataaaacttacatgatctgtacttccacgtgactgggtgctgaggggagttaaagcctccctggtgccagccccagtgcttgtcaaatttgctgacaggtcacatcatattgtaattctattctttgcagctcaagcatgcagtatgaatactgtgtattttttaaaaaaataatttagtatcaaggcttcagaaaatgccatttacggcatcccttctgtatgtaacaaaaagacattcataatgttaggaagatgataaaaattcgctcttttaaagtgcagcttattattctcaattgctaaatacgattactctgctttttttttttcatttcttttgatgtcatatgtgagtatcttataatttagttcatttgttcagggtaaaatttgaaacaaaaaattttacctgtgcaaaatagttttttaaaaattatacatgtagctcaacttgaggtactgctatataaatattcactcacattatcacggaatttatgtatagtttctctaatatagaagataaaattggtgtcctcataactttaacaaagaaaaccctcagtcctatttattaatgggtagaattaaatatataattttatagctcagtttacccagtattcatctgcaaagccagattgctctcattgcttttatatttttaaattgtagcttttagagacctatgatcctcatggaacttaattttttattaaatattcaggtaacagttctgaattcatgtgataatggtggcattatatatgattaaacacttcagaactttctaatgttatcaggagtattttgagggagatatgattatattgtattttctcagataagaaaaatgttttttaacaatattattttaatctgttttaagcatctcttagatttacattataactacataaagcagtgaagcaaaggcaaattaagataaagctagaaagtctgaacattttatttcaaaatcatacgaatcggggtcagttaagcctcagtattcttagcttttgttgattttggcactatctttatattattaaatatatttgttgtttggatatttcatataaagatggctataattacatatttcattcccaatttgtgtgtgttggggggtacttttaaaggtgactattgttttgtacatctaattttgggaaaccaagtctataagacatcttgtgatttcttaatgtttttgtttgtatgtttttcaaagatatcactgtcctttatcatgttttgaagattgtttaaaattcattttcctaaattaatgtgcaagtaatgttttgaggatatcggtgttttatattaaacatatttccaattcaaaaaaaaaaaaaaaaaaacttatcgataccgtcgacctcgatgatgatgatgatgatgatgatgtcgac

SEQ ID NO: 3562 - protein, 984 aa, Homo sapien
MDKRKLGRRPSSSEIITEGKRKKSSSDLSEIRKMLNAKPEDVHVQSPLSKFRSSERWTLPLQWERSLRNKVISLDHKNKKHIRGCPVTSRSSPERIPRVILTNVLGTELGRKYIRTPPVTEGSLSDTDNLQSEQLSSSSDGSLESYQNLNPHKSCYLSERGSQRSKTVDDNSAKQTAHNKEKRRKDDGISLLISDTQPEDLNSGSRGCDHLEQESRNKDVKYSDSKVELTLISRKTKRRLRNNLPDSQYCTSLDKSTEQTKKQEDDSTISTEFERPSENYHQDPKLPEEITTKPTKSDFTKLSSLNSQELTLSNATKSASAGSTTETVEYSNSIDIVGISSLVEKDENELNTIEKPILRGHNEGNQSLISAEPIVVSSDEEGPVEHKSSEILKLQSKQDRETTNENESTSESALLELPLITCESVQMSSELCPYNPVMENISSIMPSNEMDLQLDFIFTSVYIGKIKGASKGCVTITKKYIKIPFQVSLNEISLLVDTTHLKRFGLWKSKDDNHSKRSHAILFFWVSSDYLQEIQTQLEHSVLSQQSKSSEFIFLELHNPVSQREELKLKDIMTEISIISGELELSYPLSWVQAFPLFQNLSSKESSFIHYYCVSTCSFPAGVAVAEEMKLKSVSQPSNTDAAKPTYTFLQKQSSGCYSLSITSNPDEEWREVRHTGLVQKLIVYPPPPTKGGLGVTNEDLECLEEGEFLNDVIIDFYLKYLILEKASDELVERSHIFSSFFYKCLTRKENNLTEDNPNLSMAQRRHKRVRTWTRHINIFNKDYIFVPVNESSHWYLAVICFPWLEEAVYEDFPQTVSQQSQAQQSQSDNKTIDNDLRTTSTLSLSAEDSQSTESNMSVPKKMCKRPCILILDSLKAASVRNTVQNLREYLEVEWEVKLKTHRQFSKTNMVDLCPKVPKQDNSSDCGVYLLQYVESFFKDPIVNFELPIHLEKWFPRHVIKTKREDIRELILKLHLQQQKGSSS

SEQ ID NO: 3563 - DNA, 3204 bp, Homo sapien
agcgggtgctgggaaacatggcgaccgagggaatgatccttactaaccacgaccatcaaatccgtgtcggagtccttacagtgagtgatagttgcttcaggaatcttgcagaagaccgcagtgggataaatctcaaagatctcgtacaagatccttctttgttgggtgggactatatcagcatacaagatagtaccagatgaaatagaagaaatcaaggaaaccctgatagattggtgtgatgaaaaggaacttaatttgatattaacaactggaggaacaggatttgcaccacgagatgtcactccagaggccacaaaagaagtaatagaacgggaagcaccagggatggccctggcaatgctgatgggatcacttaatgttacacctctgggcatgctctctaggcctgtatgtggaatcagagggaaaacgcttataattaacctgccaggtagcaagaaaggatctcaggaatgctttcaattcatactgccagctctacctcatgccattgaccttttacgtgatgccattgtaaaagtaaaggaggtgcatgatgaacttgaagatttgccttccccacctccccctctttcccctcctcctactaccagcccccataaacagacagaagacaaaggagttcaatgtgaggaagaggaagaagagaagaaagacagtggtgttgcttcaacagaagatagttcctcatcacatataactgcagcagccattgctgccaagaagcatccattctacaccagtcctgctgttgtcatggcacacggtgaacagcccatccctggtctcatcaattattcccatcattcaacagatgaacggattccagactccatcatttctcgtggtgttcaggtgctcccacgagacacagcctccctcagcactactccttcagaatcgcctcgtgctcaggctacatctcgcctctctacagcttcctgcccaacaccaaaagtccagtccaggtgcagcagcaaggagaacattctcagagccagtcacagtgctgtcgatatcaccaaggtggctagaagacatcgcatgtctccttttcctctgacatctatggacaaagcctttatcacagtcctggagatgactccggtgcttgggacagaaatcatcaattaccgagatggaatggggcgagtccttgctcaagatgtatatgcaaaagacaatttaccccccttcccagcatcagtaaaagatggctatgctgtccgagctgctgatggcccaggagatcgtttcatcattggggaatcccaagctggtgaacagccaactcagacagtaatgccaggacaagtcatgcgggttacaacaggtgctccaataccctgcggtgctgatgcagtagtacaagtggaagataccgaacttatcagggaatcagatgatggcactgaagaacttgaagtgcgaattctggtgcaagctcggccaggccaagatatcaggcccatcggccatgacattaaaagaggggaatgtgttttggccaaaggaacccacatgggcccctcagagattggtcttctggcaactgtaggtgtcacagaggttgaagttaataagtttccagtggttgcagtcatgtcaacagggaatgagctgctaaatcctgaagatgacctcttaccagggaagattcgagacagcaatcgttcaactcttctagcaacaattcaggaacatggttaccccacgatcaacttgggtattgtaggagacaacccagatgacttactcaatgccttgaatgagggtatcagtcgtgctgatgtcatcatcacatcagggggtgtatccatgggggaaaaggactatctcaagcaggtgctggacattgatcttcatgctcagatccattttggcagggtttttatgaaaccaggcttgccaacaacatttgcaactttggatattgatggtgtaagaaaaataatctttgcactacctgggaatcctgtatcggctgtggtcacctgcaatctctttgttgtgcctgcactgaggaaaatgcagggcatcttggatcctcggccaaccatcatcaaagcaaggttatcatgtgatgtaaaacttgatcctcgtccagaataccatcggtgtatactaacttggcatcaccaagaaccactaccttgggcacagagtacaggtaatcaaatgagcagccgtctgatgagcatgcgcagtgccaatggattgttgatgctacctccaaagacagaacagtacgtggagctccacaaaggcgaggtggtggatgtcatggtcattggacggctatgatggtcaccagcaggagaaagctttgatgcatgtccacatatcattgactgtatcctgtaatatgcaacggcacagctagttttcccgatttggataaaagttgatctgtatagtcaacatcttgaactatatttcaaatgaatttaaatatcttttaaagaaaaaaacacctaaaaataaatcttaacagaaaattctgttctgattatatcaaggcaaatttttcctttcttgcaaattgctttgtgtgttcaatgctaggtctgatagcgatagcttttagtagacagcggtaggtgcctgcagaacttgtgtttttctcatctttaaaatacaactacttatgctcttaaatcaaggctgtctgcttatttatactagcgtaggcaacacttggatttcccttcttagtatgcttcataactgctttacagagagcttttgcttgttctttctcatgtatctcgtgtttatgtgcacagtgccaaaagaagactgactgggtggaggctctgccttgcctcaagaaccatcccctgcagagcatccagggaggtttctcgccccaatagcctcacggcacagtactcttgggcagtaactggacaccttttatttgaagaaacaaactgaagaaaaaatgcttccttaagtgctgacagcctttttaaccaatacatttaaaattgtacagaacaaaaaaataaaatcaaagactgatcttgtacagatattagtgttaccagcattcatgtggaagtcaagagcaaagacaaaataatgttaaacaattctgtaccataacattttctgtaatgatactgaaacttaatgaataaaaaaattccttgatcattatttaaaaaaaaaaaaaaaa

SEQ ID NO: 3564 - protein, 769 aa, Homo sapien
MATEGMILTNHDHQIRVGVLTVSDSCFRNLAEDRSGINLKDLVQDPSLLGGTISAYKIVPDEIEEIKETLIDWCDEKELNLILTTGGTGFAPRDVTPEATKEVIEREAPGMALAMLMGSLNVTPLGMLSRPVCGIRGKTLIINLPGSKKGSQECFQFILPALPHAIDLLRDAIVKVKEVHDELEDLPSPPPPLSPPPTTSPHKQTEDKGVQCEEEEEEKKDSGVASTEDSSSSHITAAAIAAKKHPFYTSPAVVMAHGEQPIPGLINYSHHSTDERIPDSIISRGVQVLPRDTASLSTTPSESPRAQATSRLSTASCPTPKVQSRCSSKENILRASHSAVDITKVARRHRMSPFPLTSMDKAFITVLEMTPVLGTEIINYRDGMGRVLAQDVYAKDNLPPFPASVKDGYAVRAADGPGDRFIIGESQAGEQPTQTVMPGQVMRVTTGAPIPCGADAVVQVEDTELIRESDDGTEELEVRILVQARPGQDIRPIGHDIKRGECVLAKGTHMGPSEIGLLATVGVTEVEVNKFPVVAVMSTGNELLNPEDDLLPGKIRDSNRSTLLATIQEHGYPTINLGIVGDNPDDLLNALNEGISRADVIITSGGVSMGEKDYLKQVLDIDLHAQIHFGRVFMKPGLPTTFATLDIDGVRKIIFALPGNPVSAVVTCNLFVVPALRKMQGILDPRPTIIKARLSCDVKLDPRPEYHRCILTWHHQEPLPWAQSTGNQMSSRLMSMRSANGLLMLPPKTEQYVELHKGEVVDVMVIGRL

SEQ ID NO: 3565 - DNA, 2616 bp, Homo sapien
gaagagtggtgtttttttcttcttcttcttcttttgtggtttcacatagcaaatgagtgacagtctctacttacagacaaagtgagacgtcaggcattgagacatagctccatagaattcagtttctgagaaccagccagaagcatgcagtgacattgcacaatctgcctctgaagctggagatactagctgcagagctcaggggagctgctccacatcaccgacatgaagggaacaggcatcatggactgtgcgcccaaggcactcctggccagggcactttatgacaactgccctgactgctctgacgagctggctttcagcagaggggacatcctgaccattctggagcaacacgtgccagaaagcgagggttggtggaagtgtttgctccatgggaggcaaggcctggcccctgccaaccgcctccaaatcctcacggaggtcgctgcagacaggccgtgccccccattcctgagaggcctggaagaagctcctgccagctcagaggagacctatcaggtgcccactctaccccgccctcccactccaggccccgtttatgagcagatgaggagttgggcggaggggccccagccccctactgcccaagtctatgaattccccgaccctcccaccagtgccagaatcatctgtgaaaagactctcagctttccaaaacaggccatcctcacgcttcccagacctgtccgggcctcactgccgactctgccttcccaggtgtatgacgtgcctacccagcaccggggccccgtggtcctgaaggagccagagaagcagcagttatatgacataccagccagccccaagaaggcaggactccatcccccagacagccaagcaagtgggcagggtgttcccctgatatcagtgactaccttaagaagaggcggttacagcacattaccaaatcctcagaaatcggaatggatttatgacactccagtgtctccaggaaaggccagcgtcagaaacacgcctctcaccagctttgcggaagaatcaaggccccacgctctccccagttccagctccactttctacaatcctccaagtggcagatccaggtccctcactccacaactgaataacaatgtgcccatgcagaaaaaactcagccttccagaaattccttcttatggctttcttgtacccagaggcacatttcctttggatgaagatgtcagcaacaaggttccttcaagcttctctgattccccgagtggacagcagaacaccaagcccaatatagacatccctaaagcaacgtcgagtgtttctcaggctgggaaggagctggagaaagccaaggaggtgtcagagaattccgcgggccataattcctcatggttctccagacggacaacttccccatctcctgaaccggacagattatcaggttccagttctgacagcagagctagcatcgtttcctcgtgctccaccacatccaccgacgactcctccagctcttcctcggaggagtcagcaaaggagctctccttggacctggatgtggccaaggagacagtgatggctctgcagcacaaggtggtcagctctgtcgctggcctgatgctctttgtcagcaggaagtggagattccgagactatctggaggccaacattgatgcaatccacaggtccactgatcacatagaagcctctgtaagagaatttctggattttgcccgaggagtccatgggactgcctgtaacctcactgacagtaaccttcagaacagaattcgggaccagatgcagaccatctccaactcctaccgcatcctgcttgaaacaaaggaaagcttggataatcgcaattggcctctggaagttcttgtgactgacagtgtccagaacagcccagatgaccttgagaggtttgtcatggtggcacggatgcttccagaagacatcaagaggtttgcctccattgtcattgccaatggaaggctcctttttaagcggaactgtgaaaaggaagagactgtgcagttgaccccaaatgcagaatttaagtgtgaaaaatacatccagcctccccaaagagaaactgaatcacaccaaaagagtaccccttccactaagcaaagggaagatgaacactcttctgaactattaaagaaaaatagagcaaatatctgtggacagaatcctggccctcttatacctcagccttcgagtcaacagactcctgagaggaaaccccgcttatctgaacactgccggctgtactttggggcgctcttcaaagccatcagcgcatttcacggcagcctcagcagcagccagcccgcggagatcatcactcagagcaagctggtcatcatggtgggacagaagctggtggacacgctgtgcatggagacccaggagagggacgtgcgcaatgagatcctccgcggcagcagtcacctctgcagcctgctcaaggacgtagcgctggccactaagaatgccgtgctcacataccccagccctgccgcgctggggcacctccaggcggaggctgagaagctggagcaacacacgcggcagttcagagggacactgggatgaggactgtctacctcccttcctcctctgctcacc

SEQ ID NO: 3566 - protein, 785 aa, Homo sapien
MKGTGIMDCAPKALLARALYDNCPDCSDELAFSRGDILTILEQHVPESEGWWKCLLHGRQGLAPANRLQILTEVAADRPCPPFLRGLEEAPASSEETYQVPTLPRPPTPGPVYEQMRSWAEGPQPPTAQVYEFPDPPTSARIICEKTLSFPKQAILTLPRPVRASLPTLPSQVYDVPTQHRGPVVLKEPEKQQLYDIPASPKKAGLHPPDSQASGQGVPLISVTTLRRGGYSTLPNPQKSEWIYDTPVSPGKASVRNTPLTSFAEESRPHALPSSSSTFYNPPSGRSRSLTPQLNNNVPMQKKLSLPEIPSYGFLVPRGTFPLDEDVSNKVPSSFSDSPSGQQNTKPNIDIPKATSSVSQAGKELEKAKEVSENSAGHNSSWFSRRTTSPSPEPDRLSGSSSDSRASIVSSCSTTSTDDSSSSSSEESAKELSLDLDVAKETVMALQHKVVSSVAGLMLFVSRKWRFRDYLEANIDAIHRSTDHIEASVREFLDFARGVHGTACNLTDSNLQNRIRDQMQTISNSYRILLETKESLDNRNWPLEVLVTDSVQNSPDDLERFVMVARMLPEDIKRFASIVIANGRLLFKRNCEKEETVQLTPNAEFKCEKYIQPPQRETESHQKSTPSTKQREDEHSSELLKKNRANICGQNPGPLIPQPSSQQTPERKPRLSEHCRLYFGALFKAISAFHGSLSSSQPAEIITQSKLVIMVGQKLVDTLCMETQERDVRNEILRGSSHLCSLLKDVALATKNAVLTYPSPAALGHLQAEAEKLEQHTRQFRGTLG

SEQ ID NO: 3567 - DNA, 2229 bp, Homo sapien
ggcacgagggccaggaacgccagccgttcacgcgttcggtcctccttggctgactcaccgccctcgccgccgcaccatggacgcccccaggcaggtggtcaactttgggcctggtcccgccaagctgccgcactcagtgttgttagagatacaaaaggaattattagactacaaaggagttggcattagtgttcttgaaatgagtcacaggtcatcagattttgccaagattattaacaatacagagaatcttgtgcgggaattgctagctgttccagacaactataaggtgatttttctgcaaggaggtgggtgcggccagttcagtgctgtccccttaaacctcattggcttgaaagcaggaaggtgtgcggactatgtggtgacaggagcttggtcagctaaggccgcagaagaagccaagaagtttgggactataaatatcgttcaccctaaacttgggagttatacaaaaattccagatccaagcacctggaacctcaacccagatgcctcctacgtgtattattgcgcaaatgagacggtgcatggtgtggagtttgactttatacccgatgtcaagggagcagtactggtttgtgacatgtcctcaaacttcctgtccaagccagtggatgtttccaagtttggtgtgatttttgctggtgcccagaagaatgttggctctgctggggtcaccgtggtgattgtccgtgatgacctgctggggtttgccctccgagagtgcccctcggtcctggaatacaaggtgcaggctggaaacagctccttgtacaacacgcctccatgtttcagcatctacgtcatgggcttggttctggagtggattaaaaacaatggaggtgccgcggccatggagaagcttagctccatcaaatctcaaacaatttatgagattattgataattctcaaggattctacgtttgtccagtggagccccaaaatagaagcaagatgaatattccattccgcattggcaatgccaaaggagatgatgctttagaaaaaagatttcttgataaagctcttgaactcaatatgttgtccttgaaagggcataggtctgtgggaggcatccgggcctctctgtataatgctgtcacaattgaagacgttcagaagctggccgccttcatgaaaaaatttttggagatgcatcagctatgaacacatcctaaccaggatatactctgttcttgaacaacatacaaagtttaaagtaacttggggatggctacaaaaagttaacacagtatttttctcaaatgaacatgtttattgcagattcttcttttttgaaagaacaacagcaaaacatccacaactctgtaaagctggtgggacctaatgtcaccttaattctgacttgaactggaagcattttaagaaatcttgttgcttttctaacaaattcccgcgtattttgcctttgctgctactttttctagttagatttcaaacttgcctgtggacttaataatgcaagttgcgattaattatttctggagtcatgggaacacacagcacagagggtaggggggccctctaggtgctgaatctacacatctgtggggtctcctgggttcagcggctgttgattcaaggtcaacattgaccattggaggagtggtttaagagtgccaggcgaagggcaaactgtagatcgatctttatgctgttattacaggagaagtgacatactttatatatgtttatattagcaaggtctgtttttaataccatatactttatatttctatacatttatatttctaataatacagttatcactgatatatgtagacacttttagaatttattaaatccttgaccttgtgcattatagcattccattagcaagagttgtaccccctccccagtcttcgccttcctctttttaagctgttttatgaaaaagacctagaagttcttgattcatttttaccattctttccataggtagaagagaaagttgattggttggttgtttttcaattatgccattaaactaaacatttctgttaaattaccctatcctttgttctctactgttttctttgtaatgtatgactacgagagtgatactttgctgaaaagtctttcccctattgtttatctattgtcagtattttatgttgaatatgtaaagaacattaaagtcctaaaacatctaaaaaaaaaaaaaaaaaaaaaaaaaaaaaaaaaaa

SEQ ID NO: 3568 - protein, 370 aa, Homo sapien
MDAPRQVVNFGPGPAKLPHSVLLEIQKELLDYKGVGISVLEMSHRSSDFAKIINNTENLVRELLAVPDNYKVIFLQGGGCGQFSAVPLNLIGLKAGRCADYVVTGAWSAKAAEEAKKFGTINIVHPKLGSYTKIPDPSTWNLNPDASYVYYCANETVHGVEFDFIPDVKGAVLVCDMSSNFLSKPVDVSKFGVIFAGAQKNVGSAGVTVVIVRDDLLGFALRECPSVLEYKVQAGNSSLYNTPPCFSIYVMGLVLEWIKNNGGAAAMEKLSSIKSQTIYEIIDNSQGFYVCPVEPQNRSKMNIPFRIGNAKGDDALEKRFLDKALELNMLSLKGHRSVGGIRASLYNAVTIEDVQKLAAFMKKFLEMHQL

SEQ ID NO: 3569 - DNA, 1499 bp, Homo sapien
tttaaactgctagaaaggaagagccgaatatttggctggagtgatttttagacatttctctaccttagggcaccagagaggttcacttgcccagggttccatagctggttggtgccagagtccgaacgagaaaccaggtcttctcagctcctgtcacccacagttttgcagacactgaatttatgaggtggattccattcaagcatgcacataactagcagacacttctcctaatcctcctcaattcccctttgcattgctcagataccacaatcctttgcaggttaaatcccttcaccttgtgaactcattaggcagggcaatgtatatgaatccctgagtccttaagaacgtccttaggctgtgttagaaatgcagttgccataggagtaaccggcccctgctgtcatttggatgttctctcttccccaaaatccagcaccaccttggttaagcacccaccatgtgcctgcccacctggctccttaggcaatgttacaattaaccaggttggttttgatgagggtctagggcaaaatttgaaccaccacaacagccaatgtgcacatccatgcagagggttcagagatggcctcggccaaggatgccaggcttcagctctggaaggagccctgggaggtgggagatctttgtataaaaattggaacccaaactataattcccattagggatatatatgctcacatcactcctgattcaaagctcagaagtggcctctcaggagaaataaaggtctctctctctctctctctctatctcacacacacacacacacacacacacacacagagagagagagagagagagagagagagagagagagagaggccagcattcaaaattcccatgcttagggaatccattgggacttctccccaggatgtactgaattcaaggaagctttctctaggtgtagcagaaactgctgctgtcatgtctctgctcaccaggacgtagcttctctctacagacctttatttctttccctggaggcttcagtccatgttgaagtgtaaactccactcagctccaggaggaatcgtgttttctttatcaccaggggcttcttctacgagttgcctttgatagggaggccaggaggaagataggcccaagctcaggggtgggatcggggagcaggaagcctgtgggctttagaatcgaggtattggtttctccctgtcaccgtcatccaccacctgtgtgaacttgagccatttatcgaacctcacggagccccaagtttctcatctgtaaacaaggggaatgagccctactttgtatggttgtcaagaggatttgagacaatatgtataaagcaatggacacgcagaggaagtcaataagtacaaggtaactctgaaaatgccaccaaagggaggctagggacaggaaagccatctccgccaacctcaagaacgtggccccgaagctgttccaggaactgggcatgtatgaagataaaaaaaaaaaaaaaa

SEQ ID NO: 3570 - protein, 129 aa, Homo sapien
MASAKDARLQLWKEPWEVGDLCIKIGTQTIIPIRDIYAHITPDSKLRSGLSGEIKVSLSLSLYLTHTHTHTHTQRERERERERERERPAFKIPMLRESIGTSPQDVLNSRKLSLGVAETAAVMSLLTRT

SEQ ID NO: 3571 - DNA, 2264 bp, Homo sapien
gggatcaggctcgtgaacatattcggcaaaacctagaaagtttcataagacaggactttccaggaactaaattgagcctgtttggctcctccaaaaatggatttgggttcaaacagagtgaccttgacgtctgtatgacaattaatgggcttgaaactgctgagggattggactgtgtcagaactattgaagaattagcaagagtcctcagaaaacattcaggcctgagaaacatcttacctattacaacagcaaaggtgccaattgtgaagttcttccatttgagaagtggtctggaagtagatatcagtttgtataacacattggcccttcataacacaaggcttttatctgcttattccgccattgatcccagagtgaagtatttgtgctataccatgaaagtatttacaaagatatacaaaggtgaaaagaaacctgaaatatttgttgatggctggaatatttatttttttgatcaaatagatgaactgcctacctattggtcagaatgtggaaaaaatacagaatctgttgggcagttatggttgggccttcttcgtttctacacagaggaatttgattttaaagaacatgttattagcatcaggagaaaaagtctgcttacaacttttaagaaacagtggacctcaaaatacattgttattgaagatccctttgatttgaatcataatcttggagctggattatcaaggaaaatgacaaattttataatgaaggcttttatcaatggtagaagagtatttggtattcctgtcaagggatttccaaaggactacccctcaaaaatggaatacttttttgatccagatgtgttaactgaaggagagctggccccaaatgatagatgttgtcgaatttgtggaaaaatcggacacttcatgaaggactgtcctatgaggagaaaagtaagacggcggcgagatcaggaagatgccctgaaccaaagataccctgagaacaaggaaaaaagaagcaaagaggacaaagaaattcacaacaagtacacagaaagggaggtgtcaacaaaagaagataagcccatacagtgcacacctcagaaagccaagccaatgcgggcagctgctgacctggggagggagaagatcctcaggccaccagtagaaaaatggaagagacaggatgacaaagacttaagagaaaaacgttgttttatttgtggaagagaagggcacattaaaaaggaatgcccacagtttaaaggctcttcaggtagcctttccagtaaatatatgactcagggaaaagcctcagcgaagaggacccagcaggaatcatgagggaaggaaaatgcagcactctaaatggccactcaggcgttcctattcactcggaaaattaggttcatttcacaggacacagcagtgtagatcaggcttcaacttaacatttaagggaaatgtcagatttttttttaatttaatgaaattgttaatgaggaaaaatttttaatatagtcttatctaccacacatccccatagatttaaggattttaatagaaagtcatgatgtatgtatttaagccacgttaaaagaaaaaatataactatggaccggtattcagtgaatacagtttcatggtttttaattctttcaaagcacattaaaaatggtgtgctgataaaccccaagtaaattaaccctttttccgtataaatccattttttgttttgaagaggggaaattatacttattgttgtttactgaatcctggtgtgaaagcatatcagatatgtatgaactgctactgctgtacttccgatttacggacatcattttattgctatttgtagacgtgataacatgaacatgagtacctatttatgtgggccttcagtggatgggcagtgccactcaggtctctggggtttccctctctaattttaagtaaattgacatataactactatgcttataaaaatgaagtaaggaaaacaagtagtcctgtttgccactaaaaacattttcaaaggaaaaataaaatgaaagtactttttactttttatgatactcagaaattaggatgaagaacttttaaaattgctgaaggtcaaagaggttatctctgccagtcacaagtgtggctggtgtcattctgggtctgactggagccctcctggactgtttctttaatttcaaaagccctgcagacatagtacctggtcagaactatgcctcggtttatttatcattttgaaataaaatcaaaatttcaacctgt

SEQ ID NO: 3572 - protein, 395 aa, Homo sapien
MTINGLETAEGLDCVRTIEELARVLRKHSGLRNILPITTAKVPIVKFFHLRSGLEVDISLYNTLALHNTRLLSAYSAIDPRVKYLCYTMKVFTKIYKGEKKPEIFVDGWNIYFFDQIDELPTYWSECGKNTESVGQLWLGLLRFYTEEFDFKEHVISIRRKSLLTTFKKQWTSKYIVIEDPFDLNHNLGAGLSRKMTNFIMKAFINGRRVFGIPVKGFPKDYPSKMEYFFDPDVLTEGELAPNDRCCRICGKIGHFMKDCPMRRKVRRRRDQEDALNQRYPENKEKRSKEDKEIHNKYTEREVSTKEDKPIQCTPQKAKPMRAAADLGREKILRPPVEKWKRQDDKDLREKRCFICGREGHIKKECPQFKGSSGSLSSKYMTQGKASAKRTQQES

SEQ ID NO: 3573 - DNA, 1858 bp, Homo sapien
ctgacctgctgggctgggacagcacaggacccacagatatctgctgccatccacactctccagattggtgtcctgggaccacgtggggatgctgctgtggcttcttgtcttctctgctctgggtatccaggcctggggtgattcctcctggaacaaaacacaagctaaacaggtatcagaggggctccagtacctatttgagaacatctcccagctcactgaaaaagatgtctccaccacggtctctcgcaaggcatggggggcagaagctgttggctgcagtattcagctgaccacgccagtgaatgtccttgttatacaccatgtccctggactggagtgtcacgaccagacagtctgcagccagagactgcgggaactgcaggcccatcatgtccacaacaacagtgggtgtgatgtggcctacaacttcctggttggggatgatggcagggtgtatgaaggtgttggctggaatatccaaggagtgcacacccaaggctacaacaacatctccctgggctttgccttcttcggcactaagaaaggccacagtcccagccctgctgccctgtcggccatggaaaacctaatcacctatgctgtccagaagggccacctgtcatccagttatgttcagccacttcttgggaaaggcgagaactgcctggcccctcggcagaagacaagcctgaagaagcttgccccggcattgtcccacggtctgtgtggggagccagggagaccactgtccaggatgactctcccagcgaagtatggcatcattatccacactgccgggaggacctgcaacatttctgatgagtgccgcctgctggtccgggacatccagtctttctacatagacaggctcaagtcatgcgacattggttataacttcctggtgggccaggatggcgccatttatgaaggggtgggctggaatgtccaaggctcctccacccctggctacgatgacattgccctgggcattaccttcatgggcaccttcacaggtataccacccaatgctgcagcactagaggcagcccaagacctgatccagtgtgccatggtcaaagggtacctgactcccaactacctgctggtgggccacagtgatgtggcccgaaccttgtctcctgggcaggctttgtacaacatcatcagcacctggcctcatttcaaacactgagagaagccccaggtccttctgagactgctttccctcccctgtcaggtctctcctgtcctaaccatccagcttggctcaacaccttttgccctcctcccctgccacacagtcctgtgcctcctttttcaggttgggatgatcatgcctctcctgccaacatcctccaagggcctccaaactcatagctggacattcacagccctctgagtctgagtccagatttcttctctccttacttcctctcccttggaaacccaactcctcagccaggtgagacaatgggctggttcttgtttcatttctctctctctctccattcccctctgcctggtgagccttcccctggtgtctgcctggcagcccccaccacccacctatcacccctcacccataactcaggtcaacgtgaccaaccttccttgcttacacataaacttgtatatatttggatgtagcccttatttaatggctgtcattatttatagatatgtctatccttgctacttggttgtgagtttctccaggggaggaactgtgttttattcatctctatgtcctctgtttctcagcagtgtctgaaatttaatgggttctactgatgtttattagagaaatggatgaataaatgaatgaagagatccaaaaaaaaaaaaaaaaaaaaaa

SEQ ID NO: 3574 - protein, 368 aa, Homo sapien
MLLWLLVFSALGIQAWGDSSWNKTQAKQVSEGLQYLFENISQLTEKDVSTTVSRKAWGAEAVGCSIQLTTPVNVLVIHHVPGLECHDQTVCSQRLRELQAHHVHNNSGCDVAYNFLVGDDGRVYEGVGWNIQGVHTQGYNNISLGFAFFGTKKGHSPSPAALSAMENLITYAVQKGHLSSSYVQPLLGKGENCLAPRQKTSLKKLAPALSHGLCGEPGRPLSRMTLPAKYGIIIHTAGRTCNISDECRLLVRDIQSFYIDRLKSCDIGYNFLVGQDGAIYEGVGWNVQGSSTPGYDDIALGITFMGTFTGIPPNAAALEAAQDLIQCAMVKGYLTPNYLLVGHSDVARTLSPGQALYNIISTWPHFKH

SEQ ID NO: 3575 - DNA, 2065 bp, Homo sapien
gggacgcgagcgggatccaaacttccggtgcctgcagagctcggagcggcggaggcagagaccgaggctgcaccggcagaggctgcggggcggacgcgcgggccggcgcagccatggtgaagattagcttccagcccgccgtggctggcatcaagggcgacaaggctgacaaggcgtcggcgtcggcccctgcgccggcctcggccaccgagatcctgctgacgccggctagggaggagcagcccccacaacatcgatccaagagggggggctcagtgggcggcgtgtgctacctgtcgatgggcatggtcgtgctgctcatgggcctcgtgttcgcctctgtctacatctacagatacttcttccttgcgcagctggcccgagataacttcttccgctgtggtgtgctgtatgaggactccctgtcctcccaggtccggactcagatggagctggaagaggatgtgaaaatctacctcgacgagaactacgagcgcatcaacgtgcctgtgccccagtttggcggcggtgaccctgcagacatcatccatgacttccagcggggtctgactgcgtaccatgatatctccctggacaagtgctatgtcatcgaactcaacaccaccattgtgctgccccctcgcaacttctgggagctcctcatgaacgtgaagagggggacctacctgccgcagacgtacatcatccaggaggagatggtggtcacggagcatgtcagtgacaaggaggccctggggtccttcatctaccacctgtgcaacgggaaagacacctaccggctccggcgccgggcaacgcggaggcggatcaacaagcgtggggccaagaactgcaatgccatccgccacttcgagaacaccttcgtggtggagacgctcatctgcggggtggtgtgaggccctcctcccccagaaccccctgccgtgttcctcttttcttctttccggctgctctctggccctcctccttccccctgcttagcttgtactttggacgcgtttctatagaggtgacatgtctctccattcctctccaaccctgcccacctccctgtaccagagctgtgatctctcggtggggggcccatctctgctgacctgggtgtggcggagggagaggcgatgctgcaaagtgttttctgtgtcccactgtcttgaagctgggcctgccaaagcctgggcccacagctgcaccggcagcccaaggggaaggaccggttgggggagccgggcatgtgaggccctgggcaaggggatggggctgtgggggcggggcggcatgggcttcagaagtatctgcacaattagaaaagtcctcagaagctttttcttggagggtacactttcttcactgtccctattcctagacctggggcttgagctgaggatgggacgatgtgcccagggagggacccaccagagcacaagagaaggtggctacctgggggtgtcccagggactctgtcagtgccttcagcccaccagcaggagcttggagtttggggagtggggatgagtccgtcaagcacaactgttctctgagtggaaccaaagaagcaaggagctaggacccccagtcctgccccccaggagcacaagcagggtcccctcagtcaaggcagtgggatgggcggctgaggaacggggcaggcaaggtcactgctcagtcacgtccacgggggacgagccgtgggttctgctgagtaggtggagctcattgctttctccaagcttggaactgttttgaaagataacacagagggaaagggagagccacctggtacttgtccaccctgcctcctctgttctgaaattccatccccctcagcttaggggaatgcacctttttccctttccttctcacttttgcatgtttttactgatcattcgatatgctaaccgttctcagccctgagccttggagaggagggctgtaacgccttcagtcagtctctggggatgaaactcttaaatgctttgtatattttctcaattagatctcttttcagaagtgtctatagaacaataaaaatcttttacttctg

SEQ ID NO: 3576 - protein, 267 aa, Homo sapien
MVKISFQPAVAGIKGDKADKASASAPAPASATEILLTPAREEQPPQHRSKRGGSVGGVCYLSMGMVVLLMGLVFASVYIYRYFFLAQLARDNFFRCGVLYEDSLSSQVRTQMELEEDVKIYLDENYERINVPVPQFGGGDPADIIHDFQRGLTAYHDISLDKCYVIELNTTIVLPPRNFWELLMNVKRGTYLPQTYIIQEEMVVTEHVSDKEALGSFIYHLCNGKDTYRLRRRATRRRINKRGAKNCNAIRHFENTFVVETLICGVV

SEQ ID NO: 3577 - DNA, 2840 bp, Homo sapien
ggtggggttgcgctcacaaggggcgaccgtcgccacggtggcggccactgcatcgcgtcccacctccgcggccctgggcgccgtggtgtcgacgggccccgagcctatgacgggccagggccagtcggcgtccgggtcgtcggcgtggagcacggtattccgccacgtccggtatgagaacctgatagcgggcgtgagcggcggcgtcttatccaaccttgcgctgcatccgctcgacctcgtgaagatccgcttcgccgtgagtgatggattggaactgagaccgaaatataatggaattttacattgcttgactaccatttggaaacttgatggactacggggactttatcaaggagtaaccccaaatatatggggtgcaggtttatcctggggactctactttttcttttacaatgccatcaagtcatataaaacagaaggaagagctgaacgtttagaggcaacagaataccttgtctcagctgctgaagctggagccatgaccctctgcattacaaacccattatgggtaacaaaaactcgccttatgttacagtatgatgctgttgttaactccccacaccgacaatataaaggaatgtttgatacacttgtgaaaatatataagtatgaaggtgtgcgtggattatataagggatttgttcctgggctgtttggaacatcgcatggtgcccttcagtttatggcatatgaattgctgaagttgaagtacaaccagcatatcaatagattaccagaagcccagttgagcacagtagaatatatatctgttgcagcactatccaaaatatttgctgtcgcagcaacatacccatatcaagtcgtaagagctcgtcttcaggatcaacacatgttttacagtggtgtaatagatgtaatcacaaagacatggaggaaagaaggcgtcggtggattttacaagggaattgctcctaatttgattagagtgactccagcctgctgtattacctttgtggtatatgaaaacgtctcacattttttacttgaccttagagaaaagagaaagtaagctcaaagaggacaattccagtatatctgcccaaggcagcaacaagctcttttgtgtttaaggcataaaagaagaattctgcatagaaacatggctcatattcgaaattgctctatagtcattagaagccagagaactgctaagtctcctgcaatgtttttctgctttttgccttccccatatatatggaacttggctacctctgcctgaaatggctgccatcaacacaatgttaaaactgacacgaaggatagagtttcacagatttctacgttttattggtggaagctgatttgcaacatttgctaaatggattagatgaatgtacttctttttgtgagcttacttgcctggattgctttaaaattaacctttgtgcaataccaagaaaatagctctttaaaagaatgtctttgtatgtctcaaggtaaattaaggatttactgaataaggtgttgaccaaatccagaccattttattttatttttttatttatttattttttgagatggagtcttgctttgtcgcccaggctggagtgcagtggcgtgatctcagctcactgcaacctccacctcccgggttcacgccattctcctgcctcagcctcctgagtagctgggactacaggcacctgccaccacgcctggctaacttttttttatattttgagtagaaatggggtttcaccatgttagccaggatggtctcaatctcctgaccttgtgatccgcctgccttggcctcccaaagtgctgggattacaggcgtgagccactgcgcctggccagaccattttagaattgggaaattttagtgagaaaaaatgcactgtaaatatgctttagttttaattcagttgggatgcactacctagcgaaaattgagaaactatatacttctcagagaaatatctgacatctattgtcattccattgctattttttttccccagagacttccataatttaaaataaaatcctagatccagttcttgttttttggcataaatacttaatctattttaaatttataaaatctgagcttctaggatccagctgtgtcaacctttatttagcatatataactataaatcacttattacagatgctaaatagatcaccttttacagatgctgaaatgtttgggatatgtttgttgacaaggtaaatggaaatgagaaactttatacttcagttttcagatatatggatctagatcccaaataaatgattaatcttcattggtttctcaaattcaggttgaaatacaaattaatagcctttattgattttacttttatgagtcattgtagacatctataaatataaaagggcctgtacccaaaggatgccagaatactagtatttttatttatcgtaaacatccacgagtgctgttgcactaccatctatttgttgtaaataaaagtgttgttttcaaagccatctttaaatagttctttaaaaataggtcttttttttatattttggaaaaggcattgtttttaaagtaaagataaaatggtaagtacctaattgtatttactgtaatatcttataacatgcagatgaatgctttataagttaaatatgatgtattttttcatacttctggattatactataattcatatgaaatcttgatattagtccccacacggaaaaagtgaactgcagttgatatttggtgtttaagatagcaccattgtttaaataccgcctatgtactcccaaatgaataaaacataattcttgtcctctgagagcataaaaaaaaaaaaaaa

SEQ ID NO: 3578 - protein, 315 aa, Homo sapien
MTGQGQSASGSSAWSTVFRHVRYENLIAGVSGGVLSNLALHPLDLVKIRFAVSDGLELRPKYNGILHCLTTIWKLDGLRGLYQGVTPNIWGAGLSWGLYFFFYNAIKSYKTEGRAERLEATEYLVSAAEAGAMTLCITNPLWVTKTRLMLQYDAVVNSPHRQYKGMFDTLVKIYKYEGVRGLYKGFVPGLFGTSHGALQFMAYELLKLKYNQHINRLPEAQLSTVEYISVAALSKIFAVAATYPYQVVRARLQDQHMFYSGVIDVITKTWRKEGVGGFYKGIAPNLIRVTPACCITFVVYENVSHFLLDLREKRK

SEQ ID NO: 3579 - DNA, 446 bp, Homo sapien
  Unsure 180-181: Unknown base
gattgccattaaagcagaaattataaggttgcaacaatatttgtttctaatcactggctttctcaagagtatggattgacatattgtgttatgaatgcacatctctcagatgtgttgaagcatccattgcatccattttttattattttcttagttttgttcttggacaaatttaaacannttaaaagattattcaagatgaatttaaaagtcaacccttcacacagtttccctactgtatgtagaatccaggtgctgaaaccaagtgtttcttttcccatgctctttgttaaactccaattatagataatttttccagtcttaagctctgtccaccttcaagtcaattcataaccaagtttttgaacgctgctatgaattgcactgtgaaaagcactcttccctctcagttttcgttcatcctgagccagaatcaaaaaaaaaaa

SEQ ID NO: 3580 - protein, 71 aa, Homo sapien
  unsure 30-31: unknown amino acid
  Unsure 180-181: Unknown amino acid
MNAHLSDVLKHPLHPFFIIFLVLFLDKFKXXKRLFKMNLKVNPSHSFPTVCRIQVLKPSVSFPMLFVKLQL

SEQ ID NO: 3581 - DNA, 2071 bp, Homo sapien
ggcacgaggcctgggtcccgtcacatccttcttgctcaaccactgggtgcacaggatggaaacttctattccctctctggaagacagcgcgtggcttggcttcacagagttgtggctggagaccgaagcagcccctttctcaggcttactgtcaccagtctgtctgtgttaggggagaggggagtccgctctgtcctgaaggcccagagatggaaggacaagtggtaggccgggtgttcaggctcttccaacgccgactgcttcaactccgagcaggaccaccccaggacaattcaggggaagctttaaaggaaccagaaagggcccaggagcactctttgcccaactttgctggggggcagcacttctttgaataccttcttgtggtttctctcaaaaagaagcgttcagaggatgattacgagcctataatcacctaccaatttcccaagcgggagaacctgcttcggggtcagcaggaggaggaggagcggctgctcaaagctatccccttgttctgcttcccagatgggaatgagtgggcatcactcaccgagtatcccagggagaccttctccttcgttctgaccaatgtggatgggagcagaaagattggatactgcaggcgcctcttgcctgccggccctggccctcgccttcccaaagtgtactgcatcatcagctgcatcggctgcttcggcttgttctccaagatcctggatgaagtggagaagagacatcagatctccatggctgtcatctacccgttcatgcagggcctccgagaggcagccttccctgctcctgggaagactgtcactctcaagagcttcatccccgactcaggcactgagttcatttcactgacacggcccctggactcccacctagaacatgtggattttagttctctattgcactgtctcagttttgaacagatacttcagatctttgcctctgccgtgctggagagaaaaatcatcttcctggcggaaggtctcagcaccttgtctcagtgcatccatgctgctgccgcactgctctaccccttcagctgggcgcacacctacatccctgttgtccctgagagccttctggccaccgtctgctgccccacccccttcatggttggagtacaaatgcgcttccagcaggaggtcatggacagccctatggaagaggtcctgctggtcaatctttgtgaaggaaccttcttaatgtcggttggtgatgaaaaagacatcctgccaccgaagcttcaggatgacatcttagactctcttggtcaggggatcaatgagttaaagactgcagaacaaatcaacgagcatgtttcaggcccctttgtgcagttctttgtcaagattgtgggccattatgcttcctatatcaagcgggaggcaaatgggcaaggccacttccaagaaagatccttctgtaaggctctgacctccaagaccaaccgccgatttgtgaagaagtttgtgaagacacagctcttctcacttttcatccaggaagccgagaagagcaagaatcctcctgcaggctatttccaacagaaaatacttgaatatgaggaacagaagaaacagaagaaaccaagggaaaaaactgtgaaataagagctgtggtgaataagaatgactagagctacacaccatttctggacttcagcccctgccagtgtggcaggatcagcaaaactgtcagctcccaaaatccatatcctcactctgagtcttggtatccaggtattgcttcaaactggtgtctgagatttggatccctggtattgatttctcaggactttggagggctctgacaccatgctcacagaactgggctcagagctccattttttgcagaggtgacacaggtaggaaacagtagtacatgtgttgtagacacttggttagaagctgctgcaactgccctctcccatcattataacatcttcaacacagaacacactttgtggtcgaaaggctcagcctctctacatgaagtctgtggacatgtaaggacgagagtaaagaggaaaatcttataaaaaaaaaaaaaaaaaaaa

SEQ ID NO: 3582 - protein, 471 aa, Homo sapien
MEGQVVGRVFRLFQRRLLQLRAGPPQDNSGEALKEPERAQEHSLPNFAGGQHFFEYLLVVSLKKKRSEDDYEPIITYQFPKRENLLRGQQEEEERLLKAIPLFCFPDGNEWASLTEYPRETFSFVLTNVDGSRKIGYCRRLLPAGPGPRLPKVYCIISCIGCFGLFSKILDEVEKRHQISMAVIYPFMQGLREAAFPAPGKTVTLKSFIPDSGTEFISLTRPLDSHLEHVDFSSLLHCLSFEQILQIFASAVLERKIIFLAEGLSTLSQCIHAAAALLYPFSWAHTYIPVVPESLLATVCCPTPFMVGVQMRFQQEVMDSPMEEVLLVNLCEGTFLMSVGDEKDILPPKLQDDILDSLGQGINELKTAEQINEHVSGPFVQFFVKIVGHYASYIKREANGQGHFQERSFCKALTSKTNRRFVKKFVKTQLFSLFIQEAEKSKNPPAGYFQQKILEYEEQKKQKKPREKTVK

SEQ ID NO: 3583 - DNA, 2098 bp, Homo sapien
gcaggagcacgtggagaggccgggtagccacagcggcagctccagcccggcccggcagcgacatggaagatatacaaacaaatgcggaactgaaaagcactcaggagcagtctgtgcccgcagaaagtgcagcggttttgaatgactacagtttaaccaaatctcatgaaatggaaaatgtggacagtggagaaggcccagccaatgaagatgaagacataggagatgattcaatgaaagtgaaagatgaatacagtgaaagagatgagaatgttttaaagtcagaacccatgggaaatgcagaagagcctgaaatcccttacagctattcaagagaatataatgaatatgaaaacattaagttggagagacatgttgtctcattcgatagtagcaggccaaccagtggaaagatgaactgcgatgtgtgtggattatcctgcatcagcttcaatgtcttaatggttcataagcgaagccatactggtgaacgcccattccagtgtaatcagtgtggggcatcttttactcagaaaggtaacctcctccgccacattaaactgcacacaggggaaaaaccttttaagtgtcacctctgcaactatgcatgccaaagaagagatgcgctcacggggcatcttaggacacattctgtggagaaaccctacaaatgtgagttttgtggaaggagttacaagcagagaagttcccttgaggagcacaaggagcgctgccgtacatttcttcagagcactgacccaggggacactgcaagtgcggaggcaagacacatcaaagcagagatgggaagtgaaagagctctcgtactggacagattagcaagcaatgtggcaaaacgaaaaagctcaatgcctcagaaattcattggtgagaagcgccactgctttgatgtcaactataattcaagttacatgtatgagaaagagagtgagctcatacagacccgcatgatggaccaagccatcaataacgccatcagctatcttggcgccgaagccctgtgccccttggtccagacaccgcctgctcccacctcggagatggttccagttatcagcagcatgtatcccatagccctcacccgggctgagatgtcaaacggtgcccctcaagagctggaaaggaaaagcatcctccttccagagaagagcgtgccttctgagagaggcctctctcccaacaatagtggccacgactccacggacactgacagcaaccatgaagaacgccagaatcacatctatcagcaaaatcacatggtcctgtctcgggcccgcaatgggatgccacttctgaaggaggttccccgctcttacgaactcctcaagcccccgcccatctgcccaagagactctgtcaaagtgatcgacaaggaaggggaggtgatggatgtgtatcggtgtgaccactgccgcgtcctcttcctggactatgtgatgttcacgattcacatgggctgccacggcttccgtgaccctttcgagtgtaacatgtgtggagatcgaagccatgatcggtatgaattctcgtctcacatagccagaggagaacacagaagcctgctgaagtgaatatctggtctcagggattgctcctatgtattcagcatcgtttctaaaaacagttgacctcgcctaacagattgctctcaaaacatactcagttccaaacttcttttcataccatttttagctgtgttcacaggggtagccagagaaacactgtcttccttcagaaattattcgcaggtctagcatattattacttttgtgaaacctttgttttcccatcagggacttgaattttatggaatttaaaagccaaaaaggtatttggtcattatcttctacagcagtggaatgagtggtcccggagatgtgctatatgaaacattctttctgagatatatcaaccacacgtggaaaagcctttcagtcatacatgcaaatccacaaagaggaagagctgaccagctgaccttgctgggaagcctcacccttctgcccttcacaggctgaagggttaagatctaatctccctaatctaaatgacagtctaagagtaagtaaaagaacag

SEQ ID NO: 3584 - protein, 509 aa, Homo sapien
MEDIQTNAELKSTQEQSVPAESAAVLNDYSLTKSHEMENVDSGEGPANEDEDIGDDSMKVKDEYSERDENVLKSEPMGNAEEPEIPYSYSREYNEYENIKLERHVVSFDSSRPTSGKMNCDVCGLSCISFNVLMVHKRSHTGERPFQCNQCGASFTQKGNLLRHIKLHTGEKPFKCHLCNYACQRRDALTGHLRTHSVEKPYKCEFCGRSYKQRSSLEEHKERCRTFLQSTDPGDTASAEARHIKAEMGSERALVLDRLASNVAKRKSSMPQKFIGEKRHCFDVNYNSSYMYEKESELIQTRMMDQAINNAISYLGAEALCPLVQTPPAPTSEMVPVISSMYPIALTRAEMSNGAPQELERKSILLPEKSVPSERGLSPNNSGHDSTDTDSNHEERQNHIYQQNHMVLSRARNGMPLLKEVPRSYELLKPPPICPRDSVKVIDKEGEVMDVYRCDHCRVLFLDYVMFTIHMGCHGFRDPFECNMCGDRSHDRYEFSSHIARGEHRSLLK

SEQ ID NO: 3585 - DNA, 1047 bp, Homo sapien
ctgtgagtgacacacgctgagtggggtgaagggaaatgctggtgaatttcattttgaggtgtgggttgctgttagtcactctgtctcttgccattgccaagcacaagcaatcttccttcaccaaaagttgttacccaaggggaacattgtcccaagctgttgacgctctctatatcaaagcagcatggctcaaagcaacgattccagaagaccgcataaaaaatatacgattattaaaaaagaaaacaaaaaagcagtttatgaaaaactgtcaatttcaagaacagcttctgtccttcttcatggaagacgtttttggtcaactgcaattgcaaggctgcaagaaaatacgctttgtggaggactttcatagccttaggcagaaattgagccactgtatttcctgtgcttcatcagctagagagatgaaatccattaccaggatgaaaagaatattttataggattggaaacaaaggaatctacaaagccatcagtgaactggatattcttctttcctggattaaaaaattattggaaagcagtcagtaaaccaaagccaagtacattgattttacagttattttgaaatacaataagaactgctagaaatatgtttataacagtctatttcttttaaaaactttttaacataatactgacggcatgttaggtgattcagaatagacaagaaggatttagtaaattaacgttttggatataagttgtcactaatttgcacattttctgtgttttcaaataatgtttccattctgaacatgttttgtcattcacaagtacattgtgtcaacttaatttaaagtatgtaacctgaattaactcgtgtaatatttgtgtgtggagtgggatgtggggggtggagggggaatgacagatttctggaatgcaatgtaatgttactgagacttaaatagatgttatgtatatgattgtctgtttaagtgtttgaaaattgttaattatgcccagtgtgaacttagtacttaacacattttgattttaattaaataaattgggtttccttctc

SEQ ID NO: 3586 - protein, 171 aa, Homo sapien
MLVNFILRCGLLLVTLSLAIAKHKQSSFTKSCYPRGTLSQAVDALYIKAAWLKATIPEDRIKNIRLLKKKTKKQFMKNCQFQEQLLSFFMEDVFGQLQLQGCKKIRFVEDFHSLRQKLSHCISCASSAREMKSITRMKRIFYRIGNKGIYKAISELDILLSWIKKLLESSQ

SEQ ID NO: 3587 - DNA, 2035 bp, Homo sapien
tccctgtcctgcgcccgcgcgccccgggagcctacccagcacgcgctccgcgcccactggttccctccagccgccgccgtccagccgagtccccactccggagtcgccgctgccgcggggacatggtcctctgcgttcagggacctcgtcctttgctggctgtggagcggactgggcagcggcccctgtgggccccgtccctggaactgcccaagccagtcatgcagcccttgcctgctggggccttcctcgaggaggtggcagagggtaccccagcccagacagagagtgagccaaaggtgctggacccagaggaggatctgctgtgcatagccaagaccttctcctaccttcgggaatctggctggtattggggttccattacggccagcgaggcccgacaacacctgcagaagatgccagaaggcacgttcttagtacgtgacagcacgcaccccagctacctgttcacgctgtcagtgaaaaccactcgtggccccaccaatgtacgcattgagtatgccgactccagcttccgtctggactccaactgcttgtccaggccacgcatcctggcctttccggatgtggtcagccttgtgcagcactatgtggcctcctgcactgctgatacccgaagcgacagccccgatcctgctcccaccccggccctgcctatgcctaaggaggatgcgcctagtgacccagcactgcctgctcctccaccagccactgctgtacacctaaaactggtgcagccctttgtacgcagaagcagtgcccgcagcctgcaacacctgtgccgccttgtcatcaaccgtctggtggccgacgtggactgcctgccactgccccggcgcatggccgactacctccgacagtaccccttccagctctgactgtacggggcaatctgcccaccctcacccagtcgcaccctggaggggacatcagccccagctggacttgggcccccactgtccctcctccaggcatcctggtgcctgcatacctctggcagctggcccaggaagagccagcaagagcaaggcatgggagaggggaggtgtcacacaacttggaggtaaatgcccccaggccgcatgtggcttcattatactgagccatgtgtcagaggatggggagacaggcaggaccttgtctcacctgtgggctgggcccagacctccactcgcttgcctgccctggccacctgaactgtatgggcactctcagccctggtttttcaatccccagggtcgggtaggacccctactggcagccagcctctgtttctgggaggatgacatgcagaggaactgagatcgacagtgactagtgaccccttgttgaggggtaagccaggctaggggactgcacaattatacactatttatttatttattctccttggggttggtgtcaggggcgagccaaccccacctctatgccctgagccctggtagtccagagaccccaactctgccctggcttctctggttcttccctgtggaaagcccatcctgagacatcttgctggaaccaaggcaatcctggatgtcctggtactgacccacccgtctgtgaatgtgtccactctcttctgcccccagccatatttggggaggatggacaactacaataggtaagaaaatgcagccggagcctcagtccccagcagagcctgtgtctcaccccctcacaggacagagctgtatctgcatagagctggtctcactgtggcgcaggccccggggggagtgcctgtgctgtcaggaagagggggtgctggtttgagggccaccactgcagttctgctaggtctgcttcctgcccaggaaggtgcctgcacatgagaggagagaaatacacgtctgataagacttcatgaaataataattatagcaaagaacagtttggtggtcttttctcttccactgatttttctgtaatgacattatacctttattacctctttattttattacctctataataaaatgatacctttttcatgtaaaaaaaaaaaaaaaaa

SEQ ID NO: 3588 - protein, 258 aa, Homo sapien
MVLCVQGPRPLLAVERTGQRPLWAPSLELPKPVMQPLPAGAFLEEVAEGTPAQTESEPKVLDPEEDLLCIAKTFSYLRESGWYWGSITASEARQHLQKMPEGTFLVRDSTHPSYLFTLSVKTTRGPTNVRIEYADSSFRLDSNCLSRPRILAFPDVVSLVQHYVASCTADTRSDSPDPAPTPALPMPKEDAPSDPALPAPPPATAVHLKLVQPFVRRSSARSLQHLCRLVINRLVADVDCLPLPRRMADYLRQYPFQL

SEQ ID NO: 3589 - DNA, 9120 bp, Homo sapien
gcggccgccgccctcgccaccccgcctgcccactcccgccgccgccccgctctcgctttccccccggcctcccctcgccccttcccctcccccttcccggcgcactcggggggctgggaacgagctgccatgtgatgcgcgtcccctccgcgagctttcggtgacccacgaactgcccacctcgccggctgccgggagggggctgcgagccgggaagacgcggggaagaggaggcggaaaaggacgcaaagttctccggcgagcgcattcattcacatagctcccagttttaacatttcgccacctactgaagacatcatttgggaccaagctgatgagcccttgaagcacagcagataagagtgttgctgttgatcatctttgcctgggaagttgaatgataaagccagaagaaagcatgctttctgatcatttgcagctgtctgcttcagaaagtgagggctccaggaatgaggagaatcttcaagaacttcctcgcactgtgacatgtctgatcccttgctcccatccctgcagcatgaacaaggtggacactcactgacctgtcacaaggttgccccacaaaactttggggtccatgtctgaatggattgccagagccttctcatctctcccttcgcccagttccctgcatcctaagactcgaaggcagcacaggacctggaaaaattacatggtgtgaacggcatgtctgtggatgagaagcctgactcccccatgtatgtgtatgagtccacagtccactgcaccaacatcctcctgggcctcaatgaccagcggaaaaaggatattctctgtgacgtgactttgatcgtggagaggaaggagttccgggcccaccgggctgtgctggccgcatgcagtgaatatttttggcaggcgctggttggacagacaaaaaatgatttggtggtcagcttgcctgaggaggtcacagccaggggctttgggccgctgttacagtttgcctacactgccaagctgttactcagcagagaaaacatccgcgaggtcatccgctgtgctgagttcctgcgcatgcacaacctggaggactcctgcttcagcttcctgcagacccagctcctgaacagtgaggatggcctgtttgtgtgccggaaggatgctgcgtgccagcgcccacacgaggactgcgagaactctgcaggagaggaggaggatgaagaggaggagacgatggattcagagacggccaagatggcttgccccagggaccagatgcttccagagcccatcagctttgaggccgccgccatccccgtagcagagaaggaagaagccctgctgcccgagcctgacgtgcccacagacaccaaggagagctcagaaaaggacgcgttaacgcagtaccccagatacaagaaataccagcttgcatgtaccaagaatgtctataatgcatcatcacacagtacctcaggttttgcaagcacattccgggaagataactctagcaacagcctcaagccggggcttgccagggggcagattaaaagtgagccgcccagtgaagagaatgaggaagagagcatcacgctctgcctgtctggagatgagcctgacgccaaggacagagcgggggatgtcgagatggaccggaaacagcccagccctgcccctacccccacggccccagctggggccgcctgcctggagagatccaggagcgtggcctcgccctcctgcttaaggtctctgttcagcataacgaaaagtgtggagctgtctggcctgcccagtacatctcagcagcactttgccaggagtccagcctgcccttttgacaaggggatcactcagggtgaccttaaaactgactacacccctttcacagggaattatggacagccccacgtgggccagaaggaggtgtccaacttcaccatggggtcgcccctcagggggcctgggttggaggctctctgtaaacaggagggagagctggaccggaggagcgtgatcttctcctccagcgcttgtgaccaagtgagcacctcggtgcattcttattctggggtgagcagtttggacaaagacctctctgagccggtgccaaagggtctgtgggtgggagccggccagtccctccccagctcgcaggcctactcccacggtgggctgatggccgaccacttgccaggaaggatgcggcccaacaccagctgcccggtgccaatcaaagtctgccctcgctcaccccccttggagaccaggaccaggacttccagctcctgctcttcctattcctacgcggaggacgggagcgggggctcaccctgcagcctccctctctgtgagttctcctcctcgccctgttcccagggagccagattccttgccacagaacatcaggaaccaggcctgatgggagatggaatgtacaaccaagtgcggccccaaattaaatgtgagcagtcttatggaaccaactccagtgacgaatccggatcgttctcggaagcagacagtgagtcgtgtcctgtgcaggacaggggccaggaggtaaaacttccttttcctgtagatcaaatcacagatcttccaaggaacgatttccagatgatgattaaaatgcacaagctaacctcagaacagttagagtttattcatgatgtccgacggcgcagcaagaaccgcatcgcggcccagcgctgccgcaaaaggaaactggactgtattcagaatttagaatgtgaaatccgcaaattggtgtgtgagaaagagaaactgttgtcagagaggaatcaactgaaagcatgcatgggggaactgttggacaacttctcctgcctttcccaggaagtttgccgagacatccagagccccgagcagatccaggccctgcatcggtattgccctgtcctcagacccatggacttgcccacggcctccagtattaaccctgcgcccttgggtgctgagcagaacattgcggcctcccaatgcgcagtgggggaaaacgtgccctgctgcttggagccaggcgcggctccccccggacccccctgggcacccagcaacacctccgagaattgtacctctgggaggagactagaaggcactgacccgggaaccttctcagagagaggacctcctcttgaacccaggagccaaacagtgaccgtggacttctgccaggaaatgactgataagtgtacaactgacgaacagcccaggaaagattatacctagtgactcggctctgcctcccagtccgcacacctctcccatccaggcgttcttcagtcagcctgtggcactgttcatctgctgtcccgaagaaaccgagaacacatttggtgcacactacagcggtcttagcagcaatactgttccgaagtatcctctcctcttctcgagcaggagtgatagttaccttcacaatggtgctaccccttgcccaggcaaggaaagacagcagtgatgacactgtctgtctgtggctcaatttcagtcttcacagggatagactacaacacctctaggccccaaccacggattttttttctcagtggcccatgtcacaaaccctatctcaggaatttcttctgaatgttcaatttttttcattgaagacagcttctatacacatcaaagttttatagctagactgtacatattatatataatatatatataaaaaatatatatatatatatatatccatatgcaaaagtcctgcatgcctcaactttctcatcctaaaactggaaacttatttctcatttagaaacaggttccaacattcctcttcttttgtctctgatgctagaactagtttggtaactgttaacgtggtcatttttcttgcttcacagttcaattttcaattcgtacttatttatggacaaaattcagtgttggaagctttttcccaaggttttatttcagatttctttttcgtttggtttggttttggcacctccaagtggtgtcatttgagcattgtaggtttgttttttgtttgtttggggggttttgtttgtttttgtttttgtttttgttttccttgcagatactgtacagtaatggtcaactttgccacttgcactgagttttgggtcaaacctattttcttaaatgaagttgtaacttcggtataactcaagtatactgtatattctttgcttttagttaaaaaagtaaaacattttagctaattaaaaagcactcaggtgataattatgtaggaaaaacaatcttgccaaataatgaattcatcctaggatgtgtagacaataatctgcttgaatatttttatatttcacctcctccccacctttccctaagcaaagtttaaacgcagatagagagttcagagttgatgctggatgttcagattcctaagtggggagagagtttggacatctcactcaaaagtacatcagaaaaacaggaatccgtgattttataccagaactcagcaggcattggctcctagaaatcaagttagaaagttttcacccagggagtaagtcccattcatttcaacacgtcctgaggcctcggcttgctcttggaagtggtgtgcagtaggacctgctcccctgaaggacggggccaaccagccactggctttcctgcccaggcttggcctcccaggacatctggcctgaggggatttgaatcacagccccgaaggtcctgccttcaccccattgggagagagcagggcatcctggcatctgcgatccatccctgacacaggctgacacattctttctcctttccttctccaaaggcttggagttttcttctgaggtttttctgccagtgtcttgtctgaaggcagacttcattctgaggctttggacaagctattcaccgggaaccctccctgtccccttcccgaatcacacacataccctaccctcacctgatgataattttctcttcttgctgcaaaactggttggcttgcaacccagagagagcagcttcccttggctctgggggccgtgttggccccagccacgtttacaggaaggtgtgccccagaggaggaggaatcagctccctcgctccagtggccttgggtccgggtctcactgagcagcccgagggccactccagcccggctggggaagagagtcctgaacggtttgatgtggggatggggtggtgggcagtggggaatagatggttgactttgtttctttatttgtgccattgtttggacaatattaaagctgcatgtaaaaggggaaattagtatatgatgtaggctaaaagtgaaatcatagtaacatatgttttagtattattaacttttttctgtacaaatattagcactaaatgtttaaatatgtatgaatgccagaaatttgtcagttcatgcagtaggataaaaaaaaaaaaaaaaaaaaaagggcttttctttttaaacagttccacttttaaaacctgcctctgggtttttgttttttcttgtttgtgtgtgtgtgtgtgtgtgtgtgtgtgtgtgtgtgtgtgtgtgtgtgtctgaaacagatcttgataaagctctgtgttggagctgctggtttttgttatggttgttggaatttcttggcctactaggacagttctgtgcttcaccatgaggtttgcctttgtggaaaactcgtgggtgacagtgagaatataaactcaatgtgaatcacgtgatacttcggcaggcgtgtgttacagtggagtcagctgacagtattttgctttttaactctattgttgcctttccaagtgacctctcctcttcttttaaaaaaagaacactttctgctcatatcataaccaggtccaacccagcttcttggcatgaggtttaccctggtaacaactcatgtgcaactggtagtcttgaccacattccatccatttcctcaggtttctgtggttcagtagcccagacctgtttggcagccatttctagcaggggcggggcctctttatttctctccaccctaactcagacctcaccttcctcccacccacccctgccttgcttttcttcctcttcccccaacctaacttctgccatgggaactggttaaaaacactgctctaaaaaccatcttccaatttcatagagatttctcacaagttatttcattcataatccaccatgaacagtgactagcttcgtgcagttgttcatgtgatgtgtgtgtgtcttttcctattcagaactatgtgcttgtcaaaattatttctgggttgattcaaagggaggacttgctggggaccagaatccaaacggcctcaagtggaattttaaaacctagcctgtctcttttccctgggatccctctgtcaaccccacgccttttaggaaaaagaaaagtgagtgaacagcaaggaagagtgtttgcacagtacagtaacatttggttgttcttaaggctcttttcttacaaaaataagagaccctccaaccacgggctgtttaggaggatgcctgcttgggtctccaaatggctggggtaggaatggttgttggggcagagccagtggaggtgagtgaccctgagactaatgaacatcccacctaaatccagtcctccccttggatctgcctttgtcctgcttgtgtatccaggcaacctcttttcaagttggtcaggctttggacaggtgagtgatttgctgtatgtgtttgtttctctgcgttacctgggggtgccttgattaaaatcgaactttattacatactgattctggaacaaaacagttagaaaaactttaaactttaaaaaaaaaaaaaccgacaaagttacgaggccatcctgctatttatcttctgagttcccagcaatgactcaggcatcagagatgatgctgcagtggaaaacctgactctgtgtgtctgcaactgaatgttgtgcgagtaatttattaactgtctttctaaaggtttgctgcttttaagatgcactataattcgggatgtaatccttacattgcttttccaaggaagggaacaaaagtctagtgattagtatgccaactgccactactccttcaaaaggagccaggaccagcgacaagactcatgagaggactggctaaagtgaagtgtgcacagtgtgaagtttaatgctgttgtcaagaggcctaaacccacattttctcttttaatattttatgattgccatcaaagaagaagaaaaagaaggaacagacaaaggtttgaaaatgataagcctgttaagacaccaaaaactcctgtcccgtgaagctgcttgacatcctgtggagtagcataatcctctcaaaatgaggaagagctgcctgcaaagctttctcaagtccctatttggctacctacttctctacattatgccccatttaaactaggagctgtcttagaaatgacttcaaactgcttcactattgcttacagtttaggaggagtctcagatccagaaggagcaagaatcaagtttggtcctcaaatgactgtaaatagactaaagaacaaggtgttttttgtttttgtttttgttttctaagaataaagctgttcgttgtatcatgagttagtgtttcttccccaaactgaagactgtgttggaagtgcaatttctggtgagtcagtccacaatacaatgccctgtgtggagttggtattcatacaggaaatctgtgtgcacgaggcattgtgtgttgaaagtgtatgtttatagtactgcctgagccatctcatgaccccagcgtccaaaaccgatgctgtagaacagaacatatctgtcacaaataggtgtgtgcaaatagcatttgtacatagaaaagtctcattgtggcagattgagcataaattattcaactgacggtgcaaaaacattacttgcaaagaaaagtttatagtattttcctacactccaccctgggagatgatatttctatcaaatgaatatcagtgcattttaaatgtaatatgaaaacgatgctgccattttgtgaagaatacccacttggttgcagaggccaactttcatagctttgatttaatgttgtgacacggtgtatgcattttgctgtcaagcaatggataaacagctctgactttcattctcattccagtttattgacctcagataaaacactggcccttcttagaagcagaagtgtgcaccaagaccattcatttcaggtagactcacattcagtgccaagtgctcccatgggaataatcagacgcatatgttgcgaaagagtgaagggacttggacaaagaggggttttcctacagatggatgctcagtcttctaccaaaacatgtttggaggcagaactatgacctccccttaagtcctaacaatgtattttgtgtgtgcaaatcctgggatgcccgtttcacgctctgacataaagacatggcacctctagtgagtgatcaggaagattccatatgcatttgggagcttcaggtgcttgttagacacagtgagccattcaaggcaagcaccacctttgctagtgaggccaagagagcctgtgacaatttgacaatttgttccagaaccagtctgatgcaagtgcacctctaatatatgccttacaaactccagaggccatattcaaaacagggtcttctcagtgtatgcaaggggctgcagcccctcttctcttcctccccaggttgaacaatacggacagttttcacacatatctacctgtataaccctctgtacctctcataactggtcaacgactgtaacaggttacatcaggtgtttttctacatactttttacacagattctatgcgattaatgtaatttaattcaatgcatcattttattgtactagttcttaggcttgtccttatttttttctaagtgattgtggtttttctcgtggtttttattgtaaaaaatgaaaggctgttgatgcttattctctgtaactaagaattttaccttttgggggaaaaaagcattgctatgaactaatggaattggaacttcatttactcattgtaaatacactattgtgcaaaaaaagttttcactcaattgaattgctagtgttaactgaattttgtctagacaccatttctgttgatgaaataaagacatatcattatgcattgtaaactg

SEQ ID NO: 3590 - protein, 841 aa, Homo sapien
MSVDEKPDSPMYVYESTVHCTNILLGLNDQRKKDILCDVTLIVERKEFRAHRAVLAACSEYFWQALVGQTKNDLVVSLPEEVTARGFGPLLQFAYTAKLLLSRENIREVIRCAEFLRMHNLEDSCFSFLQTQLLNSEDGLFVCRKDAACQRPHEDCENSAGEEEDEEEETMDSETAKMACPRDQMLPEPISFEAAAIPVAEKEEALLPEPDVPTDTKESSEKDALTQYPRYKKYQLACTKNVYNASSHSTSGFASTFREDNSSNSLKPGLARGQIKSEPPSEENEEESITLCLSGDEPDAKDRAGDVEMDRKQPSPAPTPTAPAGAACLERSRSVASPSCLRSLFSITKSVELSGLPSTSQQHFARSPACPFDKGITQGDLKTDYTPFTGNYGQPHVGQKEVSNFTMGSPLRGPGLEALCKQEGELDRRSVIFSSSACDQVSTSVHSYSGVSSLDKDLSEPVPKGLWVGAGQSLPSSQAYSHGGLMADHLPGRMRPNTSCPVPIKVCPRSPPLETRTRTSSSCSSYSYAEDGSGGSPCSLPLCEFSSSPCSQGARFLATEHQEPGLMGDGMYNQVRPQIKCEQSYGTNSSDESGSFSEADSESCPVQDRGQEVKLPFPVDQITDLPRNDFQMMIKMHKLTSEQLEFIHDVRRRSKNRIAAQRCRKRKLDCIQNLECEIRKLVCEKEKLLSERNQLKACMGELLDNFSCLSQEVCRDIQSPEQIQALHRYCPVLRPMDLPTASSINPAPLGAEQNIAASQCAVGENVPCCLEPGAAPPGPPWAPSNTSENCTSGRRLEGTDPGTFSERGPPLEPRSQTVTVDFCQEMTDKCTTDEQPRKDYT

SEQ ID NO: 3591 - DNA, 2712 bp, Homo sapien
gtcatgttcttcgcgccctggtgtggacactgccagcggctgcagccgacttggaatgacctgggagacaaatacaacagcatggaagatgccaaagtctatgtggctaaagtggactgcacggcccactccgacgtgtgctccgcccagggggtgcgaggataccccaccttaaagcttttcaagccaggccaagaagctgtgaagtaccagggtcctcgggacttccagacactggaaaactggatgctgcagacactgaacgaggagccagtgacaccagagccggaagtggaaccgcccagtgcccccgagctcaagcaagggctgtatgagctctcagcaagcaactttgagctgcacgttgcacaaggcgaccactttatcaagttcttcgctccgtggtgtggtcactgcaaagccctggctccaacctgggagcagctggctctgggccttgaacattccgaaactgtcaagattggcaaggttgattgtacacagcactatgaactctgctccggaaaccaggttcgtggctatcccactcttctctggttccgagatgggaaaaaggtggatcagtacaagggaaagcgggatttggagtcactgagggagtacgtggagtcgcagctgcagcgcacagagactggagcgacggagaccgtcacgccctcagaggccccggtgctggcagctgagcccgaggctgacaagggcactgtgttggcactcactgaaaataacttcgatgacaccattgcagaaggaataaccttcatcaagttttatgctccatggtgtggtcattgtaagactctggctcctacttgggaggaactctctaaaaaggaattccctggtctggcgggggtcaagatcgccgaagtagactgcactgctgaacggaatatctgcagcaagtattcggtacgaggctaccccacgttattgcttttccgaggagggaagaaagtcagtgagcacagtggaggcagagaccttgactcgttacaccgctttgtcctgagccaagcgaaagacgaactttaggaacacagttggaggtcacctctcctgcccagctcccgcaccctgcgtttaggagttcagtcccacagaggccactgggttcccagtggtggctgttcagaaagcagaacatactaagcgtgaggtatcttctttgtgtgtgtgttttccaagccaacacactctacagattctttattaaatgtgtaactcatggtcactgtgtaaacattttcagtggcgatatatcccctttgaccttctcttgatgaaatttacatggtttcctttgagactaaaatagcgttgagggaaatgaaattgctggactatttgtggctcctgagttgagtgattttggtgaaagaaagcacatccaaagcatagtttacctgcccacgagttctggaaaggtggccttgtggcagtattgacgttcctctgatcttaaggtcacagttgactcaatactgtgttggtccgtagcatggagcagattgaaatgcaaaaacccacacctctggaagataccttcacggccgctgctggagcttctgttgctgtgaatacttctctcagtgtgagaggttagccgtgatgaaagcagcgttacttctgaccgtgcctgagtaagagaatgctgatgccataactttatgtgtcgatacttgtcaaatcagttactgttcaggggatccttctgtttctcacggggtgaaacatgtctttagttcctcatgttaacacgaagccagagcccacatgaactgttggatgtcttccttagaaagggtaggcatggaaaattccacgaggctcattctcagtatctcattaactcattgaaagattccagttgtatttgtcacctggggtgacaagaccagacaggctttcccaggcctgggtatccagggaggctctgcagccctgctgaagggccctaactagagttctagagtttctgattctgtttctcagtagtccttttagaggcttgctatacttggtctgcttcaaggaggtcgaccttctaatgtatgaagaatgggatgcatttgatctcaagaccaaagacagatgtcagtgggctgctctggccctggtgtgcacggctgtggcagctgttgatgccagtgtcctctaactcatgctgtccttgtgattaaacacctctatctcccttgggaataagcacatacaggcttaagctctaagatagataggtgtttgtccttttaccatcgagctacttcccataataaccactttgcatccaacactcttcacccacctcccatacgcaaggggatgtggatacttggcccaaagtaactggtggtaggaatcttagaaacaagaccacttatactgtctgtctgaggcagaagataacagcagcatctcgaccagcctctgccttaaaggaaatctttattaatcacgtatggttcacagataattctttttttaaaaaaacccaacctcctagagaagcacaactgtcaagagtcttgtacacacaacttcagctttgcatcacgagtcttgtattccaagaaaatcaaagtggtacaatttgtttgtttacactatgatactttctaaataaactctttttttttaaaaaaaaaaaaaaaaaaaaaaaaaaaaaaaaaaaaaaaaaaaaaaaaaaac

SEQ ID NO: 3592 - protein, 324 aa, Homo sapien
MEDAKVYVAKVDCTAHSDVCSAQGVRGYPTLKLFKPGQEAVKYQGPRDFQTLENWMLQTLNEEPVTPEPEVEPPSAPELKQGLYELSASNFELHVAQGDHFIKFFAPWCGHCKALAPTWEQLALGLEHSETVKIGKVDCTQHYELCSGNQVRGYPTLLWFRDGKKVDQYKGKRDLESLREYVESQLQRTETGATETVTPSEAPVLAAEPEADKGTVLALTENNFDDTIAEGITFIKFYAPWCGHCKTLAPTWEELSKKEFPGLAGVKIAEVDCTAERNICSKYSVRGYPTLLLFRGGKKVSEHSGGRDLDSLHRFVLSQAKDEL

SEQ ID NO: 3593 - DNA, 3379 bp, Homo sapien
ctggcctgggcctgaagtgagtgagaggcacatgaagagaagtattcaagtatttatacagataggaatcaagataatcaacaatgtctgtcactgaggaagacctgtgccaccatatgaaagtagtagttcgtgtacgtccggaaaacactaaagaaaaagcagctggatttcataaagtggttcatgttgtggataaacatatcctagtttttgatcccaaacaagaagaagtcagttttttccatggaaagaaaactacaaatcaaaatgttataaagaaacaaaataaggatcttaaatttgtatttgatgctgtttttgatgaaacgtcaactcagtcagaagtttttgaacacactactaagccaattcttcgtagttttttgaatggatataattgcacagtacttgcctatggtgccactggtgctgggaagacccacactatgctaggatcagctgatgaacctggagtgatgtatctaacaatgttacacctttacaaatgcatggatgagattaaagaagagaaaatatgtagtactgcagtttcatatctggaggtatataatgaacagattcgtgatctcttagtaaattcagggccacttgctgtccgggaagatacccaaaaaggggtggtcgttcatggacttactttacaccagcccaaatcctcagaagaaattttacatttattggataatggaaacaaaaacaggacacaacatcccactgatatgaatgccacatcttctcgttctcatgctgttttccaaatttacttgcgacaacaagacaaaacagcaagtatcaatcaaaatgtccgtattgccaagatgtcactcattgacctggcaggatctgagcgagcaagtacttccggtgctaaggggacccgatttgtagaaggcacaaatattaatagatcacttttagctcttgggaatgtcatcaatgccttagcagattcaaagagaaagaatcagcatatcccttacagaaatagtaagcttactcgcttgttaaaggattctcttggaggaaactgtcaaactataatgatagctgctgttagtccttcctctgtattctacgatgacacatataacactcttaagtatgctaaccgggcaaaggacattaaatcttctttgaagagcaatgttcttaatgtcaataatcatataactcaatatgtaaagatctgtaatgagcagaaggcagagattttattgttaaaagaaaaactaaaagcctatgaagaacagaaagccttcactaatgaaaatgaccaagcaaagttaatgatttcaaaccctcaggaaaaagaaatcgaaaggtttcaagaaatcctgaactgcttgttccagaatcgagaagaaattagacaagaatatctgaagttggaaatgttacttaaagaaaatgaacttaaatcattctaccaacaacagtgccataaacaaatagaaatgatgtgttctgaagacaaagtagaaaaggccactggaaaacgagatcatagacttgcaatgttgaaaactcgtcgctcctacctggagaaaaggagggaggaggaattgaagcaatttgatgagaatactaattggctccatcgtgtcgaaaaagaaatgggactcttaagtcaaaacggtcatattccaaaggaactcaagaaagatcttcattgtcaccatttgcacctccagaacaaagatttgaaagcacaaattagacatatgatggatctagcttgtcttcaggaacagcaacacaggcagactgaagcagtattgaatgctttacttccaaccctaagaaaacaatattgcacattaaaagaagccggcctgtcaaatgctgcttttgaatctgacttcaaagagatcgaacatttggtagagaggaaaaaagtggtagtttgggctgaccaaactggcgaacaaccaaagcaaaacgatctacccgggatttctgttcttatgaccttttcacaacttggaccagttcagcctattccttgttgctcatcttcaggtggaactaatctggttaagattcctacagaaaaaagaactcggagaaaactaatgccatctcccttgaaaggacagcatactctaaagtctccaccatctcaaagtgtgcagctcaatgattctcttagcaaagaacttcagcctattgtatatacaccagaagactgtagaaaagcttttcaaaatccgtctacagtaaccttaatgaaaccatcatcatttactacaagttttcaggctatcagctcaaacataaacagtgataattgtctgaaaatgttgtgtgaagtagctatccctcataatagaagaaaagaatgtggacaggaggacttggactctacatttactatatgtgaagacatcaagagctcgaagtgtaaattacccgaacaagaatcactaccaaatgataacaaagacattttacaacggcttgatccttcttcattctcaactaagcattctatgcctgtaccaagcatggtgccatcctacatggcaatgactactgctgccaaaaggaaacggaaattaacaagttctacatcaaacagttcgttaactgcagacgtaaattctggatttgccaaacgtgttcgacaagataattcaagtgagaagcacttacaagaaaacaaaccaacaatggaacataaaagaaacatctgtaaaataaatccaagcatggttagaaaatttggaagaaatatttcaaaaggaaatctaagataaatcacttcaaaaccaagcaaaatgaagttgatcaaatctgcttttcaaagtttatccaataccctttcaaaaatatatttaaaatctttgaaagaagacccatcttaaagctaagtttacccaagtactttcagcaagcagaaaaatgaaactctttgttttcttcttttgtgttctaaaaaaataaaatttcaaaagaaaaggttgtcttttaagttttttaaatatttgttgccttttaaaatccctgagtgtaagttaccatggtggcagcttagttttactatgccacaacaagttgactaggacattttagtaaatggtagtgagttaaattatctttattattttttaaaaataagaatttagaagtggtaaaattatggcccaagatgtatttggttctctattatgttttgatacattattttaatcatatatatgactttccttttcaaaaatactttaatgtacaagtgtaaatatatgtgcccataaaatcattgtaaatattatttagtcatcacaaataaaatattgtcccttgctacttgatatattaaagatgtagattttaaagtgaaaaaaaaaaaaaaaaa

SEQ ID NO: 3594 - protein, 898 aa, Homo sapien
MSVTEEDLCHHMKVVVRVRPENTKEKAAGFHKVVHVVDKHILVFDPKQEEVSFFHGKKTTNQNVIKKQNKDLKFVFDAVFDETSTQSEVFEHTTKPILRSFLNGYNCTVLAYGATGAGKTHTMLGSADEPGVMYLTMLHLYKCMDEIKEEKICSTAVSYLEVYNEQIRDLLVNSGPLAVREDTQKGVVVHGLTLHQPKSSEEILHLLDNGNKNRTQHPTDMNATSSRSHAVFQIYLRQQDKTASINQNVRIAKMSLIDLAGSERASTSGAKGTRFVEGTNINRSLLALGNVINALADSKRKNQHIPYRNSKLTRLLKDSLGGNCQTIMIAAVSPSSVFYDDTYNTLKYANRAKDIKSSLKSNVLNVNNHITQYVKICNEQKAEILLLKEKLKAYEEQKAFTNENDQAKLMISNPQEKEIERFQEILNCLFQNREEIRQEYLKLEMLLKENELKSFYQQQCHKQIEMMCSEDKVEKATGKRDHRLAMLKTRRSYLEKRREEELKQFDENTNWLHRVEKEMGLLSQNGHIPKELKKDLHCHHLHLQNKDLKAQIRHMMDLACLQEQQHRQTEAVLNALLPTLRKQYCTLKEAGLSNAAFESDFKEIEHLVERKKVVVWADQTGEQPKQNDLPGISVLMTFSQLGPVQPIPCCSSSGGTNLVKIPTEKRTRRKLMPSPLKGQHTLKSPPSQSVQLNDSLSKELQPIVYTPEDCRKAFQNPSTVTLMKPSSFTTSFQAISSNINSDNCLKMLCEVAIPHNRRKECGQEDLDSTFTICEDIKSSKCKLPEQESLPNDNKDILQRLDPSSFSTKHSMPVPSMVPSYMAMTTAAKRKRKLTSSTSNSSLTADVNSGFAKRVRQDNSSEKHLQENKPTMEHKRNICKINPSMVRKFGRNISKGNLR

SEQ ID NO: 3595 - DNA, 1397 bp, Homo sapien
ggctgctgtctggggcggtagctgggggggcgctctcccccctgcccgcgactcggagcacccccacccctcccctgccgggccaggccgggcggcgttgttggcgggggccccggtggaggcccggcctgggcggcgcccgccatgaatgggctgtcgctgagtgagctctgctgcctcttctgctgcccgccctgccccggccgcatcgctgccaagctcgccttcctgccgccggaggccacctactccctggtgcctgagcccgagccggggcctggtggggccggggccgcccccttggggaccctgagagcctcctcgggcgcacccgggcgctggaagctgcacctgacggagcgtgccgacttccagtacagccagcgcgagctggacaccatcgaggtcttccccaccaagagcgcccgcggcaaccacgtctcctgcatgtatgttcgctgcgtgcctggtgccaggtacacggtcctcttctcgcacggcaatgccgtggacctgggccagatgagcagcttctacattggcctgggctcccgcctccactgcaacatcttctcctacgactactccggctacggtgccagctcgggcaggccttccgagaggaacctctatgccgacatcgacgccgcctggcaggccctgcgcaccaggtacggcatcagcccggacagcatcatcctgtacgggcagagcatcggcacggtgcccaccgtggacctggcctcgcgctacgagtgtgccgcggtggtgctgcactcgccgctcacctcgggcatgcgcgtcgccttccccgacaccaagaagacctactgcttcgacgccttccctaagtgagcggcccgggcggggacgggggcggggcggggcccgggccgggcgcgaagtctcaccggctccacgaccctcccgcagcatcgagaaggtgtccaagatcacgtctcccgtgctcatcatccacggcacggaggacgaggtgatcgacttctcgcacgggctggcgctctacgagcgctgccccaaggcggtggagccgctgtgggtggagggcgccgggcacaacgacatcgagctctacagccagtacctggagcgcctgcgtcgcttcatctcccaggagctgcccagccagcgcgcctagcggcggccccaaccggccggacctcagcaataaggcggcccccggacctcaccccgcgccggcccccacccaggggctgcatgtggaccccccgggcggcccaggggaccccgccccgacccaggggctgtggacgatgtacaggcaacagagctacgcactcctttccttttggaagcaagaagaaaatacgtgaaaacggaaattaaagatttaaaattttaaaaaaaaaaaaaaa

SEQ ID NO: 3596 - protein, 236 aa, Homo sapien
MNGLSLSELCCLFCCPPCPGRIAAKLAFLPPEATYSLVPEPEPGPGGAGAAPLGTLRASSGAPGRWKLHLTERADFQYSQRELDTIEVFPTKSARGNHVSCMYVRCVPGARYTVLFSHGNAVDLGQMSSFYIGLGSRLHCNIFSYDYSGYGASSGRPSERNLYADIDAAWQALRTRYGISPDSIILYGQSIGTVPTVDLASRYECAAVVLHSPLTSGMRVAFPDTKKTYCFDAFPK

SEQ ID NO: 3597 - DNA, 642 bp, Homo sapien
gctgaagtgaaaacgagaccaaggtctagctctactgttggtacttatgagatccagtcctggcaacatggagaggattgtcatctgtctgatggtcatcttcttggggacactggtccacaaatcaagctcccaaggtcaagatcgccacatgattagaatgcgtcaacttatagatattgttgatcagctgaaaaattatgtgaatgacttggtccctgaatttctgccagctccagaagatgtagagacaaactgtgagtggtcagctttttcctgttttcagaaggcccaactaaagtcagcaaatacaggaaacaatgaaaggataatcaatgtatcaattaaaaagctgaagaggaaaccaccttccacaaatgcagggagaagacagaaacacagactaacatgcccttcatgtgattcttatgagaaaaaaccacccaaagaattcctagaaagattcaaatcacttctccaaaagatgattcatcagcatctgtcctctagaacacacggaagtgaagattcctgaggatctaacttgcagttggacactatgttacatactctaatatagtagtgaaagtcatttctttgtattccaagtggaggagccctattaaattatataaagaaata

SEQ ID NO: 3598 - protein, 162 aa, Homo sapien
MRSSPGNMERIVICLMVIFLGTLVHKSSSQGQDRHMIRMRQLIDIVDQLKNYVNDLVPEFLPAPEDVETNCEWSAFSCFQKAQLKSANTGNNERIINVSIKKLKRKPPSTNAGRRQKHRLTCPSCDSYEKKPPKEFLERFKSLLQKMIHQHLSSRTHGSEDS

SEQ ID NO: 3599 - DNA, 2025 bp, Homo sapien
cttctgtgtgtgcacatgtgtaatacatatctgggatcaaagctatctatataaagtccttgattctgtgtgggttcaaacacatttcaaagcttcaggatcctgaaaggttttgctctacttcctgaagacctgaacaccgctcccataaagccatggcttgccttggatttcagcggcacaaggctcagctgaacctggctaccaggacctggccctgcactctcctgttttttcttctcttcatccctgtcttctgcaaagcaatgcacgtggcccagcctgctgtggtactggccagcagccgaggcatcgccagctttgtgtgtgagtatgcatctccaggcaaagccactgaggtccgggtgacagtgcttcggcaggctgacagccaggtgactgaagtctgtgcggcaacctacatgatggggaatgagttgaccttcctagatgattccatctgcacgggcacctccagtggaaatcaagtgaacctcactatccaaggactgagggccatggacacgggactctacatctgcaaggtggagctcatgtacccaccgccatactacctgggcataggcaacggaacccagatttatgtaattgatccagaaccgtgcccagattctgacttcctcctctggatccttgcagcagttagttcggggttgtttttttatagctttctcctcacagctgtttctttgagcaaaatgctaaagaaaagaagccctcttacaacaggggtctatgtgaaaatgcccccaacagagccagaatgtgaaaagcaatttcagccttattttattcccatcaattgagaaaccattatgaagaagagagtccatatttcaatttccaagagctgaggcaattctaacttttttgctatccagctatttttatttgtttgtgcatttggggggaattcatctctctttaatataaagttggatgcggaacccaaattacgtgtactacaatttaaagcaaaggagtagaaagacagagctgggatgtttctgtcacatcagctccactttcagtgaaagcatcacttgggattaatatggggatgcagcattatgatgtgggtcaaggaattaagttagggaatggcacagcccaaagaaggaaaaggcagggagcgagggagaagactatattgtacacaccttatatttacgtatgagacgtttatagccgaaatgatcttttcaagttaaattttatgccttttatttcttaaacaaatgtatgattacatcaaggcttcaaaaatactcacatggctatgttttagccagtgatgctaaaggttgtattgcatatatacatatatatatatatatatatatatatatatatatatatatatatatattttaatttgatagtattgtgcatagagccacgtatgtttttgtgtatttgttaatggtttgaatataaacactatatggcagtgtctttccaccttgggtcccagggaagttttgtggaggagctcaggacactaatacaccaggtagaacacaaggtcatttgctaactagcttggaaactggatgaggtcatagcagtgcttgattgcgtggaattgtgctgagttggtgttgacatgtgctttggggcttttacaccagttcctttcaatggtttgcaaggaagccacagctggtggtatctgagttgacttgacagaacactgtcttgaagacaatggcttactccaggagacccacaggtatgaccttctaggaagctccagttcgatgggcccaattcttacaaacatgtggttaatgccatggacagaagaaggcagcaggtggcagaatggggtgcatgaaggtttctgaaaattaacactgcttgtgtttttaactcaatattttccatgaaaatgcaacaacatgtataatatttttaattaaataaaaatctgtggtggtcgttttaaaaaaaaaaaaaaaaaaaaaaaaaaaaaaaaaaaaaaaaaaaaaaaaaaaaaaaaaa

SEQ ID NO: 3600 - protein, 223 aa, Homo sapien
MACLGFQRHKAQLNLATRTWPCTLLFFLLFIPVFCKAMHVAQPAVVLASSRGIASFVCEYASPGKATEVRVTVLRQADSQVTEVCAATYMMGNELTFLDDSICTGTSSGNQVNLTIQGLRAMDTGLYICKVELMYPPPYYLGIGNGTQIYVIDPEPCPDSDFLLWILAAVSSGLFFYSFLLTAVSLSKMLKKRSPLTTGVYVKMPPTEPECEKQFQPYFIPIN

SEQ ID NO: 3601 - DNA, 1632 bp, Homo sapien
atagatactagattgtattgaattctgttttaattattctctaggtaagtatgttttaggattaaataccttttacagatactgaaagtgcctccttttgtggtgtaaaaaacaaattatggtgcaaaaagtaatcactagattgaaatacatgaaggttttttgctttttgacatacgaaaatgtcaagagaaaggccaaagatttgtactttttcacttacaaagcactcctttttcccttaaacttctttctgtcaaattagatttaatgagagagtactatttttaaggagctatctgtttatgtagaatgattttgttaagagtaatgtaaactattattgagtagaggcctaaagaggactgtgccatttttgctatttaaaggaatcacaaatgatcatacttaagtgagcaaaaatgacaagttttactagctaagtagagaaataaatctcaaatgcagcgctacaattttcattatcttaagtacattgtacatttctacagaacctgtgattattctcgcatgataaggatggtacttgcatatggtgaattactactgttgacagtttccgcagaaatcctatttcagtggaccaacattgtggcatggcagcaaatgccaacattttgtggaatagcagcaaatctacaagagaccctggttggtttttcgttttgttttctttgttttttcccccttctcctgaatcagcagggatggaaggagggtagggaagttatgaattactccttccagtagtagctctgaagtgtcacatttaatatcagttttttttaaacatgattctagttaaatgtagaagagagaagaaagaggaagtgttcacttttttaatacactgatttagaaatttgatgtcttatatcagtagttctgaggtattgatagcttgctttatttctgcctttacgttgacagtgttgaagcagggtgaataactagggcatatatttttttttttttttgtaagctgtttcatgatgttttctttggaatttccggataagttcaggaaaacattctgcatgttgtatctagtctgatgtacttatccatctcattacaaacaaaaacacacagaactgcatttgtagctctgtaatccttgaatacggaagtaaattttcttctttcctgactttgacattgtagctatactgtttccatttttgtttttacaaatcctttgggtctaattctgtgagcctacctatagcactggattaaaatgtctgcatcatttctttagttatccagttaactttaaaactgttgtaaaagtgtaaaccagcccatgacaggtttttgtacatgttaaagaacttcattgttcagttttcatgattattgtgtaaggaagactgatgtagatgttctgtgctgtcctggaccatgttaattacacttacgacgtattttagttccacatcacaatgatttgtccccagtgacccttttatcctttctaggcacatttcttgttgttgttgttgttgcagttcccctttgcattgtattgctttgacaactgtaatttgaatcagatctgaaagaggtccagaataaaatatattttgatattaaaaaaagaaaaaaaat

SEQ ID NO: 3602 - protein, 102 aa, Homo sapien
MQRYNFHYLKYIVHFYRTCDYSRMIRMVLAYGELLLLTVSAEILFQWTNIVAWQQMPTFCGIAANLQETLVGFSFCFLCFFPLLLNQQGWKEGREVMNYSFQ

SEQ ID NO: 3603 - DNA, 442 bp, Homo sapien
ggccattatggccggggaaggtgctttagtctgaagatggcggcctcagcagcgcgaggtgctgcggcgctgcgtagaagtatcaatcagccggttgcttttgtgagaagaattccttggactgcggcgtcgagtcagctgaaagaacactttgcacagttcggccatgtcagaaggtgcattttaccttttgacaaggagactggctttcacagaggtttgggttgggttcagttttcttcagaagaaggacttcggaatgcactacaacaggaaaatcatattatagatggagtaaaggtccaggttcacactagaaggccaaaacttccgcaaacatctgatgatgaaaagaaagatttttgagactgcagcctattaataaagttaacataactgagaaaaaaaaaaaaaacaaaaaaaaaaaaaaaaaaaaaaaaaa

SEQ ID NO: 3604 - protein, 109 aa, Homo sapien
MAASAARGAAALRRSINQPVAFVRRIPWTAASSQLKEHFAQFGHVRRCILPFDKETGFHRGLGWVQFSSEEGLRNALQQENHIIDGVKVQVHTRRPKLPQTSDDEKKDF

SEQ ID NO: 3605 - DNA, 3330 bp, Homo sapien
gcatccgtgcgtctgtggaaggctgcgtttccggcctgagaaaccgtcatgtttctggggagtcacctcagctggcagttaccaccgtgttagaaagcagcctcaggaccggccacctccatcactggcgtcaccatgggggctgtgctgggtgtcttctccctcgccagctgggttccatgcctctgcagcggtgcctcatgtttgctgtgtagttgctgtcctaacagtaagaattccacggtgactcgcctcatttatgctttcattctcctcctgagcactgtcgtatcctatatcatgcagagaaaagagatggaaacttacttgaagaagattcctggattttgtgaagggggatttaaaatccatgaggctgatataaatgcagataaagattgtgatgtgctggttggttataaagctgtgtatcggatcagctttgccatggccatctttttctttgtcttttctctgctcatgttcaaagtaaaaacaagtaaagatctccgagcggcagtacacaatgggttttggttcttcaaaattgctgcccttattggaatcatggttggctctttctacatccctgggggctatttcagctcagtctggtttgttgttggcatgataggggccgccctcttcatcctcattcagctggtgctgctggtagattttgctcattcttggaatgaatcatgggtaaatcgaatggaagaaggaaacccaaggttgtggtatgctgctttactgtctttcacaagcgccttttatatcctgtcaatcatctgtgtcgggctgctctatacatattacaccaaaccagatggctgcacagaaaacaagttcttcatcagtattaacctgatcctttgcgttgtggcttctattatatcgatccacccaaaaattcaggaacaccagcctcgctccggcctcttgcagtcctccctcatcaccctctacactatgtacctcacctggtcagccatgtccaatgaacctgatcgttcctgcaatcccaacctgatgagctttattacacgcataactgcaccaaccctggctcctggaaattcaactgctgtggtccctacccctactccaccatcaaagagtgggtctttactggattcagataattttattggactgtttgtctttgttctctgcctcttgtattctagcatccgcacttccactaatagccaagtagacaagctgaccctgtcagggagtgacagcgtcatccttggtgatacaactaccagtggtgccagtgatgaagaagatggacagcctcggcgggctgtggacaacgagaaagagggagtgcagtatagctactccttattccacctcatgctctgcttggcttccttgtacatcatgatgaccctgaccagctggtacagccctgatgcaaagtttcagagcatgaccagcaagtggccagctgtgtgggtcaagatcagctccagctgggtctgcctcctgctttacgtctggacccttgtggctccacttgtcctcaccagtcgggacttcagctgaacctctgagtgccaaggacaccactggaactcacaaaggtctccttcaccgaaaacccatataccttttaagtttgtttcaactaaaatattaagtgaatgctttgcaagtttgactgtatgcaggtttatatcagaaggtgagattgaataatgcttgatgcagaatcgaaacttctcatttatctgtatattatgtttacttctaaggatatagcacaaagggaacattttttgtttaaagtgaactacagctgtgctgtgaagagagttctttataaagcctgtaggttcttttaactttggtttaaaatgtaagataggaaaatgttggatatttgaggccatgcttaatatatttatattgcagtatcctttaaaagcaaaaaaaaaaaaatgcatttatattacagttttcctctatgaaagtccttacttatatgatacaagcactgtgttttgtgcttaaactcttcagcggggtagcatcaaagttcttggggaaggatcgtatatgtgggtcccttccctagaagaatggttgctgatatggctactgcttctacatcttgagttttttaatttactttttttacactgtagcattgagactgcttgattcaagtctggtgctttgccagatgtattaatttccataaatgctttgtgagtttggttaaaatgaagattcacttgggaaaacactgcagctttagtctgtgttactatcttgttatgagtatgtaaaagtaaaatgcatgtgaatttatcatatttgcactatgaaggtatttggttaaaatacaaagacttttaagattttaaggccctttcttccaacagcttttatagttagcagccattctttattttctggatagccaggttttatcacgcttctagtcaggatgctcctattccttctaaaaattacggtctgactagtgagcaaagtcttgaatttattcaaaagtcctaaataccttctctaggtaagacacttggtagatgagagacggaaggcattgtcaagaaccattttcatgagaggtggtgtgcaaaaaggtagaataaaagagttctttcaacaaagatttactgtctattctgtactagaccctgtaggttttggggtacagtgttaaacatgatagaggctctgccgtcttggactttaatagcttagagaagagagcaaatgagctgacaggtggttataatgtgaattagtgctgtggtttaggaattggagagaactcaaaggagaggtatttggtgtaatggtaggctttctggagaaaatgatatttaagccaagaactcttagaagttagctaagagagagatgggaaaatgagacgacattgctggagtagataaaactgcatgttaaaggcaggaagatggggaaaaaaagttcagtaaagctggaatggggaaatgtagtcagggactgaattttaaagggctttatcaacctcagtaaagagtttggaccttatgttgagggtggctgaaaacatattcatagtgtcatgaacaaattttatcttcagtcacttgggctgatatatagagaatggatttagagagatgagaccaggtgcagtccatatgagatgtgaaatagagaagtggaatcgtagggacggggagaaattgacaggtgagggctacttagcaattagaattttttttcagtccaccctcaacataaggtccaaactctttactgaggttgataaagccctttaaaattcagtacctgactaca

SEQ ID NO: 3606 - protein, 473 aa, Homo sapien
MGAVLGVFSLASWVPCLCSGASCLLCSCCPNSKNSTVTRLIYAFILLLSTVVSYIMQRKEMETYLKKIPGFCEGGFKIHEADINADKDCDVLVGYKAVYRISFAMAIFFFVFSLLMFKVKTSKDLRAAVHNGFWFFKIAALIGIMVGSFYIPGGYFSSVWFVVGMIGAALFILIQLVLLVDFAHSWNESWVNRMEEGNPRLWYAALLSFTSAFYILSIICVGLLYTYYTKPDGCTENKFFISINLILCVVASIISIHPKIQEHQPRSGLLQSSLITLYTMYLTWSAMSNEPDRSCNPNLMSFITRITAPTLAPGNSTAVVPTPTPPSKSGSLLDSDNFIGLFVFVLCLLYSSIRTSTNSQVDKLTLSGSDSVILGDTTTSGASDEEDGQPRRAVDNEKEGVQYSYSLFHLMLCLASLYIMMTLTSWYSPDAKFQSMTSKWPAVWVKISSSWVCLLLYVWTLVAPLVLTSRDFS

SEQ ID NO: 3607 - DNA, 2018 bp, Rattus norvegicus
cctttccgtctggcggcagccatcaggtaagccaagatgggtgcatacaagtacatccaggagctatggagaaagaagcagtctgatgtcatgcgctttcttctgagggtccgctgctggcagtaccgccagctctctgctctccacagggctccccgccccacccggcctgataaagcgcgccgactgggctacaaggccaagcaaggttacgttatatataggattcgtgttcgccgtggtggccgaaaacgcccagttcctaagggtgcaacttacggcaagcctgtccatcatggtgttaaccagctaaagtttgctcgaagccttcagtccgttgcagaggagcgagctggacgccactgtggggctctgagagtcctgaattcttactgggttggtgaagattccacatacaaattttttgaggttatcctcattgatccattccataaagctatcagaagaaatcctgacacccagtggatcaccaaaccagtccacaagcacagggagatgcgtgggctgacatctgcaggccgaaagagccgtggccttggaaagggccacaagttccaccacactattggtggctctcgccgggcagcttggagaaggcgcaatactctccagctccaccgttaccgctaatataagtaaagtttgtaaaattcatacttaataaacaatttaggacagtcatgtctgcttacaggtgttatttgtctgttaaaactagtctgcagatgtttcttgaatgctttgtcaaattaagaaagttaaagtgcaataatgtttgaagacaataagtggtggtgtatcttgtttctaataagataaacttttttgtctttgctttatcttattagggagttgtatgtcagtgtataaaacatactgtgtggtataacaggcttaataaattctttaaaaggagagaactgaaactagccctgtagatttgtctggtgcatgtgatgaaacctgcagctttatcggagtgatggcaatgctctgctggtttattttcaagtggctgcgttttttttagtttggcaggtgtagactttttaagttgggctttagaaaatctgggttagcctgaagaaaattgcctcagcctccacagtaccattttaaattcacataaaaggtgaaagctcctggttcagtgccatggcttcatggcattcagtgattagtggtaatggtaaacactggtgtgttttgaagttgaatgtgcgataaaattattagccttaagattggtaagctagcaatgaatgctagggtgggaagctggtgagccagtggccattagataaatacctttcaagtgtgagcttagacgtcaaccctaaaatacttaaccgtaatgctaattgtgatcattatgaatcccttcagtcacattagggggaaagtagttggctataagtacgtcattcttagtccagtcagtcttaaaaacatcttgggttacccactctgtccactcccataggctacagaaaaagtcacaagcgcatggtttccaaccatatgtgttttctgcagttatttctcttgttctggccaaacaaccctaaaaatccttaccattccacaaagttggaccatcacttgtgcacccactttgactatgagtataccaccacattgcatttctgtttgcaccatgtcttccaggagactagactactgttgtccagggtcaatttgagtgtaaagaaaatgtagacaaggaattgcccaattttaaattctgactttgctgacttaatttaaatgctcgttctgaaccaattttctcctatcttctctaggggtttcaaaagactcagttaattgatttccaggaagtactcatagcaagttcataaaagttcttgagacctaaatttcttcacaaaaaaagaaaagatcttaagtcatacattttaattgtgtagaggttgttcaactgaaggaataaatgtctattaaactaaaaaaaaaaaaaaaaaaaaaaaaaaaaa

SEQ ID NO: 3608 - protein, 204 aa, Rattus norvegicus [sequence omitted]

SEQ ID NO: 3609 - DNA, 1337 bp, Homo sapien
gcggcggactcggcttgttgtgttgctgcctgagtgccggagacggtcctgctgctgccgcagtcctgccagctgtccgacgatgtcgtcccacctagtcgagccgccgccgcccctgcacaacaacaacaacaactgcgaggaaaatgagcagtctctgcccccgccggccggcctcaacagttcctgggtggagctacccatgaacagcagcaatggcaatgataatggcaatgggaaaaatggggggctggaacacgtaccatcctcatcctccatccacaatggagacatggagaagattcttttggatgcacaacatgaatcaggacagagtagttccagaggcagttctcactgtgacagcccttcgccacaagaagatgggcagatcatgtttgatgtggaaatgcacaccagcagggaccatagctctcagtcagaagaagaagttgtagaaggagagaaggaagtcgaggctttgaagaaaagtgcggactgggtatcagactggtccagtagacccgaaaacattccacccaaggagttccacttcagacaccctaaacgttctgtgtctttaagcatgaggaaaagtggagccatgaagaaagggggtattttctccgcagaatttctgaaggtgttcattccatctctcttcctttctcatgttttggctttggggctaggcatctatattggaaagcgactgagcacaccctctgccagcacctactgagggaaaggaaaagcccctggaaatgcgtgtgacctgtgaagtggtgtattgtcacagtagcttatttgaacttgagaccattgtaagcatgacccaacctaccaccctgtttttacatatccaattccagtaaccctcaaattcaatattttattcaaactctgttgaggcattttactaaccttataccctttttggcctgaagacattttagaatttcctaacagagtttactgttgtttagaaatttgcaagggcttcttttccgcaaatgccaccagcagattataattttgtcggcaatgctattatctctaattagtgccaccagactagacctgtatcattcatggtataaattttactcttccaacataactaccatctctctcttaaaacgagatcaggttagcaaatgatgtaaaagaagctttattgtctagttgttttttttcccccaagacaaaggcaagtttccctaagtttgagttgatagttattaaaaagaaaacaaaacaaaaaaaaaaggcaaggcacaacaaaaaaatatcctgggcaataaaaaaaatattttaaaccaaaaaaaaaaaaaaaa

SEQ ID NO: 3610 - protein, 219 aa, Homo sapien
MSSHLVEPPPPLHNNNNNCEENEQSLPPPAGLNSSWVELPMNSSNGNDNGNGKNGGLEHVPSSSSIHNGDMEKILLDAQHESGQSSSRGSSHCDSPSPQEDGQIMFDVEMHTSRDHSSQSEEEVVEGEKEVEALKKSADWVSDWSSRPENIPPKEFHFRHPKRSVSLSMRKSGAMKKGGIFSAEFLKVFIPSLFLSHVLALGLGIYIGKRLSTPSASTY

SEQ ID NO: 3611 - DNA, 4646 bp, Homo sapien
gggaggcggtggccgaggcccaggcggtggcggcggcggcccaggaggcggcggacggggagctgcgggagcaggcccgggcctggctctctagcggccgcctggctgcagcatgcgcgcccgccgggggctgctgcggctgccgcgccgctcgctgctcgccgcgctcttcttcttttctctctcgtcctcgctgctgtacttcgtctatgtggcgcccggcatagtgaacacctacctcttcatgatgcaagcccaaggcattctgatccgggacaacgtgagaacaatcggtgctcaggtttatgagcaggtgcttcggagtgcttatgccaagaggaacagcagtgtaaatgactcagattatcctcttgacttgaaccacagtgaaaccttcctgcaaactacaacatttcttcctgaagacttcacctactttgcaaaccatacctgccctgaaagactcccttccatgaagggcccaatagacataaacatgagtgaaattggaatggattacattcatgaactcttctccaaagacccaaccatcaagctcggaggtcactggaagccttctgattgcatgcctcggtggaaggtggcgatccttatccccttccggaaccgccacgagcacctcccagtcctgttcagacacctgcttcccatgctccagcgccagcgcttgcagtttgcattttatgtggttgaacaagttggtacccaaccctttaatcgagccatgcttttcaacgttggctttcaagaggcaatgaaagacttggattgggactgtttgatttttcatgatgtagatcacataccggaaagtgatcgcaactattatggatgtggacagatgccgaggcattttgcaaccaaattggataagtatatgtatctgcttccttataccgagttctttggcggagtgagtggcttaacagtggaacaatttcggaaaatcaatggctttcctaatgctttctggggttggggtggagaagatgacgacctctggaacagagtacagaatgcaggctattctgtgagccggccagagggtgacacaggaaagtacaagtccattcctcatcaccatcgaggagaagtccagtttcttggaaggtatgctctgctgaggaagtcaaaagaacggcaagggctggatggcctcaacaacctgaactactttgcaaacatcacatacgacgccttgtataaaaacataactgtcaacctgacacccgagctggctcaggtgaacgagtactgagaggagagaatgtacgtttgctttacccaccgccaccaagaaagcagtccgatgagatttttttttggaggggggagggtctacacagcaagagaacagaaatactgtgtctcatgaaggatcacagagttcagggggaaaatgtgacagcacacgcacaaacgccttcactggatcagccgctggaactgagggagtgagcttggggacttccttcgtcagcactggctttctgttttcacaagacagacgtctgtcccgctgctctctccccatctcctaccccacatcctgtcttagccgcagtctccagaacccatgatgaactgtgatctgccgtggtcctgccgtggtcctgccgtggagcctgtccctacacatgaccttggagcctcttggccttcagagcagaggcaaacccaccacagggcagctgcgttttaggaagagcaaatgaaactccacaccattcttctagatctctggtgttctctttggtttcatttttttaaaaaattaccttctttgggtggggattgagggtggaggggagggtgtttgggaaagataaatagacataaatatataacaatcacttcttgaagaagtataattgtaaataagccatgtaaaatgcctttttaaaatttaattttctagctggctccaattcaaattgaggatttatgtattaggccacttacttggttggcaagtgcaggaactcagttaaaatgcagttgaagaatgtcatctcccgaattgctgtcactttggcgagggagtggatatagggcatgtcacaaaagaacaaaataacccgacctttattgctgggagctggcttctgtccctttcttcccccccccacgagtcttgcccttgacttctgctctggattcactcttccctgtcggccgcgcatgtgctcatcccactctccgctaagcgggaggctgctgttagagcaggctgcttcctgcctaaagcaggcccttcggggctcgctgcacacacatctctggctctccaggcttcgtgttctgtcttttcatcagcatggcggggcggggggcggggggcgggggtgtgtatgggaatccctccccctcttactttttctcttgtggaacttggccacagtttctgaacaatgtgcctacattaccagctggcttcagtgattcctctgtgtccctttttggtttctggaaagattctttgtcaacattagtaactgatacatagaaccaaggagcactcaaatagggagccaggagccagggagctggtgacacttgtgtgctgtggggcagctgggatccaggtaagaccggattgaagctttgaaattagactaacaaagctccagacagcaagagcccaggtgcactgctcacacccccacctgcattttgaagtcatattattttttgttttgttttttaagacggtctggctctgtcgcctaagctggagtgtggtggcacgatcacagctcactgcagcctccatctcctaggctcaagccattttcccacctcagcctcccgagtagctgggactacaggtgcacaccaccacacctggctaattttttgtatttttagtagagacaggggtttcttccatgttgcccaggctggtctcgaactcctggactcaagcaatccgcccaccttgacttcccaaagtgctgggattatgggcgggtgtgagccattgcgcccagccttgaagtcatgttctaaattgtatttgaatttgtgcctctttgtttttccccaaaccaaagccctcaaattgtagtctctgtcggcttctgcagaattctggaaaatgccagttttcctcccccgcccttgttttccataaaacatatttatatattgtgatgaggagtactttctgaagagtacttcgtatttttttttaattgccttgtttgccttcaacttccttgattttcatagtttacatgggtgtgtgtaggggtgtgtgtgtgtatgtgtgtgggttagggcttttttcgttgcatgtgatggttctgtggacatatgatccccacaaactgtgggagtgattggccaggccttgttttgtttgtttgtttgtttgtgtttttgttcttttgaagaatagagtggtatttagaaaataaattgcattgcaaagctcttatcggctcatatgagagagcaggttcctgcccttgaaaatgccggtaagctatagcatatgttttttaagacttaagcatttcatgctttaaaataccttcacaagtgaacattacacacagaagttcatttggttttcctttgttttatggtgcatatagcaataaagacccccctccaccctgcaacccccatcccccaccgggcctttgtccctgccttggcttttctccccttctcattctcctctcccctttcctcactgaaggctgtgagttgctttcaatgtgacaacactatgatgtcatttggaaggatttgccaggacagactgattctgagtcctgggtgccgtatgtgtatgcggcagtgttgtcaggcgatcttgtttgaagctctatgttgccataattaccatcaagtacacactgttggcaaaaggctaacacctgactttagaaaatgctgatttgagaacaaaaggaaaggtcttttttcactgcttaaagtggggtcactttgatacctttgcggtcatgtctgtgtctgatgagtgtagaatctctggatgtgcactgtcagtcatgtgtccaccaggcctcgaatatcatatgggaaatgtcatagttaaaaacgtacagccaggcccgtgtgctgttaatagtgtgaaattgtcatgttaaaaaaaaaaacaggaaccaaatgtgaccttgtgcatatattggtagctgaaaatcttcaaggctactgatgggtggccccttaatcttgtctttgattgctgtgtgcagggaaaggtgtccccgtttgttcatgctgttttggggggtgggggggtatttgcaagaatactcattttgacataataggtcctcttgtcagagatcctctaccacagacattaatagctgagcaggagccacatggattgattgtatccactcaccattgacgatggcattgagcgtagctagcttatttccatcactacgtgtttttgagcttgctcttacgttttaagaggtgccaggggtacatttttgcactgaaatctaaagatgttttaaaaaacacttttcacaaaaatagtcctttgtcattacattatttactcatgtgtttgtacatttttgtatgttaatttatgaatgattttttcagtaaaaaatacatattcaagaaccaaa

SEQ ID NO: 3612 - protein, 388 aa, Homo sapien
MRARRGLLRLPRRSLLAALFFFSLSSSLLYFVYVAPGIVNTYLFMMQAQGILIRDNVRTIGAQVYEQVLRSAYAKRNSSVNDSDYPLDLNHSETFLQTTTFLPEDFTYFANHTCPERLPSMKGPIDINMSEIGMDYIHELFSKDPTIKLGGHWKPSDCMPRWKVAILIPFRNRHEHLPVLFRHLLPMLQRQRLQFAFYVVEQVGTQPFNRAMLFNVGFQEAMKDLDWDCLIFHDVDHIPESDRNYYGCGQMPRHFATKLDKYMYLLPYTEFFGGVSGLTVEQFRKINGFPNAFWGWGGEDDDLWNRVQNAGYSVSRPEGDTGKYKSIPHHHRGEVQFLGRYALLRKSKERQGLDGLNNLNYFANITYDALYKNITVNLTPELAQVNEY

SEQ ID NO: 3613 - DNA, 2307 bp, Homo sapien
gtgactgtggagtttgaattgggtggcggttgactgtagagccgctctctctcactggcacagcgaggttttgctcagcccttgtctcgggaccgcagcctccgccgagcgccatggctcctaggaagggcagtagtcgggtggccaagaccaactccttacggaggcggaagctcgcctcctttctgaaagacttcgaccgtgaagtggaaatacgaatcaagcaaattgagtcagacaggcagaacctcctcaaggaggtggataacctctacaacatcgagatcctgcggctccccaaggctctgcgcgagatgaactggcttgactacttcgcccttggaggaaacaaacaggccctggaagaggcggcaacagctgacctggatatcaccgaaataaacaaactaacagcagaagctattcagacacccctgaaatctgccaaaacacgaaaggtaatacaggtagatgaaatgatagtggaagaggaagaagaagaagaaaatgaacgtaagaatcttcaaactgcaagagtcaaaaggtgtcctccatccaagaagagaactcagtccatacaaggaaaaggaaaagggaaaaggtcaagccgtgctaacactgttaccccagccgtgggccgattggaggtgtccatggtcaaaccaactccaggcctgacacccaggtttgactcaagggtcttcaagacccctggcctgcgtactccagcagcaggagagcggatttacaacatctcagggaatggcagccctcttgctgacagcaaagagatcttcctcactgtgccagtgggcggcggagagagcctgcgattattggccagtgacttgcagaggcacagtattgcccagctggatccagaggccttgggaaacattaagaagctctccaaccgtctcgcccaaatctgcagcagcatacggacccacaaatgagacaccaaagttgacaggatggacttttaatgggcacttctgggaccctgaagagacttcttcccttcaggcttattgtttgagtgtgaagttccagagcaaggagccatgttcctctaagggaattcaggaattcagacgtgctagtcccacaccagttaggtagagctgtctgttcaccctcccatcccagctgatcccagtcactgcttgctggggccatgccatggaagcttcccatcagtctcccagctgaatcctccctgctctctgagctgctgccttttgcctcctgcaactcaacatcctcttcaccctgccctgcctgcagttgagggggcgaagaagaaccctgtgttctcaggaagactgcctccaccaccgctacccagagaacctctgcatctggcatttctgctctctatgcttgagaccgggaggtttaggctcagataagtgagctctgggccatgagagggtaggtccagaaggtggggggaactgtacagatcagcagagcaggacagttggcagcagtgacctcagtagggaacatgtccgtctaccctctcgcactcatgacacctccccctaccagccctcctcttcctcctcctcctcctcctgtgggaggtggtcagtgggacttagggatctttcacctgctgtgcccagtagttctgaagtctgcttgtggagcagtgttttatgtttatccctgtttactgaagaccaaatactggtttggagacaacttccatgtcttgctcttctacctccctagttagtggaaatttggataagggaactgtagggcccagattctggaggttttatgtcattggccacagaataactgtctctaagctatccatggtccagtggtccctgccaagtctgtagacttcagagagcacttctctcttatggggttcatgggaacaggggcgggtgtgacttgcttggtggcctcattccatgtgtgcctgtgcctggggcatggactttgttaagcagagtcagcagtgaggtcctcattctccagccagcctctctgccctggagaatcatgtgctatgttctaagaatttgagaactagagtcctcatccccaggcttgaaggcacatggctttctcatgtagggctctctgtggtatttgttattattttgcaacaagaccattttagtaaaacagtcctgttcaagttgtattcttttaagttcttttattctcctttccctgagatttttgtatatattgttctgagtaatggtatctttgagctgattgttctaatcagagctggtacctactttcaataaattctggttttgtgttttcttctgt

SEQ ID NO: 3614 - protein, 280 aa, Homo sapien
MAPRKGSSRVAKTNSLRRRKLASFLKDFDREVEIRIKQIESDRQNLLKEVDNLYNIEILRLPKALREMNWLDYFALGGNKQALEEAATADLDITEINKLTAEAIQTPLKSAKTRKVIQVDEMIVEEEEEEENERKNLQTARVKRCPPSKKRTQSIQGKGKGKRSSRANTVTPAVGRLEVSMVKPTPGLTPRFDSRVFKTPGLRTPAAGERIYNISGNGSPLADSKEIFLTVPVGGGESLRLLASDLQRHSIAQLDPEALGNIKKLSNRLAQICSSIRTHK

SEQ ID NO: 3615 - DNA, 1453 bp, Homo sapien
ggccacgaaggccggcccccaccccgggacccccgccgtccccgggccggccggccggtgggcacgatgagccaggtgctggggaagccgcagccgcaggacgaggacgacgcggaggaggaggaggaggaggatgagctggtggggctagcggactacggagacgggcccgactcctccgacgccgatccggacagcggcacagaggagggagttctggacttcagtgaccccttcagcactgaagtgaagccgagaatcctgctcatgggcctgaggagaagcggcaagtcgtctattcagaaagttgtctttcacaaaatgtctcccaacgaaactctgttcttggagagcactaataagatatgccgggaagatgtttccaacagctcctttgtcaattttcagatttgggacttcccaggacagattgacttttttgaccctacatttgactatgagatgatcttccggggaacaggagcactgatatttgtcattgactcacaggatgattacatggaagccctggccaggctccacctcacggtgaccagggcctacaaagtgaatactgacatcaacttcgaggtgtttattcataaagtggatggtctgtcagatgaccacaaaattgaaacccaaagagatattcaccagagggcaaacgatgaccttgcagatgctggattagaaaaaattcacctcagcttttatctgacaagcatatatgatcattcaatatttgaagcttttagcaaagttgttcagaaactgattccacaactcccaactctggagaatttgctgaacatctttatctcaaattctggaattgaaaaggcatttctatttgatgtggtcagtaaaatttatattgcaactgatagtactccggtggatatgcaaacctatgagctctgctgtgatatgatagatgtggttattgacatctcttgtatttatggtctcaaagaagatggagcaggaaccccctatgacaaggaatccacagccatcataaagcttaataatacaaccgtgctttatttaaaagaggtgacaaagttcctggctctcgtttgctttgtcagagaggaaagctttgaaagaaaagggctaattgactataattttcattgcttccggaaggccattcatgaagtttttgaggtgagaatgaaagtagtaaaatctcgaaaggttcagaatcggctgcagaagaaaaagagagccacccctaatgggacccctagagtgctgctgtaggtgaggtttcaggaatgtcttttgaaatcagaccttatccatgaggctgctgcgccatgttgcactaaaggaagaggaagaaggagattgggacacataccattgatttgttgttaaaaaaaaaaaaattcctgcaaccctcttgatcttctcttttataattaaagtcagcacttgaagcggg

SEQ ID NO: 3616 - protein, 400 aa, Homo sapien
MSQVLGKPQPQDEDDAEEEEEEDELVGLADYGDGPDSSDADPDSGTEEGVLDFSDPFSTEVKPRILLMGLRRSGKSSIQKVVFHKMSPNETLFLESTNKICREDVSNSSFVNFQIWDFPGQIDFFDPTFDYEMIFRGTGALIFVIDSQDDYMEALARLHLTVTRAYKVNTDINFEVFIHKVDGLSDDHKIETQRDIHQRANDDLADAGLEKIHLSFYLTSIYDHSIFEAFSKVVQKLIPQLPTLENLLNIFISNSGIEKAFLFDVVSKIYIATDSTPVDMQTYELCCDMIDVVIDISCIYGLKEDGAGTPYDKESTAIIKLNNTTVLYLKEVTKFLALVCFVREESFERKGLIDYNFHCFRKAIHEVFEVRMKVVKSRKVQNRLQKKKRATPNGTPRVLL

SEQ ID NO: 3617 - DNA, 895 bp, Homo sapien
gcggagcgaggctggaggcgcgggagggcagcgagaggttcgcgggtgcagcgcacaggagaccatgtccgggggcagcagctgcagccagaccccaagccgggccatccccgccactcgccgggtggtgctcggcgacggcgtgcagctcccgcccggggactacagcacgacccccggcggcacgctcttcagcaccaccccgggaggtaccaggatcatctatgaccggaaattcctgatggagtgtcggaactcacctgtgaccaaaacacccccaagggatctgcccaccattccgggggtcaccagcccttccagtgatgagccccccatggaagccagccagagccacctgcgcaatagcccagaagataagcgggcgggcggtgaagagtcacagtttgagatggacatttaaagcaccagccatcgtgtggagcactaccaaggggcccctcagggccttcctgggaggagtcccaccagccaggccttatgaaagtgatcatactgggcaggcgttggcgtggggtcggacaccccagccctttctccctcactcagggcacctgccccctcctcttcgtgaacaccagcagatacctccttgtgcctccactgatgcaggagctgccaccccaaggggagtgacccctgccagcacaccctgcagccaagggccaggaagtggacaagaacgaacccttccttccgaatgatcagcagttccagcccctcgctgctgggggcgcaaccaccccttccttaggttgatgtgcttgggaaagctccctccccctccttccccaagagaggaaataaaagccaccttcgccctaggaaaaaaaaaaaaaaaaaaaaaaaaaaaaaaaaaaaaaaaaaaaaaaaaaaa

SEQ ID NO: 3618 - protein, 118 aa, Homo sapien
MSGGSSCSQTPSRAIPATRRVVLGDGVQLPPGDYSTTPGGTLFSTTPGGTRIIYDRKFLMECRNSPVTKTPPRDLPTIPGVTSPSSDEPPMEASQSHLRNSPEDKRAGGEESQFEMDI

SEQ ID NO: 3619 - DNA, 2121 bp, Homo sapien; identical to SEQ ID NO: 29

SEQ ID NO: 3620 - protein, 337 aa, Homo sapien; identical to SEQ ID NO: 30

SEQ ID NO: 3621 - DNA, 2241 bp, Homo sapien
tgggacttatagaagggagaggagcgaacatggcagcgcgttggcggttttggtgtgtctctgtgaccatggtggtggcgctgctcatcgtttgcgacgttccctcagcctctgcccaaagaaagaaggagatggtgttatcagaaaaggttagtcagctgatggaatggactaacaaaagacctgtaataagaatgaatggagacaagttccgtcgccttgtgaaagccccaccgagaaattactccgttatcgtcatgttcactgctctccaactgcatagacagtgtgtcgtttgcaagcaagctgatgaagaattccagatcctggcaaactcctggcgatactccagtgcattcaccaacaggatattttttgccatggtggattttgatgaaggctctgatgtatttcagatgctaaacatgaattcagctccaactttcatcaactttcctgcaaaagggaaacccaaacggggtgatacatatgagttacaggtgcggggtttttcagctgagcagattgcccggtggatcgccgacagaactgatgtcaatattagagtgattagacccccaaattatgctggtccccttatgttgggattgcttttggctgttattggtggacttgtgtatcttcgaagaagtaatatggaatttctctttaataaaactggatgggcttttgcagctttgtgttttgtgcttgctatgacatctggtcaaatgtggaaccatataagaggaccaccatatgcccataagaatccccacacgggacatgtgaattatatccatggaagcagtcaagcccagtttgtagctgaaacacacattgttcttctgtttaatggtggagttaccttaggaatggtgcttttgtgtgaagctgctacctctgacatggatattggaaagcgaaagataatgtgtgtggctggtattggacttgttgtattattcttcagttggatgctctctatttttagatctaaatatcatggctacccatacagctttctgatgagttaaaaaggtcccagagatatatagacactggagtactggaaattgaaaaacgaaaatcgtgtgtgtttgaaaagaagaatgcaacttgtatattctgtattacctctttttttcaagtgatttaaatagttaatcatttaaccaaagaagatgtgtagtgccttaacaagcaatcctctgtcaaaatctgaggtatttgaaaataattatcctcttaaccttctcttcccagtgaactttatggaacatttaatttagtacaattaagtatattataaaaattgtaaaactactactttgttttagttagaacaaagctcaaaactactttagttaacttggtcatctgatcttatattgccttatccaaagatggggaaagtaagtcctgaccaggtgttcccacatatgcctgttacagataactacattaggaattcattcttagcttcttcatctttgtgtggatgtgtatactttacgcatctttccttttgagtagagaaattatgtgtgtcatgtggtcttctgaaaatggaacaccattcttcagagcacacgtctagccctcagcaagacagttgtttctcctcctccttgcatatttcctactgcgctccagcctgagtgatagagtgagactctgtctcaaaaaaaaagtatctctaaatacaggattataatttctgcttgagtatggtgttaactaccttgtatttagaaagatttcagattcattccatctccttagttttcttttaaggtgacccatctgtgataaaaatatagcttagtgctaaaatcagtgtaacttatacatggcctaaaatgtttctacaaattagagtttgtcacttattccatttgtacctaagagaaaaataggctcagttagaaaaggactccctggccaggcgcagtgacttacgcctgtaatctcagcactttgggaggccaaggcaggcagatcacgaggtcaggagttcgagaccatcctggccaacatggtgaaaccccgtctctactaaaaatataaaaattagctgggtgtggtggcaggagcctgtaatcccagctgcacaggaggctgaggcacgagaatcacttgaactcaggagatggaggtttcagtgagccgagatcacgccactgcactccagcctggcaacagagcgagactccatctcaaaaaaaaaaaaaaaaaaaa

SEQ ID NO: 3622 - protein, 335 aa, Homo sapien
MAARWRFWCVSVTMVVALLIVCDVPSASAQRKKEMVLSEKVSQLMEWTNKRPVIRMNGDKFRRLVKAPPRNYSVIVMFTALQLHRQCVVCKQADEEFQILANSWRYSSAFTNRIFFAMVDFDEGSDVFQMLNMNSAPTFINFPAKGKPKRGDTYELQVRGFSAEQIARWIADRTDVNIRVIRPPNYAGPLMLGLLLAVIGGLVYLRRSNMEFLFNKTGWAFAALCFVLAMTSGQMWNHIRGPPYAHKNPHTGHVNYIHGSSQAQFVAETHIVLLFNGGVTLGMVLLCEAATSDMDIGKRKIMCVAGIGLVVLFFSWMLSIFRSKYHGYPYSFLMS

SEQ ID NO: 3623 - DNA, 3084 bp, Homo sapien
aagatctaaaaacggacatctccaccgtgggtggctcctttttctttttctttttttcccacccttcaggaagtggacgtttcgttatcttctgatccttgcaccttcttttggggaaacggggcccttctgcccagatcccctctcttttctcggaaaacaaactactaagtcggcatccggggtaactacagtggagagggtttccgcggagacgcgccgccggaccctcctctgcactttggggaggcgtgctccctccagaaccggcgttctccgcgcgcaaatcccggcgacgcggggtcgcggggtggccgccggggcagcctcgtctagcgcgcgccgcgcagacgcccccggagtcgccagctaccgcagccctcgccgcccagtgcccttcggcctcggggcgggcgcctgcgtcggtctccgcgaagcgggaaagcgcggcggccgccgggattcgggcgccgcggcagctgctccggctgccggccggcggccccgcgctcgcccgccccgcttccgcccgctgtcctgctgcacgaacccttccaactctcctttcctcccccacccttgagttacccctctgtctttcctgctgttgcgcgggtgctcccacagcggagcggagattacagagccgccgggatgccccaactctccggaggaggtggcggcggcgggggggacccggaactctgcgccacggacgagatgatccccttcaaggacgagggcgatcctcagaaggaaaagatcttcgccgagatcagtcatcccgaagaggaaggcgatttagctgacatcaagtcttccttggtgaacgagtctgaaatcatcccggccagcaacggacacgaggtggccagacaagcacaaacctctcaggagccctaccacgacaaggccagagaacaccccgatgacggaaagcatccagatggaggcctctacaacaagggaccctcctactcgagttattccgggtacataatgatgccaaatatgaataacgacccatacatgtcaaatggatctctttctccacccatcccgagaacatcaaataaagtgcccgtggtgcagccatcccatgcggtccatcctctcacccccctcatcacttacagtgacgagcacttttctccaggatcacacccgtcacacatcccatcagatgtcaactccaaacaaggcatgtccagacatcctccagctcctgatatccctactttttatcccttgtctccgggtggtgttggacagatcaccccacctcttggctggcaaggtcagcctgtatatcccatcacgggtggattcaggcaaccctacccatcctcactgtcagtcgacacttccatgtccaggttttcccatcatatgattcccggtcctcctggtccccacacaactggcatccctcatccagctattgtaacacctcaggtcaaacaggaacatccccacactgacagtgacctaatgcacgtgaagcctcagcatgaacagagaaaggagcaggagccaaaaagacctcacattaagaagcctctgaatgcttttatgttatacatgaaagaaatgagagcgaatgtcgttgctgagtgtactctaaaagaaagtgcagctatcaaccagattcttggcagaaggtggcatgccctctcccgtgaagagcaggctaaatattatgaattagcacggaaagaaagacagctacatatgcagctttatccaggctggtctgcaagagacaattatggtaagaaaaagaagaggaagagagagaaactacaggaatctgcatcaggtacaggtccaagaatgacagctgcctacatctgaaacatggtggaaaacgaagctcattcccaacgtgcaaagccaaggcagcgaccccaggacctcttctggagatggaagcttgttgaaaacccagactgtctccacggcctgcccagtcgacgccaaaggaacactgacatcaattttaccctgaggtcactgctagagacgctgatccataaagacaatcactgccaacccctctttcgtctactgcaagagccaagttccaaaataaagcataaaaaggttttttaaaaggaaatgtaaaagcacatgagaatgctagcaggctgtggggcagctgagcagcttttctccccccatatctgcgtgcacttcccagagcatcttgcatccaaacctgtaacctttcggcaaggacggtaacttggctgcatttgcctgtcatgcgcaactggagccagcaaccagctatccatcagcaccccagtggaggagttcatggaagagttccctctttgtttctgcttcatttttctttcttttcttttctcctaaagcttttatttaacagtgcaaaaggatcgtttttttttgcttttttaaacttgaatttttttaatttacactttttagttttaattttcttgtatattttgctagctatgagcttttaaataaaattgaaagttctggaaaagtttgaaataatgacataaaaagaagccttctttttctgagacagcttgtctggtaagtggcttctctgtgaattgcctgtaacacatagtggcttctccgcccttgtaaggtgttcagtagagctaaataaatgtaatagccaaaccccactctgttggtagcaattggcagccctatttcagtttattttttcttctgttttcttcttttctttttttaaacagtaaaccttaacagatgcgttcagcagactggtttgcagtgaattttcatttctttccttatcacccccttgttgtaaaaagcccagcacttgaattgttattactttaaatgttctgtatttgtatctgtttttattagccaattagtgggattttatgccagttgttaaaatgagcattgatgtacccattttttaaaaaagcaagcacagcctttgcccaaaactgtcatcctaacgtttgtcattccagtttgagttaatgtgctgagcatttttttaaaagaagctttgtaataaaacatttttaaaaattgtcatttaaaaaaaaaaaaaaaaaa

SEQ ID NO: 3624 - protein, 399 aa, Homo sapien
MPQLSGGGGGGGGDPELCATDEMIPFKDEGDPQKEKIFAEISHPEEEGDLADIKSSLVNESEIIPASNGHEVARQAQTSQEPYHDKAREHPDDGKHPDGGLYNKGPSYSSYSGYIMMPNMNNDPYMSNGSLSPPIPRTSNKVPVVQPSHAVHPLTPLITYSDEHFSPGSHPSHIPSDVNSKQGMSRHPPAPDIPTFYPLSPGGVGQITPPLGWQGQPVYPITGGFRQPYPSSLSVDTSMSRFSHHMIPGPPGPHTTGIPHPAIVTPQVKQEHPHTDSDLMHVKPQHEQRKEQEPKRPHIKKPLNAFMLYMKEMRANVVAECTLKESAAINQILGRRWHALSREEQAKYYELARKERQLHMQLYPGWSARDNYGKKKKRKREKLQESASGTGPRMTAAYI

SEQ ID NO: 3625 - DNA, 1881 bp, Homo sapien
ggcacgagggttagattagtctgaagccgccaccagccccaggcccccgtgcagaagaaaagcgggagggaacggcggaggccgccgctgccctgcaccgccctcctggaggccacttggagagtccggccccgaggaggccatggccacaagtgcccacagctggccccaggttgccagcgtcgctacagcccagaccaaggcagaataatctccggatgagctggtggcaccgctgagcctttggtctcaccagggcttcctgttgctggcaggcggggtggagcggagctgctgggaggctgctggataggagaggggtcacggctgcggaagaggaggttcttcgggacacccgtggatggacacggcaaggaaacaccaggccaaccacagctggggataaaatagcacaaccacaccctgccgtccagcgcctcccagcctgtgccccttcctagtaccaccagcaaccatcaatcccgtctcctcctgcctcctctcctgcaatccaccccgccacgactatcgccatggcagccctgatcgcagagaacttccgcttcctgtcacttttcttcaagagcaaggatgtgatgattttcaacggcctggtggcactgggcacggtgggcagccaggagctgttctctgtggtggccttccactgcccctgctcgccggcccggaactacctgtacgggctggcggccatcggcgtgcccgccctggtgctcttcatcattggcatcatcctcaacaaccacacctggaacctcgtggccgagtgccagcaccggaggaccaagaactgctccgccgcccccaccttcctccttctaagctccatcctgggacgtgcggctgtggcccctgtcacctggtctgtcatctccctgctgcgtggtgaggcttatgtctgtgctctcagtgagttcgtggacccttcctcactcacggccagggaagagcacttcccatcagcccacgccactgaaatcctggccaggttcccctgcaaggagaaccctgacaacctgtcagacttccgggaggaggtcagccgcaggctcaggtatgagtcccagctctttggatggctgctcatcggcgtggtggccatcctggtgttcctgaccaagtgcctcaagcattactgctcaccactcagctaccgccaggaggcctactgggcgcagtaccgcgccaatgaggaccagctgttccagcgcacggccgaggtgcactctcgggtgctcgctgccaacaatgtgcgccgcttctttggctttgtggcgctcaacaaggatgatgaggaactgattgccaacttcccagtggaaggcacgcagccacggccacagtggaatgccatcaccggcgtctacttgtaccgtgagaaccagggcctcccactctacagccgcctgcacaagtgggcccagggtctggcaggcaacggcgcggcccctgacaacgtggagatggccctgctcccctcctaaggaggtgcttcccatgctctttgtaaatggcactacttggtcccaaactgaaccccactgcttgctcacatccatatcagaaggggatttttaaaaaactgttatcttcttggccaggggaaaggaccacaaggcaatctggggtgtggacagacccagtagacaatggaagcccagccagcagggccaggtgacagtgaagctcaccagtgggctcctttatggtactctatgcagttaacatgtatctagctgcatagggacacccagcgcagcagtgcaccactgggaagtggcctccagtgcagcctctggccttattttatatatttaaatttttgataaagtttttcttactaaaaaaaaaaaaaaaaaa

SEQ ID NO: 3626 - protein, 323 aa, Homo sapien
MAALIAENFRFLSLFFKSKDVMIFNGLVALGTVGSQELFSVVAFHCPCSPARNYLYGLAAIGVPALVLFIIGIILNNHTWNLVAECQHRRTKNCSAAPTFLLLSSILGRAAVAPVTWSVISLLRGEAYVCALSEFVDPSSLTAREEHFPSAHATEILARFPCKENPDNLSDFREEVSRRLRYESQLFGWLLIGVVAILVFLTKCLKHYCSPLSYRQEAYWAQYRANEDQLFQRTAEVHSRVLAANNVRRFFGFVALNKDDEELIANFPVEGTQPRPQWNAITGVYLYRENQGLPLYSRLHKWAQGLAGNGAAPDNVEMALLPS

SEQ ID NO: 3627 - DNA, 1411 bp, Homo sapien
ggcacgagggagaggcaggaggacaccgagttccccgtgttggcctccaggtcctgtgcttgcggagccgtccggcggctgggatcgagccccgacaatgggcaacgcgcaggagcggccgtcagagactatcgaccgcgagcggaaacgcctggtcgagacgctgcaggcggactcgggactgctgttggacgcgctgctggcgcggggcgtgctcaccgggccagagtacgaggcattggatgcactgcctgatgccgagcgcagggtgcgccgcctactgctgctggtgcagggcaagggcgaggccgcctgccaggagctgctacgctgtgcccagcgtaccgcgggcgcgccggaccccgcttgggactggcagcacgtgggtccgggctaccgggaccgcagctatgaccctccatgcccaggccactggacgccggaggcacccggctcggggaccacatgccccgggttgcccagagcttcagaccctgacgaggccgggggccctgagggctccgaggcggtgcaatccgggaccccggaggagccagagccagagctggaagctgaggcctctaaagaggctgaaccggagccggagccagagccagagctggaacccgaggctgaagcagaaccagagccggaactggagccagaaccggacccagagcccgagcccgacttcgaggaaagggacgagtccgaagattcctgaaggccagagctctgacaggcggtgccccgcccatgctggataggacctgggatgctgctggagctgaatcggatgccaccaaggctcggtccagcccagtaccgctggaagtgaataaactccggagggtcggacgggacctgggctctctccacgattctggctgtttgcccaggaacttagggtgggtacctctgagtcccagggacctgggcaggcccaagcccaccacgagcatcatccagtcctcagccctaatctgcccttaggagtccaggctgcaccctggagatcccaaacctagccccctagtgggacaaggacctgaccctcctgcccgcatacacaacccatttcccctggtgagccacttggcagcatatgtaggtaccagctcaaccccacgcaagttcctgagctgaacatggagcaaggggagggtgacttctctccacatagggagggcttagagctcacagccttgggaagtgagactagaagaggggagcagaaagggaccttgagtagacaaaggccacacacatcattgtcattactgttttaattgtctggcttctctctggactgggagctcagtgaggattctgaccagtgacttacacaaaaggcgctctatacatattataatatattcgcttactaaatgaaaaaaaaaaaaaaaaaaaa

SEQ ID NO: 3628 - protein, 208 aa, Homo sapien
MGNAQERPSETIDRERKRLVETLQADSGLLLDALLARGVLTGPEYEALDALPDAERRVRRLLLLVQGKGEAACQELLRCAQRTAGAPDPAWDWQHVGPGYRDRSYDPPCPGHWTPEAPGSGTTCPGLPRASDPDEAGGPEGSEAVQSGTPEEPEPELEAEASKEAEPEPEPEPELEPEAEAEPEPELEPEPDPEPEPDFEERDESEDS

SEQ ID NO: 3629 - DNA, 1977 bp, Homo sapien
ggcacgaggatttcctcatcgtcaagctttgttcctcgtgggggctagaaatctctttccagttccagattgtgaagggttcctgagtaagcagcgtgtctccatccccctctctaggggctcttggatggaccttgcactctagaagggacaatggacttctggctttggccactttacttcctgccagtatcgggggccctgaggatcctcccagaagtaaaggtagagggggagctgggcggatcagttaccatcaagtgcccacttcctgaaatgcatgtgaggatatatctgtgccgggagatggctggatctggaacatgtggtaccgtggtatccaccaccaacttcatcaaggcagaatacaagggccgagttactctgaagcaatacccacgcaagaatctgttcctagtggaggtaacacagctgacagaaagtgacagcggagtctatgcctgcggagcgggcatgaacacagaccggggaaagacccagaaagtcaccctgaatgtccacagtgaatacgagccatcatgggaagagcagccaatgcctgagactccaaaatggtttcatctgccctatttgttccagatgcctgcatatgccagttcttccaaattcgtaaccagagttaccacaccagctcaaaggggcaaggtccctccagttcaccactcctcccccaccacccaaatcacccaccgccctcgagtgtccagagcatcttcagtagcaggtgacaagccccgaaccttcctgccatccactacagcctcaaaaatctcagctctggaggggctgctcaagccccagacgcccagctacaaccaccacaccaggctgcacaggcagagagcactggactatggctcacagtctgggagggaaggccaaggatttcacatcctgatcccgaccatcctgggccttttcctgctggcacttctggggctggtggtgaaaagggccgttgaaaggaggaaagccctctccaggcgggcccgccgactggccgtgaggatgcgcgccctggagagctcccagaggccccgcgggtcgccgcgaccgcgctcccaaaacaacatctacagcgcctgcccgcggcgcgctcgtggagcggacgctgcaggcacaggggaggcccccgttcccggccccggagcgccgttgccccccgccccgctgcaggtgtctgaatctccctggctccatgccccatctctgaagaccagctgtgaatacgtgagcctctaccaccagcctgccgccatgatggaggacagtgattcagatgactacatcaatgttcctgcctgacaactccccagctatcccccaaccccaggctcggactgtggtgccaaggagtctcatctatctgctgatgtccaatacctgcttcatgtgttctcagagccctcatcacttcccatgccccatctcgactcccatccccatctatctgtgccctgagcatggctctgcccccaggtcgtcttgcacaccttggcagccccctgtagttgacaggtaagctgtaggcatgtagagcaattgtcccaatgccacttgcttcctttccaagccgtcgaacagactgtgggatttgcagagtgtttcttccatgtctttgaccacagggttgttgctgcccaggctctagatcacatggcatcaggctggggcagaggcatagctattgtctcgggcatccttcccagggttgggtcttacacaaatagaaggctcttgctctgagttatgtgacatgcctcagccccatggactaagcaggggtctggtataaaaacactcctggaaacgcctttgccctgatccaaatgttagcacttgctagtgaacgtctacttatctcaagttctatgctaaaggcaatttatcttgatgtgatgataaaccaaacttattagcaagatatgcatatatatcaaaaaaaaaaaaaaaaaa

SEQ ID NO: 3630 - protein, 390 aa, Homo sapien
MDFWLWPLYFLPVSGALRILPEVKVEGELGGSVTIKCPLPEMHVRIYLCREMAGSGTCGTVVSTTNFIKAEYKGRVTLKQYPRKNLFLVEVTQLTESDSGVYACGAGMNTDRGKTQKVTLNVHSEYEPSWEEQPMPETPKWFHLPYLFQMPAYASSSKFVTRVTTPAQRGKVPPVHHSSPTTQITHRPRVSRASSVAGDKPRTFLPSTTASKISALEGLLKPQTPSYNHHTRLHRQRALDYGSQSGREGQGFHILIPTILGLFLLALLGLVVKRAVERRKALSRRARRLAVRMRALESSQRPRGSPRPRSQNNIYSACPRRARGADAAGTGEAPVPGPGAPLPPAPLQVSESPWLHAPSLKTSCEYVSLYHQPAAMMEDSDSDDYINVPA

SEQ ID NO: 3631 - DNA, 1977 bp, Homo sapien; identical to SEQ ID NO: 3629

SEQ ID NO: 3632 - protein, 390 aa, Homo sapien; identical to SEQ ID NO: 3630

SEQ ID NO: 3633 - DNA, 2734 bp, Homo sapien
cccgctccccgcaggggtggagcctgagcgaggagcccgcgagctctcctctctcctctggtctccgcggatgacgagtggctggataacatggagtcgggcaagatggcgcctcccaagaacgctccgagagatgccttggtgatggcacagatcctgaaggatatgggaatcacagagtatgaaccaagggttataaatcaaatgttggaatttgctttccgttatgtgactacaattctggatgatgcaaaaatttattcgagccatgctaagaaacctaatgttgatgcagatgatgtgagactggcaatccagtgtcgtgctgaccaatcttttacctctcctcccccaagagattttttactggatatcgcaaggcagaaaaatcaaacccctttgccactgattaagccatatgcaggacctagactgccacctgatagatactgcttaacagctccaaactataggctgaagtccttaattaaaaagggacctaaccaagggagactagttccacgattaagtgttggtgctgttagtagcaaacctactactcctactatagcaaccccacaaacggtgtctgtcccaaataaagttgcaactccaatgtcagtgacaagccaaagatttacggtgcagattccaccttctcagtccacacctgtcaaaccagttcctgcaacaactgcagttcaaaatgttctgattaatccttcaatgattgggcccaaaaatattcttattaccaccaacatggtttcgtcacagaacacagccaatgaagcaaacccactgaagagaaaacatgaagatgatgatgacaatgatattatgtaaggaatatagtctagtctagatgcatttcaaaaggaaagttggttttgagcccagtatactgaactagaatattctagatcttgttttaccttaaaagactgaaatgtagctgcagtatttttcgtcagttaaaactgttagatctctttagtaaacatacaaatgtgtttttcagtaggcttcaattacaaacagttaagtacttgtttcttaatagtttcattaatgttgagtcctaatatggcaattctgtttttgagacacttttctgccttctatcactgatagtagcatttaagtttcagattctacagcctagtcagcagatttatctttgacagcataatttctgatctacatttaaatactactttattttataaggtaatatagttacttactgtcactagctaattttttttttttaccaaatctctcaatataggaaacattttttggaaaggatggatttagaggagagattctaaatccattttggatgtatttgtttctttgacttccttaacttccaaactcaactccctttctagatcccattcattttctgcacctcccccataggcttgtttctctccattgctattaaatgtagaaggccatacctggaattttaaaaatattattcctggtaatacagctcagtgtcattttcctatttttaaaacatgctctacatgcctaatgtttcgtgattcactttaacctgatggtttgcatttgctgtttttcactcttatgtcagagcagttgggttttaccccttagtttttatgcctgttaagctttactgtgcttttgacaggtagttttgggtcagttatattcagttttagtattgtattccaagttgataactcttccatgtttcacatttctaaatttaacagagatgctgtagcttaaaacatgttttgataagtaattacactggacctaggcaaaaccactgaagaacaagtgttcctttttaccacatacatattatgttttgatcactgctgcttgagccccgctattggtataattcagatcatattagcttgttgctgaggatgtcacatataagacaggatcaaacctgaaagacactaatggttcatcctctataaggccaacaaagaaaacaaattaatgtgatgtaacttgcatttatgtgcactctgcataggtttcccaataatactgtaatgttgctgaacacctttccctgttttccatttatacacatattaaagtcatattgggaaagatggcaaagcttttgagaatataaacacacctgttttgtttttcttaagttcaacatacttttgtagaatttgtaaaataaatgttcgtatcataattgagaatttatagccaaggatcctcaaaacagaagtttcatcttaggatagtgtttgatatatctaagaaagtccagtaacagagaagaaatgtctcaaatgtctcgtatcagttttagtgtttttcagtattagggaaaggtaatataaaaacaggtaaaatgtataaaaatagacctgatcaacatcataggagataaatattcattatatagcataggatattattacttgaatgttctcagggaggcagcaagtcagaaggcctaggttctagtcctagctccatcatttaccaactgtgtgaccttacttcacctcttagccttgttctcctcactagcagtaggaaagtaacacctaccctgcctacctcacagggctgttgtgagggttcaattggtatatgtgaaaattctttcagaattgtaaaatgctatatgactgtaaggaattattgcatttgttccaaggttaataaaaatttgagcttaaaaaaaaaaaaaaaaaaaaaaaaaaaa

SEQ ID NO: 3634 - protein, 251 aa, Homo sapien
MESGKMAPPKNAPRDALVMAQILKDMGITEYEPRVINQMLEFAFRYVTTILDDAKIYSSHAKKPNVDADDVRLAIQCRADQSFTSPPPRDFLLDIARQKNQTPLPLIKPYAGPRLPPDRYCLTAPNYRLKSLIKKGPNQGRLVPRLSVGAVSSKPTTPTIATPQTVSVPNKVATPMSVTSQRFTVQIPPSQSTPVKPVPATTAVQNVLINPSMIGPKNILITTNMVSSQNTANEANPLKRKHEDDDDNDIM

SEQ ID NO: 3635 - DNA, 1954 bp, Homo sapien
acaccctctgccgactccaagacgctgcctcttcctgcgggcgaggcgcgcggtctggtactcgtgcgtcttttatcgcctgagtttccctccgccgactagcgcgcggggcccggttctccatcgcgcgcacggcagcctagcgcaatgaggcgggcaccctgcgttcgagataagttgcgggagatagtaggagcatccacaaactggagagaccatgtgaaggcaatggaagaaaggaaattacttcatagtttcttggctaaatcacaggatggactgcctcctaggagaatgaaggacagttatattgaagttctcttgcctttgggcagtgagcctgaattacgagagaaatatttgactgttcaaaacaccgtaagatttggcaggattcttgaggatcttgacagcttgggagttcttatttgttacatgcacaacaaaatccactccgccaagatgtctcctttatcgatagttacagccctggtggataagattgatatgtgtaagaagagcttgagcccagaacaggacattaagttcagtggccatgttagctgggtcgggaagacatccatggaagtgaagatgcaaatgttccagttacatggtgatgaattttgtcctgttttggatgcaacatttgtaatggtggctcgtgattctgaaaataaagggccggcatttgtaaatccactcatccctgaaagcccagaggaagaggagctctttagacaaggggaattgaacaaggggagaagaattgccttcagctccacgtcgttactgaaaatggcccccagcgctgaggagaggaccaccatacatgagatgtttctcagcacactggatccaaagactataagttttcggagtcgagttttaccctctaatgcagtgtggatggagaattcaaaactgaagagtttggaaatttgccaccctcaggagcggaacattttcaatcggatctttggtggtttccttatgaggaaggcatatgaacttgcgtgggctactgcttgtagctttggtggttctcgaccgtttgtggtagcagtagatgacatcatgtttcagaaacctgttgaggttggctcattgctctttctttcttcacaggtatgctttactcagaataattatattcaagtcagagtacacagtgaagtggcctccctgcaggagaagcagcatacaaccaccaatgtctttcatttcacgttcatgtcggaaaaagaagtgccattggttttcccaaaaacatatggagagtccatgttgtacttagatgggcagcggcatttcaactccatgagtggcccagcgaccttgagaaaggactaccttgtggagccctaagaacaccacatttgttgaaaactagcactctacccacagtgacgtggtatctgatgaagacctgatcgagtgtattgattttagtattgcttcgtgtcctccacacaggaggaggatgtattcagcctttaggatgatcagaaaagcagaaagagagagtggccggatggggctgaggggagaaagaattattaaacaataaatactttcaagacaattttaattgtgaacctaccatgttgcctcccatcttctgaaaaaacaaaaaaattataggcatgagccactgcacccggccggtggaaagcatttttaacaaaaaatttttaggccaggcacagtggtggctcatgcctgtaatcccagcactttgggagactgagatgggaggatcgcttgagaccagcctggggaacatagtgagaccctttctctacaaaaagttaaaaaattatctgagcatggtggtgtgcacctgtagtcccagttaggaggctgaggtgagtggattgcttgagtccgggagtttgagtctgcagtgagctatgatcatgccactgcactccagtctgggtgacagcaagac

SEQ ID NO: 3636 - protein, 406 aa, Homo sapien
MRRAPCVRDKLREIVGASTNWRDHVKAMEERKLLHSFLAKSQDGLPPRRMKDSYIEVLLPLGSEPELREKYLTVQNTVRFGRILEDLDSLGVLICYMHNKIHSAKMSPLSIVTALVDKIDMCKKSLSPEQDIKFSGHVSWVGKTSMEVKMQMFQLHGDEFCPVLDATFVMVARDSENKGPAFVNPLIPESPEEEELFRQGELNKGRRIAFSSTSLLKMAPSAEERTTIHEMFLSTLDPKTISFRSRVLPSNAVWMENSKLKSLEICHPQERNIFNRIFGGFLMRKAYELAWATACSFGGSRPFVVAVDDIMFQKPVEVGSLLFLSSQVCFTQNNYIQVRVHSEVASLQEKQHTTTNVFHFTFMSEKEVPLVFPKTYGESMLYLDGQRHFNSMSGPATLRKDYLVEP

SEQ ID NO: 3637 - DNA, 2887 bp, Homo sapien; identical to SEQ ID NO: 3495

SEQ ID NO: 3638 - protein, 538 aa, Homo sapien; identical to SEQ ID NO: 3496

SEQ ID NO: 3639 - DNA, 936 bp, Homo sapien
gagggcgcgatcctggcgtcccccgacggcctggggccccaatccagaggcctgggtgggaggggaccaagggtgtagtaaggaagcgccttttgctggagggcaacggaccggggcggggagtcgggagaccagagtgggaggaaggcggggagtccaggttccgccccggagccgacttcctcctggtcggcggctgcagcggggtgagcggcggcagcggccggggatcctggagccatggggcgcgcgcgcgacgccatcctggatgcgctggagaacctgaccgccgaggagctcaagaagttcaagctgaagctgctgtcggtgccgctgcgcgagggctacgggcgcatcccgcggggcgcgctgctgtccatggacgccttggacctcaccgacaagctggtcagcttctacctggagacctacggcgccgagctcaccgctaacgtgctgcgcgacatgggcctgcaggagatggccgggcagctgcaggcggccacgcaccagggctctggagccgcgccagctgggatccaggcccctcctcagtcggcagccaagccaggcctgcactttatagaccagcaccgggctgcgcttatcgcgagggtcacaaacgttgagtggctgctggatgctctgtacgggaaggtcctgacggatgagcagtaccaggcagtgcgggccgagcccaccaacccaagcaagatgcggaagctcttcagtttcacaccagcctggaactggacctgcaaggacttgctcctccaggccctaagggagtcccagtcctacctggtggaggacctggagcggagctgaggctccttcccagcaacactccggtcagcccctggcaatcccaccaaatcatcctgaatctgatctttttatacacaatatacgaaaagccagcttgaaaaaaaaaaa

SEQ ID NO: 3640 - protein, 195 aa, Homo sapien
MGRARDAILDALENLTAEELKKFKLKLLSVPLREGYGRIPRGALLSMDALDLTDKLVSFYLETYGAELTANVLRDMGLQEMAGQLQAATHQGSGAAPAGIQAPPQSAAKPGLHFIDQHRAALIARVTNVEWLLDALYGKVLTDEQYQAVRAEPTNPSKMRKLFSFTPAWNWTCKDLLLQALRESQSYLVEDLERS

SEQ ID NO: 3641 - DNA, 3828 bp, Homo sapien
cagtgccaggctggaggcggcagcggttggaggcttcgcccggctttgcagcggggacttcggcggcggcgcctcaggcacctcggcccggacacgatgaggcgagtggtacgacagagcaagtttcggcatgtatttgggcaagcggtgaaaaatgaccagtgctatgatgacatccgggtttctcgtgtgacctgggatagttccttttgtgctgtcaatcccagatttgttgccataatcatagaggcaagtgggggaggagcgttccttgtcctccctctgcacaagactggtcgaattgacaaatcttaccctacagtatgtggccacacaggaccagtgctggacatagactggtgcccacataacgatcaggtcattgccagcggttcagaggactgcacggtcatggtatggcagatcccagaaaatggactcaccctttccctgactgaacctgtggtgattttggaaggccactcaaagagagtcggcatcgtggcttggcatccaacggcccgcaatgtgcttcttagtgcaggctgtgataatgccattatcatctggaatgtgggaacaggggaagcccttataaacttggacgatatgcattcagacatgatttacaatgtgagctggaaccggaatggcagtctgatctgcacagcttccaaagacaagaaagtgagagtcattgatcccaggaaacaagagattgttgctgagaaggagaaagcacatgaaggagcaagacccatgagagccatcttcctggccgatggcaatgtcttcaccactgggttcagccgcatgagcgagcggcagctggctctctggaatccgaaaaatatgcaggaaccaattgctcttcatgagatggacactagcaatggggtgttgctgcctttctatgaccctgacaccagcatcatttacttatgtggaaagggtgacagcagtattcgctattttgagatcacggatgaatccccgtacgtccactacctcaacacattcagcagcaaggagcctcagagagggatgggttacatgcccaagaggggacttgatgttaacaaatgtgagattgccagattcttcaaacttcatgagagaaagtgtgaacctattattatgactgttcccaggaagtctgaccttttccaagatgacctgtatcctgacacagcggggccagaggccgcgctggaggcagaagagtggttcgaaggcaagaatgcagacccaatcctcatctccttgaagcacgggtacattccaggcaaaaacagggatctcaaggtggtcaagaagaacattctggatagcaagcccactgcaaacaagaagtgcgacctgatcagcatccccaagaaaaccacagacacggccagtgtgcaaaatgaagccaagttggatgagattttaaaagagatcaaatctataaaagacacaatctgcaatcaagatgagcgtatttccaagttagaacagcagatggcaaagatagcagcctgaaggtcccacccccacccctacagaaaaaatgggagcaagaacttgtgcttgggagctggttattggtgtggtcctagggagggcggaaagggaggcactgccatttggagacattccatttcagatttgtcaaccagcgataggccacattccagtaagaactcaatttgtctcccaaatttgcagaaacaaaacgtgatttaaaagctgagctttttatcagaaagcttttttgatgttttaagtgttatgtgacttgttgaactttttaaaaagtgctacttttaaaatcccagatactctgaattttagaaaacaaactaattctgattgtgtcgtgcccaagtacccttttttttttaatgaatagggaccaatgccacattgctttttatatttctttcttttttaatgttgccaaaaccaaaagtagctttgttttcctttgtattttgctactttgcagtatttgtgtgtgtggttttttttccttaatttgaaagggacagcactgtgtatgtttataaactaaatgaagataagatattattttgtataaacattcatctgagaacaatcaaagcagtagccacatggtgctggctcctttgcagcacaaacctggtcattttgatgactgtacaacaggaagacttgaaaaatcacgtggattcatattaccaccgctctcatttcatggagtcttctgatcaaaaaagctcacgtcgtatttcttcttttcctttctcttttctagaaattgggtgtttgtaccagaatggaattttgcttctcggttatcctgtgcttcagatgattataatctaacccaaactagcatgtgtttctgcagtttgttacacacctaggatcatattgcattcatcactttaaacatcatgtttcaggttttggtcaatacttgacaagggtgcccaggacaggaagacgtgtactgctgagtgttccttcttgcccttttcagcagcttgcccagctcttgagtacagtggtggggactaaaaatgtgggcatgtggagaggggtatttgccctgggtgatcctgtttccctgtgctgtccccatgctgtgttggaggaggaagtggctctccttccaccaacaaagctcctgctctaccctcttcctcacatgtgctgcgacctctctcagggctcccccagccattccttctttccttcctgccttttagctctaaccacattaagctaagacaaggccagagggtgcgattgaatgagtattgagactgaggagaatgatagagagtgaagcagaaacaggagcacagacctctgctgtagctttaatgcatacaaacatgtccctccgcacaactaacctgccctgcctctccatctctcaccaaggctgcgtcaaagcacagaggctccccggactcggagggggccagagactgagctctggtcacctgttcattcctcggttagctggaactttgccccgtttccagtttcttatagtgcatgcttgggaaacaagatttaaggagcctctgttttggaagggctgtctgtgattgaacgtgaaatgtgtagtgccattgggaccacgaagggaattcttgcacatgctcgtgctggtgtgggcatgggactggctggaaacgtctgtatgcagggagccagggtgagggcagagtgtggtgacagccgaacttggagtaatgtccgtgtagaaaaaggaccatgttcttatccagccaatactgggagtgctgtctccacaatttcagggcatctgaatgtttgatgtggttttgtgtgtgtgtatgtatgtgtttaatattgaagtggatcatgagatgtaaagaaaacaataatggcaatgacttatattcaaatctgtatttgtttctttatcaatgtaatctgctgaggaccttttgtctaagattcagtagtgttttaaggttctgatatcgaattaatgaagtaaagttgttgatggtggtgaaacaccgtagggcatgtggttcaaagagaagcaggagggcaagggaaagttaccctgatcttagtttgtagcttatgacttatttaatgaatggatgcccagccaagctcagagtaggcgcccaaagcattgtggattattttcctgttttgtctttttttttttttttttttaagccatgacatcccagaagaggacagtgaattactcctaggtcggctcttatagagtggccatagtgttctgtcaaaacacttgcttccattttcagagataaaaatcattgattacaaaaaaaaaaaaaaaaa

SEQ ID NO: 3642 - protein, 474 aa, Homo sapien
MRRVVRQSKFRHVFGQAVKNDQCYDDIRVSRVTWDSSFCAVNPRFVAIIIEASGGGAFLVLPLHKTGRIDKSYPTVCGHTGPVLDIDWCPHNDQVIASGSEDCTVMVWQIPENGLTLSLTEPVVILEGHSKRVGIVAWHPTARNVLLSAGCDNAIIIWNVGTGEALINLDDMHSDMIYNVSWNRNGSLICTASKDKKVRVIDPRKQEIVAEKEKAHEGARPMRAIFLADGNVFTTGFSRMSERQLALWNPKNMQEPIALHEMDTSNGVLLPFYDPDTSIIYLCGKGDSSIRYFEITDESPYVHYLNTFSSKEPQRGMGYMPKRGLDVNKCEIARFFKLHERKCEPIIMTVPRKSDLFQDDLYPDTAGPEAALEAEEWFEGKNADPILISLKHGYIPGKNRDLKVVKKNILDSKPTANKKCDLISIPKKTTDTASVQNEAKLDEILKEIKSIKDTICNQDERISKLEQQMAKIAA

SEQ ID NO: 3643 - DNA, 1491 bp, Homo sapien
gccgggtcggggcggggcggcttttctgtcggaggacgcgaaccggcacgctgcgcctttaaggagtccggctgggctgggcgccggagctgggagccgcgcgggtaggagcccggcggcaggtcccagcccggggctagagaccgagggccggggtccgggcccggcggcgggacccaggcggttgaggctggtcagaatctcattttcaggacccaggcggttgaggctggtcaggagtcagccagcctgaaagagcaggatggatcttgatgtggttaacatgtttgtgattgcgggcggcacgctggccatcccaatcctggcatttgtggcttcatttcttctgtggccttcagcactgataagaatctattattggtactggcggaggacattgggcatgcaagtccgctatgttcaccatgaagactatcagttctgttattccttccggggcaggcctgggcacaaaccctccatcctcatgctccacggattctctgcccacaaggatatgtggctcagtgtggtcaagttccttccaaagaacctgcacttggtctgcgtggacatgccaggacatgagggcaccacccgctcctccctggatgacctgtccatagatgggcaagttaagaggatacaccagtttgtagaatgcctgaagctgaacaaaaaacctttccacctggtaggcacctccatgggtggccaggtggctggggtgtatgctgcttactacccatcggatgtctccagcctgtgtctcgtgtgtcctgctggcctgcagtactcaactgacaatcaatttgtacaacggctcaaagaactgcagggctctgccgccgtggagaagattcccttgatcccgtctaccccagaagagatgagtgaaatgcttcagctctgctcctatgtccgcttcaaggtgccccagcagatcctgcaaggccttgtcgatgtccgcatccctcataacaacttctaccgaaagttgtttttggaaatcgtcagtgagaagtccagatactctctccatcagaacatggacaagatcaaggttccgacgcagatcatctgggggaaacaagaccaggtgctggatgtgtctggggcagacaatgttggccaagtcaattgccaactgccaggtggagcttctggaaaactgtgggcactcagtagtgatggaaaaaacccaggaagacagccaagctcataatcgactttttagcttctgtgcaaaacacagacaaacaacaagaagctggacttgaaggcccccaactgcagcctggaatttttgaacacagcattctgcttcccattcccccaagttttgacgcagccaaccatttttaagggattcctgccccaaattgcggttggaagcgccaattgacccctggaggaaagcccgtccccttattccccgggtatccacggttccccagagctttggggaccacggcgaaaacctccaagata

SEQ ID NO: 3644 - protein, 320 aa, Homo sapien
MDLDVVNMFVIAGGTLAIPILAFVASFLLWPSALIRIYYWYWRRTLGMQVRYVHHEDYQFCYSFRGRPGHKPSILMLHGFSAHKDMWLSVVKFLPKNLHLVCVDMPGHEGTTRSSLDDLSIDGQVKRIHQFVECLKLNKKPFHLVGTSMGGQVAGVYAAYYPSDVSSLCLVCPAGLQYSTDNQFVQRLKELQGSAAVEKIPLIPSTPEEMSEMLQLCSYVRFKVPQQILQGLVDVRIPHNNFYRKLFLEIVSEKSRYSLHQNMDKIKVPTQIIWGKQDQVLDVSGADNVGQVNCQLPGGASGKLWALSSDGKNPGRQPSS
